(19) United States
(12) Patent Application Publication
(10) Pub. No.: US 2015/0376612 A1
(43) Pub. Date: Dec. 31, 2015

(54) CCCTC-Binding Factor (CTCF) RNA Interactome

(71) Applicant: The General Hospital Corporation, Boston, MA (US)

(72) Inventors: Jeannie T. Lee, Boston, MA (US); Johnny Kung, Boston, MA (US); Barry Kesner, Charlestown, MA (US)

(21) Appl. No.: 14/735,930

(22) Filed: Jun. 10, 2015

Related U.S. Application Data
(60) Provisional application No. 62/010,342, filed on Jun. 10, 2014.

(51) Int. Cl. C12N 15/113

(52) U.S. Cl. CPC C12N 15/113; C12N 2310/321; C12N 2310/315; C12N 2310/341; C12N 2310/14; C12N 2320/30

(57) ABSTRACT

This invention relates to methods and compositions for selectively reactivating or downregulating certain genes, e.g., genes regulated by zinc-finger protein CCCTC-binding factor (CTCF) on autosomes (e.g., imprinted genes, tumor suppressors, cancer) and the inactive X chromosome (Xi), e.g., genes associated with X-linked diseases, e.g., Rett Syndrome, Factor VIII or IX deficiency, Fragile X Syndrome, Duchenne muscular dystrophy, and PNH, in heterozygous females carrying a mutated allele, in addition to a functional wildtype or hypomorphic allele.

### CLAIM OF PRIORITY

[0001] This application claims the benefit of U.S. Provisional Patent Application Ser. No. 62/010,342, filed on Jun. 10, 2014. The entire contents of the foregoing are hereby incorporated by reference.

### FEDERALLY SPONSORED RESEARCH OR DEVELOPMENT

[0002] This invention was made with Government support under Grant No. RO1-GM58839 awarded by the National Institutes of Health. The Government has certain rights in the invention.

### TECHNICAL FIELD

[0003] This invention relates to methods and compositions for selectively reactivating or repressing certain genes, e.g., genes regulated by zinc-finger protein CCCTC-binding factor (CTCF). On the inactive X chromosome (Xi), e.g., genes associated with X-linked diseases, e.g., Rett Syndrome, Factor VIII or IX deficiency, Fragile X Syndrome, Duchenne muscular dystrophy, and PNH, in heterozygous females carrying a mutated allele, in addition to a functional wildtype or hypomorphic allele.

### BACKGROUND

[0004] The zinc-finger protein CCCTC-binding factor, CTCF, is a ubiquitous gene regulator that is frequently mutated or aberrantly expressed in cancer and other human diseases (Lobanenkov et al., 1990; Ohlsson et al., 2001; Kim et al., 2007; Ohlsson et al., 2010; Chen et al., 2012; Nakahashi et al., 2013). CTCF binds throughout the genome via combinatorial subsets of its 11 zinc fingers, serving as chromatin insulator, activator, or repressor depending on the epigenetic context (Filippova, 2008; Ong and Corces, 2014). One mechanism by which CTCF exercises its gene regulatory function occurs through mediation of long-range intra- and inter-chromosomal interactions that bring distant genetic elements into close proximity. In the case of intra-chromosome interactions, formation of “active chromatin hubs” (ACH)(Palstra et al., 2003; Splinter et al., 2006) results in “loop-outs” of regions that are excluded from expression.

[0005] Some of the best-studied cases of intra-chromosomal regulation by CTCF can be found in the imprinted gene cluster, H19-Igf2, where CTCF binds to an imprint control region (ICR) on the maternal allele to block the enhancer from engaging the Igf2 allele in cis, involving the formation of intrachromosomal loops between the ICR and Igf2 promoter (Bell and Felsenfeld, 2000; Hark et al., 2000; Kanduri et al., 2002; Li et al., 2008; Wan and Bartolomei, 2008; Zhang et al., 2011). Genome-wide chromosome interaction studies indicate that CTCF is often enriched at interaction boundaries at sites between genes and their distal regulatory elements (Handoko et al., 2011; Dixon et al., 2012; Sanyal et al., 2012; Shen et al., 2012; DeMare et al., 2013; Phillips-Cremins et al., 2013). CTCF may also aid inter-chromosomal associations between maternal H19-Igf2 ICR (Chr. 7) and paternal Wsb1-Nf1 (Chr. 11)(Ling et al., 2006), though the function of this interaction is unclear.

[0006] CTCF's role in epigenetic regulation has also been studied intensively for X-chromosome inactivation (XCI), the dosage compensation mechanism in mammals in which one of the two Xs in females is heterochromatinized and silenced early in development by the long noncoding Xist RNA (Heard and Disteche, 2006; Starmer and Magnuson, 2009; Wutz, 2011; Disteche, 2012; Lee and Bartolomei, 2013). During XCI, CTCF plays a number of different roles and binds a large number of sites within concentrated regions of the X-inactivation center. Here CTCF acts both in cis and in trans. In trans, CTCF-mediated inter-chromosomal interactions play a role in X-chromosome pairing, a process that has been proposed to ensure mutually exclusive choice of active versus inactive X chromosomes (Bacher et al., 2006; Xu et al., 2006; Xu et al., 2007; Donohoe et al., 2009; Masui et al., 2011). In cis, CTCF-binding sites have been correlated with intra-chromosomal interactions (Tsai et al., 2008; Spencer et al., 2011) and topologically associated domains (Nora et al., 2012) around the X-inactivation center. For example, CTCF binds the RS14 element between Xist and its antisense repressor, Tsix, to form a presumptive border between two ACH's, with one ACH involving physical interactions between promoter regions of Xist and its activator, Jpx, for the inactive X, and the other ACH centering on interactions between Tsix and its enhancer, Xite, for the active X.

### SUMMARY

[0007] As described herein, crosslinking immunoprecipitation (CLIP) coupled with high-throughput sequencing (CLIP-seq) analysis was used to define an RNA interactome for CTCF in mouse embryonic stem cells (mESC) and human HEK293 kidney cells; in parallel, chromatin immunoprecipitation (ChIP) followed by high-throughput DNA sequencing (ChIP-seq) was performed to investigate the epigenomic landscape relative to interacting transcripts in the mESC. The genome-wide datasets reported here provide a useful resource for modulating CTCF's role in epigenomic regulation.

[0008] Thus, in a first aspect, the invention provides methods for activating an inactive X-linked allele in a cell, preferably a cell of a female heterozygous subject. The methods include administering to the cell an inhibitory oligonucleotide targeting a sequence within 500 nucleotides of a CTCF binding site on a CTCF-interacting RNA, i.e., complementary or identical to a region within 500 nts of a CTCF binding site, i.e., within a sequence as listed in Tables 1-2 (each of which shows a binding site sequence +500 flanking nucleotides on both sides). In some embodiments, the inactive X-linked allele is associated with an X-linked disorder, and the oligonucleotide is administered in a therapeutically effective amount.

[0009] In another aspect, the invention provides methods for activating a repressed autosomal gene in a cell. The methods include administering to the cell an inhibitory oligonucleotide targeting a sequence within 500 nucleotides of a CTCF binding site on a CTCF-interacting RNA that represses the autosome or the autosomal gene, i.e., complementary or identical to a region within 500 nts of a CTCF binding site on the RNA, i.e., within a sequence as listed in Tables 1-2 (each of which shows a binding site sequence +500 flanking nucleotides on both sides). In some embodiments, the repressed gene is associated with a disorder, and the oligonucleotide is administered in a therapeutically effective amount.

[0010] In another aspect, the invention provides methods for downregulating an X-linked escapee gene in a cell. The methods include administering to the cell an inhibitory oligonucleotide targeting a sequence within 500 nucleotides of a CTCF binding site on a CTCF-interacting RNA that increases expression of the X-linked escapee gene, i.e., complementary or identical to a region within 500 nts of a CTCF binding site on the RNA, i.e., within a sequence as listed in Tables 1-2 (each of which shows a binding site sequence +500 flanking nucleotides on both sides). In some embodiments, the X-linked escapee gene is associated with a disorder, and the oligonucleotide is administered in a therapeutically effective amount.

[0011] In another aspect, the invention provides methods for repressing an autosomal gene in a cell. The methods include administering to the cell an inhibitory oligonucleotide targeting a sequence within 500 nucleotides of a CTCF binding site on a CTCF-interacting RNA that increases expression of the autosomal gene, i.e., complementary or identical to a region within 500 nts of a CTCF binding site on the RNA, i.e., within a sequence as listed in Tables 1-2 (each of which shows a binding site sequence +500 flanking nucleotides on both sides). In some embodiments, the autosomal gene is associated with a disorder, and the oligonucleotide is administered in a therapeutically effective amount.

[0012] In a further aspect, the invention provides methods for increasing expression of a selected gene listed in Tables 1 or 2 in a cell; the methods include contacting the cell with a nucleic acid triplex-forming oligonucleotide (TFO) that binds specifically to a CTCF localization sequence or binding site associated with the selected gene.

[0013] In some embodiments, the cell is in a living subject, e.g., a human, and the oligonucleotide is optionally administered in a therapeutically effective amount.

[0014] In some embodiments, the inhibitory oligonucleotide is identical or complementary to at least 8 consecutive nucleotides of a strong or moderate binding site nucleotide sequence as set forth in Tables 1-2, or complementary to at least 8 consecutive nucleotides of a caRNA as set forth in Tables 1-2.

[0015] In another aspect, the invention provides inhibitory oligonucleotides that are complementary or identical to at least 8 consecutive nucleotides of a CTCF binding site nucleotide sequence as set forth in Tables 1-2.

[0016] In some embodiments, the oligonucleotide does not comprise three or more consecutive guanosine nucleotides.

[0017] In some embodiments, the oligonucleotide does not comprise four or more consecutive guanosine nucleotides.

[0018] In some embodiments, the oligonucleotide is 8 to 30 nucleotides in length.

[0019] In some embodiments, at least one nucleotide of the oligonucleotide is a nucleotide analogue.

[0020] In some embodiments, at least one nucleotide of the oligonucleotide comprises a 2′ O-methyl. In some embodiments, each nucleotide of the oligonucleotide comprises a 2′ O-methyl.

[0021] In some embodiments, the oligonucleotide comprises at least one ribonucleotide, at least one deoxyribonucleotide, or at least one bridged nucleotide.

[0022] In some embodiments, the bridged nucleotide is a LNA nucleotide, a cEt nucleotide or a ENA modified nucleotide.

[0023] In some embodiments, each nucleotide of the oligonucleotide is a LNA nucleotide.

[0024] In some embodiments, one or more of the nucleotides of the oligonucleotide comprise 2′-fluoro-deoxyribonucleotides.

[0025] In some embodiments, one or more of the nucleotides of the oligonucleotide comprise 2′-O-methyl nucleotides.

[0026] In some embodiments, one or more of the nucleotides of the oligonucleotide comprise ENA nucleotide analogues.

[0027] In some embodiments, one or more of the nucleotides of the oligonucleotide comprise LNA nucleotides.

[0028] In some embodiments, the nucleotides of the oligonucleotide comprise comprising phosphorothioate internucleotide linkages between at least two nucleotides.

[0029] In some embodiments, the nucleotides of the oligonucleotide comprise phosphorothioate internucleotide linkages between all nucleotides.

[0030] In some embodiments, the oligonucleotide is a gapmer or a mixmer.

[0031] In some embodiments of the methods described herein, the TFO comprises one or more of DNA, RNA, PNA, HNA, MNA, ANA, LNA, CAN, INA, CeNA, TNA, (2′-NH)-TNA, (3′-NH)-TNA, alpha-L-Ribo-LNA, alpha-L-Xylo-LNA, beta-D-Ribo-LNA, beta-D-Xylo-LNA, [3.2.1]-LNA, Bicyclo-DNA, 6-Amino-Bicyclo-DNA, 5-epi-Bicyclo-DNA, alpha-Bicyclo-DNA, Tricyclo-DNA, Bicyclo[4.3.0]-DNA, Bicyclo[3.2.1]-DNA, Bicyclo[4.3.0]amide-DNA, beta-D-Ribopyranosyl-NA, alpha-L-Lyxopyranosyl-NA, 2′-R-RNA, 2′-OR-RNA, 2′-AE-RNA, alpha-L-RNA, and beta-D-RNA.

[0032] In some embodiments of the methods described herein, the TFO includes one or more modifications described herein.

[0033] Unless otherwise defined, all technical and scientific terms used herein have the same meaning as commonly understood by one of ordinary skill in the art to which this invention belongs. Methods and materials are described herein for use in the present invention; other, suitable methods and materials known in the art can also be used. The materials, methods, and examples are illustrative only and not intended to be limiting. All publications, patent applications, patents, sequences, database entries, and other references mentioned herein are incorporated by reference in their entirety. In case of conflict, the present specification, including definitions, will control.

[0034] Other features and advantages of the invention will be apparent from the following detailed description and figures, and from the claims.

### REFERENCE TO SEQUENCE LISTING SUBMITTED ON A COMPACT DISC

[0035] This application includes a sequence listing submitted on compact disc. The sequence listing is identified on the compact disc as follows.

| File Name | Date of Creation | Size |
|---|---|---|
| 29539-0115001 | Jun. 10, 2015 | 238,862 KB |
| SEQ LIST.txt | | |

The entire content of this file is hereby incorporated by reference.

### DESCRIPTION OF DRAWINGS

[0036] The patent or application file contains at least one drawing executed in color. Copies of this patent or patent application publication with color drawing(s) will be provided by the Office upon request and payment of the necessary fee.

[0037] FIGS. 1A-E. CLIP-Seq Identifies a Large CTCF-RNA Interactome.

[0038] (A) Schematic for modified CLIP-seq protocol.

[0039] (B) Autoradiographs (³²P, top) and α-FLAG Western blots (bottom) for CLIP, performed in CTCF-3×FLAG expressing d0 and d3 mESC with or without UV (256 nm) irradiation. Location of FLAG-CTCF-bound RNA indicated with bracket on autoradiograph. Red boxes indicate regions of membrane excised for RNA isolation and library synthesis.

[0040] (C) Agilent Bioanalyzer profiles of membrane-isolated RNA (top) and corresponding CLIP-seq library (bottom) from d0 experiments. ±UV, with or without UV irradiation. Spike at 25 nt (for RNA) or 35 bp (for DNA) are the lower markers for Bioanalyzer runs.

[0041] (D) Scatterplot comparing +UV and −UV library reads. Fragments per kilobase per million reads (FPKM) were calculated from both libraries over transcripts that were assembled from RNA-seq data. Log₂ values of FPKM were plotted; d0 data shown. Red line is x=y diagonal. Pearson's correlation (R)=0.773, p<<0.0001.

[0042] (E) Enrichment of total, sense and antisense CTCF CLIP peaks, from day 0 mESC, in various genomic regions as compared to reference mouse genome.

[0043] FIGS. 2A-E. Characterization of the CTCF RNA Interactome.

[0044] (A) Average CLIP peaks profile over a 3-kb metagene, as well as 1 kb up- or downstream, for d0 CLIP peaks that are sense or antisense to RefSeq annotated genes.

[0045] (B) Average profile of d0 CLIP peaks between 0-4 kb up- or downstream of transcription start site (TSS) or transcription termination site (TTS).

[0046] (C) Scatterplot comparing CLIP-seq and RNA-seq coverage. Fragments per kilobase per million reads (FPKM) were calculated for both libraries, and their log₂ values were plotted against each other; d3 data shown. Transcripts were assembled from RNA-seq data. For CLIP-seq, coverage under all peaks within each transcript was summed for division over the transcript length. Red line is x=y diagonal. Position of various RNAs of interest indicated. Pearson's correlation (R)=0.287, p=2.94×10⁻¹⁷⁸.

[0047] (D) Metagene profiles comparing d3 CTCF CLIP (red) and ChIP (blue) peaks.

[0048] (E) Average profile of d3 ChIP peaks relative to CLIP peaks. CLIP-seq peak is centered at by 0 on the x-axis.

[0049] FIGS. 3A-E. The RNA Interactome and Epigenomic Landscape of CTCF.

[0050] Normalized CTCF CLIP-seq, ChIP-seq and RNA-seq signals for (A) Sox2, (B) Sra1, (C) Jpx, (D) 5′ end of Xist, and (E) Xite and 5′ end of Tsix. Below each CLIP and ChIP tracks are corresponding “peaks”, defined as statistically significant CLIP and ChIP enriched segments. Regions of interest within Xist and Tsix indicated by red dashed bar. RNA data are divided into strand-specific tracks, with +strand being the Watson strand.

[0051] FIGS. 4A-C. Allele-Specific Binding of CTCF on the X-Chromosome.

[0052] Day 3 CTCF ChIP peaks, CLIP peaks, and RNA-seq signal over (A) entire X chromosome, (B) Zmym-Nono-Taf1-Ogt region, (C) Kdm6a (left) and Mid1 (right). Only statistically significant ChIP and CLIP peaks are shown. Composite=sum of all peaks (cas, mus, and neutral). Xa-specific=enriched on cas chromosome. Xi-specific=enriched on mus chromosome. Day 3 ES composite Xist CHART, day 7 ES allelic H3K27me3 ChIP (Simon et al., 2013), and mouse embryonic fibroblast allelic H3K4me3 ChIP (Yildirim et al., 2012) data also included for comparison.

[0053] FIGS. 5A-F. CTCF Binds RNA with High Affinity and Specificity.

[0054] (A) qRT-PCR for in vitro RNA pulldown with FLAG-CTCF, FLAG-GFP and mock pulldown. Results are expressed as percent of RNA in input sample. Representative results from four biological replicates shown. Means±1 SD shown. *, p<0.05, as determined by unpaired two-tailed Student's t-test comparing each amplicon to Ppia. RepA, RepF, RepC: Xist Repeats A, F and C. Ppia and Gtl2-as are negative controls.

[0055] (B) UV-RIP qRT-PCR, comparing αCTCF and IgG immunoprecipitation performed on UV-crosslinked or uncrosslinked day 3 ES cells. Results are expressed as percent of RNA in input sample. Representative results from three biological replicates shown. Means±1 SD shown. *, significant enrichment (p<0.05, determined by unpaired two-tailed Student's t-test) of +UV αCTCF pulldown over +UV IgG pulldown; †, significant enrichment of +UV αCTCF pulldown over −UV αCTCF pulldown. Ppia, Gapdh and Gtl2-as are negative controls.

[0056] (C) Coomassie staining of FLAG-CTCF and FLAG-GFP on an SDS-PAGE.

[0057] (D) RNA EMSA using 1.5 pmol of purified recombinant FLAG-CTCF or FLAG-GFP and 0.5 pmol of various in vitro-transcribed, end-labelled RNA probes. Comp, unlabelled competitors at 40× molar excess. *, CTCF-RNA shift. Jpx is positive control, Gapdh is negative control. Map of Xite/Tsix and EMSA probes are shown above the gels.

[0058] (E) RNA EMSA using 1.5 pmol of purified recombinant FLAG-CTCF or FLAG-GFP and 0.5 pmol of various Tsix RNA fragments (as shown in map in panel D). Comp, unlabelled competitors at 40× molar excess. *, CTCF-RNA shift.

[0059] (F) RNA EMSA with 0.5 pmol of purified Tsix probe d and 1.5 pmol of recombinant, purified CTCF full-length protein (FL), GST-CTCF fragments: N, N-terminal domain (aa 1-284); Zn, zinc-finger domain (aa 284-583); C, C-terminal domain (aa 583-727); or GST alone. Comp, unlabelled competitors at 40× molar excess. *, CTCF-RNA shift.

[0060] FIGS. 6A-E. Tsix RNA is Required for X-X Pairing

[0061] (A) Map of Xic and pairing center, with positions for RIP qPCR primers and EMSA probes (arrowheads). Tsix antagomirs (asterisks): blue, shRNA; green, LNA; red, LNA. The Tsix major promoter accounts for 90% of Tsix transcripts. Position of the Tsix^{TST} truncation allele is shown. Xite enhancer expresses an eRNA.

[0062] (B) RIP-RT-qPCR, + or −UV, on d3 female ES cells at various RNA domains with Tsix and Xite, with Jpx as positive control and U1 snRNA as negative control. qPCR positions shown in panel A. Representative results from two biological replicates shown. All values normalized to 1% of input RNA. Means±1 s.d. shown. p, determined by unpaired two-tailed Student t-tests comparing CTCF to IgG pulldowns in the +UV samples.

[0063] (C) Effect of TsixKD on pairing in female clones stably expressing shTsix versus shScr. DNA FISH using a two-probe combination of RP24 (centromeric) and pSx9 (Xist/Tsix) was performed. To exclude XO artifacts, only nuclei with two RP24 signals were scored. Cumulative frequency curves shown for decile with closest X-X distances. Whole distributions shown in FIG. 11A-C. The significance of the difference, p, in pairwise comparisons between ScrKD and TsixKD on various differentiation days is determined using unpaired two-tailed Student t-tests. Representative results shown for two independent biological replicates. Sample sizes, n: ScrKD: 261 (d0), 297 (d2), 295 (d4), 254 (d6); TsixKD: 263 (d0), 332 (d2), 282 (d4), 246 (d6).

[0064] (D,E) Quantitation of Tsix RNA after ScrKD versus TsixKD using two LNAs. Pairing analysis performed as in panel C. Whole distributions shown in FIG. 11A-C. Representative results shown from 2-3 independent biological replicates. D, sample sizes: ScrKD: 295 (d0), 289 (d3), 294 (d6); TsixKD: 277 (d0), 303 (d3), 310 (d6). E, sample sizes: ScrKD: 212 (d0), 186 (d3), 171 (d6); TsixKD, 205 (d0), 202 (d3), 186 (d6).

[0065] FIGS. 7A-F. Tsix RNA Recruits CTCF to Binding Sites in Xic

[0066] (A) Map of Xic and pairing center, with positions for ChIP primers. Tsix antagomirs (asterisks) as in FIG. 6A.

[0067] (B) ChIP-qPCR in stable shTsix or shScr KD clones. Representative results from four biological replicates shown. Means±1 SD shown. p determined by unpaired two-tailed t-tests.

[0068] (C) EB outgrowth of shTsix KD ES cells was severely compromised. Scale bar, 100 μm.

[0069] (D) Pluripotency markers are appropriately downregulated in female shTsix KD cells, suggesting proper cell differentiation. Means±1 SD shown.

[0070] (E) Xist RNA FISH in shRNA TsixKD versus ScrKD during differentiation. P, determined by χ² test comparing the distribution of Xist cells for ScrKD versus TsixKD from d0, d2, d4, and d6; [(observed-expected)²/expected], degrees of freedom=3.

[0071] (F) Site-specific action of Tsix RNA facilitates locus-specific targeting of CTCF. POL-II transcribes Tsix RNA, which remains tethered to the site of synthesis as the RNA recruits CTCF to the locus. Co-transcriptional tethering, coupled to rapid turnover of Tsix (t_{1/2}, 30-60 min), enables the RNA to act in cis and in a locus-specific manner.

[0072] FIGS. 8A-B. CTCF is Expressed at Physiological Levels in the Inducible FLAG-CTCF mESC Line.

[0073] (A) qRT-PCR of CTCF RNA level, normalized to GAPDH RNA level, with or without 24-hr induction with 1 μg/mL of doxycycline (Dox) induction.

[0074] (B) Immunoblot of nuclear lysate, with or without Dox induction, with α CTCF, α FLAG and α actin antibodies.

[0075] FIGS. 9A-C. Metagene Analysis of CLIP-Seq Peaks in Day 3 mESC.

[0076] (A) Percentage of multiple-mapping reads in d0+UV library that are in various classes of repetitive elements.

[0077] (B) Percentage of total, sense and antisense CTCF CLIP peaks, from d3 mESCs, in various genomic regions.

[0078] (C) Average CLIP peaks profile over a 3-kb metagene, as well as 1 kb up- or downstream, for d3 CLIP peaks that are sense or antisense to RefSeq annotated genes.

[0079] FIGS. 10A-D. The CTCF RNA Interactome and Epigenomic Landscape at Additional Loci.

[0080] (A) 5′ end of Gtl2 and upstream sequence. DMR, differentially methylated region.

[0081] (B) Nespas-Gnas cluster.

[0082] (C) H19. ICR, imprinting control region.

[0083] (D) Hoxa1, -2, -3, and upstream sequence.

[0084] FIGS. 11A-C. Distribution of Inter-Xic Distances in Control and Tsix-Knockdown mESCs.

[0085] (A) Normalized distance (ND) distribution profiles of shScr and shTsix, corresponding to cumulative frequency (CF) curves in FIG. 6C. Arrowheads, Mean of ND. ND=X-X distance/d, where d=2*(nuclear area/π)^{0.5}. ND ranges from 0 to 1. Samples sizes are indicated in parentheses.

[0086] (B,C) ND distribution profiles of ScrKD and TsixKD, corresponding to CF curves in FIG. 6D,E. Arrowheads, Mean of ND. Representative results from three independent biological replicates.

[0087] FIG. 12A-B. Occupancies of CTCF and OCT4 are not Significantly Affected in the Regions Outside of the Pairing Center

[0088] (A) ChIP-seq analysis of SMC3, CTCF, OCT4, and H3K27me3 on X chromosome.

[0089] (B) ChIP-qPCR in shScr and shTsix at indicated sites of X chromosome. Means±1 S.D. shown. Three independent biological replicates shown.

[0090] Table 1. Human CTCF Binding Sites.

[0091] Coordinates for the genomic equivalents of the sequences of the empirically determined human peaks plus 500 nucleotides of flanking sequence; the sequences coordinates are with reference to human genome build 19. Imp'd, imprinted; Onco, oncogene; T-supp., tumor suppressor.

[0092] Table 2. Human CTCF Binding Sites.

[0093] Coordinates for the genomic equivalents of the sequences of the human Lift-Over peaks plus 500 nucleotides of flanking sequence; the sequences coordinates are with reference to human genome build 19. Imp'd, imprinted; Onco, oncogene; T-supp., tumor suppressor.

### DETAILED DESCRIPTION

[0094] CTCF is a master regulator of the genome and a fastener that holds together higher-order genomic architecture. In light of recent advances that have uncovered roles for RNA in chromosome looping (Lai et al., 2013a; Li et al., 2013), it is tempting to speculate that RNA may play a general role in aiding CTCF weave genomic architecture.

Thus, we speculated that CTCF might interact with RNA on a larger scale. Given that enhancer-directed chromosomal looping involves RNA-mediated interactions (Kung et al., 2013; Lai et al., 2013b), the present inventors set out to determine whether RNA may bind CTCF on a global scale and aid long-range chromatin interactions in some contexts. As described herein, CLIP-seq analysis was used to define an RNA interactome for CTCF in mESC and, in parallel, ChIP-seq was performed to investigate the epigenomic landscape relative to interacting transcripts. One novel function of CTCF-RNA interactions described herein is the in cis locus-specific targeting of CTCF to chromatin. Because Tsix remains tethered to the site of transcription, it serves as an allele-specific tether for CTCF and ensures locus-specific recruitment of an otherwise ubiquitous factor (FIG. 7F). By targeting CTCF to the pairing center, Tsix and Xite RNAs promote long-range chromosomal interaction. Because many imprinted noncoding RNAs such as H19, Nespas, and Gtl2 are cis-acting (Lee and Bartolomei, 2013) and interact directly with CTCF (FIG. 10A-D), CTCF may be recruited to nearby imprinting control regions via a similar RNA-mediated mechanism. CTCF-RNA interactions elsewhere may similarly mediate long-range interactions to form inter- and intra-chromosomal structures—structures that are now increasingly associated with CTCF binding activities (Handoko et al., 2011; Dixon et al., 2012; Sanyal et al., 2012; Shen et al., 2012; DeMare et al., 2013; Phillips-Cremins et al., 2013).

[0095] Using XCI as a model, the present analysis defines a large RNA interactome and chromosome-specific binding patterns, which together implicate RNAs in the recruitment of CTCF to the X-chromosome pairing center and in inter-chromosomal interactions. Relevant to this, the allele-specific binding patterns of CTCF to the Xi chromatin also merit future consideration (FIG. 4), as CTCF-RNA interactions near escapee genes (FIG. 4) may facilitate the genes' continued expression within facultative heterochromatin (Filippova et al., 2005; Li and Carrel, 2008; Calabrese et al., 2012; Mugford et al., 2014). As shown in the case of Kdm6a and Mid1 genes (FIG. 4C), there are Xi-specific CTCF peaks within/flanking theses escapees, which correlated CTCF-interacting transcripts. We suspect that these transcripts may recruit CTCF to the escapees to mediate escape from XCI.

[0096] In general, the CTCF-interacting RNAs may operate both in cis and in trans. For example, Tsix and Xite (FIG. 7) are cis-acting and are required to target CTCF to the pairing center of the X-inactivation center to enable long-range interactions between two X-chromosomes (inter-chromosomal pairing) and the initiation of Xist RNA expression from the future inactive X (FIG. 6DE; 7AB). Other CTCF-associated RNAs such as Jpx (Sun et al., 2013) and SRA1 (Yao et al., 2010) are trans-acting. In the case of Jpx, interaction between the RNA and CTCF leads to eviction of CTCF from the promoter of Xist, which thereby induces expression of Xist RNA. CTCF may also function as either activator or repression of gene expression. As an example of CTCF-mediated repression, at the X-inactivation center, CTCF is recruited by Tsix and Xite RNA, and binding to Tsix/Xite operates as a transcriptional repressor of Xist (FIG. 6-7). At the H19-imprinted cluster, binding of CTCF to the imprinting control region (ICR) is also repressive for the linked Igf2 gene in cis (Wan and Bartolomei, 2008; Li et al., 2008; Ling et al., 2006; Lee and Bartolomei, 2013). Thus, selective activation such genes as Xist and Igf2 may be achieved by blocking CTCF recruitment to those location, potentially by interfering with the RNA-mediated recruitment of CTCF. As an example of an activator, in the same imprinted cluster H19-Igf2, CTCF binding to the ICR activates H19 in cis (while it represses the Igf2). Thus, CTCF's effect on gene expression is context-dependent and likely mediated by the intra- and inter-chromosomal loops generated by CTCF as its primary function. That is, CTCF is believed to be acting by forming functional chromosomal domains (e.g., intra-chromosomal loops to insulate one gene while repressing or activating a neighboring gene). Thus, this invention leverages the role of RNA in recruiting CTCF to modulate the expression of genes within such higher-order domains.

[0097] Provided herein are putative CTCF binding sites within an interacting transcript, against which antisense oligonucleotides could be designed to block CTCF-RNA interactions and thereby interfere with CTCF's chromatin binding and function in a locus-specific manner. A “binding site” is defined as a region on the interacting RNA that makes direct contact with CTCF protein. These binding sites were identified as statistically significant “peaks” in the CLIP-seq data. Listed in Tables 1-2 are the coordinates for the genomic equivalents of the sequences of the peaks of binding PLUS 500 nucleotides of flanking sequence; the sequences are provided in the sequence listing filed herewith. The additional 500 nucleotides are included because designing inhibitory nucleic acids against flanking sequences can be efficacious in targeting RNA-protein interactions (e.g., RepC RNA interaction with YY1—see Sarma et al., 2010; Jeon and Lee, 2011). Mouse-to-human LiftOver analysis and analysis in the UCSC genome browser of syntenic positions indicate the existence of similar transcripts in the human genome; the peaks are set out in Table 2. This process and LiftOver chains are generally described in Kent et al., Proc. Nat'l Acad. Sci., 100(20) 11484-11489 (2003). Similar CTCF-interacting transcripts are believed to occur in the human system given the geographic and sequence similarities between the mouse and human transcripts. The data suggest that many if not all of the mouse CTCF-transcripts have direct counterparts in the human epigenome. Such direct counterparts in other species are termed “orthologous” herein. Empirically identified CTCF binding sites in the X Chromosome, are described herein (see Example 5 and Table 1). These CTCF binding sites may be functionally conserved without being highly conserved at the level of overall nucleotide identity. For example, mouse Xist shows only 76% overall nucleotide identity with human XIST using sliding 21-bp windows, or an overall sequence identity of only 60%. However, within specific functional domains, such as Repeat A of XIST, the degree of conservation can be >70% between different mammalian species. The crucial motif in Repeat A is the secondary structures formed by the repeat. A CTCF binding site interacting with CTCF may therefore be similarly low in overall conservation but still have conservation in secondary structure within specific domains of the RNA, and thereby demonstrate functional conservation with respect to recruitment of CTCF. Calculations of homology or sequence identity between sequences (the terms are used interchangeably herein) are performed as follows.

[0098] To determine the percent identity of two nucleic acid sequences, the sequences are aligned for optimal comparison purposes (e.g., gaps can be introduced in one or both of a first and a second amino acid or nucleic acid sequence for optimal alignment and non-homologous sequences can be disregarded for comparison purposes). The length of a reference sequence aligned for comparison purposes is at least 80% of the length of the reference sequence, and in some embodiments is at least 90% or 100%. The nucleotides at corresponding amino acid positions or nucleotide positions are then compared. When a position in the first sequence is occupied by the same nucleotide as the corresponding position in the second sequence, then the molecules are identical at that position (as used herein nucleic acid “identity” is equivalent to nucleic acid “homology”). The percent identity between the two sequences is a function of the number of identical positions shared by the sequences, taking into account the number of gaps, and the length of each gap, which need to be introduced for optimal alignment of the two sequences.

[0099] For purposes of the present invention, the comparison of sequences and determination of percent identity between two sequences can be accomplished using a Blossum 62 scoring matrix with a gap penalty of 12, a gap extend penalty of 4, and a frameshift gap penalty of 5.

[0100] There are several potential uses for the CTCF binding sites described herein in the expanded CTCF transcriptome: The CTCF binding sites themselves, or antagomirs and small molecules designed against them, can be utilized to modulate expression (either up or down) of CTCF target genes. In addition, the CTCF binding sites can be used to design and/or test inhibitory nucleic acids as described herein.

### Methods of Treatment

[0101] The present disclosure provides therapeutics, useful in treating a number of conditions including but not limited to various autosomal imprinting disorders, cancer, and X-linked diseases, that are formulated by designing inhibitory nucleic acids, e.g., oligonucleotides, or TFOs that bind to the CTCF binding sites as described herein (e.g., in Tables 1-2). In some embodiments, the oligo is targeted to anywhere in the binding site sequence; in some embodiments, it is targeted to a sequence within a region that starts at nt +501 from the 5′ end of a sequence in Tables 1-2, and ends at nt −501 from the 3′ end. We envision that this approach could be used to (1) disrupt silencing of X-linked and autosomal genes controlled repressively by CTCF sites (e.g., all of the genes within a cluster), or to disrupt silencing of one specific gene; to (2) prevent the activation of X-linked and autosomal genes that are turned on by CTCF, as targeting the CTCF binding sites would enable repression of the disease gene of interest; and to (3) turn off escapee genes on the X-chromosome.

### Treating X-Linked Disorders

[0102] This methodology is useful particularly in X-linked disorders, e.g., in heterozygous women who retain a wildtype copy of a gene on the Xi (See, e.g., Lyon, Acta Paediatr Suppl. 2002; 91(439):107-12; Carrell and Willard, Nature. 434(7031):400-4 (2005); den Veyver, Semin Reprod Med. 19(2):183-91 (2001)). Again, without wishing to be bound by theory, administration of an inhibitory nucleic acid (e.g., oligonucleotide) targeting a strong or moderate binding site is expected to prevent CTCF recruitment to a specific X-linked gene cluster or to a specific gene on the inactive X, thereby reactivating the “good” or hypomorphic copy of the X-linked gene.

[0103] As a result of X-inactivation, heterozygous females are mosaic for X-linked gene expression; some cells express genes from the maternal X and other cells express genes from the paternal X. The relative ratio of these two cell populations in a given female is frequently referred to as the “X-inactivation pattern.” One cell population may be at a selective growth disadvantage, resulting in clonal outgrowth of cells with one or the other parental X chromosome active; this can cause significant deviation or skewing from an expected mean X-inactivation pattern (i.e., 50:50). See, e.g., Plenge et al., Am. J. Hum. Genet. 71:168-173 (2002) and references cited therein.

[0104] In some embodiments, the present methods include targeting RNAs that recruit CTCF for either gene upregulation or downregulation. In this manner, specific genes of interest on the inactive X could be reactivated to treat X-linked diseases, when the inactivated X chromosome bears a functional or hypomorphic copy of the gene. In this manner, specific autosomal genes such as Igf2 could be reactivated. To downregulate genes, ASOs could be targeted to CTCF to silence H19, for example. The example of FIG. 6-7 shows that knocking down Tsix and Xite prevented CTCF recruitment, which in turn prevent inter-chromosomal pairing and the ability to induce Xist RNA. In another embodiment, targeting the CTCF binding sites could block the expression of disease genes that “escape” from XCI.

[0105] Thus, the present methods can be used to treat disorders associated with X-inactivation, which includes those listed in Table A.

TABLE A

| Disorder | OMIM # | Locus | Gene |
|---|---|---|---|
| Dent's disease 1 | 300009 | Xp11.22 | CLCN5 |
| Testicular feminization syndrome | 300068 | Xq11-q12 | AR |
| Addison's disease with cerebral sclerosis | 300100 | Xq28 | ABCD1 |
| Adrenal hypoplasia | 300200 | XP21.3-p21.2 | DAX1 |
| siderius X-linked mental retardation | 300263 | Xp11.22 | PHF8 |
| syndrome | | | |
| Agammaglobulinaemia, Bruton type | 300300 | Xq21.3-q22 | BTK |
| Choroidoretinal degeneration | 300389 | Xp21.1 | RPGR |
| Choroidaemia | 300390 | Xq21.2 | CHM |
| Albinism, ocular | 300500 | Xp22.3 | OA1 |
| Dent's disease 2 | 300555 | Xq25-q26 | OCRL |
| fragile X syndrome | 300624 | Xq27.3 | FMR1 |
| Rett/Epileptic encephalopathy, early | 300672 | Xp22.13 | CDKL5 |
| infantile, 2 | | | |
| Albinism-deafness syndrome | 300700 | Xq26.3-q27.1 | ADFN |
| paroxysmal nocturnal hemoglobinuria | 300818 | Xp22.2 | PIGA |
| Aldrich syndrome | 301000 | Xp11.23-p11.22 | WAS |
| Alport syndrome | 301050 | Xq22.3 | COL4A5 |
| Anaemia, hereditary hypochromic | 301300 | Xp11.21 | ALAS2 |
| Anemia, sideroblastic, with ataxia | 301310 | Xq13.3 | ABCB7 |
| Fabry disease | 301500 | Xq22 | GLA |
| Spinal muscular atrophy 2 | 301830 | Xp11.23 | UBA1 |
| Cataract, congenital | 302200 | Xp | CCT |
| Charcot-Marie-Tooth, peroneal | 302800 | Xq13.1 | GJB1 |
| Spastic paraplegia | 303350 | Xq28 | L1CAM |
| Colour blindness | 303800 | Xq28 | OPN1MW |
| Diabetes insipidus, nephrogenic | 304800 | Xq28 | AVPR2 |
| Dyskeratosis congenita | 305000 | Xq28 | DKC1 |
| Ectodermal dysplasia, anhidrotic | 305100 | Xq12-q13.1 | ED1 |
| Faciogenital dysplasia (Aarskog syndrome) | 305400 | Xp11.21 | FGD1 |
| Glucose-6-phosphate dehydrogenase | 305900 | Xq28 | G6PD |
| deficiency | | | |
| Glycogen storage disease type VIII | 306000 | Xp22.2-p22.1 | PHKA2 |
| Gonadal dysgenesis (XY female type) | 306100 | Xp22.11-p21.2 | GDXY |
| Granulomatous disease (chronic) | 306400 | Xp21.1 | CYBB |
| Haemophilia A | 306700 | Xq28 | F8 |
| Haemophilia B | 306900 | Xq27.1-q27.2 | F9 |
| Hydrocephalus (aqueduct stenosis) | 307000 | Xq28 | L1CAM |
| Hypophosphataemic rickets | 307800 | Xp22.2-p22.1 | PHEX |
| Lesch-Nyhan syndrome (hypoxanthine- | 308000 | Xq26-q27.2 | HPRT1 |
| guanine-phosphoribosyl transferase | | | |
| deficiency) | | | |
| Incontinentia pigmenti | 308300 | Xq28 | IKBKG |
| Kallmann syndrome | 308700 | Xp22.3 | KAL1 |
| Keratosis follicularis spinulosa | 308800 | Xp22.1 | SAT |
| Lowe (oculocerebrorenal) syndrome | 309000 | Xq26.1 | OCRL |
| Menkes syndrome | 309400 | Xq12-q13 | ATP7A |
| Renpenning Syndrome | 309500 | Xp11.23 | PQBP1 |
| Mental retardation, with or without fragile | 309530 | Xp11.3-q21.1 | MRX1 |
| site (numerous specific types) | | | |
| Coffin-Lowry syndrome | 309580 | Xq13 | ATRX |
| Microphthalmia with multiple anomalies | 309800 | Xq27-q28 | MAA |
| (Lenz syndrome) | | | |
| Muscular dystrophy (Becker, Duchenne and | 310300 | Xq28 | EMD |
| Emery-Dreifuss types) | | | |
| Myotubular myopathy | 310400 | Xq28 | MTM1 |
| Night blindness, congenital stationary | 310500 | Xp11.4 | CSNB1 |
| Norrie's disease (pseudoglioma) | 310600 | Xp11.4 | NDP |
| Nystagmus, oculomotor or ‘jerky’ | 310700 | Xq26-q27 | NYS1 |
| Orofaciodigital syndrome (type I) | 311200 | Xp22.3-p22.2 | OFD1 |
| Ornithine transcarbamylase deficiency (type I | 311250 | Xp21.1 | OTC |
| hyperammonaemia) | | | |
| Phosphoglycerate kinase deficiency | 311800 | Xq13 | PGK1 |
| Phosphoribosylpyrophosphate synthetase | 311850 | Xq22-q24 | PRPS1 |
| deficiency | | | |
| Retinitis pigmentosa | 312610 | Xp21.1 | RPGR |
| Retinoschisis | 312700 | Xp22.2-p22.1 | RS1 |
| Rett syndrome | 312750 | Xq28, Xp22 | MECP2 |
| Muscular atrophy/Dihydrotestosterone | 313200 | Xq11-q12 | AR |
| receptor deficiency | | | |
| Spinal muscular atrophy | 313200 | Xq11-q12 | AR |
| Spondyloepiphyseal dysplasia tarda | 313400 | Xp22.2-p22.1 | SEDL |
| Thrombocytopenia, hereditary | 313900 | Xp11.23-p11.22 | WAS |
| Thyroxine-binding globulin, absence | 314200 | Xq22.2 | TBG |
| McLeod syndrome | 314850 | Xp21.1 | XK |

[0106] Table A was adapted in part from Germain, “Chapter 7: General aspects of X-linked diseases” in Fabry Disease: Perspectives from 5 Years of FOS. Mehta A, Beck M, Sunder-Plassmann G, editors. (Oxford: Oxford PharmaGenesis; 2006).

### Treating Cancer

[0107] The methods described herein can also be used to treat a cancer in a subject by administering to the subject a composition (e.g., as described herein) comprising an inhibitory nucleic acid or TFO that binds to a CTCF binding site associated with a tumor suppressor, or cancer-suppressing gene, or imprinted gene and/or other growth-suppressing genes in any of Tables 1-2. Examples of cellular proliferative and/or differentiative disorders include cancer, e.g., carcinoma, sarcoma, metastatic disorders or hematopoietic neoplastic disorders, e.g., leukemias. A metastatic tumor can arise from a multitude of primary tumor types, including but not limited to those of prostate, colon, lung, breast and liver origin.

[0108] As used herein, treating includes “prophylactic treatment” which means reducing the incidence of or preventing (or reducing risk of) a sign or symptom of a disease in a patient at risk for the disease, and “therapeutic treatment”, which means reducing signs or symptoms of a disease, reducing progression of a disease, reducing severity of a disease, in a patient diagnosed with the disease. With respect to cancer, treating includes inhibiting tumor cell proliferation, increasing tumor cell death or killing, inhibiting rate of tumor cell growth or metastasis, reducing size of tumors, reducing number of tumors, reducing number of metastases, increasing 1-year or 5-year survival rate.

[0109] As used herein, the terms “cancer”, “hyperproliferative” and “neoplastic” refer to cells having the capacity for autonomous growth, i.e., an abnormal state or condition characterized by rapidly proliferating cell growth. Hyperproliferative and neoplastic disease states may be categorized as pathologic, i.e., characterizing or constituting a disease state, or may be categorized as non-pathologic, i.e., a deviation from normal but not associated with a disease state. The term is meant to include all types of cancerous growths or oncogenic processes, metastatic tissues or malignantly transformed cells, tissues, or organs, irrespective of histopathologic type or stage of invasiveness. “Pathologic hyperproliferative” cells occur in disease states characterized by malignant tumor growth. Examples of non-pathologic hyperproliferative cells include proliferation of cells associated with wound repair.

[0110] The terms “cancer” or “neoplasms” include malignancies of the various organ systems, such as affecting lung (e.g., small cell, non-small cell, squamous, adenocarcinoma), breast, thyroid, lymphoid, gastrointestinal, genito-urinary tract, kidney, bladder, liver (e.g. hepatocellular cancer), pancreas, ovary, cervix, endometrium, uterine, prostate, brain, as well as adenocarcinomas which include malignancies such as most colon cancers, colorectal cancer, renal-cell carcinoma, prostate cancer and/or testicular tumors, non-small cell carcinoma of the lung, cancer of the small intestine and cancer of the esophagus. The term “carcinoma” is art recognized and refers to malignancies of epithelial or endocrine tissues including respiratory system carcinomas, gastrointestinal system carcinomas, genitourinary system carcinomas, testicular carcinomas, breast carcinomas, prostatic carcinomas, endocrine system carcinomas, and melanomas. In some embodiments, the disease is renal carcinoma or melanoma. Exemplary carcinomas include those forming from tissue of the cervix, lung, prostate, breast, head and neck, colon and ovary. The term also includes carcinosarcomas, e.g., which include malignant tumors composed of carcinomatous and sarcomatous tissues. An “adenocarcinoma” refers to a carcinoma derived from glandular tissue or in which the tumor cells form recognizable glandular structures.

[0111] The term “sarcoma” is art recognized and refers to malignant tumors of mesenchymal derivation.

[0112] Additional examples of proliferative disorders include hematopoietic neoplastic disorders. As used herein, the term “hematopoietic neoplastic disorders” includes diseases involving hyperplastic/neoplastic cells of hematopoietic origin, e.g., arising from myeloid, lymphoid or erythroid lineages, or precursor cells thereof. Preferably, the diseases arise from poorly differentiated acute leukemias, e.g., erythroblastic leukemia and acute megakaryoblastic leukemia. Additional exemplary myeloid disorders include, but are not limited to, acute promyeloid leukemia (APML), acute myelogenous leukemia (AML) and chronic myelogenous leukemia (CML) (reviewed in Vaickus, L. (1991) Crit Rev. in Oncol./Hemotol. 11:267-97); lymphoid malignancies include, but are not limited to acute lymphoblastic leukemia (ALL) which includes B-lineage ALL and T-lineage ALL, chronic lymphocytic leukemia (CLL), prolymphocytic leukemia (PLL), hairy cell leukemia (HLL) and Waldenstrom's macroglobulinemia (WM). Additional forms of malignant lymphomas include, but are not limited to non-Hodgkin lymphoma and variants thereof, peripheral T cell lymphomas, adult T cell leukemia/lymphoma (ATL), cutaneous T-cell lymphoma (CTCL), large granular lymphocytic leukemia (LGF), Hodgkin's disease and Reed-Sternberg disease.

[0113] In some embodiments, specific cancers that can be treated using the methods described herein are listed in the categories herein, for example, and include, but are not limited to: breast, lung, prostate, CNS (e.g., glioma), salivary gland, prostate, ovarian, and leukemias (e.g., ALL, CML, or AML). Associations of these genes with a particular cancer are known in the art, e.g., as described in Futreal et al., Nat Rev Cancer. 2004; 4:177-83; and The COSMIC (Catalogue of Somatic Mutations in Cancer) database and website, Bamford et al., Br J Cancer. 2004; 91:355-8; see also Forbes et al., Curr Protoc Hum Genet. 2008; Chapter 10; Unit 10.11, and the COSMIC database, e.g., v. 50 (Nov. 30, 2010). It is understood that reference to any particular type of cancer herein means that patients with other types of cancer, i.e., cancer in general, may be treated.

[0114] In addition, the methods described herein can be used for modulating (e.g., enhancing or decreasing) pluripotency of a stem cell and to direct stem cells down specific differentiation pathways to make endoderm, mesoderm, ectoderm, and their developmental derivatives. To modulate, e.g., decrease, increase, maintain, or enhance pluripotency, the methods include introducing into the cell an inhibitory nucleic acid that specifically binds to, or is complementary to, a CTCF-binding RNA or RNA domain as set forth herein. Stem cells useful in the methods described herein include adult stem cells (e.g., adult stem cells obtained from the inner ear, bone marrow, mesenchyme, skin, fat, liver, muscle, or blood of a subject, e.g., the subject to be treated); embryonic stem cells, or stem cells obtained from a placenta or umbilical cord; progenitor cells (e.g., progenitor cells derived from the inner ear, bone marrow, mesenchyme, skin, fat, liver, muscle, or blood); and induced pluripotent stem cells (e.g., iPS cells).

### Methods of Targeting Genes Modulated by CTCF

[0115] The methods described herein can be used to specifically re-activate or repress one or more genes suppressed by CTCF, by targeting CTCF binding sites (i.e., within 500 nts of a peak sequence) as described herein, to disrupt RNA-mediated silencing or enhancement in cis on the inactive X-chromosome. The CTCF-binding RNAs can be noncoding (long noncoding RNA, lncRNA) or occasionally part of a coding mRNA; for simplicity, we will refer to them together as CTCF-associated RNAs (caRNAs) henceforth.

[0116] In the present methods, inhibitory nucleic acids targeting the CTCF binding sites, or complementary or identical to a CTCF binding site in the genome, are used to modulate gene expression in a cell, e.g., a cancer cell, a stem cell, or other normal cell types for gene or epigenetic therapy. The nucleic acids used in the methods described herein are termed “inhibitory” because they inhibit the CTCF-mediated repression or enhancement of a specified gene, by binding to a CTCF-binding sequence on the caRNA itself (e.g., an antisense oligo that is complementary to the CTCF-binding region of the caRNA) or by binding to a CTCF binding site as described herein in the genome, and (without wishing to be bound by theory) preventing binding or recruitment of CTCF to the binding site and thus disrupting CTCF-mediated silencing or enhancement in the region of the binding site.

[0117] The cells can be in vitro, including ex vivo, or in vivo (e.g., in a subject who has cancer, e.g., a tumor). In some embodiments, the methods include introducing into the cell an inhibitory nucleic acid that is modified in some way, e.g., that differs from the endogenous caRNA or CTCF binding site by including one or more modifications to the backbone or bases as described herein for inhibitory nucleic acids. Such modified oligos are also within the scope of the present invention.

[0118] In some embodiments, the methods include introducing into the cell an inhibitory nucleic acid that specifically binds, or is complementary, to a strong or moderate binding site or a long non-coding RNA described herein. A nucleic acid that binds “specifically” binds primarily to the target, i.e., to the CTCF binding site to inhibit regulatory function or binding of CTCF to the caRNA or DNA but not to other non-target RNAs. The specificity of the nucleic acid interaction thus refers to its function (e.g., inhibiting the CTCF-associated repression or enhancement of gene expression) rather than its hybridization capacity. Inhibitory nucleic acids may exhibit nonspecific binding to other sites in the genome or other mRNAs, without interfering with binding of other regulatory proteins and without causing degradation of the non-specifically-bound RNA. Thus this nonspecific binding does not significantly affect function of other non-target RNAs and results in no significant adverse effects. These methods can be used to treat a subject, e.g., a subject with an X-linked condition or cancer, by administering to the subject a composition (e.g., as described herein) comprising an inhibitory nucleic acid that binds to a long non-coding RNA (e.g., an inhibitory nucleic acid that binds to a CTCF binding site described herein, e.g., as described in Tables 1-2) that is associated with a disease gene. Examples of genes involved in X-linked diseases are shown in Table A.; examples of oncogenes, tumor suppressors, and imprinted genes are shown in Tables 1-2.

[0119] The methods described herein can be used for modulating expression of oncogenes and tumor suppressors in cells, e.g., cancer cells. For example, to decrease expression of an oncogene in a cell, the methods include introducing into the cell an inhibitory nucleic acid that binds to a CTCF-binding region of a CTCF associated RNA or DNA as described herein, that regulates the genes, e.g., the tumor suppressors, oncogenes, and/or other growth-promoting genes in Tables 1-2.

[0120] As another example, to increase expression of a tumor suppressor in a cell, the methods include introducing into the cell an inhibitory nucleic acid or small molecule that specifically binds, or is complementary, to a CTCF-associated RNA targeting a tumor suppressor as set forth in Tables 1-2, e.g., in subjects with cancer, e.g., lung adenocarcinoma patients. In some embodiments, the methods include introducing into the cell an inhibitory nucleic acid that specifically binds, or is complementary, to a CTCF-associated RNA targeting an imprinted gene as set forth in Tables 1-2, or an X-linked gene as listed in Table A. A nucleic acid that binds “specifically” binds primarily to the target lncRNA or related lncRNAs to inhibit regulatory function of the lncRNA but not of other non-target RNAs. The specificity of the nucleic acid interaction thus refers to its function (e.g. inhibiting the CTCF-associated repression of gene expression) rather than its hybridization capacity. Inhibitory nucleic acids may exhibit nonspecific binding to other sites in the genome or other mRNAs, without interfering with binding of other regulatory proteins and without causing degradation of the non-specifically-bound RNA. Thus this nonspecific binding does not significantly affect function of other non-target RNAs and results in no significant adverse effects.

[0121] As used herein, treating includes “prophylactic treatment” which means reducing the incidence of or preventing (or reducing risk of) a sign or symptom of a disease in a patient at risk for the disease, and “therapeutic treatment”, which means reducing signs or symptoms of a disease, reducing progression of a disease, reducing severity of a disease, in a patient diagnosed with the disease.

[0122] In some embodiments, the methods described herein include administering a composition, e.g., a sterile composition, comprising an inhibitory nucleic acid that is complementary to a CTCF binding site described herein. Inhibitory nucleic acids for use in practicing the methods described herein can be an antisense or small interfering RNA, including but not limited to an shRNA or siRNA. In some embodiments, the inhibitory nucleic acid is a modified nucleic acid polymer (e.g., a locked nucleic acid (LNA) molecule).

[0123] Inhibitory nucleic acids have been employed as therapeutic moieties in the treatment of disease states in animals, including humans. Inhibitory nucleic acids can be useful therapeutic modalities that can be configured to be useful in treatment regimens for the treatment of cells, tissues and animals, especially humans.

[0124] For therapeutics, an animal, preferably a human, suspected of having cancer is treated by administering an inhibitory nucleic acid in accordance with this invention. For example, in one non-limiting embodiment, the methods comprise the step of administering to the animal in need of treatment, a therapeutically effective amount of an inhibitory nucleic acid as described herein.

### Inhibitory Nucleic Acids

[0125] Inhibitory nucleic acids useful in the present methods and compositions include antisense oligonucleotides, ribozymes, external guide sequence (EGS) oligonucleotides, siRNA compounds, single- or double-stranded RNA interference (RNAi) compounds such as siRNA compounds, molecules comprising modified bases, locked nucleic acid molecules (LNA molecules), antagomirs, peptide nucleic acid molecules (PNA molecules), and other oligomeric compounds or oligonucleotide mimetics which hybridize to at least a portion of the target nucleic acid and modulate its function. In some embodiments, the inhibitory nucleic acids include antisense RNA, antisense DNA, chimeric antisense oligonucleotides, antisense oligonucleotides comprising modified linkages, interference RNA (RNAi), short interfering RNA (siRNA); a micro, interfering RNA (miRNA); a small, temporal RNA (stRNA); or a short, hairpin RNA (shRNA); small RNA-induced gene activation (RNAa); small activating RNAs (saRNAs), or combinations thereof. See, e.g., WO 2010040112. However, in some embodiments the inhibitory nucleic acid is not an miRNA, an stRNA, an shRNA, an siRNA, an RNAi, or a dsRNA.

[0126] In some embodiments, the inhibitory nucleic acids are 10 to 50, 13 to 50, or 13 to 30 nucleotides in length. One having ordinary skill in the art will appreciate that this embodies oligonucleotides having antisense (complementary) portions of 10, 11, 12, 13, 14, 15, 16, 17, 18, 19, 20, 21, 22, 23, 24, 25, 26, 27, 28, 29, 30, 31, 32, 33, 34, 35, 36, 37, 38, 39, 40, 41, 42, 43, 44, 45, 46, 47, 48, 49, or 50 nucleotides in length, or any range therewithin. It is understood that non-complementary bases may be included in such inhibitory nucleic acids; for example, an inhibitory nucleic acid 30 nucleotides in length may have a portion of 15 bases that is complementary to the targeted RNA. In some embodiments, the oligonucleotides are 15 nucleotides in length. In some embodiments, the antisense or oligonucleotide compounds of the invention are 12 or 13 to 30 nucleotides in length. One having ordinary skill in the art will appreciate that this embodies inhibitory nucleic acids having antisense (complementary) portions of 12, 13, 14, 15, 16, 17, 18, 19, 20, 21, 22, 23, 24, 25, 26, 27, 28, 29 or 30 nucleotides in length, or any range therewithin.

[0127] Preferably the inhibitory nucleic acid comprises one or more modifications comprising: a modified sugar moiety, and/or a modified internucleoside linkage, and/or a modified nucleotide and/or combinations thereof. It is not necessary for all positions in a given oligonucleotide to be uniformly modified, and in fact more than one of the modifications described herein may be incorporated in a single oligonucleotide or even at within a single nucleoside within an oligonucleotide.

[0128] In some embodiments, the inhibitory nucleic acids are chimeric oligonucleotides that contain two or more chemically distinct regions, each made up of at least one nucleotide. These oligonucleotides typically contain at least one region of modified nucleotides that confers one or more beneficial properties (such as, for example, increased nuclease resistance, increased uptake into cells, increased binding affinity for the target) and a region that is a substrate for enzymes capable of cleaving RNA:DNA or RNA:RNA hybrids. Chimeric inhibitory nucleic acids of the invention may be formed as composite structures of two or more oligonucleotides, modified oligonucleotides, oligonucleosides and/or oligonucleotide mimetics as described above. Such compounds have also been referred to in the art as hybrids or gapmers. Representative United States patents that teach the preparation of such hybrid structures comprise, but are not limited to, U.S. Pat. Nos. 5,013,830; 5,149,797; 5,220,007; 5,256,775; 5,366,878; 5,403,711; 5,491,133; 5,565,350; 5,623,065; 5,652,355; 5,652,356; and 5,700,922, each of which is herein incorporated by reference.

[0129] In some embodiments, the inhibitory nucleic acid comprises at least one nucleotide modified at the 2′ position of the sugar, most preferably a 2′-O-alkyl, 2′-O-alkyl-O-alkyl or 2′-fluoro-modified nucleotide. In other preferred embodiments, RNA modifications include 2′-fluoro, 2′-amino and 2′ O-methyl modifications on the ribose of pyrimidines, abasic residues or an inverted base at the 3′ end of the RNA. Such modifications are routinely incorporated into oligonucleotides and these oligonucleotides have been shown to have a higher Tm (i.e., higher target binding affinity) than; 2′-deoxyoligonucleotides against a given target.

[0130] A number of nucleotide and nucleoside modifications have been shown to make the oligonucleotide into which they are incorporated more resistant to nuclease digestion than the native oligodeoxynucleotide; these modified oligos survive intact for a longer time than unmodified oligonucleotides. Specific examples of modified oligonucleotides include those comprising modified backbones, for example, phosphorothioates, phosphotriesters, methyl phosphonates, short chain alkyl or cycloalkyl intersugar linkages or short chain heteroatomic or heterocyclic intersugar linkages. Most preferred are oligonucleotides with phosphorothioate backbones and those with heteroatom backbones, particularly CH₂—NH—O—CH₂, CH,˜N(CH₃)˜O˜CH₂ (known as a methylene(methylimino) or MMI backbone], CH₂—O—N(CH₃)—CH₂, CH₂—N(CH₃)—N(CH₃)—CH₂ and O—N(CH₃)—CH₂—CH₂ backbones, wherein the native phosphodiester backbone is represented as O—P—O—CH,); amide backbones (see De Mesmaeker et al. Ace. Chem. Res. 1995, 28:366-374); morpholino backbone structures (see Summerton and Weller, U.S. Pat. No. 5,034,506); peptide nucleic acid (PNA) backbone (wherein the phosphodiester backbone of the oligonucleotide is replaced with a polyamide backbone, the nucleotides being bound directly or indirectly to the aza nitrogen atoms of the polyamide backbone, see Nielsen et al., Science 1991, 254, 1497). Phosphorus-containing linkages include, but are not limited to, phosphorothioates, chiral phosphorothioates, phosphorodithioates, phosphotriesters, aminoalkylphosphotriesters, methyl and other alkyl phosphonates comprising 3′alkylene phosphonates and chiral phosphonates, phosphinates, phosphoramidates comprising 3′-amino phosphoramidate and aminoalkylphosphoramidates, thionophosphoramidates, thionoalkylphosphonates, thionoalkylphosphotriesters, and boranophosphates having normal 3′-5′ linkages, 2′-5′ linked analogs of these, and those having inverted polarity wherein the adjacent pairs of nucleoside units are linked 3′-5′ to 5′-3′ or 2′-5′ to 5′-2; see U.S. Pat. Nos. 3,687,808; 4,469,863; 4,476,301; 5,023,243; 5,177,196; 5,188,897; 5,264,423; 5,276,019; 5,278,302; 5,286,717; 5,321,131; 5,399,676; 5,405,939; 5,453,496; 5,455, 233; 5,466,677; 5,476,925; 5,519,126; 5,536,821; 5,541,306; 5,550,111; 5,563, 253; 5,571,799; 5,587,361; and 5,625,050.

[0131] Morpholino-based oligomeric compounds are described in Dwaine A. Braasch and David R. Corey, Biochemistry, 2002, 41(14), 4503-4510); Genesis, volume 30, issue 3, 2001; Heasman, J., Dev. Biol., 2002, 243, 209-214; Nasevicius et al., Nat. Genet., 2000, 26, 216-220; Lacerra et al., Proc. Natl. Acad. Sci., 2000, 97, 9591-9596; and U.S. Pat. No. 5,034,506, issued Jul. 23, 1991. In some embodiments, the morpholino-based oligomeric compound is a phosphorodiamidate morpholino oligomer (PMO) (e.g., as described in Iverson, Curr. Opin. Mol. Ther., 3:235-238, 2001; and Wang et al., J. Gene Med., 12:354-364, 2010; the disclosures of which are incorporated herein by reference in their entireties). Cyclohexenyl nucleic acid oligonucleotide mimetics are described in Wang et al., J. Am. Chem. Soc., 2000, 122, 8595-8602.

[0132] Modified oligonucleotide backbones that do not include a phosphorus atom therein have backbones that are formed by short chain alkyl or cycloalkyl internucleoside linkages, mixed heteroatom and alkyl or cycloalkyl internucleoside linkages, or one or more short chain heteroatomic or heterocyclic internucleoside linkages. These comprise those having morpholino linkages (formed in part from the sugar portion of a nucleoside); siloxane backbones; sulfide, sulfoxide and sulfone backbones; formacetyl and thioformacetyl backbones; methylene formacetyl and thioformacetyl backbones; alkene containing backbones; sulfamate backbones; methyleneimino and methylenehydrazino backbones; sulfonate and sulfonamide backbones; amide backbones; and others having mixed N, O, S and CH2 component parts; see U.S. Pat. Nos. 5,034,506; 5,166,315; 5,185,444; 5,214,134; 5,216,141; 5,235,033; 5,264, 562; 5, 264,564; 5,405,938; 5,434,257; 5,466,677; 5,470,967; 5,489,677; 5,541,307; 5,561,225; 5,596,086; 5,602,240; 5,610,289; 5,602,240; 5,608,046; 5,610,289; 5,618,704; 5,623,070; 5,663,312; 5,633,360; 5,677,437; and 5,677,439, each of which is herein incorporated by reference.

[0133] Modified oligonucleotides are also known that include oligonucleotides that are based on or constructed from arabinonucleotide or modified arabinonucleotide residues.

[0134] Arabinonucleosides are stereoisomers of ribonucleosides, differing only in the configuration at the 2′-position of the sugar ring. In some embodiments, a 2′-arabino modification is 2′-F arabino. In some embodiments, the modified oligonucleotide is 2′-fluoro-D-arabinonucleic acid (FANA) (as described in, for example, Lon et al., Biochem., 41:3457-3467, 2002 and Min et al., Bioorg. Med. Chem. Lett., 12:2651-2654, 2002; the disclosures of which are incorporated herein by reference in their entireties). Similar modifications can also be made at other positions on the sugar, particularly the 3′ position of the sugar on a 3′ terminal nucleoside or in 2′-5′ linked oligonucleotides and the 5′ position of 5′ terminal nucleotide. PCT Publication No. WO 99/67378 discloses arabinonucleic acids (ANA) oligomers and their analogues for improved sequence specific inhibition of gene expression via association to complementary messenger RNA.

[0135] Other preferred modifications include ethylene-bridged nucleic acids (ENAs) (e.g., International Patent Publication No. WO 2005/042777, Morita et al., Nucleic Acid Res., Suppl 1:241-242, 2001; Surono et al., Hum. Gene Ther., 15:749-757, 2004; Koizumi, Curr. Opin. Mol. Ther., 8:144-149, 2006 and Horie et al., Nucleic Acids Symp. Ser (Oxf), 49:171-172, 2005; the disclosures of which are incorporated herein by reference in their entireties). Preferred ENAs include, but are not limited to, 2′-0,4′-C-ethylene-bridged nucleic acids.

[0136] Examples of LNAs are described in WO 2008/043753 and WO2007031091 and include compounds of the following formula.

[chemical structure]

where X and Y are independently selected among the groups —O—, —S—, —N(H)—, N(R)—, —CH2- or —CH— (if part of a double bond), —CH₂—O—, —CH₂—S—, —CH₂—N(H)—, —CH₂—N(R)—, —CH₂—CH₂— or —CH₂—CH— (if part of a double bond), —CH═CH—, where R is selected from hydrogen and C₁₋₄-alkyl; Z and Z* are independently selected among an internucleoside linkage, a terminal group or a protecting group; B constitutes a natural or non-natural nucleotide base moiety; and the asymmetric groups may be found in either orientation.

[0137] Preferably, the LNA used in the oligomer of the invention comprises at least one LNA unit according any of the formulas

[chemical structure]

wherein Y is —O—, —S—, —NH—, or N(R^{H}); Z and Z* are independently selected among an internucleoside linkage, a terminal group or a protecting group; B constitutes a natural or non-natural nucleotide base moiety, and RH is selected from hydrogen and C₁₋₄-alkyl. Preferably, the Locked Nucleic Acid (LNA) used in an oligomeric compound, such as an antisense oligonucleotide, as described herein comprises at least one nucleotide comprises a Locked Nucleic Acid (LNA) unit according any of the formulas shown in Scheme 2 of PCT/DK2006/000512 (WO2007031091).

[0138] Preferably, the LNA used in the oligomer of the invention comprises internucleoside linkages selected from -0-P(O)₂—O—, —O—P(O,S)—O—, -0-P(S)₂—O—, —S—P(O)₂—O—, —S—P(O,S)—O—, —S—P(S)₂—O—, -0-P(O)₂—S—, —O—P(O,S)—S—, —S—P(O)₂—S—, —O—PO(R^{H})—O—, O—PO(OCH₃)—O—, —O—PO(NR^{H})—O—, -0-PO(OCH₂CH₂S—R)—O—, —O—PO(BH₃)—O—, —O—PO(NHR^{H})—O—, —O—P(O)₂—NR^{H}—, —NR^{H}—P(O)₂—O—, —NR^{H}—CO—O—, where R^{H} is selected from hydrogen and C₁₋₄-alkyl.

[0139] Specifically preferred LNA units are shown in scheme 3:

[chemical structure]

[0140] The term “thio-LNA” comprises a locked nucleotide in which at least one of X or Y in the general formula above is selected from S or —CH2-S—. Thio-LNA can be in both beta-D and alpha-L-configuration.

[0141] The term “amino-LNA” comprises a locked nucleotide in which at least one of X or Y in the general formula above is selected from —N(H)—, N(R)—, CH₂—N(H)—, and —CH₂—N(R)— where R is selected from hydrogen and C₁₋₄-alkyl Amino-LNA can be in both beta-D and alpha-L-configuration.

[0142] The term “oxy-LNA” comprises a locked nucleotide in which at least one of X or Y in the general formula above represents —O— or —CH₂—O—. Oxy-LNA can be in both beta-D and alpha-L-configuration.

[0143] The term “ena-LNA” comprises a locked nucleotide in which Y in the general formula above is —CH₂—O—(where the oxygen atom of —CH₂—O— is attached to the 2′-position relative to the base B).

[0144] LNAs are described in additional detail below. One or more substituted sugar moieties can also be included, e.g., one of the following at the 2′ position: OH, SH, SCH₃, F, OCN, OCH₃OCH₃, OCH₃O(CH₂)n CH₃, O(CH₂)n NH₂ or O(CH₂)n CH₃ where n is from 1 to about 10; C1 to C10 lower alkyl, alkoxyalkoxy, substituted lower alkyl, alkaryl or aralkyl; Cl; Br; CN; CF3; OCF3; O-, S-, or N-alkyl; O-, S-, or N-alkenyl; SOCH3; SO2 CH3; ONO2; NO2; N3; NH2; heterocycloalkyl; heterocycloalkaryl; aminoalkylamino; polyalkylamino; substituted silyl; an RNA cleaving group; a reporter group; an intercalator; a group for improving the pharmacokinetic properties of an oligonucleotide; or a group for improving the pharmacodynamic properties of an oligonucleotide and other substituents having similar properties. A preferred modification includes 2′-methoxyethoxy[2′-0-CH₂CH₂OCH₃, also known as 2′-O-(2-methoxyethyl)] (Martin et al, Helv. Chim. Acta, 1995, 78, 486). Other preferred modifications include 2′-methoxy (2′-0-CH₃), 2′-propoxy (2′-OCH₂CH₂CH₃) and 2′-fluoro (2′-F). Similar modifications may also be made at other positions on the oligonucleotide, particularly the 3′ position of the sugar on the 3′ terminal nucleotide and the 5′ position of 5′ terminal nucleotide. Oligonucleotides may also have sugar mimetics such as cyclobutyls in place of the pentofuranosyl group.

[0145] Inhibitory nucleic acids can also include, additionally or alternatively, nucleobase (often referred to in the art simply as “base”) modifications or substitutions. As used herein, “unmodified” or “natural” nucleobases include adenine (A), guanine (G), thymine (T), cytosine (C) and uracil (U). Modified nucleobases include nucleobases found only infrequently or transiently in natural nucleic acids, e.g., hypoxanthine, 6-methyladenine, 5-Me pyrimidines, particularly 5-methylcytosine (also referred to as 5-methyl-2′ deoxycytosine and often referred to in the art as 5-Me-C), 5-hydroxymethylcytosine (HMC), glycosyl HMC and gentobiosyl HMC, isocytosine, pseudoisocytosine, as well as synthetic nucleobases, e.g., 2-aminoadenine, 2-(methylamino)adenine, 2-(imidazolylalkyl)adenine, 2-(aminoalklyamino)adenine or other heterosubstituted alkyladenines, 2-thiouracil, 2-thiothymine, 5-bromouracil, 5-hydroxymethyluracil, 5-propynyluracil, 8-azaguanine, 7-deazaguanine, N6 (6-aminohexyl)adenine, 6-aminopurine, 2-aminopurine, 2-chloro-6-aminopurine and 2,6-diaminopurine or other diaminopurines. See, e.g., Kornberg, “DNA Replication,” W. H. Freeman & Co., San Francisco, 1980, pp 75-77; and Gebeyehu, G., et al. Nucl. Acids Res., 15:4513 (1987)). A “universal” base known in the art, e.g., inosine, can also be included. 5-Me-C substitutions have been shown to increase nucleic acid duplex stability by 0.6-1.2<0>C. (Sanghvi, in Crooke, and Lebleu, eds., Antisense Research and Applications, CRC Press, Boca Raton, 1993, pp. 276-278) and are presently preferred base substitutions.

[0146] It is not necessary for all positions in a given oligonucleotide to be uniformly modified, and in fact more than one of the modifications described herein may be incorporated in a single oligonucleotide or even at within a single nucleoside within an oligonucleotide.

[0147] In some embodiments, both a sugar and an internucleoside linkage, i.e., the backbone, of the nucleotide units are replaced with novel groups. The base units are maintained for hybridization with an appropriate nucleic acid target compound. One such oligomeric compound, an oligonucleotide mimetic that has been shown to have excellent hybridization properties, is referred to as a peptide nucleic acid (PNA). In PNA compounds, the sugar-backbone of an oligonucleotide is replaced with an amide containing backbone, for example, an aminoethylglycine backbone. The nucleobases are retained and are bound directly or indirectly to aza nitrogen atoms of the amide portion of the backbone. Representative United States patents that teach the preparation of PNA compounds include, but are not limited to, U.S. Pat. Nos. 5,539,082; 5,714,331; and 5,719,262, each of which is herein incorporated by reference. Further teaching of PNA compounds can be found in Nielsen et al, Science, 1991, 254, 1497-1500.

[0148] Inhibitory nucleic acids can also include one or more nucleobase (often referred to in the art simply as “base”) modifications or substitutions. As used herein, “unmodified” or “natural” nucleobases comprise the purine bases adenine (A) and guanine (G), and the pyrimidine bases thymine (T), cytosine (C) and uracil (U). Modified nucleobases comprise other synthetic and natural nucleobases such as 5-methylcytosine (5-me-C), 5-hydroxymethyl cytosine, xanthine, hypoxanthine, 2-aminoadenine, 6-methyl and other alkyl derivatives of adenine and guanine, 2-propyl and other alkyl derivatives of adenine and guanine, 2-thiouracil, 2-thiothymine and 2-thiocytosine, 5-halouracil and cytosine, 5-propynyl uracil and cytosine, 6-azo uracil, cytosine and thymine, 5-uracil (pseudo-uracil), 4-thiouracil, 8-halo, 8-amino, 8-thiol, 8-thioalkyl, 8-hydroxyl and other 8-substituted adenines and guanines, 5-halo particularly 5-bromo, 5-trifluoromethyl and other 5-substituted uracils and cytosines, 7-methylquanine and 7-methyladenine, 8-azaguanine and 8-azaadenine, 7-deazaguanine and 7-deazaadenine and 3-deazaguanine and 3-deazaadenine. Further, nucleobases comprise those disclosed in U.S. Pat. No. 3,687,808, those disclosed in “The Concise Encyclopedia of Polymer Science And Engineering”, pages 858-859, Kroschwitz, ed. John Wiley & Sons, 1990; those disclosed by Englisch et al., Angewandle Chemie, International Edition, 1991, 30, page 613, and those disclosed by Sanghvi, Chapter 15, Antisense Research and Applications,” pages 289-302, Crooke, and Lebleu, eds., CRC Press, 1993. Certain of these nucleobases are particularly useful for increasing the binding affinity of the oligomeric compounds of the invention. These include 5-substituted pyrimidines, 6-azapyrimidines and N-2, N-6 and 0-6 substituted purines, comprising 2-aminopropyladenine, 5-propynyluracil and 5-propynylcytosine. 5-methylcytosine substitutions have been shown to increase nucleic acid duplex stability by 0.6-1.2° C. (Sanghvi, et al., eds, “Antisense Research and Applications,” CRC Press, Boca Raton, 1993, pp. 276-278) and are presently preferred base substitutions, even more particularly when combined with 2′-O-methoxyethyl sugar modifications. Modified nucleobases are described in U.S. Pat. No. 3,687,808, as well as U.S. Pat. Nos. 4,845,205; 5,130,302; 5,134,066; 5,175,273; 5,367,066; 5,432,272; 5,457,187; 5,459,255; 5,484,908; 5,502,177; 5,525,711; 5,552,540; 5,587,469; 5,596,091; 5,614,617; 5,750,692, and 5,681,941, each of which is herein incorporated by reference.

[0149] In some embodiments, the inhibitory nucleic acids are chemically linked to one or more moieties or conjugates that enhance the activity, cellular distribution, or cellular uptake of the oligonucleotide. For example, one or more inhibitory nucleic acids, of the same or different types, can be conjugated to each other; or inhibitory nucleic acids can be conjugated to targeting moieties with enhanced specificity for a cell type or tissue type. Such moieties include, but are not limited to, lipid moieties such as a cholesterol moiety (Letsinger et al., Proc. Natl. Acad. Sci. USA, 1989, 86, 6553-6556), cholic acid (Manoharan et al., Bioorg. Med. Chem. Let., 1994, 4, 1053-1060), a thioether, e.g., hexyl-S-tritylthiol (Manoharan et al, Ann. N. Y. Acad. Sci., 1992, 660, 306-309; Manoharan et al., Bioorg. Med. Chem. Let., 1993, 3, 2765-2770), a thiocholesterol (Oberhauser et al., Nucl. Acids Res., 1992, 20, 533-538), an aliphatic chain, e.g., dodecandiol or undecyl residues (Kabanov et al., FEBS Lett., 1990, 259, 327-330; Svinarchuk et al., Biochimie, 1993, 75, 49-54), a phospholipid, e.g., di-hexadecyl-rac-glycerol or triethylammonium 1,2-di-O-hexadecyl-rac-glycero-3-H-phosphonate (Manoharan et al., Tetrahedron Lett., 1995, 36, 3651-3654; Shea et al., Nucl. Acids Res., 1990, 18, 3777-3783), a polyamine or a polyethylene glycol chain (Mancharan et al., Nucleosides & Nucleotides, 1995, 14, 969-973), or adamantane acetic acid (Manoharan et al., Tetrahedron Lett., 1995, 36, 3651-3654), a palmityl moiety (Mishra et al., Biochim. Biophys. Acta, 1995, 1264, 229-237), or an octadecylamine or hexylamino-carbonyl-t oxycholesterol moiety (Crooke et al., J. Pharmacol. Exp. Ther., 1996, 277, 923-937). See also U.S. Pat. Nos. 4,828,979; 4,948,882; 5,218,105; 5,525,465; 5,541,313; 5,545,730; 5,552, 538; 5,578,717, 5,580,731; 5,580,731; 5,591,584; 5,109,124; 5,118,802; 5,138,045; 5,414,077; 5,486, 603; 5,512,439; 5,578,718; 5,608,046; 4,587,044; 4,605,735; 4,667,025; 4,762, 779; 4,789,737; 4,824,941; 4,835,263; 4,876,335; 4,904,582; 4,958,013; 5,082, 830; 5,112,963; 5,214,136; 5,082,830; 5,112,963; 5,214,136; 5,245,022; 5,254,469; 5,258,506; 5,262,536; 5,272,250; 5,292,873; 5,317,098; 5,371,241, 5,391, 723; 5,416,203, 5,451,463; 5,510,475; 5,512,667; 5,514,785; 5, 565,552; 5,567,810; 5,574,142; 5,585,481; 5,587,371; 5,595,726; 5,597,696; 5,599,923; 5,599,928 and 5,688,941, each of which is herein incorporated by reference.

[0150] These moieties or conjugates can include conjugate groups covalently bound to functional groups such as primary or secondary hydroxyl groups. Conjugate groups of the invention include intercalators, reporter molecules, polyamines, polyamides, polyethylene glycols, polyethers, groups that enhance the pharmacodynamic properties of oligomers, and groups that enhance the pharmacokinetic properties of oligomers. Typical conjugate groups include cholesterols, lipids, phospholipids, biotin, phenazine, folate, phenanthridine, anthraquinone, acridine, fluoresceins, rhodamines, coumarins, and dyes. Groups that enhance the pharmacodynamic properties, in the context of this invention, include groups that improve uptake, enhance resistance to degradation, and/or strengthen sequence-specific hybridization with the target nucleic acid. Groups that enhance the pharmacokinetic properties, in the context of this invention, include groups that improve uptake, distribution, metabolism or excretion of the compounds of the present invention. Representative conjugate groups are disclosed in International Patent Application No. PCT/US92/09196, filed Oct. 23, 1992, and U.S. Pat. No. 6,287,860, which are incorporated herein by reference. Conjugate moieties include, but are not limited to, lipid moieties such as a cholesterol moiety, cholic acid, a thioether, e.g., hexyl-5-tritylthiol, a thiocholesterol, an aliphatic chain, e.g., dodecandiol or undecyl residues, a phospholipid, e.g., di-hexadecyl-rac-glycerol or triethylammonium 1,2-di-O-hexadecyl-rac-glycero-3-H-phosphonate, a polyamine or a polyethylene glycol chain, or adamantane acetic acid, a palmityl moiety, or an octadecylamine or hexylamino-carbonyl-oxy cholesterol moiety. See, e.g., U.S. Pat. Nos. 4,828,979; 4,948,882; 5,218,105; 5,525,465; 5,541,313; 5,545,730; 5,552,538; 5,578,717, 5,580,731; 5,580,731; 5,591,584; 5,109,124; 5,118,802; 5,138,045; 5,414,077; 5,486,603; 5,512,439; 5,578,718; 5,608,046; 4,587,044; 4,605,735; 4,667,025; 4,762,779; 4,789,737; 4,824,941; 4,835,263; 4,876,335; 4,904,582; 4,958,013; 5,082,830; 5,112,963; 5,214,136; 5,082,830; 5,112,963; 5,214,136; 5,245,022; 5,254,469; 5,258,506; 5,262,536; 5,272,250; 5,292,873; 5,317,098; 5,371,241, 5,391,723; 5,416,203, 5,451,463; 5,510,475; 5,512,667; 5,514,785; 5,565,552; 5,567,810; 5,574,142; 5,585,481; 5,587,371; 5,595,726; 5,597,696; 5,599,923; 5,599,928 and 5,688,941.

[0151] The inhibitory nucleic acids useful in the present methods are sufficiently complementary to the target a CTCF binding site, e.g., hybridize sufficiently well and with sufficient biological functional specificity, to give the desired effect. “Complementary” refers to the capacity for pairing, through base stacking and specific hydrogen bonding, between two sequences comprising naturally or non-naturally occurring (e.g., modified as described above) bases (nucleosides) or analogs thereof. For example, if a base at one position of an inhibitory nucleic acid is capable of hydrogen bonding with a base at the corresponding position of a CTCF binding site, then the bases are considered to be complementary to each other at that position. 100% complementarity is not required. As noted above, inhibitory nucleic acids can comprise universal bases, or inert abasic spacers that provide no positive or negative contribution to hydrogen bonding. Base pairings may include both canonical Watson-Crick base pairing and non-Watson-Crick base pairing (e.g., Wobble base pairing and Hoogsteen base pairing). It is understood that for complementary base pairings, adenosine-type bases (A) are complementary to thymidine-type bases (T) or uracil-type bases (U), that cytosine-type bases (C) are complementary to guanosine-type bases (G), and that universal bases such as such as 3-nitropyrrole or 5-nitroindole can hybridize to and are considered complementary to any A, C, U, or T. Nichols et al., Nature, 1994; 369:492-493 and Loakes et al., Nucleic Acids Res., 1994; 22:4039-4043. Inosine (I) has also been considered in the art to be a universal base and is considered complementary to any A, C, U, or T. See Watkins and SantaLucia, Nucl. Acids Research, 2005; 33 (19): 6258-6267. In some embodiments, the location on a target CTCF binding site to which an inhibitory nucleic acid hybridizes is a region to which a protein binding partner binds. The identification of these binding sites is described in the Examples below. Routine methods can be used to design an inhibitory nucleic acid that binds to a selected strong or moderate binding site sequence with sufficient specificity. In some embodiments, the methods include using bioinformatics methods known in the art to identify regions of secondary structure, e.g., one, two, or more stem-loop structures, or pseudoknots, and selecting those regions to target with an inhibitory nucleic acid. For example, methods of designing oligonucleotides similar to the inhibitory nucleic acids described herein, and various options for modified chemistries or formats, are exemplified in Lennox and Behlke, Gene Therapy (2011) 18: 1111-1120, which is incorporated herein by reference in its entirety, with the understanding that the inhibitory oligonucleotides of the present disclosure do not target miRNA ‘seed regions’.

[0152] While the specific sequences of certain exemplary target segments are set forth herein, one of skill in the art will recognize that these serve to illustrate and describe particular embodiments within the scope of the present invention. Additional target segments are readily identifiable by one having ordinary skill in the art in view of this disclosure. Target segments 5-500 nucleotides in length comprising a stretch of at least five (5) consecutive nucleotides within the protein binding region, or immediately adjacent thereto, are considered to be suitable for targeting as well. Target segments can include sequences that comprise at least the 5 consecutive nucleotides from the 5′-terminus of one of the protein binding regions (the remaining nucleotides being a consecutive stretch of the same RNA beginning immediately upstream of the 5′-terminus of the binding segment and continuing until the inhibitory nucleic acid contains about 5 to about 100 nucleotides). Similarly preferred target segments are represented by RNA sequences that comprise at least the 5 consecutive nucleotides from the 3′-terminus of one of the illustrative preferred target segments (the remaining nucleotides being a consecutive stretch of the same CTCF binding site beginning immediately downstream of the 3′-terminus of the target segment and continuing until the inhibitory nucleic acid contains about 5 to about 100 nucleotides). One having skill in the art armed with the sequences provided herein will be able, without undue experimentation, to identify further preferred protein binding regions to target with complementary inhibitory nucleic acids.

[0153] In the context of the present disclosure, hybridization means base stacking and hydrogen bonding, which may be Watson-Crick, Hoogsteen or reversed Hoogsteen hydrogen bonding, between complementary nucleoside or nucleotide bases. For example, adenine and thymine are complementary nucleobases which pair through the formation of hydrogen bonds. Complementary, as the term is used in the art, refers to the capacity for precise pairing between two nucleotides. For example, if a nucleotide at a certain position of an oligonucleotide is capable of hydrogen bonding with a nucleotide at the same position of a CTCF binding site molecule, then the inhibitory nucleic acid and the CTCF binding site are considered to be complementary to each other at that position. The inhibitory nucleic acids and the CTCF binding site are complementary to each other when a sufficient number of corresponding positions in each molecule are occupied by nucleotides that can hydrogen bond with each other through their bases. Thus, “specifically hybridizable” and “complementary” are terms which are used to indicate a sufficient degree of complementarity or precise pairing such that stable and specific binding occurs between the inhibitory nucleic acid and the CTCF binding site target. For example, if a base at one position of an inhibitory nucleic acid is capable of hydrogen bonding with a base at the corresponding position of a CTCF binding site, then the bases are considered to be complementary to each other at that position. 100% complementarity is not required. It is understood in the art that a complementary nucleic acid sequence need not be 100% complementary to that of its target nucleic acid to be specifically hybridizable. A complementary nucleic acid sequence for purposes of the present methods is specifically hybridizable when binding of the sequence to the target CTCF binding site molecule interferes with the normal function of the target CTCF binding site to cause a loss of activity (e.g., inhibiting CTCF-associated repression with consequent up-regulation of gene expression) and there is a sufficient degree of complementarity to avoid non-specific binding of the sequence to non-target CTCF binding site sequences under conditions in which avoidance of the non-specific binding is desired, e.g., under physiological conditions in the case of in vivo assays or therapeutic treatment, and in the case of in vitro assays, under conditions in which the assays are performed under suitable conditions of stringency. For example, stringent salt concentration will ordinarily be less than about 750 mM NaCl and 75 mM trisodium citrate, preferably less than about 500 mM NaCl and 50 mM trisodium citrate, and more preferably less than about 250 mM NaCl and 25 mM trisodium citrate. Low stringency hybridization can be obtained in the absence of organic solvent, e.g., formamide, while high stringency hybridization can be obtained in the presence of at least about 35% formamide, and more preferably at least about 50% formamide. Stringent temperature conditions will ordinarily include temperatures of at least about 30° C., more preferably of at least about 37° C., and most preferably of at least about 42° C. Varying additional parameters, such as hybridization time, the concentration of detergent, e.g., sodium dodecyl sulfate (SDS), and the inclusion or exclusion of carrier DNA, are well known to those skilled in the art. Various levels of stringency are accomplished by combining these various conditions as needed. In a preferred embodiment, hybridization will occur at 30° C. in 750 mM NaCl, 75 mM trisodium citrate, and 1% SDS. In a more preferred embodiment, hybridization will occur at 37° C. in 500 mM NaCl, 50 mM trisodium citrate, 1% SDS, 35% formamide, and 100 μg/ml denatured salmon sperm DNA (ssDNA). In a most preferred embodiment, hybridization will occur at 42° C. in 250 mM NaCl, 25 mM trisodium citrate, 1% SDS, 50% formamide, and 200 μg/ml ssDNA. Useful variations on these conditions will be readily apparent to those skilled in the art.

[0154] For most applications, washing steps that follow hybridization will also vary in stringency. Wash stringency conditions can be defined by salt concentration and by temperature. As above, wash stringency can be increased by decreasing salt concentration or by increasing temperature. For example, stringent salt concentration for the wash steps will preferably be less than about 30 mM NaCl and 3 mM trisodium citrate, and most preferably less than about 15 mM NaCl and 1.5 mM trisodium citrate. Stringent temperature conditions for the wash steps will ordinarily include a temperature of at least about 25° C., more preferably of at least about 42° C., and even more preferably of at least about 68° C. In a preferred embodiment, wash steps will occur at 25° C. in 30 mM NaCl, 3 mM trisodium citrate, and 0.1% SDS. In a more preferred embodiment, wash steps will occur at 42° C. in 15 mM NaCl, 1.5 mM trisodium citrate, and 0.1% SDS. In a more preferred embodiment, wash steps will occur at 68° C. in 15 mM NaCl, 1.5 mM trisodium citrate, and 0.1% SDS. Additional variations on these conditions will be readily apparent to those skilled in the art. Hybridization techniques are well known to those skilled in the art and are described, for example, in Benton and Davis (Science 196:180, 1977); Grunstein and Hogness (Proc. Natl. Acad. Sci., USA 72:3961, 1975); Ausubel et al. (Current Protocols in Molecular Biology, Wiley Interscience, New York, 2001); Berger and Kimmel (Guide to Molecular Cloning Techniques, 1987, Academic Press, New York); and Sambrook et al., Molecular Cloning: A Laboratory Manual, Cold Spring Harbor Laboratory Press, New York.

[0155] In general, the inhibitory nucleic acids useful in the methods described herein have at least 80% sequence complementarity to a target region within the target nucleic acid, e.g., 90%, 95%, or 100% sequence complementarity to the target region within a CTCF binding site. For example, an antisense compound in which 18 of 20 nucleobases of the antisense oligonucleotide are complementary, and would therefore specifically hybridize, to a target region would represent 90 percent complementarity. Percent complementarity of an inhibitory nucleic acid with a region of a target nucleic acid can be determined routinely using basic local alignment search tools (BLAST programs) (Altschul et al., J. Mol. Biol., 1990, 215, 403-410; Zhang and Madden, Genome Res., 1997, 7, 649-656). Antisense and other compounds of the invention that hybridize to a CTCF binding site are identified through routine experimentation. In general the inhibitory nucleic acids must retain specificity for their target, i.e., either do not directly bind to, or do not directly significantly affect expression levels of, transcripts other than the intended target.

[0156] Target-specific effects, with corresponding target-specific functional biological effects, are possible even when the inhibitory nucleic acid exhibits non-specific binding to a large number of non-target RNAs. For example, short 8 base long inhibitory nucleic acids that are fully complementary to a CTCF binding site may have multiple 100% matches to hundreds of sequences in the genome, yet may produce target-specific effects, e.g. upregulation of a specific target gene through inhibition of CTCF activity. 8-base inhibitory nucleic acids have been reported to prevent exon skipping with with a high degree of specificity and reduced off-target effect. See Singh et al., RNA Biol., 2009; 6(3): 341-350. 8-base inhibitory nucleic acids have been reported to interfere with miRNA activity without significant off-target effects. See Obad et al., Nature Genetics, 2011; 43: 371-378. For further disclosure regarding inhibitory nucleic acids, please see US2010/0317718 (antisense oligos); US2010/0249052 (double-stranded ribonucleic acid (dsRNA)); US2009/0181914 and US2010/0234451 (LNA molecules); US2007/0191294 (siRNA analogues); US2008/0249039 (modified siRNA); and WO2010/129746 and WO2010/040112 (inhibitory nucleic acids).

### Antisense

[0157] In some embodiments, the inhibitory nucleic acids are antisense oligonucleotides. Antisense oligonucleotides are typically designed to block expression of a DNA or RNA target by binding to the target and halting expression at the level of transcription, translation, or splicing. Antisense oligonucleotides of the present invention are complementary nucleic acid sequences designed to hybridize under stringent conditions to a CTCF binding site in vitro, and are expected to inhibit the activity of CTCF in vivo. Thus, oligonucleotides are chosen that are sufficiently complementary to the target, i.e., that hybridize sufficiently well and with sufficient biological functional specificity, to give the desired effect.

### Modified Bases, Including Locked Nucleic Acids (LNAs)

[0158] In some embodiments, the inhibitory nucleic acids used in the methods described herein comprise one or more modified bonds or bases. Modified bases include phosphorothioate, methylphosphonate, peptide nucleic acids, or locked nucleic acids (LNAs). Preferably, the modified nucleotides are part of locked nucleic acid molecules, including [alpha]-L-LNAs. LNAs include ribonucleic acid analogues wherein the ribose ring is “locked” by a methylene bridge between the 2′-oxygen and the 4′-carbon—i.e., oligonucleotides containing at least one LNA monomer, that is, one 2′-O,4′-C-methylene-β-D-ribofuranosyl nucleotide. LNA bases form standard Watson-Crick base pairs but the locked configuration increases the rate and stability of the basepairing reaction (Jepsen et al., Oligonucleotides, 14, 130-146 (2004)). LNAs also have increased affinity to base pair with RNA as compared to DNA. These properties render LNAs especially useful as probes for fluorescence in situ hybridization (FISH) and comparative genomic hybridization, as knockdown tools for miRNAs, and as antisense oligonucleotides to target mRNAs or other RNAs, e.g., CTCF binding sites as described herein.

[0159] The modified base/LNA molecules can include molecules comprising, e.g., 10-30, e.g., 12-24, e.g., 12, 13, 14, 15, 16, 17, 18, 19, 20, 21, 22, 23, 24, 25, 26, 27, 28, 29, or 30 nucleotides in each strand, wherein one of the strands is substantially identical, e.g., at least 80% (or more, e.g., 85%, 90%, 95%, or 100%) identical, e.g., having 3, 2, 1, or 0 mismatched nucleotide(s), to a target region in the CTCF binding site. The modified base/LNA molecules can be chemically synthesized using methods known in the art. The modified base/LNA molecules can be designed using any method known in the art; a number of algorithms are known, and are commercially available (e.g., on the internet, for example at exiqon.com). See, e.g., You et al., Nuc. Acids. Res. 34:e60 (2006); McTigue et al., Biochemistry 43:5388-405 (2004); and Levin et al., Nuc. Acids. Res. 34:e142 (2006). For example, “gene walk” methods, similar to those used to design antisense oligos, can be used to optimize the inhibitory activity of a modified base/LNA molecule; for example, a series of oligonucleotides of 10-30 nucleotides spanning the length of a target CTCF binding site can be prepared, followed by testing for activity. Optionally, gaps, e.g., of 5-10 nucleotides or more, can be left between the LNAs to reduce the number of oligonucleotides synthesized and tested. GC content is preferably between about 30-60%. General guidelines for designing modified base/LNA molecules are known in the art; for example, LNA sequences will bind very tightly to other LNA sequences, so it is preferable to avoid significant complementarity within an LNA molecule. Contiguous runs of three or more Gs or Cs, or more than four LNA residues, should be avoided where possible (for example, it may not be possible with very short (e.g., about 9-10 nt) oligonucleotides). In some embodiments, the LNAs are xylo-LNAs.

[0160] In some embodiments, the modified base/LNA molecules can be designed to target a specific region of the CTCF binding site. For example, a specific functional region can be targeted, e.g., a region comprising a known RNA localization motif (i.e., a region complementary to the target nucleic acid on which the CTCF binding site acts), or a region comprising a known protein binding region, e.g., a CTCF binding region. Sarma et al., “Locked nucleic acids (LNAs) reveal sequence requirements and kinetics of Xist RNA localization to the X chromosome.” PNAS published ahead of print Dec. 6, 2010, doi:10.1073/pnas.1009785107. Alternatively or in addition, highly conserved regions can be targeted, e.g., regions identified by aligning sequences from disparate species such as primate (e.g., human) and rodent (e.g., mouse) and looking for regions with high degrees of identity. Percent identity can be determined routinely using basic local alignment search tools (BLAST programs) (Altschul et al., J. Mol. Biol., 1990, 215, 403-410; Zhang and Madden, Genome Res., 1997, 7, 649-656), e.g., using the default parameters.

[0161] For additional information regarding LNA molecules see U.S. Pat. Nos. 6,268,490; 6,734,291; 6,770,748; 6,794,499; 7,034,133; 7,053,207; 7,060,809; 7,084,125; and 7,572,582; and U.S. Pre-Grant Pub. Nos. 20100267018; 20100261175; and 20100035968; Koshkin et al. Tetrahedron 54, 3607-3630 (1998); Obika et al. Tetrahedron Lett. 39, 5401-5404 (1998); Jepsen et al., Oligonucleotides 14:130-146 (2004); Kauppinen et al., Drug Disc. Today 2(3):287-290 (2005); and Ponting et al., Cell 136(4):629-641 (2009), and references cited therein.

[0162] As demonstrated herein, LNA molecules can be used as a valuable tool to manipulate and aid analysis of long nuclear ncRNAs. Advantages offered by an LNA molecule-based system are the relatively low costs, easy delivery, and rapid action. While other inhibitory nucleic acids may exhibit effects after longer periods of time, LNA molecules exhibit effects that are more rapid, e.g., a comparatively early onset of activity, are fully reversible after a recovery period following the synthesis of new CTCF binding site, and occur without causing substantial or substantially complete RNA cleavage or degradation. One or more of these design properties may be desired properties of the inhibitory nucleic acids of the invention. Additionally, LNA molecules make possible the systematic targeting of domains within much longer nuclear transcripts. Although a PNA-based system has been described earlier, the effects on Xi were apparent only after 24 hours (Beletskii et al., Proc Natl Acad Sci USA 98:9215-9220 (2001)). The LNA technology enables high-throughput screens for functional analysis of long non-coding RNAs and also provides a novel tool to manipulate chromatin states in vivo for therapeutic applications.

[0163] In various related aspects, the methods described herein include using LNA molecules to target CTCF binding sites for a number of uses, including as a research tool to probe the function of a specific CTCF binding site, e.g., in vitro or in vivo. The methods include selecting one or more desired CTCF binding sites, designing one or more LNA molecules that target the CTCF binding site, providing the designed LNA molecule, and administering the LNA molecule to a cell or animal. The methods can optionally include selecting a region of the CTCF binding site and designing one or more LNA molecules that target that region of the CTCF binding site.

[0164] Aberrant imprinted gene expression is implicated in several diseases including Long QT syndrome, Beckwith-Wiedemann, Prader-Willi, and Angelman syndromes, as well as behavioral disorders and carcinogenesis (see, e.g., Falls et al., Am. J. Pathol. 154:635-647 (1999); Lalande, Annu Rev Genet 30:173-195 (1996); Hall Annu Rev Med. 48:35-44 (1997)). LNA molecules can be created to treat such imprinted diseases. As one example, the long QT Syndrome can be caused by a K+gated Calcium-channel encoded by Kcnq1. This gene is regulated by its antisense counterpart, the long noncoding RNA, Kcnq1ot1 (Pandey et al., Mol Cell. 2008 Oct. 24; 32(2):232-46). Disease arises when Kcnq1ot1 is aberrantly expressed. LNA molecules can be created to downregulate Kcnq1ot1, thereby restoring expression of Kcnq1. As another example, LNA molecules could inhibit caRNA binding to CTCF to reverse the imprinted defect.

[0165] From a commercial and clinical perspective, the timepoints between about 1 to 24 hours potentially define a window for epigenetic reprogramming. The advantage of the LNA system is that it works quickly, with a defined half-life, and is therefore reversible upon degradation of LNAs, at the same time that it provides a discrete timeframe during which epigenetic manipulations can be made. By targeting nuclear long ncRNAs, LNA molecules or similar polymers, e.g., xylo-LNAs, might be utilized to manipulate the chromatin state of cells in culture or in vivo, by transiently eliminating the regulatory RNA and associated proteins long enough to alter the underlying locus for therapeutic purposes. In particular, LNA molecules or similar polymers that specifically bind to, or are complementary to, CTCF binding sites can prevent recruitment of CTCF to a specific chromosomal locus, in a gene-specific fashion.

[0166] LNA molecules might also be administered in vivo to treat other human diseases, such as but not limited to cancer, neurological disorders, infections, inflammation, and myotonic dystrophy. For example, LNA molecules might be delivered to tumor cells to downregulate the biologic activity of a growth-promoting or oncogenic long nuclear ncRNA (e.g., Gtl2 or MALAT1 (Luo et al., Hepatology. 44(4):1012-24 (2006)), a lncRNA associated with metastasis and is frequently upregulated in cancers). Repressive caRNAs downregulating tumor suppressors can also be targeted by LNA molecules to promote reexpression. For example, expression of the INK4b/ARF/INK4a tumor suppressor locus is controlled by Polycomb group proteins including PRC1 and PRC2 and repressed by the antisense noncoding RNA ANRIL (Yap et al., Mol Cell. 2010 Jun. 11; 38(5):662-74). ANRIL can be targeted by LNA molecules to promote reexpression of the INK4b/ARF/INK4a tumor suppressor. Some CTCF binding sites may be associated with caRNAs that are positive regulators of oncogenes. Such “activating caRNAs” have been described recently (e.g., Jpx (Tian et al., Cell. 143(3):390-403 (2010) and others (Ørom et al., Cell. 143(1):46-58 (2010)). Therefore, LNA molecules could be directed at these activating CTCF binding sites to downregulate oncogenes. LNA molecules could also be delivered to inflammatory cells to downregulate regulatory caRNA that modulate the inflammatory or immune response. (e.g., LincRNA-Cox2, see Guttman et al., Nature. 458(7235):223-7. Epub 2009 February 1 (2009)).

[0167] In still other related aspects, the LNA molecules targeting CTCF binding sites described herein can be used to create animal or cell models of conditions associated with altered gene expression (e.g., as a result of altered epigenetics).

[0168] For example, it was first noticed about half a century ago that X chromosome changes are often seen in female reproductive cancers. Some 70% of breast carcinomas lack a ‘Barr body’, the cytologic hallmark of the inactive X chromosome (Xi), and instead harbor two or more active Xs (Xa). Additional X's are also a risk factor for men, as XXY men (Klinefelter Syndrome) have a 20- to 50-fold increased risk of breast cancer in a BRCA1 background. The X is also known to harbor a number of oncogenes. Supernumerary Xa's correlate with a poor prognosis and stand as one of the most common cytogenetic abnormalities not only in reproductive cancers but also in leukemias, lymphomas, and germ cell tumors of both sexes. See, e.g., Liao et al., Cancer Invest 21, 641-58 (2003); Spatz et al., Nat Rev Cancer 4, 617-29 (2004); Barr et al., Proc Can Cancer Conf 2, 3-16 (1957); Borah et al., J Surg Oncol 13, 1-7 (1980); Camargo and Wang, Hum Genet 55, 81-5 (1980); Dutrillaux et al., Int J Cancer 38, 475-9 (1986); Ghosh and Shah, Cancer Genet Cytogenet 4, 269-74 (1981); Ghosh and Shah, Med Hypotheses 7, 1099-104 (1981); Ghosh et al., Acta Cytol 27, 202-3 (1983); Huang et al., Mol Cancer Ther 1, 769-76 (2002); Kawakami et al., Lancet 363, 40-2 (2004); Kawakami et al., J Urol 169, 1546-52 (2003); Kawakami et al., Oncogene 23, 6163-9 (2004); Moore and Barr, Br J Cancer 9, 246-52 (1955); Moore and Barr, Br J Cancer 11, 384-90 (1957); Moore et al., J Exp Zool 135, 101-25 (1957); Rosen et al., Ann Clin Lab Sci 7, 491-9 (1977); Sirchia et al., Cancer Res 65, 2139-46 (2005); Tavares, Lancet 268, 948-9 (1955); Tavares, Medico (Porto) 12, 97-100 (1961); Tavares, Acta Cytol 6, 90-4 (1962); Wang et al., Cancer Genet Cytogenet 46, 271-80 (1990); and Ganesan et al., Cold Spring Harb Symp Quant Biol 70, 93-7 (2005).

[0169] See also PCT/US11/60493, which is incorporated by reference herein in its entirety.

### Antagomirs

[0170] In some embodiments, the inhibitory nucleic acid is an antagomir. Antagomirs are chemically modified antisense oligonucleotides that can target a CTCF binding site. For example, an antagomir for use in the methods described herein can include a nucleotide sequence sufficiently complementary to hybridize to a CTCF binding site target sequence of about 12 to 25 nucleotides, preferably about 15 to 23 nucleotides.

[0171] In some embodiments, antagomirs include a cholesterol moiety, e.g., at the 3′-end. In some embodiments, antagomirs have various modifications for RNase protection and pharmacologic properties such as enhanced tissue and cellular uptake. For example, in addition to the modifications discussed above for antisense oligos, an antagomir can have one or more of complete or partial 2′-O-methylation of sugar and/or a phosphorothioate backbone. Phosphorothioate modifications provide protection against RNase or other nuclease activity and their lipophilicity contributes to enhanced tissue uptake. In some embodiments, the antagomir cam include six phosphorothioate backbone modifications; two phosphorothioates are located at the 5′-end and four at the 3′-end, but other patterns of phosphorothioate modification are also commonly employed and effective. See, e.g., Krutzfeldt et al., Nature 438, 685-689 (2005); Czech, N Engl J Med 2006; 354:1194-1195 (2006); Robertson et al., Silence. 1:10 (2010); Marquez and McCaffrey, Hum Gene Ther. 19(1):27-38 (2008); van Rooij et al., Circ Res. 103(9):919-928 (2008); and Liu et al., Int. J. Mol. Sci. 9:978-999 (2008). Krutzfeld et al. (2005) describe chemically engineered oligonucleotides, termed ‘antagomirs’, that are reported to be efficient and specific silencers of endogenous miRNAs in mice.

[0172] In general, the design of an antagomir avoids target RNA degradation due to the modified sugars present in the molecule. The presence of an unbroken string of unmodified sugars supports RNAseH recruitment and enzymatic activity. Thus, typically the design of an antagomir will include bases that contain modified sugar (e.g., LNA), at the ends or interspersed with natural ribose or deoxyribose nucleobases.

[0173] Antagomirs useful in the present methods can also be modified with respect to their length or otherwise the number of nucleotides making up the antagomir. In some embodiments, the antagomirs must retain specificity for their target, i.e., must not directly bind to, or directly significantly affect expression levels of, transcripts other than the intended target. In some embodiments, antagomirs may exhibit nonspecific binding that does not produce significant undesired biologic effect, e.g., the antagomirs do not affect expression levels of non-target transcripts or their association with regulatory proteins or regulatory RNAs.

Interfering RNA, Including siRNA/shRNA

[0174] In some embodiments, the inhibitory nucleic acid sequence that is complementary to a CTCF binding site can be an interfering RNA, including but not limited to a small interfering RNA (“siRNA”) or a small hairpin RNA (“shRNA”). Methods for constructing interfering RNAs are well known in the art. For example, the interfering RNA can be assembled from two separate oligonucleotides, where one strand is the sense strand and the other is the antisense strand, wherein the antisense and sense strands are self-complementary (i.e., each strand comprises nucleotide sequence that is complementary to nucleotide sequence in the other strand; such as where the antisense strand and sense strand form a duplex or double stranded structure); the antisense strand comprises nucleotide sequence that is complementary to a nucleotide sequence in a target nucleic acid molecule or a portion thereof (i.e., an undesired gene) and the sense strand comprises nucleotide sequence corresponding to the target nucleic acid sequence or a portion thereof. Alternatively, interfering RNA is assembled from a single oligonucleotide, where the self-complementary sense and antisense regions are linked by means of nucleic acid based or non-nucleic acid-based linker(s). The interfering RNA can be a polynucleotide with a duplex, asymmetric duplex, hairpin or asymmetric hairpin secondary structure, having self-complementary sense and antisense regions, wherein the antisense region comprises a nucleotide sequence that is complementary to nucleotide sequence in a separate target nucleic acid molecule or a portion thereof and the sense region having nucleotide sequence corresponding to the target nucleic acid sequence or a portion thereof. The interfering can be a circular single-stranded polynucleotide having two or more loop structures and a stem comprising self-complementary sense and antisense regions, wherein the antisense region comprises nucleotide sequence that is complementary to nucleotide sequence in a target nucleic acid molecule or a portion thereof and the sense region having nucleotide sequence corresponding to the target nucleic acid sequence or a portion thereof, and wherein the circular polynucleotide can be processed either in vivo or in vitro to generate an active siRNA molecule capable of mediating RNA interference.

[0175] In some embodiments, the interfering RNA coding region encodes a self-complementary RNA molecule having a sense region, an antisense region and a loop region. Such an RNA molecule when expressed desirably forms a “hairpin” structure, and is referred to herein as an “shRNA.” The loop region is generally between about 2 and about 10 nucleotides in length. In some embodiments, the loop region is from about 6 to about 9 nucleotides in length. In some embodiments, the sense region and the antisense region are between about 15 and about 20 nucleotides in length. Following post-transcriptional processing, the small hairpin RNA is converted into a siRNA by a cleavage event mediated by the enzyme Dicer, which is a member of the RNase III family. The siRNA is then capable of inhibiting the expression of a gene with which it shares homology. For details, see Brummelkamp et al., Science 296:550-553, (2002); Lee et al, Nature Biotechnol., 20, 500-505, (2002); Miyagishi and Taira, Nature Biotechnol 20:497-500, (2002); Paddison et al. Genes & Dev. 16:948-958, (2002); Paul, Nature Biotechnol, 20, 505-508, (2002); Sui, Proc. Natl. Acad. Sd. USA, 99(6), 5515-5520, (2002); Yu et al. Proc NatlAcadSci USA 99:6047-6052, (2002).

[0176] The target RNA cleavage reaction guided by siRNAs is highly sequence specific. In general, siRNA containing a nucleotide sequences identical to a portion of the target nucleic acid are preferred for inhibition. However, 100% sequence identity between the siRNA and the target gene is not required to practice the present invention. Thus the invention has the advantage of being able to tolerate sequence variations that might be expected due to genetic mutation, strain polymorphism, or evolutionary divergence. For example, siRNA sequences with insertions, deletions, and single point mutations relative to the target sequence have also been found to be effective for inhibition. Alternatively, siRNA sequences with nucleotide analog substitutions or insertions can be effective for inhibition.

[0177] In general the siRNAs must retain specificity for their target, i.e., must not directly bind to, or directly significantly affect expression levels of, transcripts other than the intended target.

### Ribozymes

[0178] In some embodiments, the inhibitory nucleic acids are ribozymes. Trans-cleaving enzymatic nucleic acid molecules can also be used; they have shown promise as therapeutic agents for human disease (Usman & McSwiggen, 1995 Ann. Rep. Med. Chem. 30, 285-294; Christoffersen and Marr, 1995 J. Med. Chem. 38, 2023-2037). Enzymatic nucleic acid molecules can be designed to cleave specific caRNA targets within the background of cellular RNA. Such a cleavage event renders the caRNA non-functional.

[0179] In general, enzymatic nucleic acids with RNA cleaving activity act by first binding to a target RNA. Such binding occurs through the target binding portion of an enzymatic nucleic acid which is held in close proximity to an enzymatic portion of the molecule that acts to cleave the target RNA. Thus, the enzymatic nucleic acid first recognizes and then binds a target RNA through complementary base pairing, and once bound to the correct site, acts enzymatically to cut the target RNA. Strategic cleavage of such a target RNA will destroy its ability to direct synthesis of an encoded protein. After an enzymatic nucleic acid has bound and cleaved its RNA target, it is released from that RNA to search for another target and can repeatedly bind and cleave new targets.

[0180] Several approaches such as in vitro selection (evolution) strategies (Orgel, 1979, Proc. R. Soc. London, B 205, 435) have been used to evolve new nucleic acid catalysts capable of catalyzing a variety of reactions, such as cleavage and ligation of phosphodiester linkages and amide linkages, (Joyce, 1989, Gene, 82, 83-87; Beaudry et al., 1992, Science 257, 635-641; Joyce, 1992, Scientific American 267, 90-97; Breaker et al, 1994, TIBTECH 12, 268; Bartel et al, 1993, Science 261:1411-1418; Szostak, 1993, TIBS 17, 89-93; Kumar et al, 1995, FASEB J., 9, 1183; Breaker, 1996, Curr. Op. Biotech., 1, 442). The development of ribozymes that are optimal for catalytic activity would contribute significantly to any strategy that employs RNA-cleaving ribozymes for the purpose of regulating gene expression. The hammerhead ribozyme, for example, functions with a catalytic rate (kcat) of about 1 min⁻¹ in the presence of saturating (10 MM) concentrations of Mg²⁺ cofactor. An artificial “RNA ligase” ribozyme has been shown to catalyze the corresponding self-modification reaction with a rate of about 100 min⁻¹. In addition, it is known that certain modified hammerhead ribozymes that have substrate binding arms made of DNA catalyze RNA cleavage with multiple turn-over rates that approach 100 min⁻¹.

### Making and Using Inhibitory Nucleic Acids

[0181] The nucleic acid sequences used to practice the methods described herein, whether RNA, cDNA, genomic DNA, vectors, viruses or hybrids thereof, can be isolated from a variety of sources, genetically engineered, amplified, and/or expressed/generated recombinantly. If desired, nucleic acid sequences of the invention can be inserted into delivery vectors and expressed from transcription units within the vectors. The recombinant vectors can be DNA plasmids or viral vectors. Generation of the vector construct can be accomplished using any suitable genetic engineering techniques well known in the art, including, without limitation, the standard techniques of PCR, oligonucleotide synthesis, restriction endonuclease digestion, ligation, transformation, plasmid purification, and DNA sequencing, for example as described in Sambrook et al. Molecular Cloning: A Laboratory Manual. (1989)), Coffin et al. (Retroviruses. (1997)) and “RNA Viruses: A Practical Approach” (Alan J. Cann, Ed., Oxford University Press, (2000)).

[0182] Preferably, inhibitory nucleic acids of the invention are synthesized chemically. Nucleic acid sequences used to practice this invention can be synthesized in vitro by well-known chemical synthesis techniques, as described in, e.g., Adams (1983) J. Am. Chem. Soc. 105:661; Belousov (1997) Nucleic Acids Res. 25:3440-3444; Frenkel (1995) Free Radic. Biol. Med. 19:373-380; Blommers (1994) Biochemistry 33:7886-7896; Narang (1979) Meth. Enzymol. 68:90; Brown (1979) Meth. Enzymol. 68:109; Beaucage (1981) Tetra. Lett. 22:1859; U.S. Pat. No. 4,458,066; WO/2008/043753 and WO/2008/049085, and the references cited therein.

[0183] Nucleic acid sequences of the invention can be stabilized against nucleolytic degradation such as by the incorporation of a modification, e.g., a nucleotide modification. For example, nucleic acid sequences of the invention includes a phosphorothioate at least the first, second, or third internucleotide linkage at the 5′ or 3′ end of the nucleotide sequence. As another example, the nucleic acid sequence can include a 2′-modified nucleotide, e.g., a 2′-deoxy, 2′-deoxy-2′-fluoro, 2′-O-methyl, 2′-O-methoxyethyl (2′-O-MOE), 2′-O-aminopropyl (2′-O-AP), 2′-O-dimethylaminoethyl (2′-O-DMAOE), 2′-O-dimethylaminopropyl (2′-O-DMAP), 2′-O-dimethylaminoethyloxyethyl (2′-O-DMAEOE), or 2′-O—N-methylacetamido (2′-O-NMA). As another example, the nucleic acid sequence can include at least one 2′-O-methyl-modified nucleotide, and in some embodiments, all of the nucleotides include a 2′-O-methyl modification. In some embodiments, the nucleic acids are “locked,” i.e., comprise nucleic acid analogues in which the ribose ring is “locked” by a methylene bridge connecting the 2′-O atom and the 4′-C atom (see, e.g., Kaupinnen et al., Drug Disc. Today 2(3):287-290 (2005); Koshkin et al., J. Am. Chem. Soc., 120(50):13252-13253 (1998)). For additional modifications see US 20100004320, US 20090298916, and US 20090143326.

[0184] It is understood that any of the modified chemistries or formats of inhibitory nucleic acids described herein can be combined with each other, and that one, two, three, four, five, or more different types of modifications can be included within the same molecule. Techniques for the manipulation of nucleic acids used to practice this invention, such as, e.g., subcloning, labeling probes (e.g., random-primer labeling using Klenow polymerase, nick translation, amplification), sequencing, hybridization and the like are well described in the scientific and patent literature, see, e.g., Sambrook et al., Molecular Cloning; A Laboratory Manual 3d ed. (2001); Current Protocols in Molecular Biology, Ausubel et al., eds. (John Wiley & Sons, Inc., New York 2010); Kriegler, Gene Transfer and Expression: A Laboratory Manual (1990); Laboratory Techniques In Biochemistry And Molecular Biology: Hybridization With Nucleic Acid Probes, Part I. Theory and Nucleic Acid Preparation, Tijssen, ed. Elsevier, N.Y. (1993).

### Modification Patterns

[0185] In some embodiments, the inhibitory oligonucleotide comprises locked nucleic acids (LNA), ENA modified nucleotides, 2′-O-methyl nucleotides, or 2′-fluoro-deoxyribonucleotides. In some embodiments, the inhibitory oligonucleotide comprises alternating deoxyribonucleotides and 2′-fluoro-deoxyribonucleotides. In some embodiments, the inhibitory oligonucleotide comprises alternating deoxyribonucleotides and 2′-O-methyl nucleotides. In some embodiments, the inhibitory oligonucleotide comprises alternating deoxyribonucleotides and ENA modified nucleotides. In some embodiments, the inhibitory oligonucleotide comprises alternating deoxyribonucleotides and locked nucleic acid nucleotides. In some embodiments, the inhibitory oligonucleotide comprises alternating locked nucleic acid nucleotides and 2′-O-methyl nucleotides. The oligonucleotide may comprise deoxyribonucleotides flanked by at least one bridged nucleotide (e.g., a LNA nucleotide, cEt nucleotide, ENA nucleotide) on each of the 5′ and 3′ ends of the deoxyribonucleotides. The oligonucleotide may comprise deoxyribonucleotides flanked by 1, 2, 3, 4, 5, 6, 7, 8 or more bridged nucleotides (e.g., LNA nucleotides, cEt nucleotides, ENA nucleotides) on each of the 5′ and 3′ ends of the deoxyribonucleotides. In some embodiments, the 5′ nucleotide of the oligonucleotide is a deoxyribonucleotide. In some embodiments, the 5′ nucleotide of the oligonucleotide is a locked nucleic acid nucleotide. In some embodiments, the nucleotides of the oligonucleotide comprise deoxyribonucleotides flanked by at least one locked nucleic acid nucleotide on each of the 5′ and 3′ ends of the deoxyribonucleotides. In some embodiments, the nucleotide at the 3′ position of the oligonucleotide has a 3′ hydroxyl group or a 3′ thiophosphate.

[0186] In some embodiments, the inhibitory oligonucleotide comprises phosphorothioate internucleotide linkages. In some embodiments, the single stranded oligonucleotide comprises phosphorothioate internucleotide linkages between at least two nucleotides. In some embodiments, the single stranded oligonucleotide comprises phosphorothioate internucleotide linkages between all nucleotides.

[0187] It should be appreciated that the oligonucleotide can have any combination of modifications as described herein.

[0188] As an example, the oligonucleotide may comprise a nucleotide sequence having one or more of the following modification patterns.

### (a) (X)Xxxxxx, (X)xXxxxx, (X)xxXxxx, (X)xxxXxx, (X)xxxxXx and (X)xxxxxX,

### (b) (X)XXxxxx, (X)XxXxxx, (X)XxxXxx, (X)XxxxXx, (X)XxxxxX, (X)xXXxxx, (X)xXxXxx, (X)xXxxXx, (X)xXxxxX, (X)xxXXxx, (X)xxXxXx, (X)xxXxxX, (X)xxxXXx, (X)xxxXxX and (X)xxxxXX,

### (c) (X)XXXxxx, (X)xXXXxx, (X)xxXXXx, (X)xxxXXX, (X)XXxXxx, (X)XXxxXx, (X)XXxxxX, (X)xXXxXx, (X)xXXxxX, (X)xxXXxX, (X)XxXXxx, (X)XxxXXx (X)XxxxXX, (X)xXxXXx, (X)xXxxXX, (X)xxXxXX, (X)xXxXxX and (X)XxXxXx,

### (d) (X)xxXXX, (X)xXxXXX, (X)xXXxXX, (X)xXXXxX, (X)xXXXXx, (X)XxxXXXX, (X)XxXxXX, (X)XxXXxX, (X)XxXXx, (X)XXxxXX, (X)XXxXxX, (X)XXxXXx, (X)XXXxxX, (X)XXXxXx, and (X)XXXXxx,

### (e) (X)xXXXXX, (X)XxXXXX, (X)XXxXXX, (X)XXXxXX, (X)XXXXxX and (X)XXXXXx, and

[0189] (f) XXXXXX, XxXXXXX, XXxXXXX, XXXxXXX, XXXXxXX, XXXXXxX and XXXXXXx, in which “X” denotes a nucleotide analogue, (X) denotes an optional nucleotide analogue, and “x” denotes a DNA or RNA nucleotide unit. Each of the above listed patterns may appear one or more times within an oligonucleotide, alone or in combination with any of the other disclosed modification patterns.

[0190] In some embodiments, the oligonucleotide is a gapmer (contain a central stretch (gap) of DNA monomers sufficiently long to induce RNase H cleavage, flanked by blocks of LNA modified nucleotides; see, e.g., Stanton et al., Nucleic Acid Ther. 2012. 22: 344-359; Nowotny et al., Cell, 121:1005-1016, 2005; Kurreck, European Journal of Biochemistry 270: 1628-1644, 2003; FLuiter et al., Mol Biosyst. 5(8):838-43, 2009). In some embodiments, the oligonucleotide is a mixmer (includes alternating short stretches of LNA and DNA; Naguibneva et al., Biomed Pharmacother. 2006 November; 60(9):633-8; Ørom et al., Gene. 2006 May 10; 3720:137-41).

### Additional Sequence Structural Information

[0191] The inhibitory oligonucleotides described herein may have a sequence that does not contain guanosine nucleotide stretches (e.g., 3 or more, 4 or more, 5 or more, 6 or more consecutive guanosine nucleotides). In some embodiments, oligonucleotides having guanosine nucleotide stretches have increased non-specific binding and/or off-target effects, compared with oligonucleotides that do not have guanosine nucleotide stretches.

[0192] The inhibitory oligonucleotides have a sequence that has less than a threshold level of sequence identity with every sequence of nucleotides, of equivalent length, that map to a genomic position encompassing or in proximity to an off-target gene. For example, an oligonucleotide may be designed to ensure that it does not have a sequence that maps to genomic positions encompassing or in proximity with all known genes (e.g., all known protein coding genes) other than the gene of interest. The oligonucleotide is expected to have a reduced likelihood of having off-target effects. The threshold level of sequence identity may be 50%, 60%, 70%, 80%, 85%, 90%, 95%, 99% or 100% sequence identity. The inhibitory oligonucleotides may have a sequence that is complementary to a region that encodes an RNA that forms a secondary structure comprising at least two single stranded loops. In some embodiments, oligonucleotides that are complementary to a region that encodes an RNA that forms a secondary structure comprising one or more single stranded loops (e.g., at least two single stranded loops) have a greater likelihood of being active (e.g., of being capable of activating or enhancing expression of a target gene) than a randomly selected oligonucleotide. In some cases, the secondary structure may comprise a double stranded stem between the at least two single stranded loops. Accordingly, the area of complementarity between the oligonucleotide and the nucleic acid region may be at a location of the PRC2 associated region that encodes at least a portion of at least one of the loops. In some embodiments, the predicted secondary structure RNA (e.g., of the CTCF binding site) containing the nucleic acid region is determined using RNA secondary structure prediction algorithms, e.g., RNAfold, mfold. In some embodiments, oligonucleotides are designed to target a region of the RNA that forms a secondary structure comprising one or more single stranded loop (e.g., at least two single stranded loops) structures which may comprise a double stranded stem between the at least two single stranded loops.

[0193] The inhibitory oligonucleotide may have a sequence that is has greater than 30% G-C content, greater than 40% G-C content, greater than 50% G-C content, greater than 60% G-C content, greater than 70% G-C content, or greater than 80% G-C content. The inhibitory oligonucleotide may have a sequence that has up to 100% G-C content, up to 95% G-C content, up to 90% G-C content, or up to 80% G-C content.

[0194] The inhibitory oligonucleotide may be complementary to a chromosome of a different species (e.g., a mouse, rat, rabbit, goat, monkey, etc.) at a position that encompasses or that is in proximity to that species' homolog of the gene of interest. The inhibitory oligonucleotide may be complementary to a human genomic region encompassing or in proximity to the target gene and also be complementary to a mouse genomic region encompassing or in proximity to the mouse homolog of the target gene. Oligonucleotides having these characteristics may be tested in vivo or in vitro for efficacy in multiple species (e.g., human and mouse). This approach also facilitates development of clinical candidates for treating human disease by selecting a species in which an appropriate animal exists for the disease.

[0195] In some embodiments, the region of complementarity of the inhibitory oligonucleotide is complementary with at least 8 to 15, 8 to 30, 8 to 40, or 10 to 50, or 5 to 50, or 5 to 40 bases, e.g., 5, 6, 7, 8, 9, 10, 11, 12, 13, 14, 15, 16, 17, 18, 19, 20, 21, 22, 23, 24, 25, 26, 27, 28, 29, 30, 31, 32, 33, 34, 35, 36, 37, 38, 39, 40, 41, 42, 43, 44, 45, 46, 47, 48, 49, or 50 consecutive nucleotides of a CTCF binding site disclosed in the tables provided herein. In some embodiments, the region of complementarity is complementary with at least 8, 10, 12, 14, 16, 18, or 20 consecutive nucleotides of a CTCF binding site disclosed in the tables provided herein.

### Modulating CTCF Binding to Genomic DNA

[0196] As described herein, CTCF localizes/binds to genomic DNA in a sequence-specific manner; the present methods can include inhibiting this localization, in addition to or as an alternative to administering an inhibitory nucleic acid as described herein that binds a CTCF-binding RNA. To inhibit this localization, and thus disrupt CTCF-dependent repression and increase expression of nearby genes, oligonucleotides are used that bind to genomic DNA at or near (e.g., within 100, 50, or 25) nucleotides of a CTCF localization site identified in Tables 1 and 2. Table 1 lists genes corresponding to the CTCF CLIP-seq peaks from human embryonic kidney cells, and Table 2 provides the Human genomic regions determined by LiftOver analysis to correspond to the CTCF CLIP-seq peaks from mus musculus mouse embryonic fibroblasts. Each table provides the SEQ ID NO: of the peak(s) (i.e., the CTCF localization site(s)) that correspond to each of the listed genes.

[0197] In some embodiments, the oligonucleotides are triplex-forming oligonucleotides (TFOs). TFOs are defined as triplex-forming oligonucleotides which bind as third strands to duplex DNA in a sequence specific manner. Triplex-forming oligonucleotides may be comprised of any possible combination of nucleotides and modified nucleotides. Modified nucleotides may contain chemical modifications of the heterocyclic base, sugar moiety or phosphate moiety. TFOs, and methods of making them, are known in the art; see, e.g., Frank-Kamenetskii and Mirkin, Annual Review of Biochemistry, 64:65-95 (1995); Vasquez and Glazer, Quarterly Reviews of Biophysics, 35(01):89-107 (2002); US PGPub Nos. 20070219122; US20110130557; and US20090216003.

[0198] In general, the TFO is a single-stranded nucleic acid molecule between 5 and 100 nucleotides in length, preferably between 7 and 40 nucleotides in length, e.g., 10 to 20 or 20 to 30 nucleotides in length. In some embodiments, the base composition is homopurine or homopyrimidine, polypurine or polypyrimidine. The oligonucleotides can be generated using known DNA synthesis procedures.

[0199] The nucleotide sequence of the oligonucleotides is selected based on a target sequence of a CTCF localization sequence as provided herein; in addition, the sequence can be determined based on physical constraints imposed by the need to achieve binding of the oligonucleotide within the major groove of the target region, and preferably have a low dissociation constant (Kd) for the oligonucleotide/target sequence. The oligonucleotides should have a base composition that is conducive to triple-helix formation and can be generated based on known structural motifs for third strand binding. The most stable complexes are formed on polypurine:polypyrimidine elements, which are relatively abundant in mammalian genomes. Triplex formation by TFOs can occur with the third strand oriented either parallel or anti-parallel to the purine strand of the duplex. In the anti-parallel, purine motif, the triplets are G.G:C and A.A:T, whereas in the parallel pyrimidine motif, the canonical triplets are C⁺.G:C and T.A:T. The triplex structures are stabilized by two Hoogsteen hydrogen bonds between the bases in the TFO strand and the purine strand in the duplex. See U.S. Pat. No. 5,422,251 for additional information on base compositions for third strand binding oligonucleotides.

[0200] The TFOs can include one or more modifications, e.g., backbone modifications such as incorporation of the flexible basestacking monomers (Bulge insertions of (R)-1-O-[4-(1-pyrenylethynyl)phenylmethyl]glycerol into the middle of homopyrimidine oligodeoxynucleotides (twisted intercalating nucleic acids, TINA)) as described in US PGPub No 20090216003; intercalating nucleic acid monomers as described in WO2006125447A2; intercalator (R)-1-O-[4-(1-pyrenylethynyl)benzyl]-glycerol (see, e.g., Filichev et al., J. Am. Chem. Soc. 127:14849 (2005); Filichev et al., Eur. J. Org. Chem. 17:3960-3968 (2006); Globisch et al., Helv. Chim. Acta, 91:805 (2008)); 2-phenyl or 2-naphth-1-yl-phenanthroimidazole intercalators as described in US20110130557.

[0201] In addition or in alternative, modifications can be made to the nucleobases (see, e.g., Roig and Asseline, J. Am. Chem. Soc. 2003, 125, 4416; Hildbrand et al., J. Am. Chem. Soc. 1997, 119, 5499; and Xodo et al., Nucleic Acids Res. 1991, 19, 5625); to the sugar (sugar moiety modifications include, but are not limited to, 2′-O-aminoetoxy, 2′-O-amonioethyl (2′-OAE), 2′-O-methoxy, 2′-O-methyl, 2-guanidoethyl (2′-OGE), 2′-O,4′-C-methylene (LNA), 2′-O-(methoxyethyl) (2′-OME) and 2′-O—(N-(methyl)acetamido) (2′-OMA). 2′-O-aminoethyl sugar moiety substitutions are especially preferred; see, e.g., Carlomagno et al., J. Am. Chem. Soc. 2001, 123, 7364; Cuenoud et al., Angew. Chem. Int. Ed. 1998, 37, 1288; Wengel, Acc. Chem. Res. 1999, 32, 301; Obika et al., Tetrahedron Let. 2000, 41, 8923; Sun et al., Biochemistry, 2004, 43, 4160; Basye et al., Nucleic Acids Res. 2001, 29, 4873); and/or to the phosphate backbone (see, e.g., Michel, et al., Chem Bio Chem. 2005, 6, 1254; Ehrenmann et al., Nucl. Nucl. Nucleic Acids. 2001, 20, 797; Michel et al., J. Biomol. Struct. Dyn. 2003, 21, 435; Tereshko et al., J. Am. Chem. Soc. 1998, 120, 269; Escude et al., Proc. Natl. Acad. Sci. U.S.A. 1996, 93, 4365; Gryaznov et al., Proc. Natl. Acad. Sci. U.S.A. 1995, 92, 5798; Gryaznov and Chen, J. Am. Chem. Soc. 1994, 116, 3143; and Chur et al., Nucleic Acids Res. 1993, 21, 5179). Chemical modifications of heterocyclic bases or heterocyclic base analogs can be used to increase the binding affinity of a nucleotide or its stability in a triplex. Chemically-modified heterocyclic bases include, but are not limited to, inosine, 5-(1-propynyl) uracil (pU), 5-(1-propynyl) cytosine (pC), 5-methylcytosine, 8-oxo-adenine, pseudocytosine, pseudoisocytosine, 5 and 2-amino-5-(2′-deoxy-beta-D-ribofuranosyl)pyridine (2-aminopyridine), and various pyrrolo- and pyrazolopyrimidine derivatives. Substitution of 5-methylcytosine or pseudoisocytosine for cytosine in triplex-forming molecules such as TFOs and PNAs helps to stabilize triplex formation at neutral and/or physiological pH, especially in triplex-forming molecules with isolated cytosines. See, e.g., US20110268810.

[0202] For example, each nucleotide monomer can be selected from the group consisting of DNA, RNA, HNA, MNA, ANA, LNA, CAN, INA, CeNA, TNA, (2′-NH)-TNA, (3′-NH)-TNA, alpha-L-Ribo-LNA, alpha-L-Xylo-LNA, beta-D-Ribo-LNA, beta-D-Xylo-LNA, [3.2.1]-LNA, Bicyclo-DNA, 6-Amino-Bicyclo-DNA, 5-epi-Bicyclo-DNA, alpha-Bicyclo-DNA, Tricyclo-DNA, Bicyclo[4.3.0]-DNA, Bicyclo[3.2.1]-DNA, Bicyclo[4.3.0]amide-DNA, beta-D-Ribopyranosyl-NA, alpha-L-Lyxopyranosyl-NA, 2′-R-RNA, 2′-OR-RNA, 2′-AE-RNA, alpha-L-RNA, and beta-D-RNA, and combinations and modifications thereof; in some embodiments, some or all of the TFO is a peptide nucleic acid (PNA), in which the phosphate backbone of oligonucleotides is replaced in part or in its entirety by repeating N-(2-aminoethyl)-glycine units, and the phosphodiester bonds are replaced by peptide bonds. In addition, the TFO can include one or more of the modifications described in WO2012/065143.

[0203] In some embodiments, the TFO includes a “tail” or “tail clamp” added to the Watson-Crick binding portion that binds to target strand outside the triple helix and reduces the requirement for a polypurine:polypyrimidine stretch, increasing the number of potential target sites. Tail clamps added to PNAs (referred to as tcPNAs) have been described by Kaihatsu, et al., Biochemistry, 42(47):13996-4003 (2003); Bentin, et al., Biochemistry, 42(47):13987-95 (2003) Rogers, et al., Proc. Natl. Acad. Sci. USA., 99(26):16695-700 (2002)), and are known to bind to DNA more efficiently due to low dissociation constants. The addition of the tail also increases binding specificity and binding stringency of the triplex-forming molecules to the target duplex.

[0204] In some embodiments, the TFOs are modified with, or administered with, amidoanthraquinones as described in Fox et al., Proc. Natl. Acad. Sci. USA 92:7887-7891 (1995).

[0205] Methods of Treatment Using TFOs

[0206] TFOs that target CTCF binding sites associated with disease-related genes can also be used to treat subjects. For example, the DMD gene is a causal factor in Duchenne muscular dystrophy; administration of a TFO that targets a CTCF localization site associated with the XIST gene can be used to treat subjects who have Rett Syndrome. One of skill in the art would be able to identify other disease-related genes from among those listed in Tables 1 and 2. In particular, a TFO that targets a CTCF localization site associated with a human disease-related gene as set forth in Tables 1 or 2 (and/or Table A) can be used to treat a human having the disease to which the gene is related; in some embodiments, the TFOs are used to reactivate a normal gene in a heterozygous individual, i.e., an individual with one normal copy and one affected copy of the gene. The TFO can be administered in a pharmaceutical composition or formulation as known in the art, e.g., as described herein. Subjects having a genetic disease, e.g., a disease related to a gene listed in Table 1 or 2, can be identified using methods known in the art.

### Pharmaceutical Compositions

[0207] The methods described herein can include the administration of pharmaceutical compositions and formulations comprising inhibitory nucleic acid sequences designed to target a CTCF binding site.

[0208] In some embodiments, the compositions are formulated with a pharmaceutically acceptable carrier. The pharmaceutical compositions and formulations can be administered parenterally, topically, orally or by local administration, such as by aerosol or transdermally. The pharmaceutical compositions can be formulated in any way and can be administered in a variety of unit dosage forms depending upon the condition or disease and the degree of illness, the general medical condition of each patient, the resulting preferred method of administration and the like. Details on techniques for formulation and administration of pharmaceuticals are well described in the scientific and patent literature, see, e.g., Remington: The Science and Practice of Pharmacy, 21st ed., 2005.

[0209] The inhibitory nucleic acids can be administered alone or as a component of a pharmaceutical formulation (composition). The compounds may be formulated for administration, in any convenient way for use in human or veterinary medicine. Wetting agents, emulsifiers and lubricants, such as sodium lauryl sulfate and magnesium stearate, as well as coloring agents, release agents, coating agents, sweetening, flavoring and perfuming agents, preservatives and antioxidants can also be present in the compositions.

[0210] Formulations of the compositions of the invention include those suitable for intradermal, inhalation, oral/nasal, topical, parenteral, rectal, and/or intravaginal administration. The formulations may conveniently be presented in unit dosage form and may be prepared by any methods well known in the art of pharmacy. The amount of active ingredient (e.g., nucleic acid sequences of this invention) which can be combined with a carrier material to produce a single dosage form will vary depending upon the host being treated, the particular mode of administration, e.g., intradermal or inhalation. The amount of active ingredient which can be combined with a carrier material to produce a single dosage form will generally be that amount of the compound which produces a therapeutic effect, e.g., an antigen specific T cell or humoral response.

[0211] Pharmaceutical formulations of this invention can be prepared according to any method known to the art for the manufacture of pharmaceuticals. Such drugs can contain sweetening agents, flavoring agents, coloring agents and preserving agents. A formulation can be admixtured with nontoxic pharmaceutically acceptable excipients which are suitable for manufacture. Formulations may comprise one or more diluents, emulsifiers, preservatives, buffers, excipients, etc. and may be provided in such forms as liquids, powders, emulsions, lyophilized powders, sprays, creams, lotions, controlled release formulations, tablets, pills, gels, on patches, in implants, etc.

[0212] Pharmaceutical formulations for oral administration can be formulated using pharmaceutically acceptable carriers well known in the art in appropriate and suitable dosages. Such carriers enable the pharmaceuticals to be formulated in unit dosage forms as tablets, pills, powder, dragees, capsules, liquids, lozenges, gels, syrups, slurries, suspensions, etc., suitable for ingestion by the patient. Pharmaceutical preparations for oral use can be formulated as a solid excipient, optionally grinding a resulting mixture, and processing the mixture of granules, after adding suitable additional compounds, if desired, to obtain tablets or dragee cores. Suitable solid excipients are carbohydrate or protein fillers include, e.g., sugars, including lactose, sucrose, mannitol, or sorbitol; starch from corn, wheat, rice, potato, or other plants; cellulose such as methyl cellulose, hydroxypropylmethyl-cellulose, or sodium carboxy-methylcellulose; and gums including arabic and tragacanth; and proteins, e.g., gelatin and collagen. Disintegrating or solubilizing agents may be added, such as the cross-linked polyvinyl pyrrolidone, agar, alginic acid, or a salt thereof, such as sodium alginate. Push-fit capsules can contain active agents mixed with a filler or binders such as lactose or starches, lubricants such as talc or magnesium stearate, and, optionally, stabilizers. In soft capsules, the active agents can be dissolved or suspended in suitable liquids, such as fatty oils, liquid paraffin, or liquid polyethylene glycol with or without stabilizers.

[0213] Aqueous suspensions can contain an active agent (e.g., nucleic acid sequences of the invention) in admixture with excipients suitable for the manufacture of aqueous suspensions, e.g., for aqueous intradermal injections. Such excipients include a suspending agent, such as sodium carboxymethylcellulose, methylcellulose, hydroxypropylmethylcellulose, sodium alginate, polyvinylpyrrolidone, gum tragacanth and gum acacia, and dispersing or wetting agents such as a naturally occurring phosphatide (e.g., lecithin), a condensation product of an alkylene oxide with a fatty acid (e.g., polyoxyethylene stearate), a condensation product of ethylene oxide with a long chain aliphatic alcohol (e.g., heptadecaethylene oxycetanol), a condensation product of ethylene oxide with a partial ester derived from a fatty acid and a hexitol (e.g., polyoxyethylene sorbitol mono-oleate), or a condensation product of ethylene oxide with a partial ester derived from fatty acid and a hexitol anhydride (e.g., polyoxyethylene sorbitan mono-oleate). The aqueous suspension can also contain one or more preservatives such as ethyl or n-propyl p-hydroxybenzoate, one or more coloring agents, one or more flavoring agents and one or more sweetening agents, such as sucrose, aspartame or saccharin. Formulations can be adjusted for osmolarity.

[0214] In some embodiments, oil-based pharmaceuticals are used for administration of nucleic acid sequences of the invention. Oil-based suspensions can be formulated by suspending an active agent in a vegetable oil, such as arachis oil, olive oil, sesame oil or coconut oil, or in a mineral oil such as liquid paraffin; or a mixture of these. See e.g., U.S. Pat. No. 5,716,928 describing using essential oils or essential oil components for increasing bioavailability and reducing inter- and intra-individual variability of orally administered hydrophobic pharmaceutical compounds (see also U.S. Pat. No. 5,858,401). The oil suspensions can contain a thickening agent, such as beeswax, hard paraffin or cetyl alcohol. Sweetening agents can be added to provide a palatable oral preparation, such as glycerol, sorbitol or sucrose. These formulations can be preserved by the addition of an antioxidant such as ascorbic acid. As an example of an injectable oil vehicle, see Minto (1997) J. Pharmacol. Exp. Ther. 281:93-102.

[0215] Pharmaceutical formulations can also be in the form of oil-in-water emulsions. The oily phase can be a vegetable oil or a mineral oil, described above, or a mixture of these. Suitable emulsifying agents include naturally-occurring gums, such as gum acacia and gum tragacanth, naturally occurring phosphatides, such as soybean lecithin, esters or partial esters derived from fatty acids and hexitol anhydrides, such as sorbitan mono-oleate, and condensation products of these partial esters with ethylene oxide, such as polyoxyethylene sorbitan mono-oleate. The emulsion can also contain sweetening agents and flavoring agents, as in the formulation of syrups and elixirs. Such formulations can also contain a demulcent, a preservative, or a coloring agent. In alternative embodiments, these injectable oil-in-water emulsions of the invention comprise a paraffin oil, a sorbitan monooleate, an ethoxylated sorbitan monooleate and/or an ethoxylated sorbitan trioleate.

[0216] The pharmaceutical compounds can also be administered by in intranasal, intraocular and intravaginal routes including suppositories, insufflation, powders and aerosol formulations (for examples of steroid inhalants, see e.g., Rohatagi (1995) J. Clin. Pharmacol. 35:1187-1193; Tjwa (1995) Ann. Allergy Asthma Immunol. 75:107-111). Suppositories formulations can be prepared by mixing the drug with a suitable non-irritating excipient which is solid at ordinary temperatures but liquid at body temperatures and will therefore melt in the body to release the drug. Such materials are cocoa butter and polyethylene glycols.

[0217] In some embodiments, the pharmaceutical compounds can be delivered transdermally, by a topical route, formulated as applicator sticks, solutions, suspensions, emulsions, gels, creams, ointments, pastes, jellies, paints, powders, and aerosols.

[0218] In some embodiments, the pharmaceutical compounds can also be delivered as microspheres for slow release in the body. For example, microspheres can be administered via intradermal injection of drug which slowly release subcutaneously; see Rao (1995) J. Biomater Sci. Polym. Ed. 7:623-645; as biodegradable and injectable gel formulations, see, e.g., Gao (1995) Pharm. Res. 12:857-863 (1995); or, as microspheres for oral administration, see, e.g., Eyles (1997) J. Pharm. Pharmacol. 49:669-674.

[0219] In some embodiments, the pharmaceutical compounds can be parenterally administered, such as by intravenous (IV) administration or administration into a body cavity or lumen of an organ. These formulations can comprise a solution of active agent dissolved in a pharmaceutically acceptable carrier. Acceptable vehicles and solvents that can be employed are water and Ringer's solution, an isotonic sodium chloride. In addition, sterile fixed oils can be employed as a solvent or suspending medium. For this purpose any bland fixed oil can be employed including synthetic mono- or diglycerides. In addition, fatty acids such as oleic acid can likewise be used in the preparation of injectables. These solutions are sterile and generally free of undesirable matter. These formulations may be sterilized by conventional, well known sterilization techniques. The formulations may contain pharmaceutically acceptable auxiliary substances as required to approximate physiological conditions such as pH adjusting and buffering agents, toxicity adjusting agents, e.g., sodium acetate, sodium chloride, potassium chloride, calcium chloride, sodium lactate and the like. The concentration of active agent in these formulations can vary widely, and will be selected primarily based on fluid volumes, viscosities, body weight, and the like, in accordance with the particular mode of administration selected and the patient's needs. For IV administration, the formulation can be a sterile injectable preparation, such as a sterile injectable aqueous or oleaginous suspension. This suspension can be formulated using those suitable dispersing or wetting agents and suspending agents. The sterile injectable preparation can also be a suspension in a nontoxic parenterally-acceptable diluent or solvent, such as a solution of 1,3-butanediol. The administration can be by bolus or continuous infusion (e.g., substantially uninterrupted introduction into a blood vessel for a specified period of time).

[0220] In some embodiments, the pharmaceutical compounds and formulations can be lyophilized. Stable lyophilized formulations comprising an inhibitory nucleic acid can be made by lyophilizing a solution comprising a pharmaceutical of the invention and a bulking agent, e.g., mannitol, trehalose, raffinose, and sucrose or mixtures thereof. A process for preparing a stable lyophilized formulation can include lyophilizing a solution about 2.5 mg/mL protein, about 15 mg/mL sucrose, about 19 mg/mL NaCl, and a sodium citrate buffer having a pH greater than 5.5 but less than 6.5. See, e.g., U.S. 20040028670.

[0221] The compositions and formulations can be delivered by the use of liposomes. By using liposomes, particularly where the liposome surface carries ligands specific for target cells, or are otherwise preferentially directed to a specific organ, one can focus the delivery of the active agent into target cells in vivo. See, e.g., U.S. Pat. Nos. 6,063,400; 6,007,839; Al-Muhammed (1996) J. Microencapsul. 13:293-306; Chonn (1995) Curr. Opin. Biotechnol. 6:698-708; Ostro (1989) Am. J. Hosp. Pharm. 46:1576-1587. As used in the present invention, the term “liposome” means a vesicle composed of amphiphilic lipids arranged in a bilayer or bilayers. Liposomes are unilamellar or multilamellar vesicles that have a membrane formed from a lipophilic material and an aqueous interior that contains the composition to be delivered. Cationic liposomes are positively charged liposomes that are believed to interact with negatively charged DNA molecules to form a stable complex. Liposomes that are pH-sensitive or negatively-charged are believed to entrap DNA rather than complex with it. Both cationic and noncationic liposomes have been used to deliver DNA to cells.

[0222] Liposomes can also include “sterically stabilized” liposomes, i.e., liposomes comprising one or more specialized lipids. When incorporated into liposomes, these specialized lipids result in liposomes with enhanced circulation lifetimes relative to liposomes lacking such specialized lipids. Examples of sterically stabilized liposomes are those in which part of the vesicle-forming lipid portion of the liposome comprises one or more glycolipids or is derivatized with one or more hydrophilic polymers, such as a polyethylene glycol (PEG) moiety. Liposomes and their uses are further described in U.S. Pat. No. 6,287,860.

[0223] The formulations of the invention can be administered for prophylactic and/or therapeutic treatments. In some embodiments, for therapeutic applications, compositions are administered to a subject who is at risk of or has a disorder described herein, in an amount sufficient to cure, alleviate or partially arrest the clinical manifestations of the disorder or its complications; this can be called a therapeutically effective amount.

[0224] The amount of pharmaceutical composition adequate to accomplish this is a therapeutically effective dose. The dosage schedule and amounts effective for this use, i.e., the dosing regimen, will depend upon a variety of factors, including the stage of the disease or condition, the severity of the disease or condition, the general state of the patient's health, the patient's physical status, age and the like. In calculating the dosage regimen for a patient, the mode of administration also is taken into consideration.

[0225] The dosage regimen also takes into consideration pharmacokinetics parameters well known in the art, i.e., the active agents' rate of absorption, bioavailability, metabolism, clearance, and the like (see, e.g., Hidalgo-Aragones (1996) J. Steroid Biochem. Mol. Biol. 58:611-617; Groning (1996) Pharmazie 51:337-341; Fotherby (1996) Contraception 54:59-69; Johnson (1995) J. Pharm. Sci. 84:1144-1146; Rohatagi (1995) Pharmazie 50:610-613; Brophy (1983) Eur. J. Clin. Pharmacol. 24:103-108; Remington: The Science and Practice of Pharmacy, 21st ed., 2005). The state of the art allows the clinician to determine the dosage regimen for each individual patient, active agent and disease or condition treated. Guidelines provided for similar compositions used as pharmaceuticals can be used as guidance to determine the dosage regiment, i.e., dose schedule and dosage levels, administered practicing the methods of the invention are correct and appropriate.

[0226] Single or multiple administrations of formulations can be given depending on for example: the dosage and frequency as required and tolerated by the patient, the degree and amount of therapeutic effect generated after each administration (e.g., effect on tumor size or growth), and the like. The formulations should provide a sufficient quantity of active agent to effectively treat, prevent or ameliorate conditions, diseases or symptoms.

[0227] In alternative embodiments, pharmaceutical formulations for oral administration are in a daily amount of between about 1 to 100 or more mg per kilogram of body weight per day. Lower dosages can be used, in contrast to administration orally, into the blood stream, into a body cavity or into a lumen of an organ. Substantially higher dosages can be used in topical or oral administration or administering by powders, spray or inhalation.

[0228] In some embodiments, the methods described herein can include co-administration with other drugs or pharmaceuticals, e.g., compositions for providing cholesterol homeostasis. For example, the inhibitory nucleic acids can be co-administered with drugs for treating or reducing risk of a disorder described herein.

### EXAMPLES

[0229] The invention is further described in the following examples, which do not limit the scope of the invention described in the claims.

[0230] Methods

[0231] The following methods were used in the examples set forth below.

[0232] UV-Crosslinking and Immunoprecipitation of RNA

[0233] A modified CLIP protocol based on previously published protocols (Ule et al., 2003; Ule et al., 2005; Jensen and R. B., 2008; Licatalosi et al., 2008; Yeo et al., 2009) was used in this study. 10⁸ mouse ES cells expressing the FLAG-tagged CTCF protein (Sun et al., 2013) were trypsinized and resuspended in PBS. Cells for +UV experiments were crosslinked with 256 nm UV in a 15-cm dish at 250 mJ/cm² using the Stratalinker 1800 (Stratagene). ±UV cell pellets were resuspended in 1-2 mL Buffer A (10 mM HEPES pH 7.9, 1.5 mM MgCl₂, 10 mM KCl, 0.5 mM PMSF) and incubated on ice for 30 min with frequent vortexing. Nuclei were pelleted at 2500×g for 15 min, washed in PBS, resuspended in 500 mL Buffer C (20 mM HEPES pH 7.5, 420 mM NaCl, 15% glycerol, 1.5 mM MgCl₂, 0.5 mM PMSF, protease and RNase inhibitors) and incubated at 4° C. for 30 min with rotation. Nuclear lysates were diluted with one volume of 20 mM HEPES pH 7.5 and treated with 40 U TURBO DNase at 37° C. for 30 min to liberate chromatin-associated CTCF-RNA complexes. After quenching the DNase with 10 mM EDTA, 5% was removed and saved for RNA-seq, while the remainder was added with sarkosyl to 0.5% and the RNA was fragmented by sonication with Diagenode Bioruptor XL twice for 20 min each (with 30 s on, 30 s off cycles). Cell debris was pelleted at 16,000×g for 10 min, the lysate was diluted again with 1 volume of 20 mM HEPES and divided into three aliquots. 15 uL of Anti-FLAG M2 Magnetic Beads (Sigma-Aldrich A2220) was added to each aliquot and incubated at 4° C. overnight with rotation. Beads from all aliquots were recombined, washed 3× with high salt Wash Buffer I (20 mM HEPES pH 7.5, 250 mM NaCl, 0.1% SDS, 0.5% sodium deoxycholate, 0.5% Nonident-P40, protease and RNase inhibitors), once with 1× TURBO DNase buffer, then treated with 100 U/mLTURBO DNase at 37° C. for 30 min. Beads were further washed 2× with Wash Buffer I supplemented with 10 mM EDTA, then 2× with low salt Wash Buffer II (50 mM Tris-HCl pH 7.5, 1% NP40, 0.5% sodium deoxycholate, 50 mM NaCl, 10 mM EDTA), and 1× with PNK buffer (50 mM Tris-HCl pH 7.5, 10 mM MgCl₂, 0.5% NP40, 5 mM DTT). CLIP-tags on beads were radiolabelled with [γ-³²P]ATP using T4 polynucleotide kinase (New England Biolabs) for 20 min at 37° C., and washed 4× with PNK buffer. Beads were resuspended in SDS-PAGE loading buffer at heated for 5 min at 70° C., run on 8% Bis-Tris SDS-PAGE in MOPS buffer (50 mM MOPS, 50 mM Tris, 0.1% SDS, 1 mM EDTA) at 120 V, transferred to nitrocellulose membrane, and exposed to film for autoradiography or used for immunoblot with 1:3000 αFLAG antibodies (Sigma-Aldrich F1804).

[0234] Membrane fragments containing CLIP signal, as confirmed by immunoblot, and corresponding positions on control lanes were excised, and RNA was eluted by incubation in prewarmed proteinase K buffer (100 mM Tris-HCl pH 7.5, 50 mM NaCl, 10 mM EDTA, 0.5% SDS, 4 mg/mL proteinase K) for 20 min at 37° C., then incubation for an additional 20 min in proteinase K buffer supplemented with 7 M urea, followed by TRIzol extraction and ethanol precipitation. RNA size and quality was verified using RNA 6000 Pico chips on the Agilent Bioanalyzer.

[0235] CLIP-seq library was constructed from CLIP RNA using the NEBNext Small RNA Library Prep set (New England Biolabs E7330), size-selected and cleaned up of primer/adaptor-dimers using Agencourt AMPure XP beads (Beckman Coulter A63880), verified with DNA High Sensitivity chips on the Agilent Bioanalyzer, quantitated using KAPA Biosystems library quantification kit (KK4844), and sequenced with the Illumina HiSeq 2000 system with 50 cycles paired end reads.

[0236] RNA-Seq

[0237] Nuclear lysate was removed before sonication, and treated with proteinase K and reprecipitated in the same way as CLIP RNA eluted from membrane. RNA was depleted of ribosomal RNA with RiboMinus Eukaryote System (Ambion A15026), treated with TURBO DNase, and cleaned up with RNeasy MinElute columns (Qiagen 74204). RNA was fragmented in Superscript III first strand synthesis buffer for 10 min at 94° C. before being used for first strand cDNA synthesis with the addition of 27.5 ng/μL actinomycin D. Second strand cDNA synthesis was performed with NEBNext mRNA Second Strand Synthesis Module (E6111) in the presence of 1.25 mM dUTP to preserve directionality. Double-stranded cDNA was then used to generate RNA-seq libraries using the NEBNext ChIP-Seq Library Prep Master Mix Set (E6240), and quality-checked and sequenced similarly as the CLIP-seq libraries.

[0238] ChIP-Seq

[0239] ChIP was performed essentially as described (Jeon and Lee, 2011) using 1.5×10⁷ TST mouse ES cells (Ogawa and Lee, 2003) and αCTCF antibodies (Cell Signaling 2899). After nuclear lysis, chromatin was sonicated in Covaris S2 ultrasonicator with 5% duty cycle, intensity 6, 200 bursts per 1-min cycle for 8 min, before IP. 15 ng of input or purified ChIP DNA was used for ChIP-seq library construction using the NEBNext ChIP-Seq Library Prep Master Mix Set. Libraries were quality-checked and sequenced similarly as CLIP-seq libraries.

[0240] Bioinformatic Analyses

[0241] Adaptor sequences were trimmed from libraries with either Trim Galore! v0.3.3 (http://www.bioinformatics.babraham.ac.uk/projects/trim_galore/) (for CLIP-seq and RNA-seq; stringency 15 and allowed error rate 0.2) or Cutadapt v1.0 (Martin, 2011)((for ChIP-seq; allowed error rate 0.2). Identical sequences were removed by custom programs prior to alignment. To account for the M. mus (mus)/M. castaneus (cas) hybrid character of the ES cell lines, reads were first aligned to custom mus/129 and cas genomes, and then mapped back to the reference mm9 genome (Pinter et al., 2012). RNA was aligned with Tophat (v2.0.8 or greater) (Kim et al., 2013), while DNA was aligned using Novoalign (3.00.03) (www.novocraft.com). Post-processing of mm9 alignments was performed with custom scripts, SAMtools v0.1.18 (Li et al., 2009), and BEDtools v2.17.0 (Quinlan and Hall, 2010). These included accounting, alignment file-type conversion, extracting and sorting uniquely/paired-end reads (SAMtools), and obtaining wig coverage files (DNA: BEDtools genomecov; RNA: SAMtools depth).

[0242] For repeats analysis, non-uniquely aligned fragments were put into a “reps” category. mm9 RepeatMasker tracks from UCSC were obtained using the table browser. The first of each non-uniquely aligned fragment was then extracted and intersected with each family of repeat elements using BEDtools intersect with options -s, -c, and the percentage that mapped to each family was counted.

[0243] For CLIP-seq, +UV and −UV libraries were scaled according to total number of fragments in each library (determined by SAMtoolsflagstat combining reads “with itself and mate mapped” and “singletons”). After subtracting −UV hits from +UV single nucleotide hit counts, peaks of CTCF enrichment were called using Piranha v1.2.0 (Uren et al., 2012) based on a zero-truncated Poisson distribution and a p-value cutoff of 0.01. Peaks were categorized into sense, antisense-only and intergenic classes. The sense category was derived by strand-specifically intersecting peaks with 3000-nt enveloped gene bodies. The antisense-only category was derived similarly using an antisense intersection and subtracting out sense genes, while the intergenic category was the result of the complement of intersecting peaks non-strand-specifically with gene bodies.

[0244] To assemble RNA transcripts from RNA-seq data, Cufflinks (v2.1.1) (Trapnell et al., 2012) was used on composite d0 and d3 alignments with upper-quartiles-norm normalization, and guided (-g) with mm9 Ensembl transcripts. The resulting transcripts were purged of entries with FPKM=0, converted to bed format, and merged using BEDtools merge with options -nms, -scores mean, -s. To compare CLIP-seq and RNA-seq, CLIP peaks were mapped onto the transcripts using BEDtools map with options -o sum, -s, and FPKM values were obtained by dividing the summed coverage by transcript length/1000. Scatterplots were generated using Excel.

[0245] For display purposes, ChIP-seq coverage of uniquely aligned neutral/cas/mus (comp) reads were obtained and normalized to input libraries using in-house software (smoothing parameters: window size 125 and step size 25). ChIP binding positions were identified by intersecting the results of the mirror tag correlation (MTC) and window tag density (WTD) peak-finding methods within the SPP program (Kharchenko et al., 2008). Briefly, both IP and input data had local anomalies removed, then binding positions were identified using the find.binding.positions routine (FDR=0.01; default method for WDT, and tag.1wcc for MTC, whs=detection.window.halfsize). Peak regions were extended using the add.broad.peak.regions function (window.size=10², z.thr=3). Finally these results were intersected to give a final high confidence peak list.

[0246] ChIP-seq allelic peak calling was performed to identify an SPP-called region as being on the active (cas) or inactive (mus) chromosome. Under the null hypothesis it was equally likely that a ChIP region would be identified by tags of either cas or mus and thus was treated as if following a binomial distribution (Pinter et al., 2012). p-values associated with cas or mus tag-id counts under an SPP-determined peak were determined from the q-value of the cumulative binomial distribution (p=0.5).

[0247] Cis-regulatory Element Annotation System (Shin et al., 2009) was used to determine peak enrichment in genomic regions and to obtain metagene profiles and metasite analyses (including comparison of CLIP peaks to ChIP enrichment). CEAS parameters were span=5000; sizes=1000,3000,5000; and rel-dist=5000. Metagene profiles were obtained on .wig files generated from the peaks.bed files using a custom perl script. The CEAS-associated program sitepro was used to generate metasite profiles.

[0248] Recombinant Protein Cloning and Purification

[0249] Mus musculus CTCF cDNA with additional sequence encoding for a C-terminal 6×His tag was cloned into pFLAG-2 (Sigma) using EcoRI and XhoI to generate pBD39. GFP cDNA (pFA6a-GFP(S65T)-kanMX6) was similarly cloned with a C-terminal 6×His tag into pFLAG-2 to generate pBD40. Recombinant FLAG-CTCF-6×His and FLAG-GFP-6×His proteins were purified from Rosetta-Gami B cells (Novagen). Briefly, pBD39 and pBD40 transformed cells were induced with 0.2 mM IPTG at 18° C. (CTCF) or 1 mM IPTG (GFP) at 30° C. FLAG-GFP-6×His expressing cells were lysed at 4° C. with 50 mM sodium phosphate pH 8, 300 mM NaCl, 20 mM imidazole, 0.5% Triton X-100, and protease inhibitors. Following sonication, insoluble material was separated by centrifugation. FLAG-GFP-6×His was purified from the supernatant using Ni-NTA resin (Qiagen). FLAG-CTCF-6×His expressing cells were lysed at 4° C. with 50 mM sodium phosphate pH 8, 300 mM NaCl, 20 mM imidazole, 0.5% Sarkosyl, and protease inhibitors. Triton X-100 was then added to 2% final (v/v). Debris was removed by centrifugation. FLAG-CTCF-6×His was purified from the supernatant using Ni-NTA resin. Both proteins were eluted from Ni-NTA resin with 50 mM sodium phosphate pH 8, 300 mM NaCl, and 250 mM imidazole. Eluates were dialyzed against 10 mM Tris-HCl pH 7.5, 2.5 mM MgCl₂, 50 mM KCl, 0.1 mM ZnSO₄, 1 mM DTT, 0.1% Tween-20, and 10% glycerol.

[0250] GST-fusion proteins of CTCF fragments were previously described (Donohoe et al., 2007).

[0251] In Vitro RNA Pulldown Assay

[0252] In vitro pulldown was performed as previously reported (Jeon and Lee, 2011). 1.5 μg of purified FLAG-tagged CTCF proteins or equimolar amounts of FLAG-tagged GFP (or no protein, in the case of mock pulldown) was immobilized on 30 μL of Anti-FLAG M2 Magnetic Beads in 400 μL PBS with 1 mM DTT at 4° C. for 2 hr. 15 μg of total RNA from day 3 female ES cells, treated with TURBO DNase and renatured by heating for 10 min 60° C. followed by slow cooling to 4° C., was then incubated with the protein-beads complexes at room temperature for 1 hr in 400 μL of Binding Buffer (1×PBS, 2 mM MgCl₂, 0.2 mM ZnCl₂, 0.2% NP40, 1 mM DTT, 100 Um′ RNase Inhibitor, 0.1 mg/ml yeast tRNA [Invitrogen], 0.5 mg/mL bovine serum albumin), with 10% of RNA-buffer mixture saved as input. Beads were washed 5× with Wash Buffer (1×PBS supplemented with additional 450 mM NaCl, to a total of 600 mM). RNA was isolated by TRIzol extraction and used in strand-specific qRT-PCR with the following primers:

RepA F: 5′-CGGTTCTTCCGTGGTTTCTC-3′
RepA R: 5′-GGTAAGTCCACCATACACAC-3′
RepF F: 5′-CTCGACAGCCCAATCTTTGTT-3′
RepF R: 5′-ACCAACACTTCCACTTAGCC-3′
RepC F: 5′-ACTTTGCATACAGTCCTACTTTACTT-3′
RepC R: 5′-GGAAAGGAGACTTGAGAGATGATAC-3′
Tsix F: 5′-AATGCTTGCCAGCTATGCGG-3′
Tsix R: 5′-TAACCACCTGTAAGGGACAG-3′
Jpx F: 5′-TTAGCCAGGCAGCTAGAGGA-3′
Jpx R: 5′-AGCCGTATTCCTCCATGGTT-3′
Ppia F: 5′-CGATGACGAGCCCTTGG-3′
Ppia R: 5′-TCTGCTGTCTTTGGAACTTTGTC-3′
H19 F: 5′-TGTAAACCTCTTTGGCAATGCTGCC-3′
H19 R: 5′-TATTGATGGACCCAGGACCTCTGGT-3′
Gt12 F: 5′-CGAGGACTTCACGCACAAC-3′
Gt12 R: 5′-TTACAGTTGGAGGGTCCTGG-3′
Gt12-as F: 5′-CACCCTGAACATCCAACA-3′
Gt12-as R: 5′-CATCTGCTTTTCCTACCTGG-3′
Malat1 F: 5′-TAAGCGCTTGCCTCTGTCTT-3′
Malat1 R: 5′-CACCTGCATTCTGTGTGGTC-3′
Neat1 F: 5′-TGAGTGCTTTGCCACTGAAT-3′
Neat1 R: 5′-TAACAGCTTCCCCTCTGCTC-3′
Airn F: 5′-TAGTGTCCCGAGGACAAACC-3′
Airn R: 5′-AGTGAGATCCAGGGATGCAG-3′
Kcnq1ot1 F: 5′-ACTCGGAATTCAGGTGTGGG-3′
Kcnq1ot1 R: 5′-GGTTGGAGGTCACCACAACAT-3′
Nespas F: 5′-AGATGAGTCCAGGTGCTT-3′
Nespas R: 5′-CAAGTCCAGAGTAGCCAAC-3′

[0253] UV-Crosslink RNA Immunoprecipitation

[0254] UV-RIP was performed as previously reported (Jeon and Lee, 2011). 1×10⁷ day 3 female ES cells were trypsinized and resuspended in PBS. Cells for +UV experiments were crosslinked with 256 nm UV in a 15-cm dish at 250 mJ/cm² using the Stratalinker 1800 (Stratagene). ±UV cell pellets were resuspended in 1 mL of UV-RIP Nuclear Isolation Buffer (10 mM HEPES pH 7.5, 1.5 mM MgCl₂, 10 mM KCl, 0.5 mM DTT, protease inhibitors) for 30 min at 4° C., after which NP40 was added to a final concentration of 0.1% and incubated for an additional 10 min at 4° C. Nuclei were pelleted and lysed in 1 mL Lysis Buffer (1×PBS, 1% NP40, 0.5% sodium deoxycholate, protease and RNase inhibitors) for 25 min at 4° C., then for 15 min at 37° C. with 30 U TURBO DNase (Ambion) added. Lysates were spun down at 13,000 rpm at 4° C. for 10 min, and 5 μg of either αCTCF or IgG was added to the cleared lysate and incubated at 4° C. overnight with rotation, saving 5% lysate as input. 40 μL of Dynabeads Protein G per IP was pre-washed 3× with Lysis Buffer, added to the lysate-antibody mixture, and incubated for 2 hr at 4° C. to capture the RNA-protein-antibody complexes. Beads were washed 3× with high salt Wash Buffer I (Lysis Buffer supplemented with 150 mM NaCL, to a total of 300 mM), once with 1× TURBO DNase buffer, then treated with 100 U/mL TURBO DNase at 37° C. for 30 min in TURBO DNase buffer containing fresh protease and RNase inhibitors. Beads were further washed 2× with Wash Buffer I supplemented with 10 mM EDTA to quench DNase activity, then 2× with low salt Wash Buffer II (50 mM Tris-HCl pH 7.5, 1% NP40, 0.5% sodium deoxycholate, 50 mM NaCl, 10 mM EDTA), and finally treated with 100 μg proteinase K in 200 μL of proteinase K buffer (100 mM Tris-HCl pH 7.5, 50 mM NaCl, 10 mM EDTA, 0.5% SDS) for 30 min at 50° C. RNA was isolated by TRIzol extraction and used in strand-specific qRT-PCR with the following primers, in addition to primers listed under in vitro pulldown assay:

Gapdh F: 5′-ATGAATACGGCTACAGCAACAGG-3′
Gapdh R: 5′-CTCTTGCTCAGTGTCCTTGCTG-3′
Xite1 F: 5′-GTCCACACTCCGCCAGCA-3′
Xite1 R: 5′-TTAGGACAGAGTGAAAATCCGGAAGTTGT-3′
Xite2 F: 5′-CCTATTACAACTATTACTCCATGCTACAACTTCTGG-3′
Xite2 R: 5′-GGCATCTGATTCTCTCTTTCATTGTCCATG-3′
Tsix1 F: 5′-CTCAAGAGCCTTAGGTCCCGC-3′
Tsix1 R: 5′-AAGTGTGTAGCGCTTGCAGGTAC-3′
Tsix2 F: 5′-TGAGATGCGGGCTAAGGAGAGG-3′
Tsix2 R: 5′-CTGAAAGCACTTTGCCACTGTCCC-3′
Tsix3 F: 5′-ACAGTGGAGCGATGGCTACGT-3′
Tsix3 R: 5′-CTTCATCTCCGCATAGCTGGCAA-3′
Tsix4 F: 5′-TCTGGGAACTTCTACCTGATCCTCACAT-3′
Tsix4 R: 5′-AACTAGAAACAGGCAGTTAAGGTCCAAGG-3′
Tsix5 F: 5′-CTTCTACTTGGACAAACCATGTATCGCTCC-3′
Tsix5 R: 5′-TCCCAAGGTATGGAGTCACCAGG-3′
JpxE1 F: 5′-AGGCTTCTGTAACTTATAAAATGGCGGC-3′
JpxE1 R: 5′-CAGGGCATGTTCATTAATTGGCCAGT-3′
JpxE2 F: 5′-CATTAATCCACCACTGAAGGAAGTCAGAGC-3′
JpxE2 R: 5′-AGGTGAGCCAGCAAGCCGTATT-3′
U1 F: 5′-CCAGGGCGAGGCTTATCCATT-3′
U1 R: 5′-GCAGTCCCCCACTACCACAAAT-3′

[0255] RNA EMSA

[0256] RNA EMSA was performed as previously described (Sun et al., 2013). Briefly, probes were in vitro transcribed with T7 RNA polymerase (Ambion) from PCR-amplified cDNA template or linearized plasmids with cloned Xist RepA or RepF sequences. Transcripts were TURBO DNase treated, TRIzol purified, 5′-dephosphorylated with alkaline phosphatase (New England Biolabs), labelled with [γ-³²P]ATP using T4 polynucleotide kinase (New England Biolabs), and cleaned with Microspin G-50 columns. Probes were denatured at 95° C. for 2 min, then cooled at 70° C. for 5 min, 37° C. for 15 min, room temperature for 15 min, and kept in folding buffer (50 mM NaCl, 2 mM MgCl₂) on ice. For binding reactions, RNA probes were incubated with recombinant proteins at room temperature for 30 min in binding buffer (total reaction volume 20 μL) containing 50 mM Tris-HCl pH 7.5, 150 mM NaCl, 5 mM MgCl₂, 0.1 mM ZnSO₄, 10% glycerol, 0.1% Tween-20, 1 mM DTT, 1 μg poly(dI-dC), 0.1 mM polyamine, 8U RNase inhibitor (Roche), and 1 μg yeast tRNA. Samples were resolved at 4° C. by TBE polyacrylamide gel electrophoresis and detected using storage phosphor screen and Typhoon scanner (Amersham).

[0257] PCR primers (unlisted primers same as those for in vitro pulldown/UV-RIP):

T7_Neat1 F,
5′-TAATACGACTCACTATAGTGAGTGCTTTGCCACTGAAT-3′
T7_Nespas F,
5′-TAATACGACTCACTATAGAGATGAGTCCAGGTGCTT-3′
T7_Gapdh F,
5′-TAATACGACTCACTATAGATGAATACGGCTACAGCAACAGG-3′
T7_Gtl2_2 F,
5′-TAATACGACTCACTATAGGGTGCTGGTGGATCGTTAAT-3′
Gtl2_2 R,
5′-CTCCACTCCCTATTGCTTTCTATC-3′
T7_Xite F,
5′-TAATACGACTCACTATAGGAAGTGTGTGAGCAGAGTAAGG-3′
Xite R,
5′-GATGCGTGAAGACCCATGAA-3′
T7_Tsix_ex1F,
5′-TAATACGACTCACTATAGACAAGGTCCATGCTCTGTTCC-3′
T7_Tsix_ex1_mF,
5′-TAATACGACTCACTATAGGCAAGCGCTACACACTTGCG-3′
Tsix_ex1_mR,
5′-TTGCAGGTACTTTTGGGACC-3′
Tsix_ex1_mR2,
5′-AAGATGCGTGGATATCTCGG-3′
Tsix_ex1R,
5′-TTAGCCCGCATCTCACCCAC-3′
T7_Jpx_ex1F,
5′-TAATACGACTCACTATAGACGGCACCACCAGGCTTCT-3′
Jpx_ex3R,
5′-GAGTTTATTTGGGCTTACAGTTC-3′

### Primer Combination for Tsix RNA EMSA Probes:

### a, T7_Tsix_ex1F×Tsix_ex1_mR;

### b, T7_Tsix_ex1_mF×Tsix_ex1R;

### c, T7_Tsix_ex1F×Tsix_ex1_mR2;

### d, T7_Tsix_ex1F×Tsix_ex1R.

[0258] Generation of shRNA Knockdown Lines

[0259] Wild-type male J1 (40XY) and female EL16.7 (40XX) ES cell lines and culture conditions have been previously described (Lee and Lu, 1999). Stable knockdown cell lines were generated by linearizing a pLKO.1-based vector containing shRNAs against Tsix, transfecting the DNA into J1 and EL16.7 cells using Lipofectamine 2000 (Invitrogen), and selecting for clones in 1 μg/mL puromycin for 7-9 days. Control cell lines containing a scrambled shRNA were also generated in parallel.

[0260] shRNA sequences were as follows: shTsix3 sense, 5′-GAAATAACCTCCAGAGAAATG-3′; shTsix3 antisense, 5′-CTTTATTGGAGGTCTCTTTAC-3′; shScr sense, 5′-CCTAAGGTTAAGTCGCCCTCG-3′; shScr antisense, 5′-CGAGGGCGACTTAACCTTAGG-3′.

[0261] Each cell line was differentiated for 6-8 days using suspension cultures forming embryoid bodies (EBs) at a starting concentration of ˜5×10⁵ cells/60 cm² as described (Ahn and Lee, 2010). At day 4, EBs were plated onto 0.2% gelatinized tissue culture plates for outgrowth. LIF (leukemia inhibitory factor) was removed from the differentiation medium, and culture medium was changed every two days. All experiments were performed three times. Viable cells were counted using a Cellometer Auto cell counter (Nexcelom Biosciences). Images were taken with a Nikon Eclipse TE2000-E inverted microscope.

[0262] Transient Knockdown by Antisense LNA

[0263] Antisense LNA oligonucleotides were obtained from Exiqon, Corp., and used for Tsix RNA knockdown. LNAs were delivered into female EL16.7 (40XX) ES cell line using Amaxa Biosystems Nucleofector and Mouse ES Cell Nucleofector Kit (Lonza). 2×10⁷ trypsinized cells on d0, d3 and d6 were processed with 2 uM LNA using A-24 program. Cells were collected 6 h or 12 h later. LNA knockdown was confirmed by qRT-PCR using the following primers: TsixCf and TsixCr (see below); Tsix-F2, 5′-GTACGTTACTCGCTAGCAGTAAT-3′ and Tsix-R2, 5′-ATCCTTTGATTTTCTAATACCC-3′; b-actin F, 5′-TTCTTTGCAGCTCCTTCGTT-3′ and b-actin R, 5′-ATGGAGGGGAATACAGCCC-3′ LNA sequences are as follows: Tsix antisense LNA1, 5′-ACTACGCAGGCATTTT-3′; Tsix antisense LNA2, 5′-GTATGGAGTCACCAGGTT-3′; Scr LNA, 5′GTGTAACACGTCTATACGCCCA-3′.

[0264] Chromatin Immunoprecipitation

[0265] ChIP analyses were carried out using a modified protocol from Millipore as described (Ahn and Lee, 2010). Briefly, 1-2λ10⁷ cells were trypsinized and crosslinked with formaldehyde to a final concentration of 1% at 37° C. for 10 min. Crosslinking was quenched with glycine (125 mM final), and cells were pelleted at 640×g for 5 min and washed twice with 1×PBS containing protease inhibitors. Nuclei were isolated from fixed cells by washing once with Buffer A-NP40 (5 mM PIPES pH 8, 85 mM KCl, 0.5% NP40), incubated on ice for 10 min, then washed with Buffer A (5 mM PIPES pH 8, 85 mM KCl) and Lysis Buffer (10 mM Tris-HCl pH 8, 10 mM NaCl, 3 mM MgCl₂, 0.5% NP40). Pelleted nuclei were resuspended in MNase buffer (10 mM Tris-HCl pH 8, 10 mM NaCl, 3 mM MgCl₂, 1 mM CaCl₂, 4% NP40) containing protease inhibitors and 1% SDS. Lysates were sonicated using the Diagenode Bioruptor XL (15 min total with 30 s on and 30 s off cycles). Sonicated lysates were cleared at 16,100×g for 10 min. For each immunoprecipitation, 50 μL of Dynabeads Protein G were first incubated with 5 μg of either αCTCF, αOCT4 (Santa Cruz sc8628) or IgG for 2 hr with rotation, then with sonicated supernatants (˜2.0×10⁶ cells) overnight. IP samples were washed 2× each with Low Salt TSE 150 Buffer (20 mM Tris-HCl pH 8, 0.1% SDS, 1% Triton X-100, 2 mM EDTA, 150 mM NaCl), High Salt TSE 500 Buffer (20 mM Tris-HCl pH 8, 0.1% SDS, 1% Triton X-100, 2 mM EDTA, 500 mM NaCl), LiCl Buffer (10 mM Tris-HCl pH 8, 250 mM LiCl, 1% NP40, 1% deoxycholate, 1 mM EDTA), and TE Buffer (10 mM Tris-HCl pH 8, 1 mM EDTA). Protein-antibody complexes were eluted from the beads with freshly made Elution Buffer (50 mM Tris-HCl pH 8, 1 mM EDTA, 1% SDS, 50 mM NaHCO₃) incubated at 65° C. for 10 mM. Crosslinks were reversed by digestion with 80 μg proteinase K at 65° C. for 4 hrs, and DNA was recovered by phenol/chloroform extraction and used for qPCR with the following primers (Xu et al., 2007; Donohoe et al., 2009; Navarro et al., 2010):

TsixAf,
5′-GTGTGTCATAGCTCAAGAGG-3′
TsixAr,
5′-GGAGCCTAAACCTGTCTGTC-3′
TsixCf,
5′-AATGCTTGCCAGCTATGCGG-3′
TsixCr,
5′-TAACCACCTGTAAGGGACAG-3′
Xitep77 (XiteCf),
5′-CAAGGTTGGGAACAAGGTATATCAGG-3′
Xitep78 (XiteCr),
5′-GGACAAGGGACAGAAGTGCTTATTTTAC-3′
XiteAf,
5′-ATGGCTTTAAGTCTGTAGCACAA-3′
XiteAr,
5′-CAGCCTCTATTCAGCTAGACTCC-3′
RS14f,
5′-ACATTCCGGCTACACACAAG-3′
RS14r,
5′-TGGGTGTTATACCCGTGTAGG-3′
Xist f,
5′-AACCCTTTTAAGTCCACTGTAAAT TCC-3′
Xist r,
5′-TAGAGAGCCAGACAATGCTAAGCC-3′
H19F,
5′-GTCACTCAGGCATAGCATTC-3′
H19R,
5′-GTCTGCCGAGCAATATGTAG-3′
ICRnF,
5′-GAGCTCTAAGGGAGGCTCCG-3′
ICRnR,
5′-CATCATGGTGTCCTCACAGG-3′

[0266] Pairing Analysis

[0267] Pairing was assayed as previously described (Xu et al., 2006). DNA FISH was performed using two X-linked probes (centromeric RP24 and pSx9-Xic) to exclude XO cells. Digital images were taken with a Nikon Eclipse 90i microscope (Nikon Instruments, Inc.) and processed using Volocity software (Improvision). X-X distances were normalized to the nuclear area as distinguished by DAPI staining of the DNA. Measurements in 3D and 2D were essentially identical because maximal z dimensions were small compared to maximal x and y (H. P. Chu and J. T. Lee, unpublished observations).

[0268] Fluorescence In Situ Hybridization (FISH)

[0269] RNA/DNA FISH was performed on ES cells as previously described (Lee and Lu, 1999) using double-stranded Xist or Chr. 2 telomeric (RP24-338B6) DNA probes labeled by nick-translation (Roche). Digital images were taken with a Nikon Eclipse 90i microscope (Nikon Instruments, Inc.) and processed using Volocity software (Improvision). Cells were counted and scored for the presence or absence of an Xist RNA cloud or checked for ploidy.

### Example 1

### The CTCF-RNA Interactome

[0270] We endeavored to define the CTCF-RNA interactome in mouse embryonic stem cell (mESC) and examine its relationship to genomic CTCF-binding sites. To investigate the CTCF-RNA interactome, we performed UV-crosslinking and immunoprecipitation followed by deep sequencing (CLIP-seq) in order to identify directly interacting transcripts (Ule et al., 2005). We modified the CLIP-seq protocol to optimize detection within nuclear CTCF preparations (FIG. 1A; see Methods above), and performed this modified CLIP protocol in a female mESC line expressing inducible FLAG-tagged CTCF at physiological levels. Although expression of FLAG-tagged CTCF was robust after induction, total CTCF expression was nearly equal before and after induction at both the mRNA and protein levels (FIG. 8A,B), suggesting that CTCF levels are under feedback regulation. CLIP was carried out on day 0 (d0) and day 3 (d3) of cell differentiation, with minus-UV controls in parallel. Resolution of the radiolabelled CLIP materials by SDS-PAGE revealed an enrichment above background, with Western blotting indicating CTCF-RNA complexes running slightly higher than the 70-86-kD CTCF monomer and the 150-170-kD dimeric form, consistent with the presence of crosslinked RNA fragments (FIG. 1B). To minimize degradation of RNA during the isolation procedure, we used sonication instead of limiting RNase digestion to fragment RNA and produce CLIP tags of ˜200 nt, as shown by bioanalyzer traces of RNA isolated from CLIP membranes (FIG. 1C, top left panel), with cDNA libraries yielding a range of sizes consistent with the RNA profile (FIG. 1C, bottom left panel). An aliquot of the CLIP nuclear lysate was set aside prior to sonication for total nuclear RNA isolation and RNA-seq library preparation to provide a comparative expression baseline.

[0271] Approximately 200 million reads were obtained for each CLIP-seq (±UV) and RNA-seq libraries from two biological replicates of each sample. After removal of PCR duplicates, 40-50% of reads from the +UV libraries mapped to the mouse genome, resulting in libraries with high complexity; by contrast, only ˜6% from control −UV libraries remained after removal of PCR duplicates, resulting in libraries with very low complexity (Table 3). Scatterplot analysis comparing +UV to −UV CLIP-seq reads revealed vast enrichment of RNA signal in the +UV library (FIG. 1D). Approximately a quarter of reads mapped more than once to the genome, of which 5-10% mapped to each of four well-characterized classes of repetitive elements, including LINEs, SINEs, LTRs, and simple repeats (FIG. 9A). Focusing on uniquely-aligned reads, the Piranha peak-caller software identified 100,000-200,000 statistically significant peaks (p≦0.01, henceforth designated “peaks”) when compared to the −UV CLIP controls. The CLIP peaks represented putative binding domains for the CTCF-RNA interactions. Using the Cis-regulatory Element Annotation System (CEAS), we determined the relative representation of CTCF CLIP peaks within genes and in intergenic space, excluding repetitive sequences. Around 90% of these peaks mapped within 3 kb of RefSeq-annotated gene loci. Thus, in mESC, RNA produced from ˜15,000 annotated genes are targets of CTCF. This large interactome is consistent with a recent analysis performed in a human osteosarcoma cell line using a different technique (Saldana-Meyer et al., 2014). In mESC, CTCF-interacting RNAs tend to reside within or near genes; in comparison to the reference genome, they appeared to localize preferentially to introns, exons, and 3′ untranslated regions (UTR)(FIG. 1D). In addition to the forward strand of annotated genes, CLIP peaks were also identified on the reverse strand (Table 3; FIG. 1E, 9B), suggesting the existence of antisense transcripts that have not been annotated. Antisense RNAs accounted for 2.0-2.5% of peaks, corresponding to 2,000-3,000 loci. The remaining peaks were “intergenic,” located outside of annotated genes (Table 3).

[0272] We then analyzed metagene profiles to examine the pattern of CTCF binding within the average interacting transcript. Interestingly, on the forward (sense) strand, CTCF binding sites trend towards greater enrichment near the 3′ end at transcription termination site (TTS)(FIG. 2A,B, 9C, top panels), consistent with high enrichment within 3′ UTRs (FIG. 1E, 9B). On the reverse (antisense) strand of RefSeq transcripts, enrichment was greatest within 1000 bp of the transcription start site (TSS) of the annotated sense gene (FIG. 2A,B, 9, bottom panels), indicating that CTCF prefered to bind the antisense transcript at a position upstream of the associated sense gene. Loci that produced CTCF-binding RNAs were not enriched in any noteworthy gene ontology (GO) terms, consistent with CTCF being a global transcriptional regulator. Analysis of CTCF CLIP peaks with the Multiple Em for Motif Elicitation (MEME) software also did not reveal a consensus motif, implying that CTCF recognizes RNA through secondary and/or tertiary structures, rather than through primary sequence.

[0273] Because the CTCF CLIP peaks were highly enriched within genes, we sought to rule out the possibility of contamination by nuclear background. We therefore compared the CLIP-seq to nuclear RNA-seq profiles (FIG. 2C). If CTCF bound RNA nonspecifically or if our CLIP-seq method merely resulted in isolation of the nuclear RNA background, we would expect a random scatterplot in the case of nonspecific IP, or observe candidate transcripts residing along the diagonal in the case of nuclear RNA contamination. However, neither was the case. Indeed, we found a significant enrichment of hits in the transcripts of Table 3 (R=0.287, p=2.94×10⁻¹⁷⁸). The proposed RNA interactome lay above the diagonal, inclusive of candidate interacting transcripts such as Tsix, Xist, Nespas, H19 and Kcnq1 ot1. This data, together with the analysis comparing+UV to −UV libraries (FIG. 1D), argued against nonspecific interactions and substantial contamination by nuclear RNA. We conclude that CTCF has the capacity to interact directly with a great diversity of RNA in the mESC transcriptome.

[0274] The software UCSC Liftover was used to convert the empirically determined mouse mm9 coordinates to human hg19 to produce the sequences in Table 2.

### Example 2

### Relationship Between the CTCF RNA Interactome and Epigenomic Landscape

[0275] ChIP-seq analysis of CTCF has been reported in a number of recent publications (Xi et al., 2007; Heintzman et al., 2009; Calabrese et al., 2012). However, allelic profiling of the X-chromosome has not been carried out in female mESC during XCI. To investigate the relationship between the RNA interactome and the genomic CTCF landscape, we performed allele-specific ChIP-seq, with biological replicates, in d0 and d3 female mESCs (Table 4). Allele-specificity was made possible by a genetically marked hybrid female ES cell line carrying a disabled Tsix allele (Tsix^{TST}/+)(Ogawa et al., 2008), ensuring that the Xi (inactive X) will be the Mus musculus X-chromosome (mus) and Xa (active X) will be the Mus castaneus X (cas). Numerous polymorphisms between mus and cas enabled us to distinguish between CTCF ChIP signals from Xi and Xa (Pinter et al., 2012). Between 60-120 million reads were obtained for each ChIP-seq library, PCR duplicates were removed, and ChIP signals were normalized to input. Using the SPP software, we identified 45,000-48,000 CTCF DNA binding sites in d0 and d3 mESC, of which ˜54% mapped within ±3 kb of Refseq annotated genes and the ˜46% remaining reads mapped to intergenic space. Within genes, CTCF ChIP peaks could be observed within promoters, exons, introns, and 5′ and 3′ UTRs. However, metagene analysis indicated a preference for promoter regions (0-3 kb upstream of TSS) and the region immediately downstream of the TTS (0-3 kb downstream of TTS) (FIG. 2D).

TABLE 3
Reads and peaks statistics for CTCF CLIP-seq and RNA-seq.

| | | CLIP-seq | | | | | | | |
|---|---|---|---|---|---|---|---|---|---|
| | | d0 rep1 | | d0 rep2 | | d3 | | RNA-seq | |
| | | +UV | −UV | +UV | −UV | +UV | −UV | d0 | d3 |
| reads | total | 2.18 × 10⁸ | 1.99 × 10⁸ | 2.19 × 10⁸ | 2.12 × 10⁸ | 1.97 × 10⁸ | 2.28 × 10⁸ | 2.50 × 10⁸ | 1.83 × 10⁸ |
| | with PCR duplicates | 2.90 × 10⁷ | 1.64 × 10⁷ | 3.35 × 10⁷ | 1.77 × 10⁷ | 2.81 × 10⁷ | 2.20 × 10⁷ | 4.74 × 10⁷ | 3.48 × 10⁷ |
| | removed | | | | | | | | |
| | uniquely aligned | 1.15 × 10⁷ | 1.0 × 10⁶ | 1.57 × 10⁷ | 1.17 × 10⁶ | 1.06 × 10⁷ | 1.28 × 10⁶ | 2.94 × 10⁷ | 2.04 × 10⁷ |
| | (% total reads; | (5.26%; | (0.53%; | (7.19%; | (0.55%; | (5.40%; | (0.56%; | (11.75%; | (11.16%; |
| | % cleaned-up reads) | 39.52%) | 6.43%) | 47.00%) | 6.62%) | 37.81%) | 5.83%) | 61.93%) | 58.70%) |

| | | | | |
|---|---|---|---|---|
| peaks | total | 114016 | 213183 | 106382 |
| | within annotated | 101876 | 190387 | 96857 |
| | genes (+/− 3b) | | | |
| | no. of loci mapped to | 15301 | 17107 | 14928 |
| | antisense to | 2716 | 5094 | 2137 |
| | annotated genes | | | |
| | no. of loci mapped to | 2062 | 3137 | 2137 |
| | | (1386 overlap with sense) | (2394 overlap with sense) | (1222 overlap with sense) |
| | intergenic | 9424 | 17702 | 7388 |

TABLE 4
Reads and peaks statistics for CTCF ChIP-seq.

| | | ChIP-seq | | | |
|---|---|---|---|---|---|
| | | d0 | | d3 | |
| | | input | IP | input | IP |
| reads | total | 1.27 × 10⁸ | 9.86 × 10⁷ | 9.40 × 10⁷ | 6.66 × 10⁷ |
| | with PCR | 1.01 × 10⁸ | 6.76 × 10⁷ | 8.34 × 10⁷ | 5.66 × 10⁷ |
| | duplicates | | | | |
| | removed | | | | |
| | aligned | 8.69 × 10⁷ | 5.79 × 10⁷ | 7.21 × 10⁷ | 4.82 × 10⁷ |
| | (% of total reads) | (68.67%) | (58.66%) | (76.73%) | (72.32%) |

| | | | |
|---|---|---|---|
| peaks | total | 48495 | 45264 |
| | | (cas: 2932; | (cas: 2533; |
| | | mus: 26052) | mus: 25170) |
| | % within | 53.3% | 54.9% |
| | annotated genes | | |
| | (+/−3kb) | | |
| | % intergenic | 46.6% | 46.1% |

[0276] We then investigated the pattern of RNA binding (statistically significant CLIP-seq peaks) relative to DNA binding (statistically significant ChIP-seq peaks). Compared to CTCF-RNA interactions, CTCF-DNA interactions were more likely (46% vs. 5% of peaks) to occur in intergenic space. Interestingly, however, DNA binding sites were often located in close proximity to CTCF-interacting transcripts (FIG. 2E,F). Metagene analysis indicated that the CTCF-binding transcripts did not generally overlap the genomic binding sites (FIG. 2E). In fact, whereas CTCF tended to bind RNA sequences within gene bodies, it bound chromatin upstream of genes, preferentially in the promoter region and in regions immediately downstream of the TTS. We also examined the distance to the closest DNA-binding site (ChIP peak) from the typical RNA-binding site (CLIP peak) using a “metasite” analysis, and observed that DNA-binding sites occurred at greatest density around 2-kb upstream of the RNA-binding site, with a second concentration of ChIP sites ˜4000 bp downstream of the RNA-binding site (FIG. 2F). These data suggest that CTCF binds RNA and DNA at different locations, but the RNA- and DNA-binding sites tend to occur within 1-4 kb of each other.

[0277] To illustrate the aforementioned points about CTCF binding patterns, we examine specific genic loci. The locus for the Sox2 pluripotency factor harbors a distinct CTCF-DNA binding site upstream of its TSS and a robust CTCF-RNA interaction domain within the 3′ UTR of the Sox2 transcript (FIG. 3A). Notably, the CLIP-seq profile did not resemble the RNA-seq profile; in fact, they were opposite of each other, with CLIP-seq peaks concentrated in the 3′ UTR, and RNAseq reads hsowing highest coverage in the coding region (FIG. 3A). Positive controls further confirmed CLIP-seq specificity. For example, human SRA1 RNA was previously found to associate with a protein complex containing CTCF (Yao et al., 2010). Here, our CLIP-seq analysis demonstrated that the interaction is direct and that mouse Sra1 RNA contacts CTCF via its 3^{rd} exon (FIG. 3B, significant peak in exon 3 [red bar]). Furthermore, binding of CTCF to Jpx RNA was previously shown to require exons 1-3 of Jpx (Sun et al., 2013). Our CLIP-seq analysis not only verified direct CTCF-Jpx interactions but also revealed that contact points occur predominantly within exon 3 (FIG. 3C). As for Sox2 RNA, the CLIP-seq profiles for Jpx and Sra1 were distinct from their RNA-seq profile. In contrast to Sox2, no CTCF-DNA interactions (ChIPseq peaks) were found within either the Jpx or Sra1 locus, consistent with the idea that Jpx and Sra1 RNA act in trans upon targets located at a distance from the site of synthesis (Lanz et al., 1999; Sun et al., 2013).

[0278] Analysis of the rest of the X-inactivation center revealed multiple sites of interaction within both RNA and DNA (FIG. 3D,E). Within Xist, CTCF-Jpx RNA interactions has been proposed to cause eviction of CTCF repressor from the Xist promoter near Repeat F (RepF)(Sun et al., 2013). Indeed, we observed CTCF-DNA interactions near RepF, but also at ˜1 kb upstream of the TSS and within Repeat C (RepC) (FIG. 3D). Meanwhile, CLIP-seq showed highly significant CTCF-RNA interactions within Xist exon 1, with particularly strong interactions at RepA and RepC, where PRC2 and YY1 interact with Xist/RepA transcripts (Zhao et al., 2008; Jeon and Lee, 2011), as well as RepF (FIG. 3D). Within Tsix and Xite, multiple CTCF-binding sites within the DNA had been identified previously by ChIP-qPCR and electromobility shift assays (EMSA)(Chao et al., 2002; Donohoe et al., 2007; Donohoe et al., 2009) and were confirmed here by ChIP-seq (FIG. 3E). Intriguingly, CLIP-seq analysis now identified multiple significant binding peaks with Tsix and Xite RNA (FIG. 3E), the biological significance of which we explored below.

[0279] The Xi provides a complex epigenomic landscape harboring both genes that are subject to silencing and those that escape from XCI (Carrel and Willard, 2005; Li and Carrel, 2008; Yang et al., 2010; Berletch et al., 2011; Calabrese et al., 2012; Pinter et al., 2012; Mugford et al., 2014). Allelic-specific ChIP-seq analysis of female mouse trophoblast stem cells (TSC) previously revealed CTCF localization patterns in a cell type with imprinted paternal X-chromosome silencing (Calabrese et al., 2012). Interestingly, in TSCs, the majority of CTCF binding sites on Xi were shared with Xa; furthermore, although a modest positive correlation was observed for CTCF binding and escape from XCI (Calabrese et al., 2012), no specific structural features have been identified (Mugford et al., 2014). Because imprinted XCI is mechanistically distinct from random XCI (Heard and Disteche, 2006; Starmer and Magnuson, 2009; Wutz, 2011; Disteche, 2012; Lee and Bartolomei, 2013), here we investigated the allelic binding patterns on Xi versus Xa in mESC undergoing random XCI.

[0280] Polymorphic sequences between mus (Xi) and cas (Xa) enabled us to distinguish between different allelic CTCF ChIP signals (Pinter et al., 2012). Although the majority of CTCF ChIP peaks were allelically balanced (or lacked sequence polymorphisms) (FIG. 4A: see “composite” track, which contains the sum of all ChIP reads at indicated positions), those peaks that did have allelic bias revealed very different binding profiles for Xa versus Xi in mESC undergoing XCI (FIG. 4A,B; violet versus green bars)—this contrasted with the mostly identical profiles reported for Xa and Xi in TSC (Calabrese et al., 2012). Even among genes subject to XCI, the pattern of CTCF binding on Xa and Xi were dramatically different (FIG. 4B; green versus violet peaks). Allele-specific binding profiles for escapee genes were also notable. For example, Kdm6a and Mid1 exhibited Xi-specific CTCF peaks (FIG. 4C and data not shown), with an Xi-specific interacting transcript located in close proximity. As was the case throughout the genome (FIG. 2E,F), the DNA binding sites on Xi were frequently located in proximity to CTCF-interacting transcripts in cis (FIG. 4C; 10A-D).

### Example 3

### CTCF is a High-Affinity and Specific RNA-Binding Protein

[0281] The large RNA interactome for CTCF is reminiscent of Polycomb repressive complex 2 (PRC2), for which an interactome of many thousands of transcripts has been reported by RIP-seq (Zhao et al., 2010; WO 2012/065143; WO 2012/087983). Recent work demonstrated that, while PRC2 has high affinity for a variety of transcripts (Davidovich et al., 2013), it binds RNA specifically with a dissociation constant (K_{d}) of ˜80 nM for its strongest targets (Cifuentes-Rojas et al., 2014). Given a similarly large RNA interactome for CTCF, we sought to determine the biochemical specificity and binding affinities between RNA and CTCF.

[0282] To confirm a direct interaction with candidate RNAs, we first performed in vitro pulldown experiments with purified recombinant FLAG-CTCF and a control FLAG-GFP protein. Candidate RNAs identified in the CLIP-seq data were specifically pulled down from total cellular RNA by the purified FLAG-CTCF, whereas the negative controls, Gtl2-as and Ppia, were not pulled down by CTCF significantly (FIG. 5A). Moreover, the negative control pulldowns using FLAG-GFP protein did not result in enrichment of any RNA (FIG. 5A; green bars all at ˜0). Next, we performed in vivo UV-crosslinking followed by RNA immunoprecipitation (UV-RIP) in wild-type d3 ESC using either control IgG or αCTCF antibodies against the endogenous CTCF protein. Once again, target RNAs were specifically enriched in αCTCF pulldowns in UV-crosslinked cells, as compared to αCTCF RIPs in non-UV-crosslinked cells and/or in IgG pulldowns in UV-crosslinked cells (FIG. 5B).

[0283] We also performed RNA electrophoretic mobility shift assays (EMSA) with recombinant FLAG-CTCF and control FLAG-GFP proteins (FIG. 5C), testing in vitro-transcribed RNA fragments based on binding patterns informed by CLIP-seq (FIG. 3). EMSA showed specific RNA-protein shifts that were abrogated by unlabelled competitors at 40× molar excess, while control FLAG-GFP protein did not shift any of the RNA fragments (FIG. 5D). These experiments showed that, like the positive control Jpx RNA, the test RNAs (Tsix, Xist RepF, and Xite) could all bind CTCF, whereas the negative control Gapdh RNA could not. The imprinted lncRNAs, Nespas and Gtl2, were also shifted by CTCF, consistent with CLIP-seq data (FIG. 10A-D). To map specific RNA-protein interaction domains, we focused on the 5′ 400-nt region of Tsix (Tsix-d), which was identified as a strong binding site by CLIP-seq (FIG. 3E) and also shifted robustly by CTCF in the EMSA (FIG. 5D). We observed that within fragment d, subfragment c, but not b or a, could bind CTCF (FIG. 5E). To map the RNA-binding domain of CTCF, we carried out EMSA using domain-specific CTCF peptides. Interestingly, the fragment containing the Zn-finger region—a known nucleic-acids interaction domain—did not bind RNA; rather, the C-terminal region gave a specific RNA shift (FIG. 5F).

### Example 4

### Tsix RNA Recruits CTCF and Directs X-Chromosome Pairing

[0284] The genome-wide association identified here between CTCF-binding DNA and RNA sequences may suggest a functional relationship between the two. At the p53 locus, it has been proposed that binding of CTCF to an overlapping antisense transcript, Wrap53, regulates expression of p53 (Saldana-Meyer et al., 2014). Here we asked if CTCF RNA interactions may have other functions in epigenetic regulation. The association between CTCF and Tsix RNA was of particular interest because previous work strongly hinted that RNA may be required for inter-chromosomal interactions between the two X-inactivation centers (Xu et al., 2007). Random XCI is modeled ex vivo by mESCs undergoing cell differentiation, during which they recapitulate X-chromosome counting, choice, and spreading of silencing by Xist RNA (Starmer and Magnuson, 2009; Wutz, 2011; Disteche, 2012; Lee and Bartolomei, 2013). Xist is in turn controlled by the antisense Tsix locus and by Xite, a Tsix enhancer located between the major and minor promoters of Tsix and that produces short eRNAs (enhancer-associated RNAs)(Lee, 1999; Sado et al., 2001; Ogawa and Lee, 2003; Stavropoulos et al., 2005). Together, Tsix and Xite not only control allelic expression of Xist RNA, but also induce X-chromosome pairing, a transient event restricted to the Xic and observed prior to Xist upregulation between days 2-4 of mESC differentiation (Bacher et al., 2006; Xu et al., 2006; Xu et al., 2007; Masui et al., 2011). Genetic analyses have shown that pairing depends on a 15-kb region encompassing Tsix and Xite (Xu et al., 2006; Xu et al., 2007)(FIG. 6A). Interestingly, X-X pairing is rapidly disrupted by POL-II inhibitors, suggesting that newly synthesized transcripts—potentially Tsix and Xite themselves—may be required for the interchromosomal interactions.

[0285] Given a known requirement for Tsix/Xite and CTCF in X-X pairing (Xu et al., 2007) and in light of CTCF interactions with Tsix/Xite RNA (FIG. 3E), we investigated the functional relationship between CTCF-Tsix and CTCF-Xite interactions. First, we performed in vivo UV-RIP analysis to confirm the domains of interaction identified by CLIP-seq (FIG. 3E). Indeed, the regions of Tsix/Xite RNAs interacted specifically and directly with CTCF protein in vivo (FIG. 6B). We then knocked down Tsix RNA in female mESC using various strategies, including transiently transfected siRNAs, stably expressed shRNAs, and locked nucleic acid (LNA) gapmer oligonucleotides (which access nuclear lncRNAs more effectively (Sarma et al., 2010)). Whereas all tested siRNAs and most shRNAs were ineffective (data not shown), one shRNA directed at the Xite enhancer (Ogawa and Lee, 2003) and the overlapping minor Tsix transcript (Sado et al., 2001) achieved ˜85% KD (FIG. 6C) and two LNAs directed at the major Tsix transcript, achieved 60-90% KD (FIG. 6D,E). To investigate effects on X-X pairing, we performed DNA fluorescence in situ hybridization (FISH) and measured Tsix inter-allelic distances. Knocking down Tsix (TsixKD) at all three positions reduced the number of X-X pairs between days 2-6 of differentiation (d2-d6) when pairing normally takes place (FIG. 6C-E; 11A-C). By contrast, scrambled shRNA or LNA (ScrKD) did not have any effect. Because the shRNA and LNAs yielded similar results, we henceforth show experiments using cell lines expressing the stably transfected shRNA, as these cells were more amenable to long-term differentiation assays.

[0286] We hypothesized that Tsix RNA may function as a locus-specific recruiting tool to recruit CTCF and thereby direct X-X pairing. In TsixKD cells, chromatin immunoprecipitations (ChIPs) of CTCF and OCT4, two transcriptional activators of Tsix/Xite known to regulate X-X pairing (Xu et al., 2006; Xu et al., 2007), showed reduced occupancy of CTCF at binding sites XiteC, XiteA, TsixA, and RS14 and decreased binding of OCT4 to binding sites XiteC, XiteA, and TsixA (FIG. 7A,B). Effects on binding were specific to this region, as CTCF and OCT4 binding to other X-linked regions was not altered (FIG. 12A-B). Other chromatin epitopes (e.g., H3K27me3) were also not affected by the knockdown (FIG. 12A-B). Consistent with disrupted pairing, TsixKD female cells exhibited defective embryoid body (EB) outgrowth (FIG. 7C), in spite of appropriate downregulation of pluripotency factors which indicated initiation of cell differentiation (FIG. 7D). Neither ScrKD female cells nor TsixKD male cells exhibited these anomalies (FIG. 7C). We furthermore observed that Xist induction was compromised, as only 1-2% of cells show full Xist upregulation between d2-d6 (P=0.03, FIG. 7E). Taken together, our functional analysis demonstrates that Tsix RNA is required for pairing and that it acts in this context by recruiting CTCF to the pairing center.

### Example 5

### Human CTCF Binding Sites

[0287] Using the methods and criteria described above, CTCF binding sites and their associated caRNAs were also identified in human HEK 293 kidney cells. Using a HEK 293 cell line expressing a FLAG-tagged CTCF construct (MacPherson, M. J., Beatty, L. G., Zhou, W., Du, M., and Sadowski, P. D. (2009) Mol Cell Biol 29:714-25), CLIP was performed to generate a CTCF-RNA interactome as described above for mESCs. Briefly, UV-crosslinking and immunoprecipitation of RNA followed by high-throughput sequencing was used to identify Ctcf-interacting RNAs. Peaks were called from uniquely mapped reads using the software Piranha. To produce non-overlapping peaks, entries from independent experiments were merged, then each entry was expanded by 500 nucleotides on each end, and then remerged. Human (hg19) data were obtained from 2 biological replicates using HEK293 cells. Approximately 170 million reads were obtained, of which about 4 million mapped uniquely to the human genome, producing about 51,000 statistically-signficant peaks, covering about 8500 genes (sense or antisense). The peaks (representing CTCF binding sites), plus 500 nucleotides on either end, are listed in Table 1.

### REFERENCES

[0288] Ahn, J. Y., and Lee, J. T. (2010). Retinoic acid accelerates downregulation of the Xist repressor, Oct4, and increases the likelihood of Xist activation when Tsix is deficient. BMC Dev Biol 10, 90
[0289] Bacher, C. P., Guggiari, M., Brors, B., Augui, S., Clerc, P., Avner, P., Eils, R., and Heard, E. (2006). Transient colocalization of X-inactivation centres accompanies the initiation of X inactivation. Nat Cell Biol 8, 293-299
[0290] Bell, A. C., and Felsenfeld, G. (2000). Methylation of a CTCF-dependent boundary controls imprinted expression of the Igf2 gene. Nature 405, 482-485.
[0291] Berletch, J. B., Yang, F., Xu, J., Carrel, L., and Disteche, C. M. (2011). Genes that escape from X inactivation. Hum Genet 130, 237-245
[0292] Calabrese, J. M., Sun, W., Song, L., Mugford, J. W., Williams, L., Yee, D., Starmer, J., Mieczkowski, P., Crawford, G. E., and Magnuson, T. (2012). Site-specific silencing of regulatory elements as a mechanism of X inactivation. Cell 151, 951-963
[0293] Carrel, L., and Willard, H. F. (2005). X-inactivation profile reveals extensive variability in X-linked gene expression in females. Nature 434, 400-404
[0294] Chao, W., Huynh, K. D., Spence, R. J., Davidow, L. S., and Lee, J. T. (2002). CTCF, a candidate trans-acting factor for X-inactivation choice. Science 295, 345-347
[0295] Chen, H., Tian, Y., Shu, W., Bo, X., and Wang, S. (2012). Comprehensive identification and annotation of cell type-specific and ubiquitous CTCF-binding sites in the human genome. PLoS ONE 7, e41374
[0296] Cifuentes-Rojas, C., Hernandez, A., Sarma, K., and Lee, J. T. (2014). Regulatory interactions between RNA and Polycomb repressive complex 2. Molecular Cell ePub May 29, 2014
[0297] Davidovich, C., Zheng, L., Goodrich, K. J., and Cech, T. R. (2013). Promiscuous RNA binding by Polycomb repressive complex 2. Nature structural & molecular biology 20, 1250-1257
[0298] DeMare, L. E., Leng, J., Cotney, J., Reilly, S. K., Yin, J., Sarro, R., and Noonan, J. P. (2013). The genomic landscape of cohesin-associated chromatin interactions. Genome Res 23, 1224-1234
[0299] Disteche, C. M. (2012). Dosage compensation of the sex chromosomes. Annual review of genetics 46, 537-560
[0300] Dixon, J. R., Selvaraj, S., Yue, F., Kim, A., Li, Y., Shen, Y., Hu, M., Liu, J. S., and Ren, B. (2012). Topological domains in mammalian genomes identified by analysis of chromatin interactions. Nature 485, 376-380
[0301] Donohoe, M. E., Silva, S. S., Pinter, S. F., Xu, N., and Lee, J. T. (2009). The pluripotency factor Oct4 interacts with Ctcf and also controls X-chromosome pairing and counting. Nature 460, 128-132
[0302] Donohoe, M. E., Zhang, L. F., Xu, N., Shi, Y., and Lee, J. T. (2007). Identification of a Ctcf cofactor, Yyl, for the X chromosome binary switch. Mol Cell 25, 43-56
[0303] Filippova, G. (2008). Genetics and epigenetics of the multifunctional protein CTCF. Curr Top Dev Biol 80, 337-360
[0304] Filippova, G. N., Cheng, M. K., Moore, J. M., Truong, J.-P., Hu, Y. J., Nguyen, D. K., Tsuchiya, K. D., and Disteche, C. M. (2005). Boundaries between Chromosomal domains of X inactivation and escape bind CTCF and lack CpG methylation during early development. Dev Cell 8, 31-42
[0305] Handoko, L., Xu, H., Li, G., Ngan, C. Y., Chew, E., Schnapp, M., Lee, C. W., Ye, C., Ping, J. L., Mulawadi, F., et al. (2011). CTCF-mediated functional chromatin interactome in pluripotent cells. Nat Genet 43, 630-638
[0306] Hark, A. T., Schoenherr, C. J., Katz, D. J., Ingram, R. S., Levorse, J. M., and Tilghman, S. M. (2000). CTCF mediates methylation-sensitive enhancer-blocking activity at the H19/Igf2 locus. Nature 405, 486-489
[0307] Heard, E., and Disteche, C. M. (2006). Dosage compensation in mammals: fine-tuning the expression of the X chromosome. Genes Dev 20, 1848-1867
[0308] Heintzman, N. D., Hon, G. C., Hawkins, R. D., Kheradpour, P., Stark, A., Harp, L. F., Ye, Z., Lee, L. K., Stuart, R. K., Ching, C. W., et al. (2009). Histone modifications at human enhancers reflect global cell-type-specific gene expression. Nature 459, 108-112
[0309] Jensen, K. B., and R. B., D. (2008). CLIP: crosslinking and immunoprecipitation of in vivo RNA targets of RNA-binding proteins. Methods Mol Biol 488, 85-98
[0310] Jeon, Y., and Lee, J. T. (2011). YY1 Tethers Xist RNA to the Inactive X Nucleation Center. Cell 146, 119-133
[0311] Kanduri, C., Fitzpatrick, G., Mukhopadhyay, R., Kanduri, M., Lobanenkov, V., Higgins, M., and Ohlsson, R. (2002). A differentially methylated imprinting control region within the Kcnq1 locus harbors a methylation-sensitive chromatin insulator. J Biol Chem 277, 18106-18110.
[0312] Kharchenko, P. V., Tolstorukov, M. Y., and Park, P. J. (2008). Design and analysis of ChIP-seq experiments for DNA-binding proteins. Nat Biotech 26, 1351-1359
[0313] Kim, D., Pertea, G., Trapnell, C., Pimentel, H., Kelley, R., and Salzberg, S. L. (2013). TopHat2: accurate alignment of transcriptomes in the presence of insertions, deletions and gene fusions. Genome Biol 14, R36
[0314] Kim, T. H., Abdullaev, Z. K., Smith, A. D., Ching, K. A., Loukinov, D. I., Green, R. D., Zhang, M. Q., Lobanenkov, V. V., and Ren, B. (2007). Analysis of the vertebrate insulator protein CTCF-binding sites in the human genome. Cell 128, 1231-1245
[0315] Kung, J. T., Colognori, D., and Lee, J. T. (2013). Long noncoding RNAs: Past, present, and future. Genetics 193, 651-669
[0316] Lai, F., Orom, U. A., Cesaroni, M., Beringer, M., Taatjes, D. J., Blobel, G. A., and Shiekhattar, R. (2013a). Activating RNAs associate with Mediator to enhance chromatin architecture and transcription. Nature 494, 497-501
[0317] Lai, F., Ørom, U. A., Cesaroni, M., Beringer, M., Taatjes, D. J., Blobel, G. A., and Shiekhattar, R. (2013b). Activating RNAs associate with Mediator to enhance chromatin architecture and transcription. Nature 494, 497-501
[0318] Lanz, R. B., McKenna, N. J., Onate, S. A., Albrecht, U., Wong, J., Tsai, S. Y., Tsai, M. J., and O'Malley, B. W. (1999). A steroid receptor coactivator, SRA, functions as an RNA and is present in an SRC-1 complex. Cell 97, 17-27
[0319] Lee, J. T., and Bartolomei, M. S. (2013). X-Inactivation, Imprinting, and Long Noncoding RNAs in Health and Disease. Cell 152, 1308-1323
[0320] Lee, J. T., Davidow, L. S., and Warshawsky, D. (1999). Tsix, a gene antisense to Xist at the X-inactivation centre. Nat Genet 21, 400-404
[0321] Lee, J. T., and Lu, N. (1999). Targeted mutagenesis of Tsix leads to nonrandom X inactivation. Cell 99, 47-57
[0322] Li, H., Handsaker, B., Wysoker, A., Fennell, T., Ruan, J., Homer, N., Marth, G., Abecasis, G., Durbin, R., and 1000 Genome Project Data Processing Subgroup (2009). The Sequence Alignment/Map format and SAMtools. Bioinformatics 25, 2078-2079
[0323] Li, N., and Carrel, L. (2008). Escape from X chromosome inactivation is an intrinsic property of the Jarid1c locus. Proc Natl Acad Sci USA 105, 17055-17060
[0324] Li, T., Hu, J. F., Qiu, X., Ling, J., Chen, H., Wang, S., Hou, A., Vu, T. H., and Hoffman, A. R. (2008). CTCF regulates allelic expression of Igf2 by orchestrating a promoter-polycomb repressive complex 2 intrachromosomal loop. Mol Cell Biol 28, 6473-6482
[0325] Li, W., Notani, D., Ma, Q., Tanasa, B., Nunez, E., Chen, A. Y., Merkurjev, D., Zhang, J., Ohgi, K., Song, X., et al. (2013). Functional roles of enhancer RNAs for oestrogen-dependent transcriptional activation. Nature 498, 516-520
[0326] Licatalosi, D. D., Mele, A., Fak, J. J., Ule, J., Kayikci, M., Chi, S. W., Clark, T. A., Schweitzer, A. C., Blume, J. E., Wang, X., et al. (2008). HITS-CLIP yields genome-wide insights into brain alternative RNA processing. Nature 456, 464-469
[0327] Ling, J. Q., Li, T., Hu, J. F., Vu, T. H., Chen, H. L., Qiu, X. W., Cherry, A. M., and Hoffman, A. R. (2006). CTCF mediates interchromosomal colocalization between Igf2/H19 and Wsb1/Nf1. Science 312, 269-272
[0328] Lobanenkov, V. V., Nicolas, R. H., Adler, V. V., Paterson, H., Klenova, E. M., Polotskaja, A. V., and Goodwin, G. H. (1990). A novel sequence-specific DNA binding protein which interacts with three regularly spaced direct repeats of the CCCTC-motif in the 5′ flaking sequence of the chicken c-myc gene. Oncogene 5, 1743-1753
[0329] Martin, M. (2011). Cutadapt removes adapter sequences from high-throughput sequencing reads. EMBnet J 17, 10-12
[0330] Masui, O., Bonnet, I., Le Baccon, P., Brito, I., Pollex, T., Murphy, N., Hupe, P., Barillot, E., Belmont, A. S., and and Heard, E. (2011). Live-cell chromosome dynamics and outcome of X chromosome pairing events during ES cell differentiation. Cell 145, 447-458
[0331] Mugford, J. W., Starmer, J., Williams, R. L., Jr., Calabrese, J. M., Mieczkowski, P., Yee, D., and Magnuson, T. (2014). Evidence for Local Regulatory Control of Escape from Imprinted X Chromosome Inactivation. Genetics
[0332] Nakahashi, H., Kwon, K. R., Resch, W., Vian, L., Dose, M., Stavreva, D., Hakim, O., Pruett, N., Nelson, S., Yamane, A., et al. (2013). A genome-wide map of CTCF multivalency redefines the CTCF code. Cell Rep 3, 1678-1689
[0333] Navarro, P., Oldfield, A., Legoupi, J., Festuccia, N., Dubois, A., Attia, M., Schoorlemmer, J., Rougeulle, C., Chambers, I., and Avner, P. (2010). Molecular coupling of Tsix regulation and pluripotency. Nature 468, 457-460
[0334] Nora, E. P., Lajoie, B. R., Schulz, E. G., Giorgetti, L., Okamoto, I., Servant, N., Piolot, T., van Berkum, N. L., Meisig, J., Sedat, J., et al. (2012). Spatial partitioning of the regulatory landscape of the X-inactivation centre. Nature 485, 381-385
[0335] Ogawa, Y., and Lee, J. T. (2003). Xite, X-inactivation intergenic transcription elements that regulate the probability of choice. Mol Cell 11, 731-743
[0336] Ogawa, Y., Sun, B. K., and Lee, J. T. (2008). Intersection of the RNA interference and X-inactivation pathways. Science 320, 1336-1341
[0337] Ohlsson, R., Lobanenkov, V., and Klenova, E. (2010). Does CTCF mediate between nuclear organization and gene expression? BioEssays: news and reviews in molecular, cellular and developmental biology 32, 37-50
[0338] Ohlsson, R., Renkawitz, R., and Lobanenkov, V. V. (2001). CTCF is a uniquely versatile transcription regulator linked to epigenetics and disease. Trends Genet 7, 520-527
[0339] Ong, C.-T., and Corces, V. G. (2014). CTCF: an architectural protein bridging genome topology and function. Nat Rev Genet 15, 234-246
[0340] Palstra, R. J., Tolhuis, B., Splinter, E., Nijmeijer, R., Grosveld, F., and de Laat, W. (2003). The β-globin nuclear compartment in development and erythroid differentiation. Nat Genet 35, 190-194
[0341] Phillips-Cremins, J. E., Sarnia, M. E., Sanyal, A., Gerasimova, T. I., Lajoie, B. R., Bell, J. S., Ong, C. T., Hookway, T. A., Guo, C., Sun, Y., et al. (2013). Architectural protein subclasses shape 3D organization of genomes during lineage commitment. Cell 153, 1281-1295
[0342] Pinter, S. F., Sadreyev, R. I., Yildirim, E., Jeon, Y., Ohsumi, T. K., Borowsky, M., and T., L. J. (2012). Spreading of X chromosome inactivation via a hierarchy of defined Polycomb stations. Genome Res 22, 1864-1876
[0343] Quinlan, A. R., and Hall, I. M. (2010). BEDTools: a flexible suite of utilities for comparing genomic features. Bioinformatics 26, 841-842
[0344] Sado, T., Wang, Z., Sasaki, H., and Li, E. (2001). Regulation of imprinted X-chromosome inactivation in mice by Tsix. Development 128, 1275-1286
[0345] Saldana-Meyer, R., Gonzalez-Buendia, E., Guerrero, G., Narendra, V., Bonasio, R., Recillas-Targa, F., and Reinberg, D. (2014). CTCF regulates the human p53 gene through direct interaction with its natural antisense transcript, Wrap53. Genes Dev 28, 723-734
[0346] Sanyal, A., Lajoie, B. R., Jain, G., and Dekker, J. (2012). The long-range interaction landscape of gene promoters. Nature 489, 109-113
[0347] Sarma, K., Levasseur, P., Aristarkhov, A., and Lee, J. T. (2010). Locked nucleic acids reveal sequence requirements and kinetics of Xist RNA localization to the X chromosome. Proc Natl Acad Sci USA 107, 22196-22201
[0348] Shen, Y., Yue, F., McCleary, D. F., Ye, Z., Edsall, L., Kuan, S., Wagner, U., Dixon, J., Lee, L., Lobanenkov, V. V., et al. (2012). A map of the cis-regulatory sequences in the mouse genome. Nature 488, 116-120
[0349] Shin, H., Liu, T., Manrai, A. K., and Liu, X. S. (2009). CEAS: cis-regulatory element annotation system. Bioinformatics 19, 2605-2606
[0350] Spencer, R. J., B. C., d. R., Pinter, S. F., Lessing, D., Sadreyev, R. I., and Lee, J. T. (2011). A boundary element between Tsix and Xist binds the chromatin insulator Ctcf and contributes to initiation of X-chromosome inactivation. Genetics 189, 441-454
[0351] Splinter, E., Heath, H., Kooren, J., Palstra, R. J., Klous, P., Grosveld, F., Galjart, N., and de Laat, W. (2006). CTCF mediates long-range chromatin looping and local histone modification in the beta-globin locus. Genes Dev 20, 2349-2354
[0352] Starmer, J., and Magnuson, T. (2009). A new model for random X chromosome inactivation. Development 136, 1-10
[0353] Stavropoulos, N., Rowntree, R. K., and Lee, J. T. (2005). Identification of developmentally specific enhancers for Tsix in the regulation of X chromosome inactivation. Mol Cell Biol 25, 2757-2769
[0354] Sun, S., del Rosario, B. C., Szanto, A., Ogawa, Y., Jeon, Y., and Lee, J. T. (2013). Jpx RNA activates Xist by evicting CTCF. Cell 153, 1537-1551
[0355] Takahashi, K., Saitoh, S., and Yanagida, M. (2000). Application of the chromatin immunoprecipitation method to identify in vivo protein-DNA associations in fission yeast. Sci STKE 2000, pl 1
[0356] Trapnell, C., Roberts, A., Goff, L., Pertea, G., Kim, D., Kelley, D. R., Pimentel, H., Salzberg, S. L., Rinn, J. L., and Pachter, L. (2012). Differential gene and transcript expression analysis of RNA-seq experiments with TopHat and Cufflinks. Nat Protocols 7, 562-578
[0357] Tsai, C. L., Rowntree, R. K., Cohen, D. E., and Lee, J. T. (2008). Higher order chromatin structure at the X-inactivation center via looping DNA. Dev Biol 319, 416-425
[0358] Ule, J., Jensen, K., Mele, A., and Darnell, R. B. (2005). CLIP: a method for identifying protein-RNA interaction sites in living cells. Methods 37, 376-386
[0359] Ule, J., Jensen, K. B., Ruggiu, M., Mele, A., Ule, A., and Darnell, R. B. (2003). CLIP identifies Nova-regulated RNA networks in the brain. Science 302, 1212-1215
[0360] Uren, P. J., Bahrami-Samani, E., Burns, S. C., Qiao, M., Karginov, F. V., Hodges, E., Hannon, G. J., Sanford, J. R., Penalva, L. O. F., and Smith, A. D. (2012). Site identification in high-throughput RNA-protein interaction data. Bioinformatics 28, 3013-3020
[0361] Wan, L. B., and Bartolomei, M. S. (2008). Regulation of imprinting in clusters: Noncoding RNAs versus insulators. Adv Genet 61, 207-223
[0362] Wutz, A. (2011). Gene silencing in X-chromosome inactivation: advances in understanding facultative heterochromatin formation. Nat Rev Genet 12, 542-553
[0363] Xi, H., Shulha, H. P., Lin, J. M., Vales, T. R., Fu, Y., Bodine, D. M., McKay, R. D., Chenoweth, J. G., Tesar, P. J., Furey, T. S., et al. (2007). Identification and characterization of cell type-specific and ubiquitous chromatin regulatory structures in the human genome. PLoS genetics 3, e136
[0364] Xu, N., Donohoe, M. E., Silva, S. S., and Lee, J. T. (2007). Evidence that homologous X-chromosome pairing requires transcription and Ctcf protein. Nat Genet 39, 1390-1396
[0365] Xu, N., Tsai, C. L., and Lee, J. T. (2006). Transient homologous chromosome pairing marks the onset of X inactivation. Science 311, 1149-1152
[0366] Yang, F., Babak, T., Shendure, J., and Disteche, C. M. (2010). Global survey of escape from X inactivation by RNA-sequencing in mouse. Genome Res 20, 614-622
[0367] Yao, H., Brick, K., Evrard, Y., Xiao, T., Camerini-Otero, R. D., and Felsenfeld, G. (2010). Mediation of CTCF transcriptional insulation by DEAD-box RNA-binding protein p68 and steroid receptor RNA activator SRA. Genes Dev 24, 2543-2555
[0368] Yeo, G. W., Coufal, N. G., Liang, T. Y., Peng, G. E., Fu, X. D., and Gage, F. H. (2009). An RNA code for the FOX2 splicing regulator revealed by mapping RNA-protein interactions in stem cells. Nat Struct Mol Biol 16, 130-137
[0369] Zhang, H., Niu, B., Hu, J. F., Ge, S., Wang, H., Li, T., Ling, J., Steelman, B. N., Qian, G., and A. R., H. (2011). Interruption of intrachromosomal looping by CCCTC binding factor decoy proteins abrogates genomic imprinting of human insulin-like growth factor II. J Cell Biol 193, 475-487
[0370] Zhao, J., Ohsumi, T. K., Kung, J. T., Y., O., D. J., G., Sarma, K., Song, J. J., Kingston, R. E., Borowsky, M., and Lee, J. T. (2010). Genome-wide identification of polycomb-associated RNAs by RIP-seq. Mol Cell 40, 939-953
[0371] Zhao, J., Sun, B. K., Erwin, J. A., Song, J. J., and Lee, J. T. (2008). Polycomb proteins targeted by a short repeat RNA to the mouse X chromosome. Science 322, 750-756

### OTHER EMBODIMENTS

[0372] It is to be understood that while the invention has been described in conjunction with the detailed description thereof, the foregoing description is intended to illustrate and not limit the scope of the invention, which is defined by the scope of the appended claims. Other aspects, advantages, and modifications are within the scope of the following claims.

What is claimed is:

1. A method of activating an inactive X-linked allele in a cell, preferably a cell of a female heterozygous subject, the method comprising administering to the cell an inhibitory oligonucleotide targeting a sequence within 500 nucleotides of a CTCF binding site on a CTCF-interacting RNA.

2. A method of activating a repressed autosomal gene in a cell, the method comprising administering to the cell an inhibitory oligonucleotide targeting a sequence within 500 nucleotides of a CTCF binding site on a CTCF-interacting RNA that represses the autosome or the autosomal gene.

3. A method of downregulating an X-linked escapee gene in a cell, the method comprising administering to the cell an inhibitory oligonucleotide targeting a sequence within 500 nucleotides of a CTCF binding site on a CTCF-interacting RNA that increases expression of the X-linked escapee gene.

4. A method of repressing an autosomal gene in a cell, the method comprising administering to the cell an inhibitory oligonucleotide targeting a sequence within 500 nucleotides of a CTCF binding site on a CTCF-interacting RNA that increases expression of the autosomal gene.

5. The method of claim 1, wherein the inactive X-linked allele is associated with an X-linked disorder, and the oligonucleotide is administered in a therapeutically effective amount.

6. The method of claim 1, wherein the cell is in a living subject.

7. The method of claim 1, wherein the inhibitory oligonucleotide is identical or complementary to at least 8 consecutive nucleotides of a strong or moderate binding site nucleotide sequence as set forth in Tables 1-2, or complementary to at least 8 consecutive nucleotides of a caRNA as set forth in Tables 1-2.

8. The method of claim 1, wherein the oligonucleotide does not comprise three or more consecutive guanosine nucleotides.

9. The method of claim 1, wherein the oligonucleotide does not comprise four or more consecutive guanosine nucleotides.

10. The method of claim 1, wherein the oligonucleotide is 8 to 30 nucleotides in length.

11. The method of claim 1, wherein at least one nucleotide of the oligonucleotide is a nucleotide analogue or a 2′ O-methyl.

12. The method of claim 1, wherein the oligonucleotide comprises at least one ribonucleotide, at least one deoxyribonucleotide, or at least one bridged nucleotide.

13. The method of claim 12, wherein the bridged nucleotide is a LNA nucleotide, a cEt nucleotide or a ENA modified nucleotide.

14. The method of claim 1, wherein one or more of the nucleotides of the oligonucleotide comprise 2′-fluoro-deoxyribonucleotides, one or more of the nucleotides of the oligonucleotide comprise 2′-O-methyl nucleotides, one or more of the nucleotides of the oligonucleotide comprise ENA nucleotide analogues, and/or one or more of the nucleotides of the oligonucleotide comprise LNA nucleotides.

15. The method of claim 1, wherein the nucleotides of the oligonucleotide comprise comprising phosphorothioate internucleotide linkages between at least two nucleotides or between all nucleotides.

16. An inhibitory oligonucleotide that is complementary or identical to at least 8 consecutive nucleotides of a CTCF binding site nucleotide sequence as set forth in Tables 1-2.

17. The oligonucleotide of claim 16, wherein the oligonucleotide does not comprise three or more consecutive guanosine nucleotides.

18. The oligonucleotide of claim 16, wherein the oligonucleotide is 8 to 30 nucleotides in length.

19. The oligonucleotide of claim 16, wherein at least one nucleotide of the oligonucleotide is a nucleotide analogue or at least one nucleotide of the oligonucleotide comprises a 2′ O-methyl.

20. The oligonucleotide of claim 16, wherein the oligonucleotide comprises at least one ribonucleotide, at least one deoxyribonucleotide, or at least one bridged nucleotide.

21. The oligonucleotide of claim 20, wherein the bridged nucleotide is a LNA nucleotide, a cEt nucleotide or a ENA modified nucleotide.

22. The oligonucleotide of claim 16, wherein one or more of the nucleotides of the oligonucleotide comprise 2′-fluoro-deoxyribonucleotides or 2′-O-methyl nucleotides.

23. The oligonucleotide of claim 16, wherein one or more of the nucleotides of the oligonucleotide comprise ENA nucleotide analogues, and/or one or more of the nucleotides of the oligonucleotide comprise LNA nucleotides.

24. The method of claim 1, wherein the nucleotides of the oligonucleotide comprise phosphorothioate internucleotide linkages between at least two nucleotides.

25. The method of claim 1, wherein the nucleotides of the oligonucleotide comprise phosphorothioate internucleotide linkages between all nucleotides.

26. The method of claim 1, wherein the oligonucleotide is a gapmer or a mixmer.

27. The oligonucleotide of claim 16, which is a gapmer or a mixmer.

28. A method of increasing expression of a selected gene listed in Tables 1 or 2 in a cell, the method comprising contacting the cell with a nucleic acid triplex-forming oligonucleotide (TFO) that binds specifically to a CTCF localization sequence or binding site associated with the selected gene.

29. The method of claim 28, wherein the TFO comprises one or more of DNA, RNA, PNA, HNA, MNA, ANA, LNA, CAN, INA, CeNA, TNA, (2′-NH)-TNA, (3′-NH)-TNA, alpha-L-Ribo-LNA, alpha-L-Xylo-LNA, beta-D-Ribo-LNA, beta-D-Xylo-LNA, [3.2.1]-LNA, Bicyclo-DNA, 6-Amino-Bicyclo-DNA, 5-epi-Bicyclo-DNA, alpha-Bicyclo-DNA, Tricyclo-DNA, Bicyclo[4.3.0]-DNA, Bicyclo[3.2.1]-DNA, Bicyclo[4.3.0]amide-DNA, beta-D-Ribopyranosyl-NA, alpha-L-Lyxopyranosyl-NA, 2′-R-RNA, 2′-OR-RNA, 2′-AE-RNA, alpha-L-RNA, and beta-D-RNA.

30. The method of claim 29, wherein the TFO includes one or more modifications described herein.

The application's sequence listing, which the Patent Office published only in electronic form, follows.

SEQUENCE LISTING (139660 sequences)

SEQ ID NO: 1 - DNA, 1044 bp, Homo sapiens
cgccgaccgttgactattctctacaaaccacaaagacattggaacactatacctattattcggcgcatgagctggagtcctaggcacagctctaagcctccttattcgagccgaactgggccagccaggcaaccttctaggtaacgaccacatctacaacgttatcgtcacagcccatgcatttgtaataatcttcttcatagtaatacccatcataatcggaggctttggcaactgactagttcccctaataatcggtgcccccgatatggcgtttccccgcataaacaacataagcttctgactcttacccccctctctcctactcctgcttgcatctgctatagtggaggccggcgcaggaacaggttgaacagtctaccctcccttggcagggaactactcccaccctggagcctccgtagacctaaccatcttctccttacacctagcaggtatctcctctatcttaggagccatcaatttcatcacaacaattattaatataaaaccccctgccataacccaataccaaacgccccttttcgtctgatccgtcctaatcacagcagtcttacttctcctatctctcccagtcctagccgctggcatcactatactactaacagaccgtaacctcaacaccaccttcttcgacccagccggaggaggagaccccattctataccaacacctattctgatttttcggtcaccctgaagtttatattctcatcctaccaggcttcggaataatctcccatattgtaacttactactccgggaaaaaaagaaccatttggatacataggtatggtctgagctatgatatcaattggcttcctagggtttatcgtgtgagcacaccatatatttacagtaggaatagacgtagacacacgagcatatttcacctccgctaccataatcatcgctatccccaccggcgtcaaagtatttagctgactcgccacactccacggaagcaatatgaaatgatctgctgcagtgctctgagccctaggatttatttttcttttcaccg

SEQ ID NO: 2 - DNA, 1005 bp, Homo sapiens
catcgtactacacgacacgtactacgttgtagcccacttccactatgtcctatcaataggagctgtatttgccatcataggaggcttcattcactgatttcccctattctcaggctacaccctagaccaaacctacgccaaaatccatttcgctatcatattcatcggcgtaaatctaactttcttcccacaacactttctcggcctatccggaatgccccgacgttactcggactatcccgatgcatacaccacatgaaatatcctatcatctgtaggctcattcatttctctaacagcagtaatattaataattttcataatttgagaagccttcgcttcgaagcgaaaagtcctaatagtagaagaaccctccataaacctggagtgactatatggatgccccccaccctaccacacattcgaagaacccgtatacataaaatctagacaaaaaaggaaggaatcgaaccccccaaagctggtttcaagccaaccccatggcctccatgactttttcaaaaagatattagaaaaaccatttcataactttgtcaaagttaaattataggctaaatcctatatatcttaatggcacatgcagcgcaagtaggtctacaagacgctacttcccctatcatagaagagcttatcatctttcatgatcacgccctcataatcattttccttatctgcttcctagtcctgtacgcccttttcctaacactcacaacaaaactaactaatactaacatctcagacgctcaggaaatagaaaccgtctgaactatcctgcccgccatcatcctagtccttatcgccctcccatccctacgcatcctttacataacagacgaggtcaacgatccctcctttaccatcaaatcaattggccatcaatggtactgaacctacgaatacaccgactacggcggactaatcttcaactcctacatacttcccccattattcctagaaccaggcgacctgcgactccttgacgtt

SEQ ID NO: 3 - DNA, 1026 bp, Homo sapiens
gctttcgctctaagattaaaaatgccctagcccacttcttaccacaaggcacacctacaccccttatccctatactagttattatcgaaaccatcagcctactcattcaaccaatagccctggccgtacgcctaaccgctaacattactgcaggccacctactcatgcacctaattggaagcgccacactagcaatatcaactattaaccttccctctacacttatcatcttcacaattctaattctactgactatcctagaaatcgctgtcgccttaatccaagcctacgtttttacacttctagtaagcctctacctgcacgacaacacataatgacccaccaatcacatgcctatcatatagtaaaacccagcccatggcccctaacaggggccctctcagccctcctaatgacctccggcctagccatgtgatttcacttccactccacaaccctcctcatactaggcctactaaccaacacactaaccatataccaatgatggcgcgatgtaacacgagaaagcacataccaaggccaccacacaccacctgtccagaaaggccttcgatacgggataatcctatttattacctcagaagtttttttcttcgcaggatttttctgagccttttaccactccagcctagctcccaccccccaactagggggacactggcccccaacaggcatcaccccgctaaatcccctagaagtcccactcctaaacacatccgtattactcgcatcaggggtatcaatcacctgagctcaccatagtctaatagaaaacaaccgaaaccaaataattcaagcactgcttattacaattttactgggtctctattttaccctcctacaagcctcagagtacttcgaggttaaaatattagatatttcccctgatacagggctcaatctttttctttttaaagcaatatttctcaaagtacttttcacagaacttaagtttcattaagcacttcactaaaagaaaagtctgtgatctaataaatttggaaa

SEQ ID NO: 4 - DNA, 1096 bp, Homo sapiens
cctccccggtggagacaggggggccgcgcttgtcttagagcctccccttgggtgccttttagctgcttatcctcgagtcctgggtcagggtcttctccctgggaggagtaattcaacgtgggcctggcactgtgccctgtcaccgcttgggggtcaccgtgttctctggcccagctggtgaggtgtgattctgggacgacagcattttggggagctacaggcttgggtgtgagtgacttgtgtctctgggtgctgaaggccagagggtgcaagggcctggacgtcgaagtgtgtcctagggacgcagaggctagccaggggcagagtctttgcagtgtgggcctttggtgtccagggaactggagtcggaggctggttcaaggccccaacccagggtagacagctatggacaccctcactgagggagcaggcaggagagacggggatgctgggagctgccttctgctcagggaggcacctgcaccccctacccagtctccagccccctagttgggcagcaagggttagaggattgatctgaaaaggaagaatgcctgttgggaaggactagtttggagccaattagggccatggctgctgggggtgggggctgcaattcctgacacactcaggaaccccttcttccaggaaagggtaggagaggcagaggtgcaaaatgggcctgagggtcccgggcgtacctccgcttgcctgctttgggcctgaggtaggatgggggaggggatgcccaggggcctgtgagccatgagtgccgtagccagggagctgggcggctgcagacacacctgtgaagacggctggtccctcagacatacagcatgttgggcaggggaaggggacacagccgcacctcacccatgtgcccacctgacacacaatccgacatggacctgcacgcacaggcaggcagctcacagagttcccaggcaggtgtgcagacagccggcagccccctgtctgctgtcacagacctacccggggcaagaggcccagttccctcctttcaagcagctggtgctggagagggctcctctgggcagcccgctgcctagccttgggtctctgtttggatttg

SEQ ID NO: 5 - DNA, 1050 bp, Homo sapiens
tcctgaggctggggtcaggggcctccagagcaacatggaccttctgcttcccttcctgcagagtccacacccactgggacgtgaacatctctttccgagaggcgtcctgcaggtaggagccgtgctgtgcgtgcataagagggggccgtgactcccctccctccctcccacccctgaccgtgccctgctgtctgctgtccgctgtctcagcgtgagctgatgctgtgatgctggctgagtgtctgccaggtttgacatgtgctgcaaggttgtcccccatcccgggaggcagacagtgttgcacccagttgggactgagggaccccagacccagtcagatgcagctctcggcagcagctcaggtgtgagttctgggcagcccggccctggagttagagtgcacttcctcccatgtgagactggccatttgagcccaaaaatgaggctgtcacctcccccttcccaccctcctagagacccacaaggaggtgagaatgctgatgtgtgagtggggccctgaagggtgtgtaggagctctaaggcgaggggatgtctgcagagtagaggaacagggaagggcgtgtaggagggacgaggagtgaacctggcagctctggttcagttggatgctgaagagtcatggatgctgggcctgtgggcaccgtcctccaggcgggagccaccgaaagttcttgagcagggcagtgaccaggtgtatgtttggagaaggtccctctggaggccttcctggcagacaggggattggattcaggctgtggaagcaggacggtagggggtgtgattccaggatgtggaaaggagataaaaatgaagagccccggggaagaggtcaagggagttgggggacccgagttcctggctccagggggaagcgagtggtaagtctgtgaacagagcccagctgtggattctgtcaatggggtcaggtctcaccctgtggcttccagggcagcaaggcaggaaggaggcgtctgccacaaggccagcttcctggggccagagccgtgaaggcccaggggacctgcgtgt

SEQ ID NO: 6 - DNA, 1382 bp, Homo sapiens
ccagcggagccccaggccgtcctcctctgcctcaggaacccggggtggcagatgctcctcgagccattgtttgcaggcgggggcttggcccctctctcctgggcccctgagctggtgggaaaatgggcaagggctaggccgtgtggtcatcaatgaggggcggtggcgggaggcccatgcgtgggcagctggggtcacacctgccaggctctggcctccccctccccctctccttcctgcgcctcctgccccagccctgactgcttctcccagcttccccacctcctgacctgcagcccggccccaccacagagactctcaggggcttcgtcccttgtgcgaagcagggtgcagagggcattctgtggttcgaggaccatgcgctgatgtgcccgggccgggttcctgcttctccactctgggacgtccagggcgtgtttctttacataaaactggcataactggctcactgagtggccaagtgaccagaacaggttttcaggggccgggccaggccaggctgtgtcggaacctcaggagcaaactccaaggcagagaccaggggcggggagggcaggtggcacccagctccccaccaggtgccactgcccagccacagcccctccacccagctattaggccctccctcactttccttctgggcgccaggctcggggctcactgccagcccccaacctctggagtctctgggaaactagttctcctcctgcaggcgtcctggggacaccagaggggggacccctggggagaactccatggcagctgtggctactgccaggccagccctcagcccccaccccatgctgaggccagcagtcctctcctgacacccccgcgtcgattaggatcatggaagggatgagtctcgctgccgattaatcccataaagtacttactcccacccagctgccttcctatgtgcctggggggggcttcctttcccactgggagccggtgggggtgggggagagccgtcatctaggtctcctggaaggtttagagcccagcctgggagtctttggtgctgaaacggatctgcttaggggcagccttggattagcccagctccagccagcccaggtcaggggagccgggagctatttaacgaggtttagggtaggctcctaggtcactgcgcaggactgctccgttacaggtgggcaggggaggcggctgcgttacaggtgggcaggggaggcggctgcgttacaggtgggcaggggaggcggctgcgttacaggtgggcaggggaggcggctgcgttacaggtgggcaggggaggcggctccgttacaggtgggcaggggaggcggctgcgttacaggtgggcaggggaggcggctgcgttacaggtgggcagg

SEQ ID NO: 7 - DNA, 1069 bp, Homo sapiens
tgcgttacaggtgggcgggggaggcggctgcgttacaggtgggcggggggggcggctgcgttacaggtgggcgggggaggctgctccgttacaggtgggcgggggaggctgctccgttacaggtgggcggggggggcggctgcgttacaggtgggcggggggggcggctgcgttacaggtgggcgggggaggcggctgcgttacaggtgggcgggggaggcggctccgttacaggtgggcgggggaggcggctgcgttacaggtgggcgggggaggcggctgcgttacaggtgggcaggggaggcggctgcgttacaggtgggcaggggaggcggctgcgttacaggtgggcgggggaggcggctccgttacaggtgggcgggggaggcggctgcgttacaggtgggcgggggaggcggctgcgttacaggtgggcgggggaggcggctgcgttacaggtgggcggggggggcggctgcgttacaggtgggcgggcggtgctgcaggaggactgctcagggagtggcgcctggaccctgagccccttctctgctgactggggagaggctcacggaaccgggaaggggtggagggccgtgctccacacagttcgtctcattgctctctgggactctgtggatgtgggattgggctgaattagcaagaagaggagaaatgagggaagaaaagagttaaatgcatgttgattccaagcccccgcctgccggggggacagcgggaggttggagcacgcagccctggtgcctggtgcgagctgcacgtgtctgccggtgccgtgtgtgcgtggggcgcgtctcatcagctgcaggactgtggtctgggcctcagtttcctcgtgtgcagaaatcgggggtcaggggatggttcacatgtggcacattctctcctggggcctgtcctgcaggactgcccctgagcagatcggcctcttcccgggcgcccggtgggcccctcgaccccctttgaggcagggagtgagataactgtgattccctgtggagggcgtgaaggcagagccggctggctgctccacatagaccctccctgg

SEQ ID NO: 8 - DNA, 1047 bp, Homo sapiens
tggagtctggggtggacccaggtgagggtgggcagtgggcatgtcagcagcaccccccgaggagagcaagctcctggaccctgtggtctgtgagtcgtctatgcagccagtggacgccgacctgccagacgcctgccccaggagcctggggaggggcagtgagcagaaaggccgggctgggtgcagtgggcacttggccaccaggactccccaggtgctgaagagacgccagctggaggggctgccccttcccccgggtcggccctgaccctgtccaccccacctcaggacgttctccaggggtccctccgggatgcactcggaccccctgcccgctgcactcagcctcccaggccccagccgcccgcctggcaggggagcttggcttttcgggctagaggtgggtgggggcgccgggaaaggaggcaggattcctcacaccaggcaccgtcccccagggcagctcaggcaccaagagcctgaataattcaccaaatgttaataatgtaaaaatcctcctttttaattgctttccctgctctgcctggggccgctctgctggccgcgcgggggaggggcgccggccgccggggagcgcgctgtcaatcaggccgcgccgccgccccccccccccgccccgccgcggagccggccgtaaataaccctgtaactaacccggccgctagcgcgggggcgctgggccccgctgggatcgatgcgggcggccgcgccggctgggctctgcgggctggcacccggcccggggcgggacccacctccgctttcgggtaattaatttataaacagaggcggcggtggagctggcggagcctgcatagtgggggctgcggggactcgggaggcccgggcgggagggagaggccgagagacctgggacgcggcgccttagacgcgggcgctgcgtgcgcattggggcgagtgtggccacgcgggacagtgaccctgcgcagccgggactgggcgacccctgtgctagtgtggcgtgcgtgcgcgggcgctgccttgcctttgtgacaagctttggcc

SEQ ID NO: 9 - DNA, 1339 bp, Homo sapiens
gagaccctgccactgctgacggaggagcacctgctgaccaacatggggctgaagctggggcccgccctcaagatccgggcccaggtgagacgctggggagtgaggtcagggtctccagaccacagctgggcagaaagctctgggtgggtgtgcgacagcccccaccaggccatctctctgcaggtggccaggcgcctgggccgagttttctacgtggccagcttccccgtggctctgccactgcagccaccaaccctgcgggccccggagcgagaactcggcacaggagagcagcccttgtcccccacgacggccacgtccccctatggagggggccacgcccttgccggtcaaacttcacccaagcaggagaatgggaccttggctctacttccaggggcccccgacccttcccagcctctgtgttgaggttgccgggggtaggggtggggccacacaaatctccaggagccaccactcaacacaatggccctgcctcccaccgctttatttctttcggtttcggatgcaaaacaaaaaattttaaaagaaaatgtgacttcaaaggaaaggaacaaattttcaaagacttgggggagtgaaggcagagcctggtgcagatggacgaggtctgcagacggagggcagaggtggtggaaggggccaggggcctgcaggcctccccctggaactgggactggtctcggtctgctgacgtcagggtcagctcccccgcggagctgacttcagcagcccacagctgtggggcttcagcagccacaccagcccagcccagcccagctctcgatacgtttggtctttcatgctgaaaaataaataataaagcctgtcccgtgtctactgcctcccccaactgcacagacgccagcctctaggcctgactgccagggaggtggaaacactggccaccagcccggcagcccctacaggccccccagatgggctgcctcagtcgtcctctgagagctgcagatcctccagctcgtcctccggcccctgggccagctgctgcagctccccaggggccagccccgcctctgcgtctgggtctccatctgcggggagagatggaggctacataaattttgctttatcaggaagaagccagccttagaggttactcatcactaattaatcacggcactaattaatttatccctgttgctggctgccagagaacagagcatttggcctggccttcccagggagggaaaagcctggcccagagccccacgccccccgcccacgtggctctgccctcccgccagatgggctcacagggccacaccctctcaccccaagaccattcaccctccga

SEQ ID NO: 10 - DNA, 1407 bp, Homo sapiens
ctgctgagccgcgagggccacagcgtggcccacaactccaagcggcactaccacgatgccttcgtggccatgagccgcatgcgccagcgcggcctcctgtgcgacatcgtcctgcacgtggctgccaaggagatccgtgcgcacaaagtggtgctggcctcctgcagcccctacttccacgccatgttcacaagcaagtacccgcctgggcggcgctgggggctccgtgggtccctcgggtcagctcgtgtaacccgctgtccccgcagatgagatgagcgagagccgccagacccacgtgacgctgcacgacatcgaccctcaggccttggaccagctggtgcagtttgcctacacggctgagattgtggtgggcgagggcaatgtgcaggtgagggctccctcacccggatcccggtgtcccccgaccctgtgcctccctcacctgcctctcggtgccccgtagactctgctcccagccgccagtctcctgcagctgaatggcgtccgagacgcttgctgcaagtttctactgagtcagctcgacccctccaactgcctgggtatccggggctttgccgatgcgcactcctgcagcgacctgctcaaggccgcccacaggtacgtgctgcagcacttcgtggacgtggccaagaccgaggagtttatgctgctgcccctgaaacaggtaacagctggcgggcccagccctcgccccccaccccaccccaccccagtctttgtctttgactcccgaccccgttttgttcctgacacagccctgcccacaatccttagtgcctgctgtgtgtccccgagacctttctggatctgggccccccaggagcctcgtctgtggctcctgactctgctcggcccctcccagtatgaacactcagcccccacctgctaaccctccctcctaggcatcttcagggctccctgggtccacaggaccctccccagatctcaggtctgaggacccccactcccaggttctggaactggtctctagcgacagcctgaacgtgccttcagaggaggaggtctaccgagccgtcctgagctgggtgaaacacgacgtggacgcccgcaggcagcatgtcccacgggtgaggcgcggccgcggggggctcccacagcatccaggagggcatgcaggtggctgagggcctggtgcaccctgaccttccccgagttcagggactccgtgggggtggtgcccccacctgtctgaagaagaatccatcacacaggtggtacgggcatctggggggttgtctcagccctgacgcccagtgtgcccgagggtcccgcctgaccttggcgttccctgcaccccagctcatgaagtgtgtgcggctgcccttgctgagccgcgacttcctgctgggccacgtggatgcc

SEQ ID NO: 11 - DNA, 1051 bp, Homo sapiens
gacgggttgccaggtgcctacatcagagctcattaaattacacattaaatagatgcacgtgtgtgtgtcaagctcccctaattcaagttgtagaaaatcagactcagagttcttacactcgggggtgttttagcagctgcgcctcaagattctaaattcaaacgcacacggaataaaacatttcggtttatcgccaggcgcggcggctcacacctgccatcccagccctttgggaggccggggtgggtggatcacctgaggtcaggagttggagaccagcctggccaacatggtgaaaccccgtctctactaaaaatacaaagattagctgggtgtggtggtgggcgtctgtaatcccagctactcgggaggctgaggcaggagaatcgcttgaacccgggaggtaaaggttatggtgagccaagatcatgccactgcactctagcctgggcaacaagagcaaactctgtctcaaaaagaaaaagaaaagaaaaaagaaaaagtttattcccagtaaaacacgttcaactctccagatcgtggtgacatttccagcttgatgtggtaacgtgattgtgagcttcaggtatgaccttcagcataaatacgtgtgccatctcctgtgcaattcttttttttttttttttttttttttttttttttttgagacggagtctcgctctgtcgcccaggctggagtgcagtggcgggatctcggctcactgcaagctccgcctcccgggttcacgccattctcctgcctcagcctcccaagtagctgggactacaggcgcccgccactacgcccggctaattttttgtatttttagtagagacggggtttcaccgttttagctgggatggtctcgatctcctgacctcgtgatccgcccgcctcggcctcccaaagtgctgggattacaggcgtgagccaccgcgcccggctcctgtgcaattcttacagacccagcttggctgttctccagtgtctcctttgggagttgtacctgattttattaccagttttcatctgaatccactggggaatggg

SEQ ID NO: 12 - DNA, 1009 bp, Homo sapiens
atctcagctcactgcaacctccacctccagggctcaagcaattctcctgcctcagcctctcgagtagctgggactacaggtgtgagccaccacacccagctaatttttgcatttttagtagagatggggtttcaccatgttggctaggctggtcttgaactcctgacctcaagtgatttgcccgcctcgtcctcccaaagcgctgggatcacaggcgtgagccgccaccccgcctcctctttggttttcagatgctgacaattttggtgacccctgagatttgctgggagacggggaagggccaggattcatattcagaatatgttgatttttcactcttacacttgtttatttaaaaattatttatttatttatttgaatcttatttaaatattttatttatttgtttattactgagtcttagctatccttctcttgttatgtgctgtgtgtaacaacaacaatttgggaacagcctaagtattcagtgatgtgggatgggttttaactaaattaactctgtactgtaacaggctcattcttccatgggaaacatgcagttgttaaaacaacctgcacagatgcgtccaccaacacggatagatgcgtgtttttgttttttgggttttttttttttttttttgagacagggtctcgctctctcacccaggctggagtgcagtgaagcgatctcggctcactgcagcctccgcctcccaggctcaagtgattctcctgcctcagcctcccaagtatctgggattacaggtgcccaccaccacgcccagctaatttttgtatttttagtagagatggggtttcaccatgttggccaggctggtctcaaactgctgacctcaggtgatctacccgcctcggtctctcaaagtgctgggattacaggtgagccactgcgcccggcccatgcccagctaatttttcgcatttttagtagggacggagtttcaccatattggccaggctggtcttgaactcctgacctcaggtg

SEQ ID NO: 13 - DNA, 1052 bp, Homo sapiens
cggcagccccagccccccagatctgaggaaggggctgcttctcccggctttgttctcaggggagtgcgtgagtgcgtgggtccctgtccccgtgagggccgccaggtcggctgtagcctttaccacaggccaccgtcagagcagctgccctcagggccccaggagctgagaaggtggagggtggggcaccctgcactgcccaaacttgatttcgtggttcacaggctgccctgagtgcacagactgtagaagcccgaggaaggggcgtctcagcccagccacagggccaagctggccccttaccccaacgccccatccccctcctccactgcccaagcttgctgggaggtgggccctgagcactgggcaggtggggagaagtgtggaaggcaggcaccccaagccaggtgggcccccttcccaaattcggccttagctgatagggacgttattggagctggggtggctgaagttggttagacctgggggaggggatgtgttcacaggtgacgcatctctgagcgttcccgcatgggctgtggtggccagtgtgggcttcccccagcttccgcccagcgggctgactcagaggtctccccacatctctgcccagggcttgagtctactgtggacatttgccctaaacacctaaagcccccagtctagccccttccccaggagaggactaatgacacctaccgccatgtccaccccaggttcgggtctggcggtacttgaagggcaaagacctggtggcccgggagagcctgctggacggcggcaacaaggtggtgatcagcggctttggagaccccctcatctgtgacaaccaggtgtccactggggacaccaggatcttctttgtgaaccctgcacccccatacctgtggccagcccacaagaacgagctgatgctcaactccagcctcatgcggatcaccctgcggaacctggaggaggtggagttctgtgtggaaggtgcgtggtggggggctcgtgtgggggcctgtgggggtcagggcagtggccaagggggacaggttgcaggggtc

SEQ ID NO: 14 - DNA, 1050 bp, Homo sapiens
cagcaggggtgggtctccaagtgcttcctttgacagctgctctggatgggacgtggcttggggtgggtgagaacccttggctgagtttggattttcctgcagggtttcattggaacaccaggttccagggccgtagagatgtggaggcctcctgtctgggtgatggggcatggtgctggtccctggctgtggggtggaaaggagtcccaagagagggagctggcaagacaggaccttcccagctaaggtggggttggtgggatttggctggggcccttggaggagcctgaccaggaggtgagacagggcacctggaaggaaggaggcgttggggagagtccagatggaggccatggggttgaggggcccagacacccggctgggggactccaggaaggcagcaggtgtgggcagtgggtcctctggggtggactgaggtgaggcctgggtgtgaccacgcggtggcactggtggctgccggcagctgtcgtctgcagagtgggtgagaccgagtgtggcagatggcttggtccgcggtgctggaggggactggcggagcagaagcgccctggcgccgggtccttgctttcctggagctggggcttggggaatggggtcggtcattgcagggacagaggagagggcagggtaatgggtgcgcaggggtcccttccaaaggctgcgggtggccaggggtgtgcgggggcgctgaggtgcggtcgccgagagattctggcctccagggtggtcgggcctggcatggactctaggggatggtgcacacaccggaccggacgggcccctcccttacccccggatcccccggctgggcagcggccagggagaggggcgacctacgggggcgggtgtggggacgccggactacgcgtcaggagtcccagatgggcccagacccccattccccgccccgggccgcagtgacgtcagggcccggacgttcccggaacggcctcttgggggcgttccagccccacggacccgcagggagtccccgccgcaatttgcatggggctcatttgcatgaccccg

SEQ ID NO: 15 - DNA, 1021 bp, Homo sapiens
tatcaccgcagcccggggcgtgggcctggctggctgccccagtgagtacctgagctcagccccgaccccgggcctggtgcggctgtgcggccacgtgaccttgtcctgccctggcctttcaggtgcctgccagtgcaacccccatggctcttacggcggcacctgtgacccagccacaggccagtgctcctgccgcccaggtgtggggggcctcaggtgtgaccgctgtgagcctggcttctggaactttcgaggcatcgtcaccgatggccggagtggctgtacacgtgagtgacagggcccaggactggccaccggctatgccctcctacctgttcacccccatcactgtgcttctcctcacctgcccaggccctggcctgacccacacctggctgggggctgggcagagccagggttggggaccaggctctggaggaggtggggaagcccgtccaggtgcggacatcacgttcctccccgattttccccaaagcctgcagctgtgatccccaaggcgccgtgcgggatgactgtgagcagatgacggggctgtgctcgtgtaagcccggggtggctggacccaagtgtgggcagtgtccagacggccgtgccctgggccccgcgggctgtgaagctggtgagtgagggccagcgctaccctggggcttcatggggtggggtggggtcacccgagccacagaggtttcccatgcccgtgccccagacgcttctgcgcctgcgacctgtgcggagatgcgctgtgagttcggtgcgcggtgcgtggaggagtctggctcagcccactgtgtctgcccgatgctcacctgtccagaggccaacgctaccaaggtgaggggtgtgggatgtgaaggggagtggggaggaggcctcgccttgaacatccttgttctctgccccaggtctgtgggtcagatggagtcacatacggcaacgagtgtcagctgaagaccatcgcctgccgccagggcctgcaaatctctatccagagcctgggccc

SEQ ID NO: 16 - DNA, 1718 bp, Homo sapiens
ggacatgtagatatgcgtgtgtgactatgcggccgtgtgtgtgcatggctccatgtatgtgtgtgtatatgagggagacatgcaggtatgtgtccgtgtgtgtgtgtgtgcatatgggtccatgtatgtgtgtgtatatgagggagacacgcaggtgtgtgtctgagtgtgtgcgcacatgggtccatgtatgtgtgtgtataggtgagggagacatgcatgtgtgtgtccgtgtgtgtgcatgggtccatgtgtgtatagtgtgtacacatgggtccatgtatgtgtgtgtatatgagggagacacgcaggtgtgtgtccgagtgtgtgtgcatgggtccatgtgtgtatagtgtgtgcacatgggtccatgtatgtgtgtgtatatgagggagacacgcaggtgtgtgtccgagtgtgtgtccatgggtccatgtatgtgtgtgtatatgtgggggagacaggtgtgtgtccgagtgtgtgcatgggtccgtgtatatgcgtgtatatatggggggatatgtagatgtgtgtgtgtatgaacaggtgtaagtggggagcactcaggtgtgtctgtgtgtgttcgtgtacacgtgtgtatgtgtgtgaacatggaggggtgtgtgtgtccgtgtgtaggtttgcgtgcatgcacacatgcatgtgtgtactggggcatccaagcccctggtctccactccataccaccctacgcctacctccttgatctctgcgcccagccttggctgtgctcccctgctgtctgcacgtgggtgtctgcacgtgggtgtctgcatgtgggtgtctgtgccctcaagtgtctcgtgtctgcacgtgggtgtctgcaccctcacgtgtctcgtgtccgcacaagcatgtgtaggtgtccctgctgggctctttggtgggcggccagtgatcctcgaggtcacgcatgtcttctgtgggtgcctgctccttgcaccccacagtgttgagatgggtttgcattggccccgcctgtcccctgctcacccgcctccctctcttcctgcttctaagccccgaaactctggattccggggcccttcacaggtgagcacgtggcagcagtgcctgcagacccctggctggcccatctgtcctcccgcccgtctctctgatctctctctgccaggctgcccctgtctccatccctcttctccctcccactgtcggtgtctgcccaccagccacccctgggtcccgtcacagcccttgtggcctccgcagctggggcccttgtcctcccgcctcccccaccctgtcctgttgccaccttcctagaggccctgacctgccctctgccctccagcgagaaggcactgcagagcaaccactttgaactgagcctgcgcactgaggccacgcaggggctggtgctctggagtggcaaggccacggagcgggcagactatgtggcactggccattgtggacgggcacctgcaactgagctacaacctgggctcccagcccgtggtgctgcgttccaccgtgcccgtcaacaccaaccgctggttgcgggtcgtggcacataggtgagtagggaacccagcgtgccgagaatagtggcgagggctgcccagacttgcccagctgggctgtgtccagtcacttgtgaccaggggtcagggaggacacgccttgctgcctgagccgaggtcactgccagtgggaggaggaagggccaagaagatg

SEQ ID NO: 17 - DNA, 1039 bp, Homo sapiens
tcggtttttttacatgatttaaggaaagacttttatgtcagaacttggtgcctgtaccgtcaaccccgctgctgcccgtgtttaaacgcaggagaactttaaaactggccatctatcttttcagtgtacaagtcactgaacccattgtttctttctgaagagactttcctttcaaggcttcccatgggtccgcgccacacagggccggtgctgctttatttcagactctgccccaggttccaggaatccgaaccccggagtgctgacgcggttccccaacttccgccttaagaaaacaggaccagccggcaccaggcccgtctctcacgtactttaacacatccttgaaagcccctcgtttaatgagaaaagcgaacactgcggtccttgccaaagtaaaatgaagctgccccaggacaaggggttaccatgagctccctggagtccgacgcgggttttctctctgggggacctgggtggtccccgctgtggtctttgttgtcccactttgggaccgggtccagtctggggtctagtctcgagcatcagggtcaggctcggggcagggctgggttaggctccgggtcagtcttgccatgggtttgggagcaggtttgggttacttgcgtttgaaggcagcagtggtctcaggaggaagaaacgggggcgggagagagtggtgatctgtggtcagtgggtcagtgacctgcacggtgattctcccacctccaaaaggtaggggtgggactggaggcgtccctaggtcaggccgttgagttcgagctccgatgggccaccttgaatccaggactgaccgcccgtgtgtgcacagtttgttcttggacgaggactcgtgaggatcgagggctggggaccccggtgtgagcaggatggggccctgccctcccgtgggagttgtggactcgagcccaggggctgcccgtcacagcggtgtcccaggtccctgccatccgattttacctgggatgtcttctctggagtttggaattgcttgaggaaccctgcgtgtgcttggaga

SEQ ID NO: 18 - DNA, 1545 bp, Homo sapiens
agcgtggactttgaatacatgacagagaaaagacaaggttcagaatgttggcggccaggcctaaggtggatcccttggggtcaggaattggagaccagcctggccaacatggtgaaaccccgtctctactaaaaatacaaaagtaagccaggtgtggaagtgcgtgcctgtaatcccaactgctcaggaggctgaggcaggagaatcgcttgaacctgggaagtggaggttgcagtgtactgagatcacgccactgcactctagcctgggcaatggggcgggactccatctcggtaaaaacaaacaaaaaaatactgggctgggcacagtggctcacacctttaatcccagcacttggggagaccaaggtgggcagatcatctgaagtcaggagttcaagaccatcctggccgacacggtgaaaccctgtctctactaaaaatacaaaagttagctgggcatggtggtgggtgcttgtaatcccagctactcagtaggctaaggcagaattacttgaacccgggaggcggagattgcagtgagctgagattgtgccattgcactccagcctgggcaacaagagcgagagtgtcaaaaacaaaaattggcaaaaaactagacttcttttaaatttaatttattcatttaaaacttgccgggtgcggtggctcatgcctgtaatcccagcactttgggaggctgaggcgggtggatcacctgaggttgggaattcaagaccagcctgaccaacacggaaaaagcccgtctctactaaaaatacaaaattagccggatgtggtggtgtgcgcctgtaatcccagctactcgggaggctgaggcaggagaactgcttgaacccgggaggcggaggttgcagtaagccgagatcgcgccactgcactccagcctgggcgacagagcgagactgtgtctcaaaaaaaaataaataaataaaattgagagacagggtggggctgtcacccaggctgcagtggcgcaatcatggctcactcaaactcctgggctcaagcgtcctcccgcctccacctccgcctcccaaatagctgggactataggcacgcacccaccacgccaggctaatttaaaaacaaaattttggccaggcgcagtggctcactcttgtaatcccagcactctgggagaccaaggcgggtggatcacctgagatcaggagttcaagaccagcctgaccaacatggtgaaacccccgtctctactaaaaaaaaatacaaaattaactgggtgtggtggcacacgcctgtaatcccagctactcgggaggctgaggcaggagaatcgcttgaacccagaaggcggaggttcaaggtgagctgagatcgcaccactgcactacagcctgggcaatgagagcgaaactccatctcaaaaaaaaaagaaaaaaaaaaagaattcaacagatgaatttaacaccatatgacacataaccagaagagaatccatgaactgaaagacaccagagggaatatccatcaggaaacaggaaagacaaacagatgacggagt

SEQ ID NO: 19 - DNA, 1029 bp, Homo sapiens
cggggccgcgcaggtcccagtggagcacgcgctggcggtcgtgcagccggtcctgggtccacaccatgcgcgggctctggcagcgcagcaccgcccgggcgcccgcctcccagctcaccgcggactcggacaccacggagctgccagcagcggcgggtaccgaggaccctggtgggggaggggagtcggtgggggaaggggtgggccccctagggccctggttgggggagtcagtgggggaggggcagggccctggtgggggagggatgtctgtaagggacgggcaggaccagagggccctggtggtggaggggaagtccgtggggtggggcagacccccgagggcctggataggggagggggagtcactgggggaggggcggaccctgatggtcctgatgggggagggtgaatcagtgggggaggggcgggctctgaggaccctggtggaggaggaggagtaactgggggaggggtgtgccccaaggactctggcggggttgggggcatctttgggggggtgtgggcccctgaggcccctcgtggtgggggagattccatgggggaggggcatgccccctagggcccatgtgggggaaggggaatcattgggggagtggtggacccccgagggccctggcaggggagggggagtccatgggggagggcaagtcagtcggggagacatggggcccaaggaccctagtgggggatggggagtccatgggggagtggtgggccccgagggccctggtggggaaggggactcagtaggggaggggcagaccccgaaggccctggttggggaaggggagtcagtgggggcatctgtgggggaggggtgggcccccgagggccctggtgggtgtgcgggagtctgtgggggagggccaggcccccaagggccctggtaggggaagaggagtcattgggggagggggagttattggcaaggggaggtgcccaagggtcctgatgagcaagggggaatcagtgggggaggggcagggcctgaggacccccgggggc

SEQ ID NO: 20 - DNA, 1053 bp, Homo sapiens
attaaattcagctaccaaggcagggcacggtgtctcgcctgtaatcccagcactttgggaggccaaggcaggcaggtcacctgaggtcggaagttcgagactagtctgaccaacatggagaaaccctgtctgtactaaaaaatacaagaaaaaaaaccacaaggccaggcgcggtggctcatgcctgtaatctgagcactttgggaggctgaggcaggcggatcaccaggtcaggagatcaagaccatcctggctaacacggtgaaaccctgtctctaccaaaaatacaaaaaaatgagctgggcatggtggtagtcacctgtagtctcagctactcaggaggctgaggcaggagaatggtgtgaacccgggaattggagctttcagtgagccaagatcgcgccacttcactccagcctgagcaacagagtgagattgtatccaaaaaaaaaaaggaacaaaaacacaaaattcggctaccgaggacaaagtggcctactacctgtgacctaactgtactacctgtgacctgtatgctttgtgcaaagtctgtctcctttctttctttcttttttttgaaacagagtctcactgtgtcgcccaagctggagtgcagtggtgcgatctcagctcattgcaagctccacctcccaggttcatgccattctcctgcctcagcctcacaagtagctgggactacaggtgcccgccaccgcacctggctactttttgtatttttagtagagatggtgtttcaccatgttagccaggatggtctcgatctcctgacctcgtgatccacccgcctcagcctcacaaagtgctgggattacaggcgtgagccaccgtgcccggccaagtatgtctcctttcttaactacagttccctgagtaaaatgggaaagtcaaacctcctaagcctaccctgaagatctttgtaaagcaccaaagagtgccttctgcaaaatacccaccccctcaaccttttaggaaaaacttaatgtacacaagcagagggactagcataatgaccagattcagtaatcaccaaga

SEQ ID NO: 21 - DNA, 1049 bp, Homo sapiens
aaagcgtcgctgcctctgtctaaatgcaacgagtgctccccacggcacttccccctgcgtcagtcacctccaaaaattacacctgagctgagaacagacgctgggctctagttagtgacgtgtttgctgcagttgactctgaaggcttaaaaaagtgagacgggctgcgggaggaagagagacgggaacaacgcaccaacccaggagcatcgggggtccctgcctactttacgtgtctttctgtgttagcagatttatatgtttatttatttatttgagatggagttgccgtccgtcgcccaggctggagtgcagtggtgcaacctcggttcatcgcaacatccacctcctgggttcaagcagttctccagccttggcctcccaagtagctgagatcacaggcgtgcaccactgtgccctgctctttttttgtctttttagtggagacagggtttcgccatgttggcccggatggagatttttcttttttaagtctctctctgtctagctggagtgcagcggtgcgatctgggttcactgcagcctctgtctccggggttcaagccatcctcccacctcagcctcagagtagctgggattacaggcgtccgccactgcgcccagctaatttttgtatatttagtagagatggggtttcaccacattggtcaggccggtctctaactcctggactcaagtgatccacccgtctcagcctctcaaagtgctgggagtacagtagtgagccaccgcgcccagccaaaagatttttatggtaaagttttatgatgggaaaactgtcatcccagaaaattttgagacctgatgctgaggcctcagcagctcagagaatacgtacttctgtcccacgacacccaaacatcgacctgtgtcagttcccctctaggaacaaaacgtaactgaggacgttgtcagatgcttgtcctcgtcaccctgagcttgttggctggtatcctattcttattcattccctttcttgcctgcatgtgcttgatagcagatcaatgacaacagccattggaagctta

SEQ ID NO: 22 - DNA, 1050 bp, Homo sapiens
gatgggcggatcatgaagtcaggaaatcaagaccatcctggctaacacggtggaaccccatctctaataaaaaatacaaaaaaaaaattagccagatgtggtggcgggtgcctgtagtcccagctacttgggaggctgaggcaggagaatggcatgaacccgggaggcagagcttgcagtgagccgagatcgcaccactgcactccagcctgggcgacagagcaagactctgtctcaaaaataaaaaaataaaaaataaaataataatttgggctgggcacggtggctcacacctgtaaccacagcactttgggaggctgaggcagtggatctccttgagttcaggtgatctgccccctttgtcctcccaaagtgctgggattacaggtgtgagccaccatgcacggcatcttgaattcttttctcataaaagggttttgaatttggtcgaatgcttttcctgcatcagatgagagggtcatgtagtttccttcctccactcggctaatattgattgatttttgtatgttgaacattttttatgtggaacattgattgatttttgtacgttgaactatccttgcattccaggaataaatcctgcttggtcagggtgtataatttttttattatactcctgaattggttttgctggcattttgttgaggacttttccaacgatgcttatcagggatattggcatgtcatttttcttgtggtgtctttgtctggctttgatatgagggtaatgctggcctcttaggatgagtgaggaaatgttcttcaatttgtccaagagtttgaggagtgatactgattcttcttaatgttttgtgaattcacatgtgaagacatcaggtccaggtcttgtctttcaacttttatagtttgaagattttaggttcccagaaaagttgcaagagtagcacagagacttcctgggcctgggaccttgccacgtggtgaacatcatgtgtcactgttggacccacctgtgactgggttttgccccagaatcccacccaggacgccacgtgacatttagctgtc

SEQ ID NO: 23 - DNA, 1031 bp, Homo sapiens
ctggtcagcggtggaccttcagcccctcctgcctggtggcctaccggcccgaggaggatgccaacctggacgtggccgagcgcgcccgggagaacaaaagtgcggcacagctcaggcggccagtgggaggtggggctgcccctggccaccactaacctcagccctgcccccaggctcactgagcgtggccctggacaagcttcgggcccagaagagtgacccagagcacccgggaaggctggtggtggaggtggcgctgggtaacgcagcccgggctctggacctgctgcggaggcgcccagagcaggcaagctcctgaccccgtcctcccatactggccagtctgagagtgaggggcagagggccagggactcacctgctggcactcttggcaggtggacaccaagaaccaaggcaggaccgctctgcaagtggctgcctacctgggccaggtggagttgatacggctgctgctacaagccagggcgggcgtggacctgccggacgacgagggcaacacggcactgcactacgcggccctggggtgaggcctgggaggggcccggccggcggggctgagcctgtgcgtcctggggtgaggcctgggaggggcccggccggcggggctgagcctgtgcgtcctggggtgaggcctgggaggggcccggcggggctgagcctgtgcgtcctggggtcgggcctggcggggctgagcctgtgcgtccagccaccgggcccggcgccctccctctcccacttcctctcctgtcaggaaccagcccgaggccaccagggtgctcctgagtgctgggtgccgggcggacgccatcaacagcacccagagcacagcactgcacgtggccgtgcagaggggcttcctggaggtggtgcgggccctgtgtgagcgcggctgtgacgtcaacctgcccgtgagtgctgctccctggcctgggtgccccctgcccgtgagtgcttgtccctggcctgggttccctctgcccatgtgtgctgctccctggcctgggtgcccc

SEQ ID NO: 24 - DNA, 1050 bp, Homo sapiens
atttattcctcattaactctaattaatgtatgattaattagattaattctaaaataacccatcggctgttaacattttaatgaaaagtgactattttcccaaacaaaatattcggcaagagagtggcaacatttttgcatctggttgagcagaacacggttgagccatcacacctgcctctgcgttcaggctgctgcagtgttgggttaagattgtgaggaaatccagtgtgtgaggaggcttggggtgaattccagtgtgtcaggaggcttggggtgaattccagtgtgtcaggaggcttggggcgttttaacagcttttcctctggtaaacgtgggtattcttctttgatatttctctgaaactcggcacgtggtcatttcttacatgtcagttgaaacatggaatctgaaactgtattggtgtcactttcctgcagttaccttaaaaatccgctggtctcttttgcgctcgaataggtttcttacgcgtgcgtgtgttttaaaaatcgtatgttggccgggcgcggtggctcacgcctgtagtcccagcactttgggagaccgaagcgggcagatcacttgaggtcaggagttcgagaccagcctggccaatgtgatgaaaccccatctctactaaaaatacaaaaattagccgggcatgcatggtggcggatgcctgtaattaatcctagctactcgggaggctgaggcacgagaatcacttggacctgggaggcggaggttgcggtgagccaagattgcaccactgcactccagcctgggcgagagagcgaaactctgtctcaaacagcaacaacaaaaaacatcgcatattggctgttaggaaatattgctccactgggttctgcaggtcttcctaagcgcagtggaaaattccccccacgctcatgagggcgagtgtgaagaaggcaggtgctgtccgcttcggattatggtcatagcttgcactcgcggctcccctgcctggtctctgggacccccaggcatccccagacctccctggcctcagccagttcccgccgcttca

SEQ ID NO: 25 - DNA, 1014 bp, Homo sapiens
ccgaggggcgtgggctcagcactgccagggcccgtgccctgtgtccccacaggatggtgctggccgtctcaccactgaggggatgccccccagccccctcaccctcagctgctccttccaggagcttaaggcccctaaagtctgccccggtccctggggtcagagcccaccctgggctggttttgaagaaacaccagtgcttctccaaggaggccccgtgcacatgtaggaatgaagccctcgtcctcccacagccgcgtgcccctcctgcgctgcgtgtgtggttttgctcatggcacctggcgtgggcgccctgggagcggcagccgggggcgtctcggagagagccagtgcaggggggaccccacaatctgggaggccatggatcctggttgtgggtttttggttttaacatttggtttacttattttcagacttttttccaaacaaatggtttatccatattaatttagctctccctgtggaatttgtaggacctcagttttcttgacattatgatctaagcagattattgaacacacgtcttaaatatcatcttttcaaactgccacatgtaccatcatatagatgtgctttaataaagaggtcagagagctgtggcccactgtagttcttgtttgtttttttgagctggagtctcactcttgttgcccaggctggactgcagtggtgcaatctcggttcactgcgacctccgcctcctgggttcaagcagtgctcctgcctcagcttcccaagtagctgggattacaggcgcttgccaccatgcccggctaatttttgtatttttagtagagacgggttggggttttaccacgttggccaggctgctctcgaactcctgacctcaggtgatctgcccgtcttggcctcccaaagtgctgggattatagaagtgagccaccgcgcctggcctgtttgttttttaattgtggtaaaatacctataacataaaattcaccattttaaccatttctaagtgtgtagttcagt

SEQ ID NO: 26 - DNA, 1630 bp, Homo sapiens
gagagtagcagtacgagccggagtggcggggtgaatagtttgacgggaaggatggttacagaacaggtgactcaggatgactaagaacagagcaggtgacaaggatgactaaggtcagagcaggtgaccaggggtgactaaggacagagcaggtgatagaggctaggcaggggttgtttactgaaactaggggcaaggatatgtaaagtacaaggaagttaaactttagaatgaagaacaaagaatggggatgtaaccatacggatacattgcttctttggagaggagctcagaattcattatacttaacaatttacaggctaaaacctttgaagaggaatttattatgttctacaggagcggtgccgctggcctgtggcttctgcagggacaagtagtggctgtggccgggaggcgttcggcagctgtgcttcagccccggccccagcttcagctcttcgagttgctggcttctctaaggcctgtcctgaagtggcctggagactgctgagttacttctggaatctgcaccgtgaaagtgaaacctggaccatgatgtgaggctggtgagagggtgccctctgccgtcacccccggccttgtagaaaactcattccaatggccctctggttctcactcaggaccaaatagtgatggttttttgtttgttttcgttttgttttgttttgttttgttttgttttgtttttttagacagagtctcgctctgtcgcccaggctggagtgcagtggcgtgatctcggctcactgcgagctccacctctcgggttcacaccattctcctgcctcagcctcccaagtagctgggactacaggcgcccaccaccacagttggctaattttttgtatatttagtggagatggggtttcaccatgttagccaggatggtcttgatttcctgacctcgtgatccacccacctcagcctcccaaagtgctgggatgacaggcgtgagccaccgcgccgggcccaatagtgatgtttttactgctctgggcctgatcgcatgcaccgttgtctgtgctgtgacttccgtcgttgtctgtgctgtgacttccgttgttgtctgtgctgtgacttccgttgttgtctgtgttgcgacttctgtgggatattcgttggagaaggagccacacagctgtgtgggacccggcactccttcatcaccatcatccagggccacggacaccccctctcacaagtcgctgggatatgaaattagggaataaatgggaattttcagtgcgatgcagctggcgctaggatcctcctcagtgtgacgtctgagaccttttcccagctggagccctgtcattcattcattcattcatcccatgccaggctgggcggctgccagaggcacaatccggaaccgccccttgctaatgggcggaccagtgaaagcaaagcgggctcactgtgcagaccaatgattgacagttccagggtgtgatggacacaggcggctgccaggaaggagccccttcagaagcagtgggcggggcggggtggggaaggccgtggggaggagtgacttccagatgaggctcacaggactgtacccggagggagggggcagcaaggaccctgtgggcagccgggggcacgg

SEQ ID NO: 27 - DNA, 1041 bp, Homo sapiens
caggccacgtcctcatcccctctgggtgagtgagaggcacagcctgggtgcgtggggccgtggcggctccgaggcgccaccgctgtgtcctctcatgagtgggtgccgtccaggtctgtcctgggctggctgcgaggaggaggttggcctcgcgcggccatgtgcgtgacagtggagacatcgccagcctcctgcttgcacagctgacggcagcccctctctctccagccatgtccccaggactcttgagtagttggcctggtggccgtgggagaagcaggccccgagtccccagggctgtgagcgaggctgtctgatgtgctccctggtcaccaccccctgcctgtccgtcttgcctgggcagatggaggtggatgaacttcctgcggccgctgtaacagtggccgccactggggggcttaaagcaacacgcatttgttagctcagcggtctggagggtgcgagtgcagatggagctcactgggccaaatttagtcaaggcaccagctgggtgggttctttctgggggctccagggagaccccgtttcccgccttctccggcgtctgaagccgcctgccccttggtgcagccctgagtcaccccagcctctgcctccgtctcacgtcaccgcctctgatacagccgcccccccatccctcttgtgaggaccccgcaatgacgtgggcccacccagatcatccaggaacatctccccatccccacgtccttcacttcatcgtctgcaaagtcccgtatgccacggaaggtgacacagtcttgggtcccgggacttgcatgtggggctgtctgggttttgcacagctgaccatgggtgcttccggatgcttggcattggaggtttctgtcctctgctggaaggattcctggagtgagggcagcagagggcacccagatggaggcactgccggacgcgcaggggcgatggtcggggggcacctgggagccaccttcccttgtctctggggggtgacccttgaccttggtggcctcagttttctcatctgtaaagtggtgcaca

SEQ ID NO: 28 - DNA, 1585 bp, Homo sapiens
ggggaagcctggagaggaagccaggtggccccaggctcctggagctcagaatctagtggaaatcgctgcccagggaagaagctccggagtctagaggtggcagcacccattttacctgcaccctcagtgacagctgcaccctggcttctggggacctctgggcccaagggcacctcactgtctccttgtcctcctggtcactgacctgggccaccatagaaggcacctggctatctgcatgtggcttgaccactgccttgcacccatccgggccccgcagggccgtcctgtggcactgctttgggctgtgctggtcaccctgtgtagcggggccatgtccagtgaacaggagaggcctcaagtgccccctgacctgctgccagggactcggcccctccctcaccgccaccgcacccaagggctgtcgcctgtcccagcctgctgctccgagtttagtgttttaaaacgtgttttctacgtcttgtcagagtgctcaaggcgcgagattgccatggaaactgagctccttagaattcctgtggccgtcctaattatagaatctcaaagacacgcacagagctccttgaggttgtcggagttaaggctgaaagaggaggagcggcccctgtgatccccacaattttgttccctgcttgcttcagcagagcctggcacccagggaggtggcaggatgggtccccaatgggcacgtgacatcgagccagctctgactccaaagcctgacccgtgtggctgcaccgtccactgtgcgctgtccactgcaggagaccccaggctgtgtccacacgtacccccggaaggacctcctgctaacctgggcttgactttgagaccctgttccacagaggtagccgggggactcgcggtgccaggcccacagcctcctcgccggtagtatctgggggccaggggccgtttccagagcacactccccagaagggctcccttctccttttcacagcgctgtctgtcgcttaggtcagaaataggcccatcgctttccaagcagaaacccaaacactgaaaattcgactgtgacttttgaggggtggggaccgccaggtccccccaacatccctgcctgcgggcccagaaaggcagagtggctgccggcccgcgtgtccaggccccttacactgagggaaccttctagtcaattgcctgaagttcgaaggtttggggggtttttgtggttgcttccgtttgttttggcagttgcagaatcccccgaaaaggtgggaatgtggatttttcaaggcaggtgctcctttgattcagaagctaaggaggccctaagtgcagtctcaccttgagaaaaatatcaggccagtcctaacggaggggcgtcctgcagacacccagcctgcactcagaactgtcacggtcagaaagcacggtcagaaagtctgagaaagtcacggtgcagcagggcccgagaggcaagacggtgacacgtgggctcctggaagaggcaggatggtgacacgtgggctccaggacaggaccctggggcggacgcagacagtgggtgaaaaccaaggaaaggtctgaatatcgcttaagg

SEQ ID NO: 29 - DNA, 1044 bp, Homo sapiens
aagcatcacaaagcctatttgcacccccatccccatcccaaccccaaatctacccaacccccatcccaaccccaaccccaatattcacccaacccccaccccaccccatccgaaccccaatatccatcccaaccccaaattcatccaaccctcaccccaccaccaacccaacccccagcccaactcccaccccaacccccaactcaacccccaccccaatatccacccaaccccactccaacccctacacccccaacccctccaacccctataatctggtggacagagccggggctgtgtgggccgggtgggctgtgtgagctcgcgcaccgccgggctggtctttgacatggccccacttgcgtggagccaaggctcctgtctcccagaagggtcagctgggaatgggggaccaccctccagggccccgaggagggatggggagacacatttcgtcctccggagccaggagagtgaggggccggacgagctcggcccatggcgcttcctggcaaccctcgactgtgctggcttggtgccgccaggagctagcggcacatgcgtcctgacctgtgagcacattggctgttggttccacagggatctgatagtgggggccggcctagagaagggcgtttgctttggtttcatggccggttttatcagcagttactggacaggaccagcagtcgcagcgttcacggcttgagctttagcgtcgggtattgaaggagagtgagtctgtggacagggtgcgacgtacactggctcgatttaggaatctgatttcggtggtgtgtgagcagggtgcattcggtagaaactactttgagttttgaccgttccccagctggccgtatgaggtcagtactctcctgtgatgaggggcggtgactgcagccccagcgggccacgtgatcaggagggggccgaatgtcccgaggggctctgcgtgcagggggttttgccggactgtaggctggcgtgtgtctgtcaggttaaggcaggtaaggctgcgccgcttggtcgtgggttctgtgtgga

SEQ ID NO: 30 - DNA, 1034 bp, Homo sapiens
cgatcctgggtgcagccttggtgccagccgggcccctgatcttgtctctcaaccactcttggtttaccgggagtggacagatgaggacagatggctgcctgtggagtgacgggctccttctcttcggagcactgtctaatctgagtgtgagtccaaccctgcccgagccggaactcaaggagaccatgaagccacccttggcctctagctgggagaggtctgcgtccctgcagcgagcacgccaggtgatctctggcacacacttgccgcgggctgtctctcggaaggtagtcagcggccctggcttcccacctgggtcccaccactgcagaatcacccccgtggctgcccacaggggcggcttccatcaccctgcttcttcctggctgctgcgggctgtgttgtgacttccatcccagcctgagaggcctgcgaagggcttgccaccgactgccagccctgcctctgccaccgaccgccggccctgcctctgccaccgaccgccgaccctgcctctgccgtttccttgccacccatcagctcttgaggcttttaggaagaagtgtggctgttttggccagattgctttagctgtcctcagcagggttggtgtggggtcaccaccacccccatgtgaccttggcagaaggaaggtcctcctcccattcacccaacgcctgcaactcagtggttctgagcaatcccagagttacatgacgtcatcgcgatcactttcatcaccctgtacccagagaagacccgaacccactccagcctctccccacaccctgcagtggctgctccgccaggctgtgtggctctgcctggtctgcacatgtcatggaagtggacctgggcacaccgcggcctttcgtgcctgccctcccctcagcattgtctccacaagctgcacccacacagtagcacgtggcactgcctccttcctgcgctgaaccccacccactgcgtccactgcgtggagactgcacctctgcatccgtcctcagtggacatagggtggcctccactttctg

SEQ ID NO: 31 - DNA, 1089 bp, Homo sapiens
cccttcgccccgcccgccttccccttcgcgcccccgggcgaggccgcggccgtgatcggccgtgagccggcggcggggggcggccggggtcggggccgcgggcgccgccggggcgcgcggggcggcggcgggggccgggggggcccgggcgcgcgggagcgggagcggccgggggagccggagcgcaccatggaggcggcggcaggcggccgcggctgtttccagccgcacccggggctgcagaagacgctggagcagttccacctgagctccatgagctcgctgggcggcccggccgctttctcggcgcgctgggcgcaggaggcctacaagaaggagagcgccaaggaggcgggcgcggccgcggtgccggcgccggtgcccgcagccaccgagccgccgcccgtgctgcacctgcccgccatccagccgccgccgcccgtgctgcccgggcccttcttcatgccgtccgaccgctccaccgagcgctgcgagaccgtactggaaggcgagaccatctcgtgcttcgtggtgggaggcgagaagcgcctgtgtctgccgcagattctcaactcggtgctgcgcgacttctcgctgcagcagatcaacgcggtgtgcgacgagctccacatctactgctcgcgctgcacggccgaccagctggagatcctcaaagtcatgggcatcctgcccttctcggcgccctcgtgcgggctcatcaccaagacggacgccgagcgcctgtgcaacgcgctgctctacggcggcgcctacccgccgccctgcaagaaggagctggccgccagcctggcgctgggcctggagctcagcgagcgcagcgtccgcgtgtaccacgagtgcttcggcaagtgtaaggggctgctggtgcccgagctctacagcagcccgagcgccgcctgcatccagtgcctggactgccgcctcatgtacccgccgcacaagttcgtggtgcactcgcacaaggccctggagaaccggacctgccactggggcttcgactcggccaactggcgggcctacatcctgctgagccaggattacacgggcaaggaggagcaggcgcgcctc

SEQ ID NO: 32 - DNA, 1130 bp, Homo sapiens
ctggcctggctttgttgtttgccagttggaggatctatgggatccggcatgggcagctcccaggccacgaggtgccgaaattactcagtggggtcctcaggaactttccgttgcgtacctccccaagtatttgtaacttttcttttaaatatccaggcttattaaattgcacacacagaatgctgcattggctcagctattcttgggaggcctaattaattcagctattgcatcaaactttttttttctaaatctgtgaatagatgctccagcccggttttctctgggcgcccctccagcagagtgtcagatcgtggggaggaggggctgtggatggaagcgagggactgtcgcctctgctcggagggggctgcggagggtgcatgtgtgtgtgcatgtgtgtgtttgtgtgtgcgcgcttctgaccctgccaggccagggctcaggtggcagccgcctgcagacctgtgggctggggaaggatgctcgtggcagagctgcagacagacgtagcaggctggggcccttcgtgtcacacggggagttggttggggtgggcccgatggcgctccctgtgggctggggcctttctttttggggtggccgcaccctcgtcagtgcctgtggctggaggaagccacatgtcgggggggattgtgggctcgtgcaggctgcgtagtgggtcacctgtggccaaggcctgagctgctgggacacgctcacgtcactgtcttcagagctgatggcagaggatctcggttgagcagggtgtgtctgcgtttgtttttgtccgactgtgggtcatgtgtgtgcttgtggtctttctgtcttcctgggctttgctgggggcccattggagtggccagtggggcctcgttgtcacagctgacacagagcagggcccaggccacccggcttctctctccctgtggttgtgagcgccggggtccttgggccgccatagagacaggccagacaggctctggtcatctcagcggatgcctccgagccgcctttcccttttgaagtccccagcactgctctgaaatttcatttaccgattaaaaagcaattcccaggccatactgacgacgtgcacggtgtgagtgactgcgtcctctaggcctgag

SEQ ID NO: 33 - DNA, 1032 bp, Homo sapiens
agggggggtcctgctccgagggggccggggtttctgttccaacagggctggtggggggggtcctgttcccagaggtccgggatcctgttctgagggggccagggtcctgttctgggccgggggtcctgctccgagggggccgggcgtcctgttcctaggggcggtgggctgcctgtgtgagagctgttcttcacctgccacgtgcagtctgggcattctggtgactggagaatttgggttgtgttacagtgttgttgctctgtcctgcagatgcctgaattcccaggggtcttgcaggtccccttgcccttgcgctgtgtgggctggcgtgggtctcagtgggctgtgggttgagggtcgcttggttgggaagctctgcgcgcttcccagtggagggtccgcgacgggggttttctgatccctcatgctggcttttgacccgtgtcactgcaaggctgcccctggccccaggcagcgtttcttcaggcaggtgcccagccaggtggtcgggcttgagacctttgagtctcgaggtctgttctggggaatgactgagcttgtggaggccaggaaggggttgctgggcttggagagcctctggggaggagttgtgttttgctctttgctgttttaagctgaaatgatcacaggaagggacagcatcaagagtttctttctgggacacccctcactcagctcagcggccgtgtgtgggtttggggctgtgctctcccagacaccctcaggtccggggagcacttcgggggctatctgtccctttgtccaccagcttcctttggaaaaagtgtttgctgcaagtgtttttctccagcttttcgtggggttccctgtagtcttgggccatgctctggggtcaggctcccggcaggccctggtccccgtgcagaaggccagggtctgcgggtttgggctggtctgccccccaggtgagggttccggaaagacggccggctgctgagtcttctcaagcaggggaaacagcagctcgagagtggttcttgacctctgccc

SEQ ID NO: 34 - DNA, 1278 bp, Homo sapiens
ggggtttcaccatgttggccagcctggtctcgaactcctgacctcaagttatctgcccaccttggcctcccagagtgctgggattacaggcataagccactgtgcctggcccctggagtgggttctgccacggaaggcatccccggggtctgcgggctggaggggtcgcccccactgtgccacctgttctctcgaggcctggttgccctctgcagaccaggtgccatgccaggtgaccctcaggaagctctggctcaccccgggggctggggggcatgataagcgatagctcttaggtgctgctgctttgtgaatatgagagagttccagaagggccccgcttcccagagcctgcatgttggtttcactgtgtggtacttgatatttttccaggctgccttgctggggtggcctcgatggggggcccagggagcctccagctctggggacatgctgccacatgagcctgcttatttacgaaaatgaagaaccaggacttgagtgtgaattttaaatgagattgtggggacaatagtaaaatccagactaggaccagatggactgagcacctgcgttggccatggcccggaggtggcgtggtggtgcctggcgcctgtggccctcagcatgtgtcctgccggccgcctagtaggccttcgcttgaagtgcttattcctttgagtaatgctcctgtcttttgtttggggggaaacagataaagggggctttgagaggcgtctcggcgtgatcctgggaaacggccgagattctgttcggtgcttggtgttcgtgtcttctctgattttacctttttgactcataaagatggaaggagtgctctgcctcggtgcctctgcagctgcagatgctgaatcggggcgtttaggcctgcctcttgggctggcacacctggcggccttggtcaggccttcttgggctgcctctgctggggtgcttgtctcactggccgtgggggttgttgcctgtgtggttgtgttgctggcttcaggggctagggttagggacgcctggtcacgtctgggtccccagtttgggggccagattcaataactcactgaatgactcagtggaactctgcaggcactggcagtcaaggtttattggcaggtccattctttggctagaaggagaatgctgtttcttttctcactgtttcaccatttttttttttgagatggagtcttgctctgttgcccaggctggagtgcagtggcgtgatctcggctcactgcaacctcagcctcccgggttcaagca

SEQ ID NO: 35 - DNA, 1084 bp, Homo sapiens
cccgggaggctggcgccctctgtgggaggtctgaggttggcccatttgaccctatccaggacgggttacttaaggagtccaacgggccttgagaggctgatcaccctcgtgtggcgggcgtctctccccggtgccctcccgcctggtgctgtcaagggcttctctgtgccaggcgctgggctgtggcagccccaggtccccgcctggtgtggctgcccacggtccaggcagctccagggtgggcatccttggctccctccctcaccagctggccctgggaggtctgtctgagaggagttaggcctcattgtccgtgctcagagaacccgagccttccttaggaagcagtttgtccccgtgcctcccttcaggatcctgtggcctgagaagcctctgcgtggcagtggatggcagctccagctgcccgtggccctctttttttatggtttcccagatgactgggccaagctgggcctctgcatcctaggcatgctgttccctgcgcttccctggaaggtcggcggccctgcgtggacctacacggtacccaggacaggcctgccatggcaccggttgggcctctgggcacagggtgctctgcctccatggccctgacaggctctgatgcctgaggatgggggccgggcactcccagccttgagacttccctctgcagaggtggcacaagcccggggccccagagtgaggggactcttgcctgcctggtgagggtgagcgtggggtctggactctgacccctggtccaggcgggagaggagcacactggacagggcagccgagccaccctctgcggagctgtggacactgcgtgtgtggtgctgaaggtgtacacgtccactgaggccacctgcgccgctgcctgtgtcctgtgggctggcactcaccgagtgagagctgtgtgcagaacctccgctgtcagcgggccaggccacactggggagggaggtattccgtgtgcttgcactgaagcctgccccaggctgccttctgggttagggatacccaggacctccatagctggtgtggcgtctgtgagatctcagctgctgcttccctggacgcc

SEQ ID NO: 36 - DNA, 1032 bp, Homo sapiens
tggtcttgagctcccgttgggggaacgggagaaccttcatcccatgtgggtgtagccgttggcggcacctttgtacggggacacaccctggacctgaatggagtcaggaagggtttcaacctggatggcccgcgtgccggggacccgcaaggtgtgcagtggcaagggccggtcctggtggcgggctccctggtgatgctggtggatggttgtgcgtgggccttggggttcacagttcagtttgggagaggcgagaacccctcactttgaagtctttcctggccaacgggaggcttctcagagcagctttcacggctccggggctgagtgaggcctgtgtctaggctcatcctgccctccggggcgtcccagtgtgcctgggcagtggcgcagctggctccttccactgggtttaggtgtgcttctgctccccactgctgcttcagctgcgtcctttgcgggtccccgtaacttcagtgcccccacccctgttcggttccctgactgagctcggcgcctctagtgtagatgggtttttaattttcccagctgaacgtcgttatttggattgtgatttctttggtgtttcaatggactgtagatgaaggaggacctgttttctctcaggagtgtctgtggggtctcttgtcctggtttgctcagtgaagtgtggccccaagggctgagggaggtggccaggaccccgcagggtggcccccaccacagaggctgctgtcctccgggttcttctccactttctgggaccttggccgaggaggcctctgggagggtgaaatggccacaggcctggagaagcgacaccggtgggaagccaccggcagagaagtcagggaggagggagtcctgggcctggaggaacgtgggaggggcaggcgcctcctagcagcctcaagaaatgtgggccaggcaggtctggctacgggcaggagtgtgtctgggactctgaactgccagaagcacttggcggcaagccacatgctgtcacaatgttgcctggcccccatgaggagg

SEQ ID NO: 37 - DNA, 1247 bp, Homo sapiens
tggaacttacttagtgtctggggcatgggccgtgttttggtatcgcaagagatgcttcagggcgcgtgtcagcacaaacacatcacacgggcttcgtgaccatgtgctggctgcacgagatgtcagtgtgctccgcgtaccacctgcttcatccccgccctgccctctcgtgctcctcggcagggggccgccatccttatgccccgcctgccctttctgcagctgtgggtgcaggctggccgttgtgctctgttgcaggagctcctgtcaggctgctggtctgcgcgtgtgctctccgagtgcctgtcactctggctgactcactgtgtcagtgtcaccgtgcagctttgctcgtcctgttcttgtgccttgggacgagtgggcagagtgcttgctgttgggtaggctgtggtgcaccatgtgggcctgggagtgaaacagcttggtcagagggcatgtcggtcacgccaggctgtcttccaaagcgtcccaacactccctgtcatcggtcttgttggctgtaaacgagttctctgctgcatgggatgctaggggtgtggtgagtttcttgtagacgtggcaggtcagaggggaggcacactgtctgccaggcaccctgttatttactgatacacgcacacgcaatacacatctctatagattgcttttgtatgttcactcagctgggatgattctgtgtgtgcttagatctttgttcacgtttctgatcatttccttagtggactctgagattcccctaaaaggtgggattgttttacccaaacttttctttctttctttctttctttttttgacacagagtctcgctctgtcacccaggctggagtgcaatggcatgatctcggctcattgcaagctccgcctcccgggttcatcccattctcctgcctcagtctcctgagtagctgggtctacaggtgcccgccaccacacccggataattttttgtatttttagtagagatggggtttcaccgtgttagccaggatggtctcatctcctgacctcgtgatccgcctgcctcggcctcccaaagtgctgggattacaggcgtgagccactgcacctggcccctcctgacaacttttaagattctgtcatttaggctgggcatggtggctcacacctgtaatcccagcactttgggaggccaaggtgggtggatcacttgaggtcaggttttcaagaccagcctggccaacatggtgacaccatgtttctactag

SEQ ID NO: 38 - DNA, 1113 bp, Homo sapiens
tgcacctggccctatttttccttcttttttttttttttttttttttttttgaggcagggtctcactctgttgcccaggccagagtgcggtggcacagtctcggctcactgcaacctccgcctcccaggttcaagtgattctcctgcctcagcctcctgagtagctggggctataggtgtgtgccaccacacctggctaatttttgtttttttagtagagacgggtttcgccacgttggccaggctggtctctgactcctggcctcaagccgtcatcccgcctcggcctcccaaagtgctgggattacaggcgtgagccaccgcattcagcccgtttttctttttaaagaaccgactgtttttcatagtggctgcagcattttccactcccagcaacagcgttcgagcagcactgtctttgcatcctctccagcacttgttctgttttttgacagcggccatcctaatgggtgtgaggtggcatctcattgtggttttggttctcatttccctgatgattagtatgttgggcattttttcgtgtgcttattggccactcctatatcctctttgaggaatgtctgagtccctctttgagtcgagttgtgtgtgggggcctttgctcagttgtacgtctttatctactctggttagtgatcctgttctacttgtaaatttctgtctcctgtttgtctactgcgtgcaccgtggtcggatcctgcctctgttgctggaggctgcctctgtcctctgctgtggtggtcaggaagctggagcgtctcggcgccagattcatgtttgtaagaggagacgctctgtgagcctcggtgtgcagcgctgtctgcaagtcagactccccacccctcctttgtgcgagctgggcgggggctctgccgggactggtggtgttcatggagagggcttctgtgtgatgaagagatgacagtgacctgctggggccgaaggctgtgagtgccattgggggagggagtctcagagagtgcggcagtcgggcctgatggggctgctcttctgtgaaggggcacctaccgtgtgcctggcctgtagcagcagcaaagaggaacctgatggggggggcctcaggaacctccac

SEQ ID NO: 39 - DNA, 1859 bp, Homo sapiens
tggagggtcctcactttttgttttgcaaataacgctggggcccctgcgccactggggcaatgcaactgtgacggtgctggttggattcaaaaggaagcctggcagtggcggggcctggacaggcagcctttgacctgaggcggggcggcgctctgcgctggttcagaaaagccgtggggcagcctctctggcaggcactggctgtacctgttggttttcctttgcccacagtgaagtgaaagtcactgcagctgggtttgctgtttaactcactgtctttccttctcacgtcttctctgtgcaaatagtggtcagtgtactttttgattatttcagtcaagtggaagtttctaggagcgtagagaggcagcgtggcttagggtttaggagcatggctgggctaccttcctactctgagtgtgggccacgttacttttctaggcctcagtttcccattggcccctctcctgtttggaagaggcagctgggtcccacaagccatctcaggagccgcgtctgggcgctggcacggggactgtgcccacagccagccagcctggtggtcagctgatggattcccgtaggtacttagcaaaatgcctggagtgtgcgaggctgtcaggccagtggcagatgcggtcgagtgctgttgtttcttggtgctgcctggcactgccaccctgatggtcggctctgagttggaggccagctttcatggcagcgttgttggtgggcgtgcagggtgtgtctgacctgggcctgggcatcaggtcccattgtggttgggtccacagggccccttgcctcattcgtggaggtgctgggggaattctacaggctgaggacgtgtgaggctccagggtccagcgtgcaggccggatgttcctagcgttgccggccacgcagacagccgtgccaccaggaggttccctggcaatgggagacaattgtctgctcagttcagccttcagtgccccagggctgttttgagatcaaggctgagggggaccctttcaagtgtctctgcctttggtggtcccgggtggccggctcctcacccatggtgtggtctgagtgggctgaaaccgaccccaggtgattcttattcggaagagatgtttctggaaatgagagcaaggcagtgagtggagagccagctgagagatgcttgactccccacctgctgctgttggggccaaaagcgtggaggagggaagagccagcacagagggctcacggtgtcccctgctccaaccgactcactggccgcggcctcatggggcctccctgtcctgcctcctgctcaacaggccacaggttttgttggattcgtcaattatgacccaggttgttgaactggaattggagatgtttttacagttggagagtttgttacagtcagaacatttcgggttgttggagttcggtgtcttgctgctgttgcagcttgcatcttttggccacagtttttttttttgatacagtgtcactctgtctcccaggctggagtgcagtggtgtgatcttggctcacagcaacctccgcctcctggattcaagtgattctcctgcctcagcctcccgaatagctgggattacaggcgcccgcccaccacgcccggctaatatttgtatttttagtagagacggggtttcaccatgttggccaagctagtctcgaactcctgacctcaagtgatgcagccgccttggcctcccaaagtgctgggattacaggcatgagccatcgcacctggccatggccacctgttttaaggaaaccactcagtgtcttaaaagttaagggtgctcattgccctgctcaacagagagtcccgtgtggtgctgggtagccctcgt

SEQ ID NO: 40 - DNA, 1104 bp, Homo sapiens
aaggctttcgtccgtctgagctgctgactgagggtctttatttccacactcgagagaaacctggcggcccagcagtcagtgcccgcggagcaggtacagctcagggaagggagcagccccttgctcacggtcctttctggcacagtctgtggccctctggagtacccggccagcgtcctcacagctgtccccaaacgcgtggtatgggttcctccctcagggccagcaccaggctggtgctcagctcttctggaagagccgtcccatggtcccagcgcatccgtggaagagtgaaatattgaacgttacaagaaggaagtgaggccaggcgcggtatctcgtgcctgtaatcccagcacttttggagttggcgatgggcagatcacttgaggtcaggagtttgagaccagcctggatcaaaatggcaaaactccatctctactgaaaatacaaaaattagccgggcgtggttgcaggtgcctgtaatcccagctacttgggaggctgaggcatgagaagagcttgaatccgggaggcagaggttgcagtgagcccaggtcatgccactgtactgcagcctgggtgatggagtgagaccctgtctgaaaaaaaaaaaaaaaatagagttgctaaattggagtaaatatttcataacgcgattcagttcagttgctttagctgctctgtgagtccagcacccgcctgcagcgcagcctcccctgtggagtctggagcacccaggcctacatcacaggctccagagcacccgggccggtatcacgggctccagagcacccaggttggtatcatgggctccagagcacccaggccggtatcacgggctccagcacagcgggcaaaaggtgggaggctccccagactttaggtgtctggagttatccataaagggggcttcctgagttttggtgtatcccttggtttacaacccagggagaagcctggccacttgtgagtgcaggtcgtccttggacacacacttggaggaatcggaaggaacaggacacgcagccttatgttcctgtcagcccttcctgcacatatgccctgtctcagggggctgctggcctctgccagggcctcctc

SEQ ID NO: 41 - DNA, 1048 bp, Homo sapiens
acatggctgggcactgccccacagtgtcacctctgtgtcctgtggtgcgtgctgtggactggcaccacaccccacgtgcttgttaggccagtttctctcaggtgtcggtcaccctaccatgcggcctttcttttgtcttttatctttagctaaggagtccatggcataccaaaagctgaatgatgacagccagtgtccccatcctgtcctccccaactttccacaggcagggacgctccccattcttgctgcatagtcttctgttgaccccatgtacctgagtgacccccacgtacctgagtgtgacaagcactatggtgcttgacctcagtccagctgcttagacctgtacctgccacagccccacgtgctgacaccttgcgtcttgagttttgataaatctatcctttggctgattaatatgactgagtggtgtcttctgaccccatttcttatctggaacactgtgtcctgacttcatttcctgtctggagcacactgtcctgacctcatttcctgtctggaacacactgtgtcctgacctcatttcctgcctggagctctctgtgtcctgacctcatttcctgtctgtgccgctctgtcctgacctcattttctgtctgtgccaccctttgtcctgacctcatttcctgtctggaacatgctgtgtcctaactgcatttcctgtctggagctctctctgtcctgacctcatttcctgtctggatctctctatgtcctgacctcatttcctgtctggaacatgctgtatcctgatatcatttcctgtctgtgccactttgtccggacctcattttctgtctggagcactctgtatcctgacctcatttcctgtttgtgccaccctttgtcctgacctcatttcctgtctggaacatgctgtgtccggattgcatttcctctctggagctctctctgtcctgacctcatttcctgtctggagccagtgacctcatttcctgtctgtgtcactctgtcctgacctcatttcctgtctgtgccactctttgtcctgacctcatttcct

SEQ ID NO: 42 - DNA, 3733 bp, Homo sapiens
cctggtgagggattctaggggttcccctcctgggttcatccttacctgagtagccacagcacactgtgcagttgggtgcctgggaggcacgtgctttgggtgttgcatggctgacctggtaactgggcacccgtgtatggagggctggaacagaacacttgtcggcgctcctcagcgtcttgcctctggtgtccccatggcgaagtcccctgccatctgctttgggctctgacatgtgacctgactgtgcccttcaggagctttcagaacctcctcttagatctggcattcaaaatgtcttgtcagacacctcgaggcggcttgtgtttggccctgtgttgggcgcctattgggcccttgtcaggtttttgttgccaggaggctcgcgccccgatcttcgggatggtgcccgtggcatcttctgctcggtgctccctagggctggacgttggtcctcctggcactggtgctccggttgctgtggtctccctgctgttcccttgtggctcaggattactctctggaggtctccgccttatcatgagcactttctttgttggctacttttagtttcatgatttcattttcgtttctaagatatctatctctttgtaaaagctcccaccttttgtgacttgtggatgctgtatctttctcctgttgctgcagacattaatgatgtttttcttgacagtttgtcctgctggtttcctctgcattcctttggttggtttcagacctcggctttaaaggggcatttccccacattgccaattcttgaccatctggtcacgtcaaggctgacgtgccaatggctgcaagggggagggcacctgggagcccgcggatggctcttatgcagacgtgcgggccagccccgatcctgcttctgcaaggcctcccctcccatggtggcgctttggtgccagagcgcgtcggcgtggctccctagcgtctgcctctgcagctgcttggcccccagccgcctcctcccagctgcctcctgccctatgtgtgcttgagctcgagacaatgcttccttcatccaagagccgggctctcggcgatttttgagaggagaatggggttgaagcgatgttgctcttccgtcttaaaactggatttctttcctcatgcttttgaattattatatcttcttgacatgtttctctggatttgcaaaagatttttatattttatatatttatttatttacttatttatttatttttgaggtggaactttgctcttgttgcccaggctggagtgcaatggtgtgatctgggctcactgcagcctccgcctcctgagttcaagcaattctcctaccttagcctgctgagtagctgggattacaggcatgtgccaccatgcctggctaattttgtagttttagtagagatggggtttctccatgttggttaggttggtctcgaactcccgacctcaggtgatctgcccgcctcagcctcccaaagtgctgggattacaggcttgatccactgtgcccagcctgcacaacattttaagtaaatgttgacattttaagcattgagcaaggaagagtgtgaagaggtactttataaagggaaatatggcaatactgattatttgcgactttaaccagaagtaatctttggacagccagatgttattgtcttggaatgtggtgttttatctagtgacaatgtgtgtgcatgcacacgtggacacacaggattcctggtccttaaacccgtatgttcggtgtctgcagcatagaatggtctcggctggtatgtgtgggaccagctcagatgcccctattctagatgccgaggccgaatcgccccctagggaggatgggacagtggctgtgctgagcgtgctacggcgtcatggaagaacagcagaggcgtttgagaattgtgttttttaaaaagagttgaaacttgtcagtcaggaaatggagtaacaggtttatcaggagtgtcattttccttttttttttttttttctcccatgagtggcttggtcggggaactcatgtttttttttgtttttgtttttgagtcagagtctaggtctgtcacccaggctggagtgctgtgatgtggtcttggctcactgcaacctctgcctcccaggttcaagggattctcctgcctcagcctcctgagtagctgggattataggcgcctgccaccatgcccggctaattttttaatttttagtagagacggggtttgttggtcaggctgatcttgaactcctgaccttgtgagctacccaccttggcctcccaaagtgctgggattacaggcgtgagccaccgtgcctggcgggagctcatgttttatctgaggtggcccagggccccacctgggagcagggtcagcagtgcctggcccttgagtgtttgcctcggggtgtgttccttttaaatcagatcagctcatcacttggccggttttctagaccagcatattcaaacccaaggtttggaatcttgggctggcttctgaaatgacatgctgtgggctccatccccagaattctgggttcccaggtccgaggtagggactgagaatgtgcatctctagcaagttcccagatgacatggtggctcctccggaacccctgcctccttttgtgggtaaagttttacaggtgcatggccacgccccaccgccctcgccggtgctgtctgtggctgttttgtgccacagcagaaaggctgagtaggtgcgagagagaccatgtggcctacaaacccaaaatatgtgtgatttggtcccttacggaaaacacttgcaggttcctgatctagagaaagaataattgtaacgcagggctacattgtttttgtgaaactctttaggatggaaaagggcatctctgaggtcagcgacagaagccgtggtggtttcatgccaccagtttacctttgtcctgagctgtggaggttgtttaaagctatagatcaaatgaagcctggaatataagggtgcagttaggatgattgctgtgtagttattttttaaaacggctttttgaggcataattaacataagctgcgtatatttaaagatacagttagataacttttgatgtatgcaaacacatataaaacatgtataaaaccctcgctgccgtccagatgatgaacctgtccgtcacccagaagctctctcctacccacacccctttctccccaggctgcagcagtctgcttttgggcctgtagattcgttgccttccttagagctttgtctaaatgaaatcctacaatatgttcttcttttggtctggcttccttccctcagcgtcattattttgggctccttggatgcgtggcgtgtgctgggcagtgttcccctgcgtggatgtcgcgtttgttcctccatttgcccgttggagcgtgtggagtgtttccagttcttgactgtcacaaagaaagcggctgtgaacattcgggtacaagttgttgtcgggatacacggttttatttccctggatagatacctaggtgtggaatggctggatcatatatttgtgcttatgtttaacttttagaaactgccagactatcttccaaggtggctgcaccattcctcgtcctaccagcagtgagtgagagttcctgctgctccacgtcctggccagcgtgtgtggtgggcgggcttaggcgttcagccgtcctgatgggtgtgcggcggcatctccttgaggtttaagttgcgcttccccaatc

SEQ ID NO: 43 - DNA, 1096 bp, Homo sapiens
aagtgctgagattacaggtgtgagccactacgtccggcctcagtttgttcttttggtttggacttcggtttcctagctgggaactttgtccctaactcaaggtcacagagattatctcctgtattctagaaattttgtagctttaagttgtatatttaggtctgtgatccattttgagttaatttttgtgtgcaatgcaaggtgtggacctgagttcatttctttgcctaaggtgttcagatgtttcagtggagtttgttgtaaagattagttctctactggattgtctttgtgcctttgtcagaaatcagctgtgcagatgtgtattcagttgatccacttgtttatctttttacatcaacgccatgctgttttggattattgtagctttgaaataattgttgaggtcaggtgatattcgcgctctaaccctgcactttttcagagctgttacagctattcgggatcttccacttttccatatgaattttagaatcagtttgtcaatttctgtgaacatttctgggaaattttgattgggattgtattgagtccatagataaattgggaatatcttaacaatcgggagttttccgaccaacggaaagctctctgtttatgggttgttattaatttagtattttgtaatttttagtgcacaggtttttaccatcttttgtcagatttattgatttatctattgaggttttttcttggtcttgtaaataatatattttaaaaattcgattactggatataaacggccactacagttcttatatgttgatcctgcagcctgtaaccttcctaacttgctcatgagtcctagtggcttttattgtagttgccattgggttttctgtgtagatgatcatgtcgtctgcagtaaaagcagtttcacttcttcctttccagtctggatgcttttttatttgtcctgcttaatggcaccggctagggcctccagggcagtttgaataggagtggtgggagtggacgccctcgctcctgatctcctgatctggaaggcgtggaatcagagtttggatgggagtggtgggagtggacgccctcactcctgatctcctggtctgga

SEQ ID NO: 44 - DNA, 1054 bp, Homo sapiens
atttggcaccgtcgagtgtgatggtgcatgttgggttttcgccagtgccctttatgagtccgaggaagtccccagaatacggttcctagtttgatcaggaaggatattgggttttgtcaggtgtttttttttcttaatttattgagattattaatatggtgagtgtctttctatttcaggttactaatgtgatgaattatattgactgattcttgaatgctaaaccaattgttcattcctgggatagccccccttcagtcgtgatgtattattattttagaatattgttgaatttgtttttttttgtttttgtttttgagaccgagtcttgctctgcacccaggctggagtgcaatggcgctatctcggctcactgtaacccccgccttccaggttcaaatgattctcctgcctcagcctcctaagttgctgggataacaggtgtccaccgccacacccagctaattttttgtattttcagtagagacagggtttcaccatgttggtcaggctggtcccgaactcctgacctcaagtgatctgtctgcctcggcctcccaaagtgctgggattacaggcatgtgccactgtgtttggcctcttgagttttatttgctaaaattttgcttagaattttttttttttttttttttggagacggagtcttgctctgtcgcccaggctggagtgcagtgacacgatcttggcttgctggaacctccgcctcctgggttcaagcgattctcctgtctcagccttccaagtagtagggattacaggcgcatgccactgtgcctggctaatttttgtatttttaatagagacggggtttcagcatgttggccaggcagtcttgaacttctgatattaggtgatcctcctgcctcagcctcccaaagtgctgggattacaggcgtgagccactgcgcctgccaagaatttttgcatttatattcatgagggatgttggtgtgtgtttttttttcttcttcttcccgtgtatctttgtctggttttggtgttaacagagtaatgttcttgtagaatgatttga

SEQ ID NO: 45 - DNA, 1067 bp, Homo sapiens
aggtcaggagttcaagaccagcatggccaacatggtgaaacccaatctctactgaaaatacaaaaaaattagctgagcgtggtggcgggtgcctgtaatcccagctactagggaggctgaggcaggagaattgcttgaacctgggaggcggaggttgcagtgagctgagatcgtgccactgcactccagcctgggtgacaaaagcaaaagtctgtctcaaaaacaaacaataaacaaacaactcttcctttgaaagttttgttttgttgtttttgttttttttttgagacggaatcttgctctgtcacccaggctggagtgcagtggcgtgatctcagctcactacaacctccgcctcccgggttcaggcagttctctgcctcagcctccctagtagctgggattacaggtgcccgccaccatgcccagccaatttttgtatttgtagcagagatgggggtttttaccatgttggccaggatggtctcgaacacctgacctcacatgatctgctcatctggacctcctaaagtgctgggattacaggcgtgagccaccgcaccagccagaaggtttttttttttttttttttttgaaacggagtctcgcactgttgcccaggctggagcacagtggcacgatctcggctcactgcaagctctgcctccccggttcacgccattctcctgcctcagcctcccgagtagctgggactacaggcacgcactgccacacccggctaatttttgtatttttagtagagatggggtttcaccacattggccaggctagtcttgaactcctgacctcgtcgtccacccaccttggcctcccaaagtgctgggattacaggcatgggccaccacgcccagcctactgttcatctttaccttgtgtaatgccagtttaagacgcaaatgcaggtcgggtgcagtggctcactcctgtcattccagtgctttggaaggacaaggtgggcagatcacttgagcccaggagaccagcctgggcaacatggagaaaccccatctctacaaaaatacaaaaattagctgggtgtggtagtg

SEQ ID NO: 46 - DNA, 1053 bp, Homo sapiens
ggatggataatgtccaaatgttttatccaagtccaaatagcagtgttggtggtaggtgtgctctgcctgtgggtgggggtggtctctgtctcaaggtgggctacgagggtctgccgcagggggggtgtggacgggtcttgcatgcgtcaccttccctgtgtggggcgtgggggtggtctccccctagaaggacagggcttgtggcagccgtgagatggatggattcccagggatctcccctcaccttgggggatgagcccaggctcctttctggggtctccagtgtgtccccgatggaccagcttcctgcatggcaccgccctccggccccaccccgagccctgagccccgccttgagccctgggcgctcctggccctggcctggcactcaagggctgctttcagggctgtttctcgtctgtcttttttcttttctttcttttttttttttcttccttgagacggagtttcactcttgttgcccaggctggactgcaatggcacgatctcggctcaccccaacctccacctcccgggttcaagtgattctcctgcctcagcctcccaagtagctgggatcacaggcgtgtgccaccacgcctggctaatttttgtatttagtagagatggggtttctccacatgggccaggctggtctcgaacttctgacctcaggtgatccacccgcctcagcctcccaaatagctgggattacaggtgtgcaccaccattcccagctaatttttgtatttttagtagagacagggtttctccacatgggccaggctggtctctaactcctaacctcaggtgatctacctgacttggtctcccaaagtgctgagattacaggcatgagccactgtgcccagcagggctgtttacttaaaggtacatgttccgatccctgaattcggttttattttgaggttaggagtgagaacacgattggttgtcgtcgtttcctgtgggagtggctcttttcagaggcagacagttgtctttgctcgtgcgtgcacatttgtttgcatgcgcgtgagacccccaggtggt

SEQ ID NO: 47 - DNA, 1033 bp, Homo sapiens
ttccttccacagaatatggtttaatggtttttcagtatatgcagccatcatcatctaagttgagaacatttttgtcacccccaacaagaagccccatgcacatggtccgtcactccccaggccccaaatcccagccagcactgatcttggccattggcctgtcctggtcattccatagaagtagagccacgtgactgtgtgtgtgtctgggccacgcgtggctgtgtgtatgagagccatgcgtgactgtgtccgggtcacacgtgactgtgtgtccgggccacgtgtggctatgtgtccaggccacgtgtgactgtgtgtgtccggcctcagcacagtattttcaaggctccttccttccttttcatgactgaatcatactccattgtctgcacagaccacaatctatcccgtcatttgtctctggatgcttgggtggctgcactttgctgctgtgagcacttgtgcacaagctgtcgtgtggatgtgtgttttcagtaacctgcgtgtacgccgaggactggaattgctgggcgatgtaactgtgttaagcttccgaggacctgccagactgttttccacagcagctaaataattgtacgttcctcttagcaatgcataggggttcctgtgtctccatgtcatcaccaacacttgtccaaactaaaaaattctaggccaggcgctcatgcctgtagtcccagcaatttgggaggccaaggtgggcagattgcatgagttcaggagttcaggaccagccagggcaacaaagtgaaaccttgtctctaggaaaaaaaacaaaaaaaaaaaaacaaaaaattagctgggcatggtggcacatgcttgtagtcccagctactcaggaggctgaggtaggaggattgcttgagccctgggtggttgaggctgcagtgagctgagatcgtgccactacactccagcctgggtgacagagcaagactccgtctcaaaaacaaacaaacccagttctagccatcgttgtgggcgtgagttgacgtctccctgcggtgtg

SEQ ID NO: 48 - DNA, 1007 bp, Homo sapiens
cttgggggccctggaggcggcgccgcggaggacggagcggaagtgctcgctgcagcttcccggagccggagcgcagcgcctgcggccgcccgtgccccgccgtcctccttcccgcggccgtgagggagaccgcggctcggccgtagcggagctgcgaggtgccaggaagggctgcgtggcgcgggaacggccgggcagcgccgcctccgcttcttccgggctgtcaaggccgcgggcgggcggggccgcgctgagggccgggcggggagggccgtcggggcccgggtggccgcggggaccgtgttcccgacccgcggccctgaggggtacgggtcgcgcctcggggtcgggcccgggacggggtgctggggggtgcggcggagccctggggcctgcgagggtcgggggagcgggagaggggccgggcgggggctgcagccctcgagccacccgggccgcatctcgtccgcatcccctgcttggcatctgggggaagcgggcagtcgcggcccccacagcgctgcgagttgggctgtattccagagtaatgtgccctgtccccatcctgcgtccaggtcagcgcttatctgtaggatttagtgttaagctctggggtgaaggcgttactgacgggctgaagggaaactagttacatcggttttgatcgtattctaaataggcaataaaatcataaattctccaggctgacttagtactggtctgtggccccactgataaaggtatcgttcgtttctctgccaggtgtctcacagcacagagggctgctttcagcctaagtaccttcagtgggcttttgcccttttccctttatgaagagtagagactggccgctagtcctggaagcactttatttttagttgagttgacatttcccaggaagatgcagttatccccgtaagtggataaagggttctcagtaattcagactctcacatggcttctgccgtatgcctgaggtgacggcgacggcggtaacagtgtgtcag

SEQ ID NO: 49 - DNA, 1078 bp, Homo sapiens
cccttggggccagcacaatgtcacagtctcctaggagattgttttgtaatagtcttgcttaagagatgaacctgcttcaggaattattgaaaataaactttggattaattgtagtcacttctttgtgctgatacatagatgatctcttgctattttaactcactcttttagctgttttaaaaattgaaagccaaccctagcagaaggtacattttgtggcagggtcagtacagaagttacaggacctgcttcatgcttttggactcttgtctttctagatttatcagtcctggctagacaagtccacaccctacacggctgtgcgatgggtcgtgacactgggcctgagctttgtctacatgattcgagtttacctgctgcaggtaggtgtgggctgaagtgacgagacttggctctgtccacgttacctgggcgtgatgtttgtggggatgttgttgatccagtctgtcttgcaggaagtggtctctagtaatcaattttcagctaaacgccaaatgtcagaaagatctcagtgactgtctttaacgaacagggttgtttatgattcacccggagtcgcctcgccaggcttctcagtatacccaggccgtcctgagcccagcctggccctgccctgggcacgtccaggcctggacagtggagccgctggtgtccctccgaccctgctgcatgatgctcaggacaaggttgcgctctgtggctgcctcattccttgggtgaagagtccatgccttgggtgtcatgaatgactcggcgtccaaagggtttatgtagcttttcctgagctctcccttgtgtgaggccaaagcacagtgcaggttgagacgccgagtcaagtaagagagacagtgaccgaagggggtcttgagggtttccttcgtgtgttttcgggcacccctaggtcaggtgatgtcgtctcagacttcacctgggtgctcctttacttgctggtaaacacggggtttctaggagcaaacctgtaagatgggaattcttcgtcggtctttagaggaggttacataatcttatgtgcagagcagggcatgttgaaagcctt

SEQ ID NO: 50 - DNA, 1048 bp, Homo sapiens
aaaaggtcaggcagcgcgtccagttcagggagcgtgtccagttgtgtcacgagtgggagacctgggttcagaaccgtccagctgtgtcgggagcaggaggcctgggctcaggaccacctctgggctcctgctgggaccttggagatcagcacctcccggcgctgatgtccagtgggaaggggaagcctctacacagaggctcccacagagaggggattgtgtggagctgtccggagcgccattcagctgggggacggagcttccctggaacatagtgccccgcttgattcttgaagagaggacgtggacagcagaggagacgcaggcctggggacggacagttgggcagcaggcatggcacgggcatgggctgggcgggggccaatgcccccaaagtcaggaagatgcccccaaagttggggccgaggggccacgctcatgcccatcaccccctcctgccctcccctcccgcacagcctctggcatcagaactcgcacccttgtgcactcctgggaagccccgtcctgcttagacctactccgagggcgcgtggagcccgcctccccctggaaggggaaataggaaaaagaaccgtgaaaagctccggagttaaccgtggcggcttgaaggaccttgacctaattggtccagaaaagtcaacatcggcacctagagtgttcagaaagtgaagattaaacttaaagcgattagacaacttatttttcttttccaagacattagctggtcaaaaatgacaaaaatgtccttaagcctagctgaggcagaggcggcaaacaggcggccttttgtttggcagaggggcctgaccacccgaacccgcgtgggacacccgggagcccacctcctgagagcccggcgaggggatcgggccgggtattagccggggattagacggccgagctgctggcctggtaggggagctgccggggagctgccggccacccgcaggctgggcctgggaggccctcctggtccgcgtgctgctgcccccgggtcaggggcttctggaaggtgccacccccgggt

SEQ ID NO: 51 - DNA, 1043 bp, Homo sapiens
cagcctccccctaggtcccccaaggctccctgtgagaacagggtgctccggagcctcctgcccttttccttcctccctttctttcttccttagggaaaataaggattggatgtgaagggagtatgacagaggcatgtggcctctgtatgggcctggtgggcacctgccgtgtgccctggtctctgtgaggctctgtctacactgggaccctcccagctgtgctgtgattaggacacagccaccctcgctctgacaggggaacccggggctgagaaggaaggaatagctcccagcccccaggtttgtccatgcaggggcccagaggcaggtgtgggtcccgctcagtgaccccagcaggagctcactgggggcagccaggctcttgccaggtgggagaggcacaggtgagctccagcaggggcggcagctgggcccagacccggttcctgcccccactaacagcatgtaggtggggcagtctcaactctgcgccttgcaggccgattgcctgggcccagtgcctcatgctcctgcctgaacatggctctgtcctctgcaggtccctgacccagccgggccctggaacttgacttcactacagccgatggccctctctgggcttgggggaattctgtgtcgtaaacatgacctcagccccactttttctcagaagctgctgtccccttgtttgaaagcaggtcccaaatgtagacccatgggcccttgtggggcctgagaatgctggggacacttggcagagagtgaggctcaccgcccggtgcccctgcctgaagctgggattctgcggtggccccagggtgcccgtggcaccagagaggggttcagccaggaaccgcaggggttcctgacccagatggtcagcctgtgagacccccacccaattccaggccacattctctacctactactggctgagagttcccgggggaggtcccaggagtctgcattctgagaagcgatcattgtggggcacttggaggagtccagcccaggaggaggccctgggaaaggggcccgccctg

SEQ ID NO: 52 - DNA, 1066 bp, Homo sapiens
ggtcgggcgtggtggctcatgcctgtaatcccagcactttgggaggccgaggcaggcggatcatgaggtcaggagatcaagaccatcctggctaacacggtgaaaccccatctctactaaaaatacaaaaattagccgggcatggtggcgggcgcctgtagtcccagctactagggaggctgaggcaggagaatggcgtgaacccaggaggcagagcttgcagtgagccgagatggcaccactgcactccagcctgggcgacagagtgcgactccatctcaaaataaataaataaataaataaagtcttcattaaaaaagagttttctggaagtggcacatcgtatgcaaacacatgcacatgcataaggacacacgtgtctgaaaaggctgattggaaatagttttgaatgataatatgccttattgctgagataatggatggtttttttaaatgaacaccgatgggggtgttttacttgttaatacgttaagtgacgcacgtagggctgtgctggcctgcagcaaacactcagtaagtggcgaaggtagtcaatgaacactggtagtacctggcaggccgcggagggctcttcgagttggttggattctaaaatccttgtggtccagggttgtggatcattccttcatgtgtgtgggtgccactggcacagctgaccccagtttctggctctctgccttccaggaacgaggtaggatgagactctctgcccacctggggttgggtggagcatcaggccggtgagtatgagggagggcactgctgctctaggccgggcaccagctgctggtgtggtccctccagagttctctgctctccaacactgcaaccagagagtcccagagagctcctcaagtttttaccacaagcagagctgccctgccaagtcacactgggcttaggaaaaaaataaaagtcacatgtttatttaggaaaaataagactttgttacttggttaagacaatgagttttagaagctgtttgttacattggcataaaccttgctcaccctgactgatctgcttagtgagttccttgtgtctg

SEQ ID NO: 53 - DNA, 1044 bp, Homo sapiens
tcacaccggcccaaggggaggctcgagtcaccctcagcttacccacgaggagggtccaggcaggcgccggaagcagaagatcccagggattccctccaggggctgcagctggggctggggagacatcgcctgggcctcgttcaccatgatgactgtgcctgggcgtggcagcaccctccgtgtgcaaagtcaggccatattgggctcaggcctgggtggtagaggccaccccttgcagctcgccaagggatgatcttagggcacaactggtgagttctgggggccacacagcagccctgtgaggcagctgcctttcttcccctccacataatcatgagaaaactgcattcaagcaggtaaactcaccacccaaggccacataggcagtaagcggcaaatcaggcccccccaagaaagccctgaaacccagaccaactagtgaacaggaggctggggcaagaggggacccagtgaagtgttttgcagcgtagcctgcagccccgcatgctctgggctgtccaggtttctgaggttggaaagagtgtggtccccacaaccagccccaagcaagggacttctgcgtgagccacctccgtgggcctgggatgcgcctctccactgggcctgggatatgcctcccctctccatggtcaggtctggtcccagctgtccctccctcgttagtgcagcaggtgccgtctgtgtgtccctcatccaggcttccttacagggcacccaggatcttccattactaagctgtggccctcaaactctccccatagtatcctccaagccccctgcacttctttgggcccctggttttccagcatcacacacccttcccacctccccatacaactccagggaagacttgcatctcccctgcggtgtacccctcagagaccaccttctgaaaccccactctcaaaaagaaactctttgcttttcaaacagctttagttgtgtgaacccaagcaactacccacaccctggcctagcagggagcactcctgattgtctggattcctgtggttctggggggcc

SEQ ID NO: 54 - DNA, 1020 bp, Homo sapiens
cgcacagggcctggagcggggctgggtggacctcagaccctgaacacctctgggagctcctcggtcagcccagcctgcaggcaaggcgaggaggccccaggctcttcaaaactaacattgggaagtggaaacactttttgtgtctgagactgcatctttttttattctgaattgtcacttggcagggcaccccctcaagaccttctctggtggccttttaagactctggagacaaaatagcccaaatccaggtgtggccgccccatgcagaactctgcctgtgaggtctttgctggaggaggcggcaccacaggccggctggagaggctgtttccaaggagaagcctggagctctgcagcagccctcggggggtcctgccccctctgcctcccttagatgtggacacccagtcccaacagcccctcagcccccgccctgccctcccaggcccacccagaggcgttgtctttcaacgctcatcccacggtcaggaccaacaacggcggcggccccgggcagggattctgttgcccggcagaaagttatttgaccccagcactgatctggttactgatgcagagcgtatcagccgctgcacatggctgccgcccatgacatctgggccagaagctgagccttttcttggaggcggaggttacagtggcagggatgggcacagtggatgatggcgtgcgggtactagaggggatgccaaggcccactcaaagcgccaccactgcacttggcccccacccacctgcaggggagacctcaagagattcacagtaaccccacatgggggtcccagagcctcaggaggcccctcgcctgccccccagcactggctgatgctggcagtgccctgggaagccaaggccactgttacccccattccacagatggggttcagcggcccagagtgtgtgacctcacccacagcacagaaatacaagttcacacaagcaaacaagttggaaaatgctgggttttctcagagaccccttgggaaaaggagcagg

SEQ ID NO: 55 - DNA, 1056 bp, Homo sapiens
ggccttggagattaaatcgggttccccaaagagcaagctgtggagaggggaagggaaagttgcctccctcttccctacggggttcttgtcaataaacgattgacaaaagacagactcacaagagacaacagttttaaggctgtgcccccgcccggaagtgccataaaaacaggagactcagcagtaaccagatgggagcggtgcagatgtccgtcctctgtgacagaaaggaaagggggcctgggcttctggggagcggtagagacaaatgaggagagggtgagggaggaaacgtctgggcataaaggctgcctcgtggtgcagctatcagtctcatggtgagaaaatgcgtcttggcgcgcggctctcttcctggcacacagaccattactaatgaaaatgtcctttatagatgtcaattttctttagaaaagagagttttttactttattttagggagctgaagagctttttttctgttggctggttctcagttgcttttagctcaaagtaatcaacatgtcaacatggcatattttggggtgacgtattctggtctcctacagtcatattttggggtgacgtattctggtctcctacagtcatattttggggtgacgtattctagtctcctacagtcatatttaggggtggcgtattctggtctcctacagtcatattttggggtggcgtattctggtctcctacagtcatattttggggtggcgtattctggtctcctacagtcatattttggggtgacgtattctggtctcctatagtcatatttaggggtggcgtattctggtctcctacagtcatactttggggtgatgtgtcctgagccccattgtttcctagtctgaaacttccccaagaagctccacggtacagaaactgggtgggtgtgttgtcccataatgctttgaagaggcatttctatggaaacaaaagaaaaaaaaaaaaagctaatcattggagctgactaaaaaccagtttctgagcctgggggccgtggcggggcaggtttgtagatgttgggctccgagcatcttc

SEQ ID NO: 56 - DNA, 1107 bp, Homo sapiens
agcctggaaacacccccaggcccacccaatacctggggcagatctttcccttcctgcaggcccgccttcaccttttcccgagcccgtccttgcctggacgccagccctggcccctgtgcctggctctgtgtttctgagaccacttttgatcccaagcccctgcacgcttgctggctggtttgtttactgtcgtcagcatggagggccggggtcgtgtctcgtgccggctgccatcttcctgcacctgggagggtgctaggatgtcaagcctaggaaatgggtgtgaagaggagacctgcctttgcaggagctgaccaaggccagtgcactgggcgggaccatccgtcactcctgagcccactaactggggaggggacaggcagagcggggctgggtgattcctgagcaagcatgctgctgtctctctggctctggggcctctgccctctgcctcgatggccccccacagccgtcctggaccgccttctccacctttgggctcctgctccaatgtccgcttatcaccgagggccatcggaggtggcacgccccgtgactgcctccccctccctgtaccctgcactgcacgtgtcataattcaagttctcggctcagccacccattctcggctcagccactaatgtgtgctggaaggtgtccaggaagccctgctaagcatctgtcagtgtctccagcacagcaggaggctgttacaggtggcgcctgattcacatctgcaggacaggtggatggatgggcagacagatgggcaggggcatgtgtgcaaggacacaggatgtcagggctgacacctgggttgggctctggggtgctggcagcagggttcggagaggggagagaagcgtgtgtgagctgtgccttccccctcgtcttcccgggcactcggcattctgggtgggagggcctggaccagcccgtttccaggtggttaaataaagtctgtgcatcctgttggccacctgcctctcataggcagcagcacagggcctgatggggatacagcctggataccccactggggcctcccgcagacactcagggtccaggctgcccctcgccacaacctggaagggaggggctggtggg

SEQ ID NO: 57 - DNA, 1081 bp, Homo sapiens
tggattgattgatattgaatggatgggtgggtggatggatggttggatggggtgggtggatggatggggttcgtggatggatggggttggtggatggatgcatggatggatattgaatggatgggtaggtggatggatgggtagataataaatgggggagtggatggatggatggatagatgggtgggtggatggatggggttggtggatggatggatggatggatggatgaatagataaatgggttcgatggatggatggatggacggatggatggatggatggggtgggttggtggatggatgaatgagtggacagatatacaaatggcaacaactatagagcagggcatccccctgcctacgtggagccaggaccagacatggagctgggggctgccaccttagtggattggggctgcgtgctgatgctagcccctctccctgctcccccatgtgcaggtggggacggaattcaccaccatcctgtacaacttcatgtgtaacagcagctgtgtagggggcatgaaccggcggcccatcctcatcatcatcaccctggagatgcgggagtgagtcccgggcacacggggtggaggtgggacagggctgggcaggcacggccgggggagaaggggagctgtcatggagacctgcaggccaaggctagcttggggaagagactttggggtgtgctgctggaggaaggaaccgccccctggcctgcagggcctgcctgggcacaagctgggcctccggagggaggtgggagtccccggcgaggtctcagggcagcctcacagctttgagcctctgactccctctagcgggaacactcgctgccggcactgggtgctctgtggtgaccgagggctctcaaggccggtcctgcagggtccgaggtgggtggggaaggtgggcaggttgagggtgggcagggttgagctcacaattctggctgtgcccacccgacagtgggcaggtgctgggccgccggtcctttgagggccgcatctgcgcctgtcctggccgcgaccgaaaagctgatgaggaccactaccgggagcagcaggccctgaacg

SEQ ID NO: 58 - DNA, 1029 bp, Homo sapiens
aatcatgtatctaatacgggacttgcatcagaatatataaagaatccttataacttaatagtaaaaagataacccaattaaacatgggcaaaggttctgaaaagaaagaaatgtctccaaggaagatattcaagtggtcgtaagcacaggaaaaggtgcttgagatcatcagtcgtcagggaactgcaaatcaaaaccacagtgagatgctacttcacacccactaggataacaaccagtgtgggcgaggatgcagagcggctggaaccctcaggccccattgatgggaagggaaaacggtgcagctgctgtggaaaatagtctggcagtttctcaacaattacacagaatcgccatgtgacccagcagctccactcctaggtatgtacccaagagaaatgaaaacacgtccacaccaaaactcgtccgtgagcgtttacagtagctttattcataatagccaaaaggtagaaaccacctaagtctccaatgatgaacacttggatcaatagagtgtggcacatccatacaatggaagtactcaccatgaagaggaatgaaacacagcatggccgagccttgaaaccatgccaagtcaagaagcctgcacatacagtagggttccattcataggaaatacccagaacggggatgttagagagatggaaaatagattagtggttgtttagggttgggggtagggtagaggggagggaggttggtagctaaagagtatgaggtttctttttgaggtggtgaaaatgttctgaaattgactgtggatgtggctgcacaactctgggaatataataaaacccattgtattgtacactttatttattttatttattttttttgagatgaagtcttgctctctccccaggctggagtacagtggcgcgatctcggctcactgcaacctctgcctcctgggttcaagcgattctcttgcctcagcctcccgagtagctggggttacaggcatgcaccactgcgcccagctaatttttgtatttttagtagagacag

SEQ ID NO: 59 - DNA, 1049 bp, Homo sapiens
atgcaatcttggctcactgcaacctccgcctctcaggttcaagtggttctccttcctcagcctcccaagtagctgggattacaggcacctaccaccagggccagctaatttttgtatgtttagtagaaacggggtttcaccatgttggccaggctgttctcgaactcctgacctcaggtgatctgcccgcctcggtctcccaaagtgctgggattacaggcatgagccactgcacctgacctgctgaattgtttataatggcaagaaataggaaaccccccaatgtctgttgaacagctatcacgttgaaccacgtgaaactgctgttttctaggccaaaaatggtgagcgatcatttatttcatgattcaacctgatacatttacatagtgcaaaactgtgtcacagtttcaggcttttatgaggaaagcgtttctgtgtagaaactggaagctgttcagggcatcggcagctgaaccctgctccgttggtcagcgttactatcatctcggatcatatggagctcatgtcagccgtgtgggtggcgggtgcacagagacggtctggaaggaaacacgcggatctgaacagcagtaatcctgggggatacgggggttgggctagattacagagggctcattttctacgtcatgtattttatgatacttgaattttttgaaatgggcatttattttataacatgttaaaatgtactttttaaattaagtcattttgtaatatttgaatttttacatttgttgtacaatcaggaaaagcaataaagatttttcaaaaatagacatgtcaagaaagtttgcactcattgaggatgctgaaaataaggataaaaataaggagtctgtgatattttacaaattgacttcatttacaaattgagtcattttacaaattgacttcaattttacaaattgactacattttcttcacagagctaaagcaataccttagaattaacccagtcctgtgtggggaatttctagaagtcccatctatggtacggtgatgtttatctgctctgatcagggaag

SEQ ID NO: 60 - DNA, 1067 bp, Homo sapiens
tcctatttcccttttttttttttggatggagtttcactcttgttgcccaggctggagtgcaatgatgtgatcttggctaaccacaacctccgcctacttggttcaagccattctccagcctcagcctcccgagtagctgggattacaggcatgcgccaccacgcccggctaattttgtatttttagtagagacagggtttctccatgttggtcaggttggtcttgaactcccgacctcaggtgatctgcctgcctcagcttcccaaagtgctgggattacaggcgtgagccactgcacccggccccccttttttttttttttttttgagatggggtcttgccatgttgcccaagctggttttgaaattcccgggctcaagtgatcctcccgcctcatcctcccaaaatgctgggattacaggtgttagccaccgtgccaagcctctttatcttccattaagtagttcatttctgctatcttgttttgcatgtccaacagctctttctgtaccccgtttcttttgatggcatcctgttgtttcagggacacaatatcttacacctctgaggctaatagtttattttttccttttggaattttctccctgaagtgtttcctcccaattgctttttgcttgtgaaggtctttgtttgtttgagacagtctcgctctgccgcccaggctggagtgcaatggcgccatctcagctctcactgcagcctccacctcccaggttcaatcgattctcctgcctcagcctccagagtagctgggattacaggtgtgtgccaccacgccctctaagcttgtgtaggtttctatcttccaggctgaaggtttttctcagatgtcaggtcacccttgagtatctgctcatattaggagtggggcagggctggagccatgaggcagatcggaagctctgagcacaagggtggtacttccttggaggagatcagggtgggtgggctcttgcttttatggaatgccccgaggtcagttttagatccctttccagtccttcctgggaagcctgtctgtggagcatctgtatgcacactgggtt

SEQ ID NO: 61 - DNA, 1070 bp, Homo sapiens
gctattacaatttttatttttacatttaatggagacaaggttttgctctgttgcccaggctggtctcaaactcctgggctcaatcgatccacccaccctggcctcccaaagtgctggaattataggtgtgagccaccatgcccagcccccaggggctattttatgttttttgtttgtttttgtttttgagttggagtcttgctctgtcaccaggctagagtgcagtagcgtgatctcagctcagtgcaacctctgcctcctgggttcaagtgattcctctgcttcagcctcccaaatagctgggattacaggcacatgccaccacacccggctaattttttgtattttagtagagacggggtttcaccatgatggccatgatggtctcaatctcctgaccttgtgatccacccgccttggcctcccaaagtgctgggattacaggtgtgagccaccatgctcagcctatgttgtttttcattttattttatttttttgagacggagtctcactctgttgccaggctggagtgcagtggcatgagatcggctcactgcaacctccgcctcctgggttcaagcgattctcctgtctcagcctcccgagtagctgggattacaggtgcctgccaccacgcctggctaatatttgtatttttagtagagatggggcttcactatcttggccaggctggtcttgaactcctgaccttgtgatccacctgcctcggcctcccaaagtgctgggactacaggcatgagccactgcgcccagcctgttatttttttttttttttttgagacagtctcactgtgtcgcccaggttggagtgcagtggcatgatcttggctcactgcaacttctgtctcccaggtttaagcgattctcctgcctcagcctcctcagtagctgggactacaggtgcgcaccactacgcccagctaattgttttacttttttttttttttttttttgagatggagtctcccctctgtcgcccaggctggagtgtggtggctccgtctaagctcactacaacctctgcctcccaggttcaagcgattctcctg

SEQ ID NO: 62 - DNA, 1622 bp, Homo sapiens
tcgagtggcagttggaagtgttctcgtcagtagagttaatgggtttcatggaagcccagctgatggcgaggaatgatgggaatttctcttccctccttgagagtatctttccttccagatgacgattcctgggacctcgtgacctgcttctgcatgaagccatttgccggccgccccatgatcgagtgtaatgagtgccacacctggattcacctgtcctgtgcgaaaatccggaaatccaatgttccagaagtgtttgtctgccaaaagtgccgggactccaagtttgacatccgccgttccaaccgctcgcggacgggctcccggaagctgttcctggactgactgctggctggcgaggaggctgcgagcgtggaatcggaagcgaccgcgggcttttttgcccttctcttagttgagcacagaaccctcagctctggtgcgggcagatccctgccatttaggtgcctaagcaaaaggacaggctgtccaaggtagaaactgtacatagccggtgaccgaatgcgacctttgccagccagagctgctgccagagctgcgttccctgcagtggaggtggactggacacccacgtgcagcgggtttggctcatttgaaaatgagggtccgtggtagctgtgcgttttgctatcattgctaagagattcccgctgattgggctcagtgccagctgttattctgcttccactgtgttggggagaggtgttcggtttccccagcctgttaatgaacagccatacgtgtaagctttttcttgagtgttaagtcttttaccaaaagtgtctgtacagcagccatccaagttgcccctacttagtggcttgccctctgcctgcctcagctgctgcctgaccggctgggggaggcactggcgggaggcctcgggctcccctggaagggcgctgggctggcgggtcagctggtggttcttaggtttccttctgtttgttaaaagggacaatgtggccacttctctgtggaaagggagttggttggggggttgagatggcccgtgttcataactcagtttcctgttttgcacgatgtaaaaaccctgtctttttgcacgatacagccaaaagtattggctgatttcttgctgagtgccctcttagttggtgtgtgaggtcttggtgggctcaggccagctgtttgcgagtgtgggaactcataggttctgtctttgtctcttcctttcacctcattctggtagcagcataaaggttaggcaatcactgggacccgcatggtgttcctccaaagaatagggtaaaggagagctgggagggagccctctccgttgggtgactcttgtgtgccctttagacaggctggcctgccggttccacagggtacagttaggacttgagtctttctttttctgttttgagttggtgagtgagtgatagggtaacatgggccttcaggatgaccccttggaactgtgccgagttccttaaatctcagctgggatcctggacctgggaggcccctgtgagggccagctctggaaaaacctgggagttgatgccggaggctgtggaagaactctgctcgagggcagggtgccctggaacactggtagttctggggctgggagg

SEQ ID NO: 63 - DNA, 1062 bp, Homo sapiens
agccctggagttcgagaccagcctgggcaacatagtgagaccttgtctctactaaaaatagaaaaaattagccagatgtgttggtgtgcgcctgtgatcccaggtacctgggaggctgaggttggaggattacttgagcccttgaggtcaaggctgcagtgagctacgatcacgccactgcactccagtctggatgacagagtgagatcctgtctcaaaacaaacaaaatgtaaaaaaatttaaatttattaaaaaagatgtacaacaccaaaatgttcatagttattctgtatgacagatctgaggtctttgttcagacatagatgagggttcatagttttggaaaatagacttaaataatatatgattacagatgaaaaatatttgctaacctcagactttttatgtttaaggtagtatttatattcatttagttgtactttctggagttgattaatataactgttattaaaatctatcgattcccagtaattcagtaaatgaagactcttcctatttagaaactcgtgtggattggggagttgctgtgggcccactgtcattgatcatatcacatcttcacttgaacctgctccctgggcctcctataggcctcgcgtttggagaggccgtgaacataatttatttttggaagtttctttcatttttaaagatactgagaggcaagttgaagttcctggtgttcgtgtaaacattccctgccttatcctttccatctcagccattatgaaatgttctggctgaatcatttgctttcacaaagctttgatgaaagtttcttcctcatttggttttcttgatagaggctgttgtgctaaaaagaaagctataacaagttagaagggtggagagtgggcacttaacatttttgaagtacttgtctttcttcctaggggtcctccagaaattgatcatagataacttgaccaaattcaaggcccagagatttcttccaggcattctgggagggaaggaacatcaggctttctgtactgaatctaattattctaaatatttcccactgcagcttgtatgagtgt

SEQ ID NO: 64 - DNA, 1172 bp, Homo sapiens
gtgatcatctcactctggtcgactatgaaagaaggttggttagatccagcagcctgctgatcatttagagggtcttagagtgagaggagattgtgtgagaagctggttatcatagcagggggtcctggcacctcaaactctgtccccatcaaacagtgtaaaagaaaagatattgactcctaaaggagtgtcttatgttcagatgctatagagttttgcagagaaagtgttcagtgtagctacagatagaaggccaagtgtccttggtcagccagcctgggtgtgtgtggagtaagttagtggtaggtgtagtaactgtctcaaagctttttctttgtctctctctctctcttttttttttttgagacaaggtcttattctgtcgcccaggctggagtgcagtagcacaatttcagctcactgaagcctcgacagcctgggctcaagtgatcctcccacctcagccccccaagctgaggacttagctggaaaacacaggcatatgccacaacgcccggctgatttttatgtttttagtagagacaggggtttcattatgttgcctaggctggtcttgaactcttggccagctcaagcaatccacctgcctcagtctctcaaagggctgggattacaggcgtgagccaccgtgcccggccccagaactttttctttgaatagtggagaagcagaacaccttggaatgctatggtctgtgcggtctttgccctgtgggtgttctcaggtggaatcaggcagtttgggtgatgtcagtatcatttgaggtcttccacagttcagctatttgggtgggcttccccacttttccccttgttttgggtcggtaaacataaaaggatggagatgtgtatccttagtaagaatgggagacgttgccttcagaatgggtagaaagcagaaaacaagcggggaagaaaacagaaaacagcctctctttaagtgtatgtggctgcctgtgtgcacagtccttcaccttttccttagtatatccctcctgcctctgatctcttgttgttcttgatttttcatggtagaaggaggaaacaaaattatagaagacaggtggaatactgtgaaagaatagtagtttggagataactatgtaaagggctactagcctgcgcaccgttgaattctctgaatttacagct

SEQ ID NO: 65 - DNA, 1023 bp, Homo sapiens
tttgccacaggtcaacttctgaaggtggtaggccttcacgccacagcggtggcacaatgtgtgtgtcctattgcaacactttccaaacggtcatctcacttctgtggctgagaccagagagacctttttaatttttttttttgagacagagtcgtgctctgttgtcctggctggagtgtagtggcgcaatcataacttaccgcagcctcgaccttccgggctcaagctatcctcccacctcagccttctgagtagctgggtctataggcgtgtgccacgcccagctaatttatacattgtttttggagatggaatctcgctcgccatgttgcccaggctggtcttgaactcctgggctcaagcagtcttcctgcctcagcctcccaaagtgctgggattatgggtgggagctcccgcccacactcggccaattcagtagtttttaatacatctacaaagttgtgtagccatcgccactacctaagttcagaacatttttcatcaccccgcagccttctggactgagtggagtcagcatgctcaggggttggcagcatctgttcagggggctcgaggttcttctttggtgtcttttcaagtttctatacctgtccagtactgaagctggaattggagattgaccttttgtccaagtcataacttaatatgctatttcctgaaactgcttttaagaaatgttaaggtgcaaatgaggatccagtttgggcccacatttttctaagttggatgaagagcagttgagtggagtttctagttgcactcgagactctgtactgtgcagacagtttattggtggagttgcctcaggataaaaatacccagctcttctcagtagtgggtgggagactttgggtgatggtgatttccgtaaaggagaagctgagcctggttggaaggaaaaaggaagaatatacggagaggctggcattctttagctgagtggatttaggcttgagctggagtcagaatcacctgggaggcttgttcaaacacagattgctg

SEQ ID NO: 66 - DNA, 1027 bp, Homo sapiens
ttttccttgaggatagttttattagtatgagagtaacttaaccatcctcattgtgcagttcttccgcctcagtctcccaggtagctgggattacaggcacgcaccaccatgccctgctaattttagtatttttagtagaggcagggtttcaccatgttggccaggctggtctcaaagtcctgatctcaggtgatccacctgcctcagcttcccaaagtgctgggattataggcatgagccactgcgcccggccccaaacttttttataattctctatgacattgacatactcccacaacagcttcagtataatttagatgcccttatacatctgcgtggccaaattaaaaaagacaccatcaggtgtcagcaagaaacagagcagggggagctttcatgtactgctgatgggaatctacattagtttaaccactttgggaaactagaattatctatgagagtggaagatttgcacaccataaagcccagcagttctactccttatgtatattcttgacagactgtatagctgtgaaaactaatgaattgatgaatattcaagaagtgagtaactctcacaaacataatgttgagagaaagaaaccagacactcagaatatatattgtttgattctgtatacaggttcaaaacaaaggcaaaattaatttatggtgttgcaagtcaggagatgtagttacctttggagagtagggaggatatattagcagggcttctggggtgttggtaatgttctttcttgatgacaggtgtgatacacatgcacacatacacacaaatatatttacaatttgtgctgtttcctgtttgtatataatattttaataaaaagttcactgaaatggggctgggcacagtggctcgcgccagtaatcccagcactttgggaggctgaggcaggcagatgctggagcccaggagttcaagaccagcctgggcaacatgacaaaaccattgcattacaaaaaaaaaaaaaaaaaaaatgcaaaaattagcccagcatagagg

SEQ ID NO: 67 - DNA, 1034 bp, Homo sapiens
cagattcagggaagggaatcctgagaaaattctagcctaaccaaattgagttaaaagctgcaatagtgatggttgcacaactctgtgcatatattaaaaaatatactttaagtgagtggactttatgatttgtgaattatatctcaataaagctgttatttacttaaacaaaactgccacatgttgaaaactttaaagaaacaatgttaccatggatgatttaagtgctgcttcttggagatatggaagtttcagtttagtaattgcttcttagcaggttgtatctatgttactctacactgctattctttggaaagctagagcgtagtaactaagatctgtttgttaatgacagacctcaaggtctcctgacaggtctgggaataagttttgaaaataggttaatgggatattgtattagtccgttctcatgctcctagtaaagacatacctgagactggataatttataaaggaaagaggtttaatggactcacaattccacatggctggggaggcctcacaatcatggcagaaggcaaaggagaagcaaaggcatgtcatacatggcagacgagagaatgtgcaggggaactcccgtttataaaaccatcagatctcttgagactcattcactaccatgagaacaatatgggggaaacagtccccatgattcaattatctccacctggccccgcccttgacacatgggaattattacagttcaaggtgagatttgggtggggacacagccaaaccatataagatacattttctcacttttcaccatgtatatttggttttaaaatttgaactaggatttctttacttatacttaaaagtaggttttacagattcattaaaactttcatatcaaatctgttttgataatctgagatattctcatcatctcaaactattggaaaatgcccttatctactctccatttacgtggagccacttttcatttgaatgtttgttatggctctttttattctctttataaggagacaattgcccaaataaagatatgca

SEQ ID NO: 68 - DNA, 1046 bp, Homo sapiens
aagaagtgggattggcacttctagatggatatatgggttgtgtttaactgctttgaatgttagtaagggaaaagtatccacttactattgttcatttcttttttcccagccttaagagccaaaatgattttctgcccacaaacgtcttggttttctttttctagcctgtcttttcatggctaagatatttgcagaaatttctggctagccaccagtccataactttttctcttctttgcagacactgtgtttagtggtatctgaaaaaccctacgaatccaaagttgtttaccctacgaaagttgagattccagttcatttgctaacctgcagtttcttatttcttgtcttggtacttcagttggctcattaaatatttcttaaaattggttgaggagcttaaatatttgttaaaattgtaatgtgtcctgatttagaggaaactaattattatgtacatcttactagatccatctgttgcccattcctcagatacagtgatagaaggagagagaaattctgggccgggcacggtggctcaaacctgtaatctcagcactctgggaggccgaggcaggcagatcacgaggtcaggagatcgagaccatcctggctaacacggtgaaaccccgtctctactaaaaatagaaaaaattagctgggcatggtggcgggtgcctgtagtcccagctactcgggaggctgaggcaggagaatggtgtgaacccaggaggcggagcttgcagtgagctgagatcgcaccactatactccagcctgggtgacagagcaagagcccatctccaaaaataaacaaacaaacaaaaggagatagaaattctgtctccaggcagataagttatagttcatagagtgtgagagaatgggctcataatggaacagttatcctgggtggagttggtgcttcgtgatggtacagatgctttccagggatatgctcaggaaagatactggaaagagattttcctaagtctcatctcaaatgagctttgctttgcttcaactggcctaactcagcaggcccag

SEQ ID NO: 69 - DNA, 1137 bp, Homo sapiens
cagccacccttggttcattttctacacgaggccccacacggccccggagctggagcttctaccgaagggttgccctctgtccccttctcggcttcctctgcagaggggctcagagccagtccagtcagacctgcgaggcctgggctgtggctgctgtggctttgccagcatctattgtctaagagggctggggaagctcactgtttgaaacacacacacacaacagaacataaatcagaggcagaatcttttaacatttacagttttaagtgaaattcctgttgagagtctcttaagctagatttatatctgattttgcattgaactgtgtcgttatgtggggctgagaaactcttacgaaattaagcataatgcgaaaacatgctgaaaagacagttctgtagaaatgtgaaacattattatgttatagaatattggagtgaagaaatacgcataaaggcacaattaccatggacattttccttttaatgatccttgtacaatccttggcagaaaggtttgctgacgtctcctcgtagataaaggaaaattgagacgatattgatattctacatccgttttgaattccaaagaatatcaggagagcgaaccagtctgtcttcatattcaaaacagcaaggcctagactatctcgataccttgggaggatctgtcattagtgtttggggatttgactgaagcctccacactatggacagaccaagtggtggcaataatgtgtgcaggggttaacgtctgaatgctctgatctggaagcttctagaagctcctagaatgggttgaggttgttggatgcttgtccctggagagtttttagggtttaaagcatctgtctagaatgtcttgagagtgtccttggggatagggtgatagaggtgcttgcttgtgctaaggtttgttccaggataccctgttcagctttgttttccacaggagaattcccctcctccagcctctgacttctgctgccctggcttagggctaaggggatattgatcatggcccctgggattttatctttcctttcagtctccagaatgactcccaaagcagatgctgcttctcttgcctcctcgtcccccttccctgggctgccctggcaccatagcctgggta

SEQ ID NO: 70 - DNA, 1084 bp, Homo sapiens
ccgaaaacatacagaagaatgcttgttattggcaagaaatcctgttgttattaagttactctgcgatctctcttctgggctaattggtgggtagagtgggcaggatgaggaagagggcttaggagaggcctcttgatgccagactagacaagactgaatttctacctttggagaatcagggcatctgatataacaatacaacagtaacaaaggattcagctgctgttaatgggagacttccttgcagactttctcacctggggtttcataagagaattaagccgtacagaaaatgatgtgcgtggccttttctcagtccttctgaggatggtgcatagctagtaccattctgatgcacagcagagaagttagtttgtcaccatggatacctgtgggccaagttagggctgaactcccccaaggaaccctcatgagaacctttcgaccaactgtcacatttaatccttacaaccaccccgagataggtataattattatcaccattctacagatgaggaaaccgaggctgagtaactggctcaagatcacacagatggcaaatggaggaatgaggaccagaactcagatctgtctaacttggtgttagttatctgttcctctgtaacaaattaccccacactgagtggcataacacaacacatgatccttatctcacagtttctgagggtcaggaacccaggcctggcttagctgtgttctctgcttcaatgtccctcatgaagctgcagtcaaagtgtcagttgaggctacggtctcataggaaggcttggctaaggcaggactggtgtccaagctcacataggcctggcagggttcaattcctcacaggttgttggacaggggcctcagttccgtgctggctgtgggtggagaccacctttagttcctggacatgtgggcccttcaaggtggctgcttgcttcatcagagccagcaggggagagagagcctgctagcaagatggacgttcctgctggccgtatgtgaacaaatcacagaagtactatcccattgcctttgccgttctgttggtgagaagcaaagctcacattctgcccacatt

SEQ ID NO: 71 - DNA, 1026 bp, Homo sapiens
tgaggcctcattcaatacatcaaagtcccgctcacatgccaaagcccctcccacacattgacctgcctctcttcctgagaagtccctcctgaggaaaaggcttgaacacttaaaagaacaaggaggtccgttctcttttctgtatagcttttgttcctctctctgtgctcagggctgccagaactggtgcagagtgtagggccataggaaatatccctcactatttctccccaccatgctctatctctgccactatttttaaaatgctcttttaaagggtttgtcaacagttatcccccgtttgtctctgccctgatttatatttctagtgactattaattgcctaccaaatgaaggctcagcatttgtaattaggctggcaaattctacctgacatcttcggctctgtgttggggcaggaagggagcatgtgttaatggtgttgaactaagccacacccctcccccagcccgctgattaaccccaggttcactaatcaatgaagtctaactgattctctttgcatttacatcctgccttgactcttagccaagggctgagggctttggttccaaaatgctttctatgcccagagaggatgcctctctgccttgttcctgcagaaggaactctcaccctgaatgggtagggtgggggttccgtaaagagctagagggagaagggcacttgcggagtagccaagctgcagagagctccctgtagctgttctggagaatgaagccctcctcagcctcctttataaaaagtctgccataattcagctgaacacaacatggtaccaagaagccacaacctcagggatttccttggttttctgttctgttaatcttttcaaaacacgattggattggaagcatccattctcagccacagcaggttgcttggcagtggccgtggaggagctgtccaggatgctggctgtgtgaaccagggaacagcccaggattcatgtatacttattggcacaattggtgccctaagtgaggaacaccagtaccaacatcc

SEQ ID NO: 72 - DNA, 1030 bp, Homo sapiens
atcagacttttttgtagaaactggcaagctatttttaaaatttacatatagcataagaatgaccaagaatagctaaaaggatttataaaaatcaaagtaaagttaaaagaattgccctacttaatttcaatacttaatctaaagctacagtaatcaagatgatgtgatactggtatcactgagttgatattccaaagaggtagatttcagggttcagtttctgaactttctgaggagccaaactagagaactaaattaatctttccaagcaatggtgtgtgtgtgtgtgtgtgtgtgtgtgtgtgtgtgtaagagagagagactcattctcattctcattctcatttttgaattaacttacagataaactgagtttcccaagaaggccctccatggcagactatatatcatctcctctctatctcccccttctcagaataaaagcagttttttcttctttatggtttgaaaatgaatttatatttattgtagaagacttcagatagtagataaagacaaggaagacattgatataatggcctatgatgtccatctttctgaatgcttttcacatacacacacatacacacactttttttttttactaaaataaggggttatatcatatatgctattttgtatttttttacttgactccatgttaagtgatttacatatttttaaatgactctgtgtgatatcatatacttaacctgttcactgacattagacattgagactattactactatttgccattagaaatcacaccgtgagaaagatccttgtatctttatttatagtaagccctcaacaaatatttatttgaggagttactaggtaccaggcttttcatacctgaacaattgttttctggagaatattcctagaaatgaaatagtagtgctgggttaaacgatataactgcctaaaaattagctccatatggctacatcatccttcagaaaggctgtgttaatttacaactgctctagggatgtttgagaagtcctgctgattaacaaacatg

SEQ ID NO: 73 - DNA, 1049 bp, Homo sapiens
atttgaggaagtgctagaatgcttcccaagctccctgcttatagggtaagaccctcctgtcccaagtatgacatccctggggttagtaaaagtctatgaccttaagaagaggtttctgcagaagcagcttggctctggctgtgcactgctgagtgtaatggtggcaggatgctaagggtgggcccagggtgccacgtggatgtcagaaagagcaaccaagggcaagcccttcttggagaggcagcattataattgccatgtggcaccggtttgcagtcactgttcaggtaattgctttgtaattgactgcatcaccttcttcctgtttaataaatagcacaaatgaaaccaacccgccagtggtgggattgtaattcaaattccattgactatagttgcgcatttttcatttagcatgtaaaggcagtttctatgtaaattatttcaaaaggttctccatggactaatgacattagcgtctggaaggataggaattgtcatagtaattgataggacaatggcgtggtgcatcatggagaaagaaattggcgctgtaacttgtacactttttaaaaataaagccaaattaggagagaactgctgaaaaacaaaaacacatatttcataaacaagaatccaaaatgtgacacatttgttttgacttaaagagccaaattatttacaaacacagaattaattattccattgatgaactttctgcagaaaaattatgagcactggcaaatatggacatattctctttttattcacccaaccagccactttacctaaacaaagggtacctctatgtctagttcccctactggcagcagaaattatattaaagacattcgttcagtttgaaaaacacagacttgtaactttttttctttataactggcagaatattaattctgcaaaccaattcaagaatctctttgaaatgtggccttttgggtttcaaggttgtaggtatatatttaataaattgagttgctttacagttaatatgtcaaaggcctggtctgccacatggagaaaataaaagt

SEQ ID NO: 74 - DNA, 1049 bp, Homo sapiens
actatcccagcacccatcccctgcctcccacctgtgtcccccacactgagcacccctcattggcaggaacagtggatgccggattctctctgtgtcctagagccccaggagggtccccaggagcaggagccacagagagatgttgttttgcagagagtcctcctgcccctatacccgccaggtcccctgagaccctctatgtccctgaacccctgggtgcacagtcacatagttgcaggtttggatgagacctggtgttaccttttattttgttaatcttaccctctcttattccagaaagaactcaaggtggaaaagtgtagcctctccgtttctgcgatatcactgctagaagccagccgtgtggcctttgaaaagctcctgtgaggagccacttgtttagcctgttcctttaccgggaagttccaactgttagaaaatttcatttttttttcttttcactgagtcacaatctgtctgccaggacttctaacttcatattgaactgttagtacagaatggtcaggtatttttaataaaaggaagtcatatggtgtgtgtgtgtgtgtatgtgtgtgtatgagcatctgggtacctgtgtatatgcacaacacatatgcaccatgctttgtacaaaagagagcacttcttggatttgggtctctgtccctccacattctgccaggatccttttaactcccgtaggggatgagaagggagttgctgctgtttaaagatcaaatctgctttgtagcctgtgttccttacacgtggcccaagcttccagggcttcccggtagggcacttctctgccccagcagctgcccatgggtcctctaggcccatcacgggtggggcgcattcctgctttggcactctgaggtccctcctgagcattttggtggtggcagacctcagcgtcgtaggaaacctaggaattgtggggactaggcagcgtgacccccaggacttgacagagacagggccatctgccaaagtgagcattttctcagggagagcatccatggcctcacgcttttcccaggcac

SEQ ID NO: 75 - DNA, 1035 bp, Homo sapiens
ggagtccagacccagcctggggaagtcctgggctgagcgtgcacctctcttctttactgttgcacccctgccccacccgggctctgacctctccctgaagcttctacgccagtagtgtggcttgggctcacagtgtcaagaacagccaggtcttcctgggttgaggctgccaggcttagccgtcctcctatcctaaatccctccccaacctcccttaatctccagccaccgccagagcccatccttgcccttcagaagctgctctccttcgtgcaatatgggtgaggccattgcaggtcctttaggggacagcacagacctgcttgatgccaataagcacaaatctaggtaagactgaaaatgttggtgagatttttgtgagtatccttgctgtatgtgtttagttttttgtttgttgtttagttaaactagcatgcagtttctttttcaaaagctcaaaagtatccacatcctaccccaccgtctagtcgagctgcacgtctttcctgggctgggtctgttgcaggctgatcactgagcagctgcggacgtagtgggcccgtgattgggcatctcgcgttattacgtagccttgcccgtgaacacgtctctgtgtttctcaatcaacttcatcaccgtcagtgttaataattacaatcgccacagtgatggagccccgtgccagcgctgccatgagtgctttgtgtgtaggagctaatttgatacccacagcagccttggagccccatgtgctcttattaccctgtcgcacagaagtgatgcacagagagatgagacacgtggcttccggttgcagagctagtcggcaataggaccaggatctgaacccaaaacagccatctagagccgcccgcatagccaccatcctacaatgcttctccctttcaatggctgcaccctggtggagcaaaggggccaggccccattgaagtggccctgggccaaccaggtagtgcttccacagtgcctttactcagagctctgtcaccaacctggtgtcaccgtagaagctcc

SEQ ID NO: 76 - DNA, 1026 bp, Homo sapiens
tttggcccaggtcatatggctaaggggcgcttggtgtcccgcacttctggagatacaattaacatatggtaaaaattccgactttctgtggccattctgagagctttggcaaatgtatgtggtttccatcagcttggtccagtgatcaccaccacaatcaatatggagatggtttctatcagctcaaaaactcactgcacctctttgtcagataagctgctcggcgtactccagcctctgggaatgaatggcctgttttcagtccctatagcattgccttttccagaatgtcatataaatgaaatcatacaggatgtggccttttgagtctggcttctttcgccagacataatgatcctgagatttatccatgtagttgcatgtatcagtacttccttcctttttatgggtgagtggtgttccatggtgtggatatacagcaatttgtttaaccattcacctattgaaggatgtctgggctgtttccagttgacattacatgccaaggactctacacatttgcatacaggttttggtgtcatcatacatttttatttctcttgggaaaatatatagaggtaagattgccaggtcgtatagtaaatctgtttaacttaatgagaaactacccaactgtgttccaaagagactactactttgcattcccatcaggaatatataagagttttagttggctgggcactgtggctcatgcctgtaattccaacactttgggaggccaaggtgagaggattgcttgaggccaggagtttgagaccctccaaacctcaacatggtgagacccccatcttttttttttttttttgagtcagttttgctcttgttacccaggctggaacgcaatggtgcaatctcagctcaccgcaacctccacctcccaggttcaagtgattctcctgcctcagcctcaggagtagctgggattacaggcatgtgccaccacacccagctgattttgtatttttagtagagtccgggtttctccatgttggtcaggctggtccc

SEQ ID NO: 77 - DNA, 1003 bp, Homo sapiens
ccaaagctgtcatgttgcagctcggataaggtgaaatgggtccttggccaagttcaacagtctgggcctgcagtggggaagccatccctgtccctaaaaaccgctccactctgacataaagataataatgtgtgggtttgtcatggtggcgctcatcctcccagaacgctgtcttctagccagcagttgaggggacaagaagggagtgtccctgcatagggagggagggaggcaggatggacttggcttcacttccaggggggctcggggaatccaatctgtgcccttagacctgagagcactgcttatttacttttgggagaacttgaatgtatctgagaattggaccaaagctgagaacctagtccccataaacaaagtgtacaccggctcactattctcacgtttgtaaggtctcaaagagcccacagaccccaggccaagaggccttgatccaggactgtggggaagacttcctgctctgagaagaggctcagagaaggtgcactgcccaaagctcagggaagacagagcgaggcttgcaggtggcccttccatggtgccctgaggagaggccgcacagttccctgggggccagcggggctcttggcattatggtctgggtgctcaggtggcacctagaccctgggaaagaggccctggcagtcccctagcccatgtcagtcatcctctgtgaatggcgatgggggcaggaaggacagtcctctaggagtttgtctggggtggacgctgcaaggccagggtccttcagagcagcctccatggcagataaagggagagtgtgaatgaggctgccaggtgggaagctatgggtcggggtgtctaaagagccaggcacttcttgctgtcagaggagagtcagagggggcaggagcaatcccccctccaccatactgccccttctctatgactcaaagacgtcaggcatggctgctacccaccgagagcccttctgggactggcagggtccatccacctcact

SEQ ID NO: 78 - DNA, 1050 bp, Homo sapiens
ttcaggatttcatgttcttcatttctccaccccaagacaagaggaatgctagggaactgtcctgcaaaacccacacagaaaagaggaagggactgaggtggtcacacccacaagagaccacagaaggccagcagaatgtcacagacctgttttccactccccacaggccagaagaaggggctcactgggaagaaatgttgcatatttttagacaaatggaaggaagccctgtctgccagcaaagggagtcacacaggagaccctgagagggctcttgtttgtaaaatgggcatagctctattgttatttctcattatgaaaataatccatgcccatgtttaaaaatctaatcattaaaaaaaggtagaatggtaataaaaatcgtgtgaaatcccaccttccaaagatagtaactcttcagattttagtgtctgaacttctgagctctttctgggcagatattagccactgctatcttgtaatctactttttttgctgacatgagcatcttttcaagctgatggacatagatctgcataatcctttctcgtggccacgttatattccattctccaaatactccatcacttatctagccagtccgtgagcgtgggatgtttggattattcctaattactcatcattaataaccaggatccttctaattatccttttcatgttggtctggttatacccttgggataaatccctagagatgggattgctgggtcacaggggaacctcacaggagagttccacttctacctgcaaccttggccaaggactttaatttccctaaagctgttccccaacctgtgaaatgggtacacgaatcctgttctgataatggcaaggattgcaggacctggcacagaacctggcatttagtaggttctactaaatgttagctccttttctgagtagttgctgctaactctcctttcacaaagtgctttggtatatatcatctctttaatgttatgattccaaaggaaggaaaaagtaaaacagatatgaagtctcaagaagggttggggaaattcctgggtg

SEQ ID NO: 79 - DNA, 1033 bp, Homo sapiens
tatcaatggtattgtgtttgtgattgtggtggccacatatttatgatgaacatatagaaatgcaatcaatttttctgtgttgatcttgtatcctccagctttactggattcactaattagttctagattttttttgtagatttcttggaattttctatttaggcaatcatgtcatctgtacagacagttgtatttcttcctgtcccatcagtgtggcttttacgtctttctcctgctttactgcctcagaacttcctgtactgtgttgggtgagggcggtgcaagcagacatccttgccccattcctcatctgtggaagagcactcagtcttccaccattaaattgatgtgagccagagggattttgtagatgctttttatcaagctgagataatttcctgctattcctgacttgctgagagcagttccctcatttgttaaactttgctgcccctgaaatcagaaactttgggacccaccagtttgtaccatacccaggactgcttttcattcacatcctgcccctcacaggatcctggagggcccggtgggtaaggggtccacagcctcccgctcaggtttttgactcgcaatcctgtcctctaccccaccgatccctctccccttggctgagccttctgtcctgtgccatgttcccggcccctcaggaaaaggaaccctgacaaaccagtgtggaccattcacacattcacatatccactcattcattcattcattcagcaaggcctgcaccctgtggtacagaaatcaagggctgcagacctgcccttgagaaatgcagtctaacacccaaactccacccgcccccgcgtcggcccccgtcgcgctgcatgagacttgcatcccctctccagggggctggccagggctggctgaggctccaggagttgctctgctctaccattttccttttccaggaaatgtgtatcccagacagcccccagcacccactcttctccgggccgccctgcagcagggtgggagcagtgtggtggtcctcaggcccccatct

SEQ ID NO: 80 - DNA, 1034 bp, Homo sapiens
taagatggcacttgttgggcagcaatgtgtgacactccctctagaggctcagatcaattctcgtgcttttatcttttcttgaggctcagcatgatgaaaagtggcctatatctacagctgataaataaccagaaacttgctgtatctgttttcattttattttcttgaacaattaccgccagcatgccttacattcagaggctgagattttaagtggccaaaagaacttcccaactgagcctgccagggactcgtttgaaatgttctttgctgcatcgaaaagcaccagacatgatctgtgaaagagctgggaggaaaatgttgcatgttcacagcacaagcgtgtcctcctctccaggggatgggaacatggaggatggttcccacctccaacctcaaaccctaggagaggcctgtcccactgatgagagaggacagcgccagcccaggagccatccaaaggatcatcagggtgaggaggggtttggagcccctgggatggctggggaggaaatggggagtgtggagctgcaggatccttagatgctgtctacattcctctagttgagcactcaagtcattgtgtgaccctagtcacatgtctgcctcagcaccaggagagttagctccttgaagccaggaactgcttcttttaatactcagagtggtatcagcatttaacaacaggtgctcaatacatgttaaatagaagggaggacggatgcatggatggttggatgggtggatggatggaggagtaggtgggtagatggaaggatggatggatggatggatggatggatggatggatggttagatgggtggttggatggaatgatgagtggatggatggatgggtaggtggatggatggaagataggtggatgggcagctggatggatgggtgaatgggtgggtagctggatggatggatggatggatgggtgtgtggatggttggatggaatggtaggtgggtggatggatggatgggtcaatggatagatggaagataggtggatgggtagatggatg

SEQ ID NO: 81 - DNA, 1025 bp, Homo sapiens
ctggatgggcgttggtattcaggatgtcgagccccactggtctgggggaccagttggcgcttcctgcaaaggcatgtgctctgggaagggcctggcctgctgcagcagctctgcagaggggccggccccagacttgcctatgtcattagtatagcaggtcccgttattacccgaggaggcttacaggttatcagcgagctccaggagccactggagaaaggaagaagataaagaaggatttaaaaagaaaataacaaaaagaaaaactgtattttctaatccaaaccttgccctgcagtggctttgttaacccccagtcactccttcaagacataaactgttgagagccacaattacttcagtgattacacgttatcttgtcctaccaaggtattaaagaggaactggggaacacattaaaaaaacatacagcccaatttaatcatgattccctctaaaacaattgctggaatctcaccattacagatgccagagcataaaaatcctgtagatgcttgatggaccgggcacaattcatcctctgctgcctccacggccagcccatttgtcagtcaagggagagctttggggtttaggtctttaacaggattgagtgcaggggctccccaggtgctcctccagagcagaggaagggtggccccatcccaacctcccagatttccctgcttggatcacctgccctgccatcactaccaccaggaagacactaaacagaaagcccaccaaacatctcgggaccctactcatagtcaaggttgtgaagaagtttgctggccgggaagcagccttgttctgaatgccacttgtggtgaacagcaaccagctctgcttttctgcaaattctctctgcaaagcgagggaggtgtaatcatttgcttcagaaggttctgaacatcaggaagaggcaaagctgagagacagcagagggtgggggtcgggtgcagctccctgtcctcactctctacctgtctgctgcgtgacgttcaactcagagtctctcttgc

SEQ ID NO: 82 - DNA, 1049 bp, Homo sapiens
ccttaagccctgggagctccttttccccttggggagaagcgggtgaccatgcctgtgttgggggcatcccgcaagctgtgagggggcaacgcgtgttgggcgtgaaggagggagagggcagtggctgtggtgcgaggtcagggatgttgggctggagggaatttgacctcatgcccgtggttcccagttacacacatatcagcttatgtgtaggtcagagtttctcaaccaggggtgatcttgccccctaggggacactgggcaatgtctgaagacttctccaggggtcacagccggagggggaggggcctaatgacatctagtgggtagaggccagcgagtctgctaatatcccacatgcgccggacagcccccaccacagaaccatctggctgcaaccgtcagcagtgtgaggtcaagagagccgggtgtctggggcctcagtctctgcctgcacctgcggggttgggggcggccctgaccctggtgggctccatgccaccctcatgctgccagtctctgctctccccacagaaccccgacatcgtcctggtgcactacctgaacgtgccggccatcgaggactgcggcaagccttgcggccccatcctctgctccatcaacaccgacaagaaggagtgggcgaaatggacgaaagaagagctcatcgggcagctgaaacccatgtgtgagtggccttggccggcctggcgcccccacgctgggaaccaggctggcatcaaccaggcggggccaggaaggtcctctgtggccttggggatgcgggtccggagccccatcttgctggaatgacagtggcaccgtgagcttagcttttgccccaccttcacttggccccttgtaagctccctatacaacagccagggcacaaaatgccaggcccacgtgacagatgaaaagagtgaggtttggagacacagagcatgtagaggaagaagcaggccaagagtgggccaggaccgggtctccggggccacagacaggagtggaggccggctggggagggaaagtatggaacaggggagggg

SEQ ID NO: 83 - DNA, 1046 bp, Homo sapiens
gctggagtgcagcagcatgattgaagctcactgtggcctccaccttctgggctcacgtgatccccccatctcagcctccagagtagctgggactacaggctcatgccaccgtgcccagctaatttttttatgttttgttgagatagggtcttactatgtggcccaggctggtctccaactcctgagttcaagtgatcctcctgcctcagcctcaaagtgctgggattacaggcatgagacactgtgcccagctaatattcttaagtcattttatccattaggacctattttattagcccctaataataaagataaaatattggacagatattttatccagaatccagctatttattttaaaatatgtacatttcattctactaagttgggaaggacttatttacctatatgttttccagattttgtagcactatgaaaaacattataattaataaacttgtgagttctggaacagaagtctctcatgtagaatccagtattcagaaaaatacatatttttggaacgtcttgggctttaactctcacaagttagcaagacagttagcaccgtctgtgcagatggtccccctagagttagttctgagagccaagccttgccaatagcagtcctaaataatgtatggagaatgagcttggcacaactaatgaggatccagcaatcccaccactgcgtctgtagccaaaggaaatgaaattaggatgtcagagagagatctgcactcctgtgtttattgcaacactgttcacaataaccaggatacggtagcaccctgagtgtccatctgtggatgaatgtgtaaggaaaatgtggtctgtgtctacagtggagtactattcagccataaaacagaatgaaatcctgccattgccaacatcagagctgaatatggacagcattctgtgaagtgaagtaagccaggcacagaaagacaaatgccacatgatctcactcctaggcagagtcttaaaaagttgatctcatggcagtggacaatagaatagtcattaccagaggctgggaatgg

SEQ ID NO: 84 - DNA, 1028 bp, Homo sapiens
agaatcacatcttctttcatgacactgtggttaatactttccagatagattttgttttcaagaaaattaccttaacaccactcttctttaggccacttcagacaaaccagaatgtctgcaagttaagtcgtgctagactttttcctcctttcttctagtctgatcctcaaactttgaatgaatgtgtgggtaacgtgggagcaaaattgcataaagtcctacactcatctcccttttgtttttgccaaagctgtgtcccgtgtttactttgggagagttaagagaatgagatatttaaacaaaacataaattcatgaaaggttgcccccacaaagtaagctgaacaaaggagtcctttcacttttgtttttagagttctctttctgtaaactggtagaggaaaatttcatgaagatttttgccttaagtataaattttaactgttaataaccttataagatggataacaagaaggttcattatgaagagaacatcagatacgggctctggattcctgtgcattaattggaatgaaataaaaaatgttattggctctttacttgaccatttacagtttagatgttagaaaaataggcaaattttaatagcctctgtaataagatcagtattcacttcccatttctatatattcaattaatatgttcaatcttgaagaaatcctaaaaatctatcctggaagtttgttttaaactgatattttctttaggatgtgtgtaatcctattttcattctgggttgagttatttaatgttattttaaaagaaactattcatgtctgttgtccttagaagcattaaaatcttattaagatagaaaaccttggccaggtgcggtggctcacgcctgtaatctcagtactttgggaggccgaggcaggcagatcacttgaggtcaggagtttgagaccagcctggccgacatggtgaaaccctgtctctactaaagatacaaaaaattagctgggcgtggtggtacgcacctgtaatcccagctacttgggaggctgg

SEQ ID NO: 85 - DNA, 1050 bp, Homo sapiens
agaaaacaaaaatcccctccaaaaaattacaagttaattgcgaaagaccacatttaaatttttgcccatgaaattcagtttagtcgtttctctgaaacagtgcttcaaaaaagactgtttccccgcattgtgtgaaatgcaggagacccacgtacttgtatttttaaaaaacccatttgcaacatactattaaagttggatttaagagaacatggtagaagaaaatctaagcaatactacaccttttagcaccctcattatgttttcatctcagagcaattaaaactgctatacaaatcaacgttaagataactaaactgctgcttttttcgtattcagttgtctatgaaaaccgtttccctaggaagtacttactctgcttgaaaatgctcctaaactttaaattttggggtatctcagggttgcaatgaaagttttttgaaatctttttttttttttttttttaaggcttgtaaacatataacataaaaatggcttccaaaagagctctggtcatcctggctaaaggagcagaggaaatggagacggtcatccctgtagatgtcatgaggcgagctggggtaagtcccacatcgatttttagccattcctgttttaaatgtttttggatttttaaatcattttgaataaaatattcaaagtgctctatgaaatatttcaaatatacacaaaatttcagagatgacataagaataaatacctgttgatccactgctcacatttaacgcttgttaatgtcttgccatatttccttcagacccatttctcttttgttttgagctctgtcgtccaggctggagtgcgatggcaggatcttggctcatttcggtctctgcctcctgggcccaaaccatcttcccacctcagcctcccaaatagctgagactacagatgcgtgccaccacacctggctaatttttgtatgttttgtagagacagggttttgccatgttgcccaggctgctctccaactcctgagctcaagttgtccacccgcctcaggcctcccaaagtgttaggactacaggc

SEQ ID NO: 86 - DNA, 1116 bp, Homo sapiens
aaatgtttgagaaccgtggcattaggggctgggaagaaccacagaggttgaccaccctggcaggtcttgtacgtgggcttactacaagagtcaccactagccttttgacctgccctgaggctcaggtaattatctctgccaaagggcactgcagtcactgcagcccaagcagctgctcccctctttggagagaaagtcacagatccttgagtttggttttctttggctctgctgctgtgaagcaagcctcagtcctagattctttgaccaaaggaagaaagagtttgggctgagtttgtttccttatgattctgctgaaagtaaaaaccacatgtcagtttgtcctgtgccacaaaagtagcaaaatcacttaaggtcaggagttcgaaaccagcctggccaccatggtgaaaccccatctctactaaaaatacagaaattagccaggcgtggtggcgcgtgcctgtaatcccagctgcttgggaggctgaggcaggagaatcgcttgaacctgggaagtggaggttgcagtgagccaagattgcgccattgcactccagcctgggcaacaagagtgaaactccgtctcaaaaaataaataaaataaaataataaaaataaaaataacaaaaattagcagggcatggtggcgcatgcctgtcgtcctagctacttgggaggctgaggcaggagaatcgcttgaacccgggaggcggagattgcagtgagccgagatcgtgccactgcactccagcctgagcgacagagcaagacttcgtttcaaaaaaaaaaaaaaaaaatcaaccacatttggcttactgttttgtgctgaggctagatggaatgccatgctaagaagcatgggccttatagtactttaaatcaacattaaaaaataaacaggctggctgtggtggctcatagctgtaatcctagcactttgggagactgaggtgggaggatcacttgaacccaggagttcaagaccagcctgggcaacatagtgagacccccccaccgacctctacaaaaaaatattttaaaaaatcagcctggtgtggtggtgcacacttgtagtcccagctactcaggaggctgaggtgggaggatcacttt

SEQ ID NO: 87 - DNA, 1032 bp, Homo sapiens
cttttaaattggcaaacagaaaaataagattcttttttttttttttttttgttgaaatgggagctttgctcttgttgcccaagctggagtgcagtggtgcaatttcggctcactgcaacctccacctcccaggttcaagcgattctcctgcctcaggctcccgagtagctagaattacaggcacctgccaccatgcccagctaatttttgtatttttggtagagacggggtttcaccatgttagccaggctggtctcgaactcctgatctcgtgatccgcccaccttggcctcccaaagtgctaggattacaggcgtgagccaccgcacccagccaagattattctgaagtgttgcagttagggattggaaacattttgaacacaaagaatattagcctagtccttaatattgagtgaatgaggaacgcaaattggaagggagtctatgttgagaagaaaattaaatgatatttactttgagtaggggagggggaggaagtgtggagttggaggagtggacagttgtcagctgagatgcccaggtctaggaatgaggcctctggaagcaaggtcttggccacctggaggagctggggagttggcagaggtggtcattttgcatgttaccacagggtggtgctgttggctgcagaaggggacatggtcagctgcgccctctgcactgtagtgcagagtacagagcgttttcatccatcagaatcccaggtcctgggagagtgaaacgtctcttctccagtattccaaatagggttctgacgccccagaaagcagtgattatgagcttacctgataagtatgaaagacatcagtaaattcctgaatccaactgtaacataaatttattcacatcgtagcagtgattttattaccaccttgaagggagcagcctaaaaattctcgttcaccgatcactttcctcactgtgctatcatctattaaagtttactttaaaatgcaagatgatgtaggaatttcttcttaaattcttaccaaataaaaattaaaaacaa

SEQ ID NO: 88 - DNA, 1035 bp, Homo sapiens
gggttggtagtggggaacctgatttatagcctttgcctatatctgtggtgtaaatattctgacgttggccaacttcaaatacactataatagaatatcttcacctcatagatgcagtggatataaataatatcaagagcatagatattagtgaaatgtagtcagatgattaggaagtaatgagttttgagtatttattacctttctttttaatttaatggtttttttttttgagacagagtctcactctgtcacccaggctggagtgcagtggtgcaatctctgctcactgcagcctccgcctcctgggttcaagcaattattctgcctcagcctcccaagtagctgggattacaggcacccgccaccacacccagctaacttttgtatttttagtagaaacgggtttttgccatgttgcccaggctggtctcaatctcctgggctcaagtagtcctcccgtctcagtctcccaaagtgctgggattacaggacaggtgcctaaagatgggatgaggattctctgagatgagagaggaacaaggaccccagagcccgatctggaagcttttgtccccattctggcccttagggcagtgaatgcagatcagaggtcattgatagcaggcttgatttttatctgcattgatgggttcagcataaatggaccagaacaggaagattgcaaaaaacagacaaaaaacaacaaaaacaaaaaccttgggttggctattgtaaaaagactaggcacatcaccttgtgctttagtttcaaatgatctttagtttgaacttttgttttactcccacatgttctttttaaaaaattccaaactcatgggtcatgatttgaagaaaatttcccttcctcctgcctggcgcacagaaggtaacgtcaaaagctgggaaagggaacagggcagcagcagacattgacctttacctcccgctcctctctcccaccccttgtctgctgggcatagaggattagaactgcttcctcctgtggtttaccagaaaacgctctgcggctagag

SEQ ID NO: 89 - DNA, 1049 bp, Homo sapiens
ggctggagtgcagtggtgcgatcatggctcactgcagcctggacctctcgggctcaagcagtcctcagcctcctgagtagctgagactacagacatgtgccaccacgcccagctagtttttaaatattttttgtagagatgggggtctcgctgtgttgcccaggctggtctggaagtcctgggctcaagtgatcctcctgccttggcctcccagagtgccgggattataggcatgagccactgtgcctggcctaattagctgacttaattagatcacgaagttaggcagtggtcttgagcccaggtccttggaccccaatgcttccttcttctgcttgacaaaggaagctgtttagcatcgtgactgagggtccaggctttgtggcttgacagtttccttcacctcccagtttcctcgtctgtagaatgagactcctcacagaacctcctccacaagactgttgtgaggaatgattggaaaggtgcgtttaagtcatctggcacacgccgactacttggttaacataggtattattattggattcaggaacaaccagtttttacaaggggatgggcgcatgaaaccatttgagactgtttcgaaacacctgtgttaggacccaccctacacctactggatcagaatgtctctgtcttgagaaagggagcaggaggcgaggaccgcgtgtttgttctgatgccctcctttgatgagaactgctgctctggtgctcgctgctcagtattccggagtctcactactcaaagtgtgctcttggaccagctgtcagcacttcaggtcctcttccttctgcatcagaatgtccttttaaaaagatccccaggaaattcaaatgctcattaaagtttgagaaacactgtaaaggttaaaaaaacataaaaaaaaaaatacccacacatactacccccacccatttaggaaagagttgttttttagttgttttgcaaccacagagtaagcaatcatgttgtaatacccaatatcttggatttgtttaaaggagtgctggcaacataacagataaggg

SEQ ID NO: 90 - DNA, 1016 bp, Homo sapiens
ttgttttgttggcaggtcttgctgcctcagcagaaaagaggcgcttttgatatgggaacggaaacttgggaccatgttagaaatagtgtgttcggcagagaggaccttggtcctcctccagctgtggaaactccacgcctggcgggaagatggcagcctgtggggctggggagggtccccgcagcacctgggtctgcggtctgagccgcctgtgctgtgatgtggccggccttccctgccaccgaggggcgtgggatgcacccgtcccctgctcgcccctctgcctgcaaaggtaacatgctgctgttttttattttatggaaagtccagcttgcagaggaaatacctttctcaacgcagcctgtctgatgtcgcggagcagctctgcccagcaaggcgagcacatgaaacgcacatttgtagtcctcctgtgtacctggctgcggtgcggggaggcagagtgggaaggggagaagactggtctagctcaaaaggccagtcctgggcttcaatttccaacactgggctgactctgctgggacaagcaactgcctctgttcttgtctcttcctcctcgggccctgattgctggcctggactagcccattcaatggatattgggccaatttcccttttttccacttcccctttcttccccttgtgttctcaaaatgtgataaatggaataggcacaccccagatccaagttgcttttctgagaaacttcccgcagtacttaggtcctggccccccggcctcagaacagagaggcacggtacacacaccactccccaccagggcactgcagacctatgtccaggctgccaccccttcccaagggcatgagggaggcagtgggggagagttcggagatgcaggtagaacctccgccagcagccccttcccctgaagcttgcactcattgttcagatgattgggtgttgcctgcctccccccactagactgagctccctgagggcagcaagttctgcctgttctgtgtatccagtaggtgc

SEQ ID NO: 91 - DNA, 1064 bp, Homo sapiens
gttgtgtgaggaaggtcctttcgggagttcccaacccaccgttttatggctgtttttctctcttgacccttcctgatctttactttaatctgatcttacttgtgggaaaatgttgctaggagttcccaacccagagtgactggtgagctccctgtcacccatgaggaggacggtcctgcagttagagctcctgtacatacatatgcatacacacacacagacacacgccacacacgcagacacaggcagacacgacacacgtgtacctacatgcacacacagcacatatatacacacatgaagacacaccacacacatatacacacatccagacacaccacacacacagatacatacacgcctcacatatctacacacacacacacacccctaccacccgcacaggtacacacacacattctttctcctggttgaaataccctcacggcatttatgcctgtgatgagattacaacctggtcttcaggaagcaccagacattggacccctgcgtgtgacagctgagccttgcagcctgagggctgcggacaggagaactgtcattatttagagtgagtagagtttggtggggcaggaggggtacaggccaggcattggtttgttgtggggcttggctgagacagctgtgcagaggaggaggcaggcgcggtcctggggacgtggtgactaatgcaagagtgtgcttttggggatgaaaactttcactaagggaatggagagcaggcgccgccggccagggcactgcctggactatgacgcctctgtcctgcttgttagtctcagctgctgcctttgctctcactgtgtaggcacacagtgtacacgtgtgtgcatgtgtgtgcatgtaggcatgcgtgcatgcgtgtgtgtggtgggtggcggtggcagcagcagggccacatctgtcctctgctctcccgttccagccctgcagggcagtacgagccacgccctttgcgtctgctcctcctgggtggggatgaaggctgagtcctcccacctcctggaaactcaccaactgctcagcagtcccaggccctgatg

SEQ ID NO: 92 - DNA, 1055 bp, Homo sapiens
agacacagatattttcaaaattcaatgttttcccacctagtatgggcagctgttgccaggtatactcaggtacttgtcctgcaaattaaatctttatcagctaatggttagttttttttttttttctttttttgaagcagcatctctctgtgtagcccaggctggagtgcagtggtgacatctcggctcgctgcaacctccacctcccgggttcaagcaattctcgtgcctcagcctcccgaggagctgtaattacaggcacgtgccaccatgcccggctgttttttgtatttttagtagagaccaggtttcaccatgttggccagactggtctcgaactactgacctcaggtgatctgcccatctcagcctccaaaagtgctgggattacaggcgtgagccaccgagcccaggcaatgccaggtttcaagtaaaactttccaagaatttacagtgtatacagaaaagcacctaatgttttttaaatagcacgatagaggtagcaggtgaaatggcggttaccaaacctccaaagattaggattgcaggatgtctggcagtatcatttgttggcaaaatgtggataagctgtgagcctggaaagcagtttaccatcagtggggtagtgattattatcagaaagagcatacaggccttggttttagtgcccgatatgcatgtatgcatagggagcagaggctgttgttgaagacagttggtttttacaaattttccttgatagtttaaactcagagttaaaaagcacaattctgtgtgcataatttaaaattttatgacttctgatcacataaagttactttttttaaaatcccagtatatattatagtagtaacgttgtagttttactctgctgtcaactggaggtgaggtgcctaagccacaaggggaaaaattaaactagggaggcatgggtgtaaaaggattagaaggttaactgtatcttcatgtaataaatacaaaacttcagttttggaaaggaataatgagagaaggtagaggaatggggaggggagtttttttgtttttggtggttt

SEQ ID NO: 93 - DNA, 1050 bp, Homo sapiens
tttgtaacttttgcaaagttaacttagaacccttgataaataaagcagacctcaaggaagttcttaaaaccagtgtcagccgggcttggtggctcacgcctgtaatcccagcactttgggaggccgaggcgagcggatcacgaggtcaggagatcgagaccatcctggctaacacggtgaaaccctgtctctactaaaaatacaaaaaaaaaaaaattagccaggcgcggtggcgggcacctgtagtcccagctgctcgggaggctgagtcaggtgaatggcgtcaacccgggaggcggagcttgcagtgagccgagatcgcgccactgcactccagcctgcgacagagcaagactcccatctcaaaaaaaaagaaaaaaccagtgtcttcctagtatcaaattaatctgcttccacagcactatagagggtgtgaggtattacagaagagatactgtatgtcagactgataccatggtgttgctttttttggttgtcctagaatgattcacagtgttaggtgagggaggtttggctgggtgtgttggctcatgcttgtaatcccagcattgtgggaggctgaggctggaggatcccttgagcccaggaattgagactagcctgagcaacaagggagacccgtctctacaaaaaaaaaaaaaaaaatttttttaaagagatggagaaggcatactcaccaaatggttatcatataaccaaataagcagatcagtcttaaaagttaaattatttctggatctgaggcttataaattgaggtttaggacagttacaattttcagtaggaatcacattaacacagatatcaacaccaccacctacaggttgaaaagactagaagggattctagaaaattaagagaaatttattttagatccagcaataccaatagatgttacacttaatggggaaactgaagcttctatctgcaggatagaaatataactgcttcctactgtctttttattaggccattgaaatccctatttcaaagtttattatatgataatagacatctttaataagtatg

SEQ ID NO: 94 - DNA, 1105 bp, Homo sapiens
aaaagagccttctaacatgcatcaggtataatcatttgaacagaccacttgttcagactcttttgatgaatctgttcctctcagggtaaattcctaattcagcagtcctgtagttttccaaaaatgtcatgtgcttttattgctctgtctccccacatatgctgtccctcaccagagattcccccttccccttcctggtcatgctgtcacctgttgtggaagcctttggtaattcctcctaattccaagtgtcccatagtaaactcatatcacttctgtttagcaagggataaatgcgtccatcagctgagagcctgtatatgtattcttgtcattctgcctaatgatggtgctcaagaatactttagaactttgggtgagctctgttaatatttgtctctcagcagtgaatatttgttgcttgcactagtcactagggaaacagcagggaattaagacctagcttctaggaacttacagcttcacagataagataattaaagtttggtgggataaggttgctgagggtgccactagaccttcaagagtcacccagtacaggttgggttaagagagagaaggttgggagggccttcagaggcagcagcacccaactcccatcttaagaatagccaggtgggctttgccgtgtctactgtgaaaatgaagaccattcacagcaatcagactgttgtcattccagaaaatgtcaacattaccctgaagagatgcacagttactgtgaatggccccagaggaaccatgcagagggacttcagtcacatcaatgtagaactcagtctaaagaggctctggagtgccacacggtggggtaacagaaaggaactggctaccgttcgaactgttggtagttatgtgcagaacacgatcaagggtgttacactgggcttctgttacaagatgaggtctgcgtatgctcacttccccaccgacattgttatccaggaggatgggtctcttgttgaaatccgaaatttcttggatgaaaaatacacccgcagggttcagatgagaccaggtgttgcttgttcagtatctcaagcctagaaagatgaatttaatccttgaaggaaatgacatcgag

SEQ ID NO: 95 - DNA, 1035 bp, Homo sapiens
aggactatggctcacccgtcagagagctcacattctgatagaaagcactgggattgtttaaatatcctagttcaacattaaaaaaaaaaaaaatttaatcccagcactttgggaggccaaggcgggcagatcacgaggtcaggagatcgagaccatcctggctaacacggtgaaaccccgtctctactaaaaaaatacaaaaaaattggccatgcgtggtggcgggcacccatagtcccagctactcgggaggctgaggcaggagaatggcgtgaacctgggaggcggagcttgcagtgagctgagatggcgccactgcactccagcctgggccacagagtgcgactccatctcaaaaaaaaaaaaaaaaccaggatgttacccccttggttttaaagcaaatttaataagggaacaaaaagatgatactaagaagaaggcaagtaaaacccctagtcttccattagctctttcactggaatttgagtatattgtacatgaaggttggttttcaatttgaacgtctagaaagatactcatttctaatacctatgcactgtagtttcaggtttacttgcagacaccctggtagggttaagaggaggatatttccaagttattttaaattgagtttacttttaactggggttcttgactctagtgtaattgctccaacaactacgtagaagtcaaaatgagtgactttagtgaagcttctgtactttacaatacatgacagtaatgctattccagaagttttgttttgttttgttttgagatggagtctcgctctgtctctcccaggctggagtgcagtggcacaatctcggctcactacagcctccacctcccggtttcaagcaattctcctgtcttagcctcctgagtagctgggactacaggcatgcgccaccacacctggctaattttgtatttttagtagagatggggtttcaccatgttggccaggctggtctcaaactcttgacctcaggtgatctacccgcctcggcctcccaaagtactgggattaca

SEQ ID NO: 96 - DNA, 1030 bp, Homo sapiens
cccagggagtcctgtcacctcaagaggcaggtcccagctggggcccagagacactggctttcctggggtccagcctgggagggagggagaacagaggtgaactcaggccaaggcagggatggggaacctgcgagaaggggaaggcaggggtgacttggcagccaggcagcttttcggcatgcttggtcgcagcaagggatcacactcctgaccctcctggccttgcaggccaaaacgtttgcttcctcagaaacagggagggagagttgcagtgctgcacgtctaagggctgagaaggaggggacttgtcttctgggctatttcagaagctgaaagaaaccttcacctgccacaaagacaggcctggccaggggctctctagcattcaagcggaagggcaagcgccacagtcggggttgtccatctgccccactccaggcagtgtcagcccgcagccaccttcccccatgttcacccaccttcttggagctctgcatctggggagcagaccctgagctcctggcctgcgggtgcgtccctggagcaacagaaccttgttagtgtccccatcacttgtgggccctgccctggattggctctaactcccggtagtccacatggctctacacagtgggcatttgtcctgttgggcagaggggaagcaggttcaaagtggggttgacttgcccccggtcatcccctagtaagtggcaggtcaggatctgattccacgtctgacctgtaagatggaggcagctcatccacccctgcagatgccgagcctgttcccccaaccccacagggcaggtatgacgaggaggtcgaggtgtaccggcatcacctggagcagatgtacaagctgtgccggccgtgccaagcggctgtggagtactacatcaagcaccagaaccgccagctgcgcgccctgttgctcagccaccagttcaagcgccgggaggccgaccagacccacgcacaggtgagaggcggcatccacagggcgggggtgggggtgttgagtttgttcagg

SEQ ID NO: 97 - DNA, 1047 bp, Homo sapiens
gcagcgcctcttggtccccatttctgtatagcaggcgtgtgtgtgtgtgtcgaggttttttattttttgcttaatcaaactccattcccaaatgcactccatctctggctctgagggcgctccctcctctcagccgggcagcctggcctctcctgcccagacctgcggtcccagcatcccccagagccagggaacaggcccagcgggagggggttttatgttttgtttcaaacagaaaacacaaccttatttttctttacaaaagcaaaaaaggaaaccaaaaaagatacagcctttgaatgatgcctgctggctgtctgtattcgtttgcttgggcagctcgggccttccaggtagggcagggtccctgctaagggggctctcatccactttctctttcctcttcaacggggggttctggagtggggggctcgggttggggtggccacagtgtgaccagacagtgtccctggaggggcttagggatttggacaggagactcgctgcctggctgagcctgggccggaaggacaccccagagtttgctgcgcagagaagggtgtccaggcaggaaatgctcagctcagctcttcagaaaagcctgagcccaccagccatccctgaccgtccttgcccctggctgcagggaccacggtcaggttgtgaaaaagacctcgtcttcctcagagagggcttagagctgctgcacggctccatgctgaggcggcggggatggggaatggccagggtgtcacagcacaagctctggggtcacctttctggtgactgggatctgcatttctgttggcttcagtttgacacgggagtaacaggacggccatccggggctgatatggggacccttaagccacagcacaacgcagagggagctctaccaaggtgggctgtcattctggcccagtgcccagcgggcaggaggaccacagccagtgagcagggggaccggctcccaggggccggcaggaccaacctgaaccagaccctgagggcagatgagggtgcagggctgggacggcttcccatcag

SEQ ID NO: 98 - DNA, 1050 bp, Homo sapiens
cacatggaatgagatttacaggctaaatgtggtggctcatgcctgtaatcccagcactttgggaggctgaggcaggaggatcgcttaagcccaggagttcgagaccatcctgggcaacgtagggaaatcctctctctacataaaataaaaaacaagccaggtattgtggcacatgcttgtgatcccagctacttgggaggctgaggtgggaggattgcttgagcctgagaggttgaggctgcagtgagccatgatcataccagtgcactccagcctgggtgacagagtgagaccctgtctcaaaaacaaaaaagagagagagagagagagacagagagagacttctagtgtgaaagacagagacccaaatgaacagaaaaaaaaatttgagaagtcacaaacagggtcgtatggggaaaaaaaggcacattcataaaataataagctgttaggtattaagatagcagaagtaaaaatagaagaagtaaaaatttcaacagaagagttggaagagtgaaaaacaaatttccagaaagtagaacacaaagacttaagagatggaaaataggaaagaaaatatagaaaaatttgacttcagtccaggagacccagcatgcaccacataggagctcaagaaaaaaaggcaagagaaacggaggaaggaaaagtatgtaggaaacaattctagaactgaaggcatttctacttttaaacagtctcgaagtagtacccaataccatgaataataaaaggcccacgctataggacatcatcatgaactttcaaactccagagatagagagaagttactaaatgtcatcagagaaaaaaaggccacatacagatcagagaatgagatggctttagacttttcaaaagcaacagtagaaactacaagacaggccaggcgcaatggctcacacctgtaatcccggcactttgggaggccgaggcgggcagatcactaggtcaggagttcaagaccagcctggccaacatggtgaaaccctgtctctactaaaaatacaaaaattagctgggcgtggtggc

SEQ ID NO: 99 - DNA, 1046 bp, Homo sapiens
atccccttctgcccttgcactctttgctgaatcaactgcagtcaggcgagggttcccgtggttgctctgtggttgctctgagtcactgtctggtctgacccatcagcctcattagacatggctttcacccacttctcctggaaacacgtttttcttttggcttccagaacagcacattctcctggttttcatgcattctctgtatctgttccttcttcactctttgcctggttccttttcatttccctgacttctaaatgttaggattcaagggctcaatatttaacctcttgtcctttccatccagctttattctcttactgttgtcatccagtgtcctggctttaattaccctcatttgatgattcctaagcttttatctccaacgtggacctgctccttgaacctcagattgacacatccagcgctttacctgacatctctgcttggatgtctaacaggcatgtcacagctagcatgccccaaatcaagctttgctgttgcctcacattttatcttctcccaggtttccatctcaataaatgacaattcatgttttctagacctggattggcaaactctttctgttaagggccagatagtaaatatttttggctttggaggctgtgaggttagaactgtttatctctgcttctgtagcacaaaagcagccatagaacatatgtaaatgagcaagtgtaactgtgttccagtaaaacttcacttacaaaaacaggcagtagcccagatttggcctgtggactagagcttgcttggccctgctctagacctgtcagaaaactagaagcagaccagattctcaccacctgtttcttctcatcacctccaccgctattacccaggtccaaggcaccagcatctcttgcctggatttctggaacagcctcctaactggtcatctcatgcccacccttgcttcacttgagtctgttctcagtgtagagccagaggggccccactaaagcataagtgcaacactgtgtaacagcccatatgctgttatcacaaactaacagaaaggcttg

SEQ ID NO: 100 - DNA, 1044 bp, Homo sapiens
gttagttatctcaagtttttctttgatttttctcttctttcctccctttctcaactaatttagcctctatgaaagtagtccggctcccactcccagtttctggagctctgttcccgtgatgggcccgtctcttgcctcaccttcccgtgcagccagccagttggctgtgccttccactcccctcagtcctcacagtgcagcctctggaactgctgcgggaagccagccttcatccccgcggtatcgcccctacactgtcactcacccatgggcgtcctcaggcgtctccattctgtcgagctccccaagtccccctgccctcgccagtagcccccaagcagtgcccgccagcagttccagacagaggcccagcagcacgggtccacccctaccacccgcctcacccagtgccacgagcagacgcccctcctccctgaggatctctcctaggtatttatcccacaggagagttgcatgtgtgtttgcggtgcagggaaaggagattaacacggtttggaagaagtgctgtgtgacactgactctgttaaattgttgttttgggttattaacctgtgtggctaactagtttggtaggcacgtactctgagtccatgcttctgccaggctctaatcatgctggaaagtttgggttgctctattctattgtgaatccctttcttccctttgagagttggggcacacaggaaccctttttggccttttgtcctgttgccagtggtagttgaaatgctatcagaccaagcaggtgtgggagcaaatctgggcctggtgttttttacttctggtgagtggggtgggtcggttcatgtcctgacgtgttgagttttagttatatgtaagttcagtctcttagaaggaagcagtatcagaattccactaatccagtggccccttctctcaaatgtacctgtatgtgtttctataatttaggtgaattatgtttctgcatgtcagtggccaaaagttttagtgtatggtttatttaaaaggacagcagttgcaaaagcttctccccgtcttgtt

SEQ ID NO: 101 - DNA, 1050 bp, Homo sapiens
gtcacccaagctggagtgcagtggagcgatctcggctcactgcaacctccacctcctgggtttaagcaattctcgtgcctcagcctcccaagtagctgggattacaggtgcatgccaccacacctggctaatttttgtatttttagcagagacaggatttcaccatgttggccagagtggtctcaaactccacacctcaggtgatctgcccacctcggcctcccagagtctcaaacttctgacctcaggtggtccgcccacctcggcctcccaaattgctgggattacaggcgtgagccactgcgtccagccaaaaccttgttactttgagcagtcagcaaagaaatagtactttatccttccccctttctcattgatcttcccagaatttttttactctgaagtaagcaattttaacactcacttcttgcctggtaagactaatgtcatagaagaaagaatcatcaggggttggatcgctctctccatctgctggcccagtggattcgatgtcttataaatctttttggaagtagttgggacatacatttatatgttaagtatttataggggtgatgataaggattaattttaaaaaggtaaaacattccttctgtaatgttttgcagacttctgagaaaagaactgtttgagatataaagaactgctttttgcgcgagtggcataaatgagtgaagtgagaattaccgtgtgtgaaaagataactgttgggtggtgggcttaatgcatgggtgatgaaataatctgtacagcaaacctcctgtaacagaccttcatatgtacccccaaacctaaaataaaagttaataaaaatcaataaatcaataaataaaagctggaagttgatctgaaaaaaaaaattaccccatggtaaaggtaccgcagaagttatccggaggaaaatgtttctaattgtttcctaggaagttgatgactagaaagaaatttggtggttttgtgtttgttttttaactgtaaatatttcagtgaaggaggtcaaatcttgaatgtcacaagccttatatgagt

SEQ ID NO: 102 - DNA, 1035 bp, Homo sapiens
atgtgtcctttaacgagagggatacattctgagaaatggatcgttaggcagattggtcattgtgtgaacatcatagagtatacttacacaacctagatcatacagcctactacacacctaggctatgtgatatatagcctgtttctcttaggctacaaacctgtactgcatgttagtgtactgaacactctaggcaattagatgcttatgccaattatggtgagtatttgtgtatctaaacatgtctaaacatagaaaagatacagtaaaaatatggcattataaccttgtgggaccactagggtatatttggtccatcacagagtgaaatgttgttatgtggcgcatgtgttacaaatgtgttccaaaattagttatgcatatctatctgtctgtaaaacatgtcaattcctcttggtcctgttagtttctagacattaattgtgtgtcctgggttgaagtagggatgtgtctctcacattcctgatgttcccatactttttttcttttattttaggacagcgtctctctttgtcgcccaggcaggagtgcagtggcatgatctcggatcactgcaacaacctcctcccacggtcaagtgattcttgtgcctcagcctcctgagtggctgggattacagacgtgtgccaccacgcccaacaaatttttgtatttttagtagaaacagggtttcgccctgttggtcaggctggtcttgaactcctggcctcaagtgatccacctgccttggtgtacgaaagtgctgggattacaggcatgagctaccatacccggccatattaccatcctttatcatcttctgtatgtaggttttttgccaagtttatgttttctcattttcttcatttcagtactccttactttttcctgtcgtaattaatccgtatgtgtcttttatgtatatcaaatccgtttgtgagttaaacaccagatttgttatgtggcctgtcaatggttgattttaactttgtttaatgtcctcaaatttaacccttgtgcttatgtttggttttt

SEQ ID NO: 103 - DNA, 1064 bp, Homo sapiens
tcctacagtgaccatttcaccattgaaacctgcaaagagacagatatgctgaactacctcatcgagtgtttcgaccgagttggaatagaggaaaaaaaagcaccaaaggtaatatgaaatggattaacttaaaaaaaaaaaagcctagttatttgtttgattatccccacccctggagcattcattgatttattcaatcagtaaagcaattattgagcatttgccatgtgccaggcacaatactaggaacttaggatgtgtcgatgaacaaaacagagatccctgccctcgtggaactcacattctaatagagacagagccaaggtttgaacctagatggcctggcttcagagtcctctcttgaccacactgtagctcggtaccgccagtgactcatatggccctgataattctactgctttgttataataaccaacattatagagcctctgtagattgccaaggactgtgccaggtcgacattagcttgtatcctcagttgctctgttagtgcagtggaacccggtataacataggcattcttttttcaacgtatgactaagcaaatgactctcagagagattaagtacttgtccagaatcacgtaaataataagttgcaaggctgggcttaaactcagtaagctacccttttcccatcacttctcttgactggcttcattgttttctcattttattcctatttcattttctgattttaattttacgttagaaacgaacctcgttgcccactggttagtttcatatttgtaaagggccttctttgggctttgttgtacttagccttagtggaagcgaaatgagtgggcatgtctccaaggttttttgttttttttgttttttgagatggagtctcgttctctcacccaggctggagtgcagtggcgctatctcagctcactgcaacctccacctcctaggttcaagcaattctcctgcctcagcctcctgagtagctgggattacaggcacctgccaccacacccagctaattttttttttttcttttgagacggagtttcactcttgttgcccaggctggag

SEQ ID NO: 104 - DNA, 1037 bp, Homo sapiens
aatacttctcagggcctgccattaccctggaaaacactcgtgtggttagccaatcattgcagcattacttagagctcggaagggtaagtgttcagaaaacaaatccagaggaagtatcaaagatgagctccagatacagagcttttattttgtagactggactatgcccagtagacaaacggctaacaaaagccaattcgatcttacataaaaaagataaactataagtaagtagcctgtgtcttgaataacaggttgtaacaacagcagtatgctgcctttgtatgtagcatcactgggaactggtcctaagcttagtggcccggctcctcctccagctggcccttaggcatttacactgtgagggtgagcaaggattgttagtttgcacacaccctcactgacttgcttatcccaaatgcagattaatatgtcttcaattctcaaacttaaaggcagagaagggccgggtgtgatggctcatgcctgtaatcccaacactttgggaggccgagtggggtggatcacctgaggtcaggagtttgagaacagcctggccaacatgacgaaaccccgtctctactaaaaatacaaaaattagccaggcatggcagcgcgtgcctgtaatcccagctacctagctactcgggaggctgaggcacaaggatcacttgaacccaggaggtggaggttgcagtgagccaagatcacgccactgcacatcagcctgggcgacagagcaagactccatctcaaaaaaaagaaacaggcaaagaagttacaggcttgggtaactaaggtaattttgatcatgggaaagaagtaacaaagcctattttattaaaactgtaactgccggctgggcgtgttggctaatgcctgtaatcccaacactttgggaggctgagatgggctgatcacgaggtcaggaagtcatcctggccaacatggtgaaacctcgtcactgctaaaaatacaaaaattggccaaggcaggtggatcacgaggtcagcagtttgagaccagcctgaccaaca

SEQ ID NO: 105 - DNA, 1007 bp, Homo sapiens
cagagtgagactctgtctcaaaaaaaaaaaaaaaacagatacaaattgaaaaaaaaaatcaagttatcataatatatctataaaaaagccaaaaccaaagtgataaaatagaatgtaagtttttgaagaagtaggtgatatttaatcaatttatttaacctatctgaagtgaattctggtgattcatagcaaaaaatataatactgttgttctcaataattctacttttcaggttatattcccaaagttggaggaaaaaggaataattttgtttacataaatcctcccagtagtaacattatttataatagaaaaaaattagaaaaaagaaatatgcagggaaacggctctggaatcagtagtttattaacataatttaataccatttcgagatttaaatatttctgtattgtgttgaaaaatggagattttatacaatacatcagtaaggaacatcaccaaagattgttgatgggctgggaatggtggctcacatccataatcccagcacttttggaagctgaggtgggaggagagcttgagcccaggagttcaagaccagcctgggcaaaataaggaaaccccatgtctacaaagaaaaaaattagcccagcatggtggcacatgcctgtgttcccagccacccaggagactgaggcaggaggattgcctgagcccaggaaattgaggctgcagtgatctgtgatcttaccactgcactgcactgcagcctaggtgacactaggtgacagagtaagaccctcttaaaaaaaaaaaaaaaaaaagattgtgatggacatctgtatgcacatttaacgaggtaggacagaatacggtggtccttgaatggagctaacaggaattctcttcttcttgtagtattgtttaagtttataattgcaaaagtatccttaaacttctggcggggcatggtggctcacgcctgtaatcccagcactttgggaggccaaggagggtagattgcctgaggtcaggagttcgagacc

SEQ ID NO: 106 - DNA, 1044 bp, Homo sapiens
aacttgatttcagacttacataagtaattctttaaaggagcagggagttttgaaactaagtctttgatggatgtctattataatggatactgtttatagtagtagagaagtgacagaataactttctgtagtccacttaactgtagctttgaatgactggataacattttcactaaattttgaagatggttgcaaggtggtttttttttttgttttgttttgttttttttttttttttttttagacggagtcttactctgtcaacaggctggagtgcagtggtgcgatcttggctcactgcaacctctgcctcccgggtttaagcaattatcctgcctcagcttcccgagtagctaggactacaggcacgtgccaccacaccagctaatttttgtatttctagtagaaacgggatttcaccacgttggccaggatggtcttgatgtcttgacctcatgatccgcccgcctcggcctcccaaagtgctgggattacaggcgtgagccactgtgcccggcctgaagtttttaccatgagacagtaaaatcagaaaaaatatttaggtttaggttgttttgagaaagtaattaaatataaacttctaaaaaggatagatgttattagcacacaacaatgcccggctaatttttgtgtttttttgcagaaatagggtttcacatgttgcctaggctggtcttgaactcctgagctcaagccatctgcctgccttggcctctgaaagtgccagaattacagcaggtgtgagtcagagtgtacagccctgaccgtggtttttgtttgtttgtttgagatggagtctcgctctgttgcccaggctggagtgcagtagtgcgatatcccagctcactgcaacctccgcctcccgggtttaagcggttctcctgcctcagcctcccgagtagctgggtttacaggtgcgtgtcaccacgcctggctaattttttgtatttttagtagagatggggtttcaccatgttagccaggatggtctcgatttcctgaccttgtgatccgcccgcctca

SEQ ID NO: 107 - DNA, 1020 bp, Homo sapiens
ttttactttatttttacccacaaattgtctcttgccctttggtgaattttgttcatatatttaacaaccttcctttgccaggaccttttttttccccagtgcccaatcttggttgggatagaagtagccctgacttttttttcctgtttattactcatattatatgtcttataggctttttcattcacgcatacatttctaaaccaaatgccgcacagcgtaactgatacaaataatgatttcatgtccactattgaaaatttggggggtgggtgcagtgactcaatgcctgtaatcccagtactttgggaggctgaggcaggcagagtgcttgagtccaggagtttgagaccagcctgggcaacatggcgaaaccctgtctctacaaaaaatacaaaaaagctagctgggtgtggtggtgtgcacctgtagtcgtagctactagggaggctgaggtgggagtatcacttgagccctggaggtcaaggctgcggtgagccgtgatcacgccactgcgctctagcctgggcaatggagtgagacactgtttcaggaaaaaagaaagaaagaaagaaaatttgggatggaggaagggcaaaatggagatttggaaaggaagagtttagaaagtaatgcatttaggctggacacagtggctcacgcctataatcctagcactttgggaggccaagttgggtgggtcacctcaggtcaggatttagagaccagcctgggcaacatggtgaagtctcatctgtactaaaaatacaaaaattagccaggtgtggtggtgggcacctgtaatcccagctaatggggaggctgaggcaggagaataacttgaatctgggagacggaggttgcagtgaactgagatggagccgttgcactccatcctgggcgacaagagcaaaactttgtctcaaaaaaaaaaaaaaaaaaaatacagaaagtaatgcatttaggccaggtgtgatgactcatacctgtaatctcagcactttgggagcctgagatgcg

SEQ ID NO: 108 - DNA, 1032 bp, Homo sapiens
aatcaagtaagtataggaagaaatattaataaaaggttatttatttctccttttactctttacagcccgaagatccctgttttgcatctcaaaaccgtgtgtacaatgacattggcaaggaaatgctcttacacgcctttgagggatataatgtctgtatttttgcctatgggcagactggtgctggaaaatcttatacaatgatgggtaaacaagaagaaagccaggctggcatcattccacaggtgaaaaacaaaacaaaacaaaaatcttctcttcattattagtgttagtcttaaattgctttaacagttatttttatttggcgaacatttatgcggggattgttttatgtcaggcacaaagatgaacaacccattattttccctcagaggagctcacaattgaatgggaaggattgacatgtacacatgtctgtcattaaaggtgggaaagtcagtgttttgtaatgattttgccatatatccaatgccatattattttgtcatttgaaaagtgttaccagcttgttaaagctctgttctaagtcctggagatggggggatattgttgatctgattttttttcaaattccatgcatagattacctctgaagaatgtgattatttttggtttttttgatagccttattcggagatactttcattttattttcctaatttaatactatgactttaaacttcaaacactctgagattctccctctttttttttttttttagaacagttagtattattgggtttgatcctttattgtttgggaatgaagaagcgttctgacatagatatttatttatttttattttcattattcgtttcacttaggatttaatggtgaaagacataagtatttaaaaagaacttcattatttacttatttatttgagacagggtctcactctgttgcccatgctggagtgcagtggtgtgatcttggctcactgaggccttgtcctcccaggctcaagtgatcctcctgccttagcctccagagtagctgggactaaagcc

SEQ ID NO: 109 - DNA, 1022 bp, Homo sapiens
ttggatacttttgtctaaactttcctgaagctttatttttttacagtgttattgaggtattattgaagtatacagtaaatggcacatatttaaagcgtaaaatttggtcagttttgacgtatttgtatacctgtgaaactagcgccacaatccagataatgataatttttattctcaaaagttgcctcatatctctttgtagtctttctctatcccttcttctgtggcaattcccgggcaattccggacctgcccttttgtcactatatattaatttacattttctagaattttatataaatggaatcatagagtatgtactgttttttgtctggagtctttcacttagcatagtgattttgagattcatctatgttgttgtgtttatcaatagttccttttcattgttgatgagtattgcgttatacagatacaccacagtttattaattcaactgttgatggacttttaaactgttgccagtttttgattattacaaacgaagctgatgtgaacatttgtgtacaagtctttgtgtggacatttgtttttgttctgttggtaaatacttaggagtaggatgattgagtcttattgtagctccttaagaaatgtcaaggctgggcacggtggctcacgcctgtactcccagcaccatgggaggctgaggcgggtggatcacaaggtcaggagtttgagaccagcctggtcaacatggtgaaaccccgtctctactaaaaatacaaaaaaaattagctgggcgtggtggtgggcgcctgtaagctcagctactcgggaggctgaggtgggagaatcgtttgaacccaggaggtggaggttgcagtgagccaagattgcaccattgcattccagcctgggtgacagagcgagactctgtctcaaaaaaaaaaaaaaaaggaaagaaaataaatgtcaaattgttttccaaagtgattgtaccattttacattcccaccagaaatatgtgattgttccagttgcttaaagcttcacttttagta

SEQ ID NO: 110 - DNA, 1095 bp, Homo sapiens
gtttaaggctgcagtgagctgtgattgtactgctgcactccagcctgagtgacagagcaagactctatctcaaaaaaacatgctttagaaacaaaaataaggccgggcacggtagctcacacctgtaattccagcactttgggaggccaaggtgggcggatcatctgaggtcaggagttcaagacccgcttggccaacagtgaaaccccatctctactaaaaatacaaaaaaattaagccgggcttagtggctcatgcctgtaatcccagcactttgggaggctgaggcaggcagatcacttaaggtcaggagttcaagaccagcctggccaacatggtgaaaccccatctcaactaaaaataagaaaattagccaagcatggtggcacacgcctgtaatcccagctgcttggagggtgaggcacaagaatcacttgaacttgggaggcggaggttgcacagcctggagattgcgccattgcattccagtctgggcggcagagtgagactctgtctcaaaaaataaataaataaaaatagaaaaattagccggccatggtgacgtgcatctatagtcccagccactcgggaagctgaggcaggagaatcccttgaacccaggaggcggaggttacagtgagctaagattgcgccaatgccctccagcctgggcaacagagtgagactccatctcaaaaaaaaaacaaaaacaaaaataatgtgcttgtttcttccttcagaacatgtaagtggaaagtgagtgaagttctgcaacacctagcaaagggagaaggagtgagaaatctttccattaaatgttgtaggctgcagggtaacttttactgttggtaaaattgactttgaaattttactaaagaccttagtgaagaggagtggtaagactccattcacacattttctcacaataggcgtcagtgaccatgttgctttgcagggctcttttcagagccagagtgagaaatagggagctccttgggaatgagaagtaaaactcccacttactgagtccttaatataaaatgttctttttctttggggatcttaagtcttaactatttgcttattaaagcctta

SEQ ID NO: 111 - DNA, 1035 bp, Homo sapiens
gcctcccaggttcaagcaactctcctgcctcagccttctgagaagctgggattacaggcatgtaccaccacatctggctaatttttgtatttttagtagagacggggtttcgccatgttggccaggctggtctcaaacttctgactacaggtgatctgcctgcctcggcctcccaaagtgctgggattacaagcatgagccaccatgccaggtcttcctgtcaaataaggttttaaacatgcagctgtagccacagctctcgtgtttattagtctggcatcacagtcagtactgtgagtgccgttgcttaggcttagcctataaatatccacaaatatccattacagaagcaggcaagggcaaatgctgtgctaagcagcccaagggccacatttggaacccacttaggaagcatgctatgttcagtacagtaaaaccttggtgattcaatggcttcaacaaatgttctgtgtagtaagtgtttttcatggaaatatttctgacttgtcctggtgatttctgtgtttccttaactgaatcatcatcaagaagagattaaattgtttagctatatgaacataatttattaaccagtgctatacaaataactagagatgcagacagatatgacgtgagaccaaagagtgaatgacacctgagcctggcattcctcggagcttaaagaagagttcctggtgtccctctgttttttggaattttttttttttcaaagaaagggaggaggattaaagatttatctcctcaacccctcatttctgaaccatgaatccacatttcaagttcatcttacattaggcccctagagtggggtatgggaagccctggacaccagcatgcctgcctgccagcagaatgagttgatgctcctgagactgaatgctgttttgcacttggcttccctatttatactaagtttgctactcaggcttgaacagaatatccttcactttttcttaacttagggtgaactgtttcatagaacatttacttgaaagcctattgatcctgttttat

SEQ ID NO: 112 - DNA, 1809 bp, Homo sapiens
ccttgtaagtataactcttttctgaaaaagtacctcctacatggctgccttactgatgcccaggttccttctttaatctgttttgctctttgcctacctttgctggttgttgttgttcttcatctttctcttttttttaaattttattttaaatcataccctcctatttgttccaccaaactcatatactactttgcttttgcagctgctgctttgaatctttactcttgcttttttcacgtgttcccttgccttgcctttggtatgttttttgttttgaggtgacatccagtcatgtaatattctggaagtccaagagatccagaaagtcaaacactagacaacttaaggtttattactcacaagtcctttctgtgtagatatttacgttttggggtcacaggcttcgttagtaacctgttatcatatgaatcatacattgaagtgtttgatgaactataacacttttccttgttaatcactactagcatcattactatatttcattatcatcatctgactttcttacttcatctccatgaccagcattttcacctgttttggcatgtgctcgtcccccttttttgtactccttttccttccattctttgcctaattgctacttgtccttcatttctctgtctgggcctcactcagccttgattcacccatgttacagagacctgtgaatactccagttctagctcttagtacactgttctcttatctcctactgtattcgttctcagtcctcagacatgctgctctagcaacacattattcctagaaaactccaggtactttcccactctcagcatacccacatggcagcttctgctcttctttgatctctgctcacatatcactgagtctgtgaggcctgtcctgacaacctcactttagattgctccctcacctacccttccccatgtgttctttcctcttgttgctttatttttgtctggagcacttgccactatctgacatactgtgtacttattgattaaaatggattatatcatggcggggcacggtggctcacacctgtaatcccagcactttgggaggctgaagcgggccgatcacctgaggtcaggagttcaagaccagcctgaccaatatggtgaaacctcatatctactaaaaatacaaaaacttgccggacatagtggtgtgcacctgcagtgccagctactcaggaggctgggacaggagaatcgcttgaacctgggaggtggaagttgcagtgagccgagatcgcaccactgtacgctagcctggatgacagaatgagactctgtctcaaacagacaaacaaacaaacaaacaaaataaataataggattatatcagtctccttactacaatgtaaatcttatgaaggcagagattttgttctctgacatatccataggtgccttgaagaaggcttgatatgtaatggggttgtatataagtattgaatgaataaatcatcacttacttctctctctctctctctggtatacagtaacctccttgagagcaggaaacatgttttcgttctttttaaattaaattaaatttaatttaattaatttatttttttaattttactttacgttccaggatgcatgtgcagaatgtgtaggcttgttacataggaatacatgtgccatggtggtttgctgcccctatcaacccgttatctgggttttaaaccctgtatgcattaggttcttatatttatataagtgtaaacactcagcaagtgattggtaaattgtcacttcagtgtgtgtcttcagatgcgatttaatagtaaacctt

SEQ ID NO: 113 - DNA, 1038 bp, Homo sapiens
ttttaagattcagttgtatctttcttttaaggtaagggggcattagggagaaagttcaagcactggcttctttccttagtataaaatacagcatgtaaactacagccttctagtcatgctctgtgctttggagaagaaggggcttagtgctaagtgggccagaaacgtgaaggacttgagcacaagcaaccttttccagaatacctcagttctcaggcatgggcatggattaaaccagttagtttgttatcttgtaaattatagtaaagccctaaaaagaatggattgtaagaataaatcaagggtttggggcaagataatagcagtgttaccaacagaggctctttaggaggcctttttagcattaagtttttaatgaaaacggaaagaactagctacaatgtgattagtggcttgaaaggtttgtgacacaagaagatgtcttttatcttaataatgtagtacattctaataacatgcctctgatggtctgtgagagatcaaatgaggacaggtgtaattaagctctattattaacaataatgccttgtatttgtatagtgctttataatttacagagagcgttaacatccatcaatttatttgaccctcaaaacaaccctctttgtttacttatgcatatgtataagtaaaatatgtaatattacctccagttgaggaaaccaaaacttggctgggcgcggtgggtcacgcctgtaatcccagcactttgggaagcctaggcaggtggatcctgggacctcacttagaataactaagcacggtgctcgcttcggcagcacatatactaaaattggaacgatacagagaagattagcatggcccctgcgcaaggatgacacgcaaattcgtgaagcgttccatatttaaaaaaaaaaaaaaagaaacaaaaaccacaaaaacaaaacaaaacaagacaaacaaaaaaaaagaataactaagcacggcagaataaggatgcctggtgctatccataaccaagagttggtgatcattctgtgccctaaaataaagatg

SEQ ID NO: 114 - DNA, 1039 bp, Homo sapiens
tgacccatgaaacccgtctctactaaaaatacaaaaattaggctgggtgtggtggctcacgtctgtaatccagcagtttgggaggccaaggcggccgggtcacctgaggtcaggagtttgagaccagcctgcccaacacggtgaaaccccgtctctactaaaaatacaaaaaattagccgggcatggtggcgggtgcctgtaatcccagctacttgggaggctgaggcaggagaatcacttgaacccggaaggcagaggttgcagtgagacaagattgcacaactgcactccagcctgggtgacaagagcgaaactccgtctcaaaaaaaaaaaaaaaaaatgaatatttgtttggtgctatatgaaactgctttgtgttaagactaggtcaccaaactgaggcattgtctctggctctcagtttgtgcatccatctttcagtgatgcagaactctctatgcacatgatcctaatactggtgtctttgttcatctccagccttcatgctgaggtaatttaaattacaagttcaacagtagagcatgcattgaattaaccaaaaagtatgtccaggtttaaaagtattaaatttaaatttaatggtacattagaatcacatattgttgaatcctttataaataagggaattatgtcagtgttaaatggatgagtaccagttatctaaaaattaaaggatagcgagtctcctgacctagtagagacataggttctaaaatttatctcaccaggtgcagtggctcacacctgtaatctcagcaactctggaggctgaggccagaagtttgagaccagagtgggcaacatagtgagaccctgtctctttgaaaatttaaaaaacaattagctgggtgttgtggtgcatgcctgtagtcccagctccttggaaggctaaggcaggaggataatttgagcccaagagtttgaggctgcagtgagccatgattgcaccactgcactccagcctggggacagagcaagaccccaagtctaccaaaaaatataaaataaaataaaaca

SEQ ID NO: 115 - DNA, 3031 bp, Homo sapiens
gttgtgtataatcatctctaaaatgcttttgtaaaaacacaaatgaaagagatcttactcttaggacagaggcaaggggctgtatcagttaatataaagggtaggagtaaatgttatcctaatgttctcctatatgtaattctgagaaccaccatcatggtcatcattgggaaacacttattaagttcctactatgtgtaggatactgtgttaagtgtggtatgtagttgttagtagtgacagtgctttgaggaatttgacttttcatagacagacttatgatgtgattacaagttgcattatgagggagaggtagttacagtaattgtttctactgaattaattgctttctgaatcttaaaaaaaactatagtctgaaattatctgtgtttcttatctcctgtcaattgccattgcacttctacattatttattgaatacttaatatcaaggggctggatgcaaccaaaagatgttactgtcctttgactactcaagtctagagaggattgagacatagatgtgtggaaaggatgagtaaatgcaaatgactgtatgattaaatgccagcatgggtgagaaagacatgggatcagaatttatcaaaacaaagaccaccaggggctaagccttgcagatgaagtagcacttagttttttcttttgcgtttctattttttaggtatatcccagctgtggttgaccacacagcaggcttgccttgccaggggacatttttgcttcatcaggtactaatgagggaccaaaacaggcatcggagggaacactgaaaagaatttagaataagagacggaattctttcttattctctgttttcatctctatttcagagggtgggcggggcattgtcctgttgtcatttttttttttttctgtgtctgtctgtagatatttcttcctcagaccttggcttatatttatccttgcttttatatgtatttagaatagctattttgaaaaatattttgtttcattcaattactctaatttgtgtagctcctatgtcacttttaatacttttcatttcgtgatgtttggaagctctgtgctttcacaccagaagttcttaataggaatagaggatgaaggtttcaatggactaaaaatctggttatgaaacataggtccgcttttggtaaatcaaaagtaggttcagtcagtgttcaaaagtacttaagacccaagtgggcataggggctagggataccatacatttgggacatacaatcagggcatggttgaatacttattatacaaggggctgggatgcagccacataatctcctgtgacagattatggttattcttaaaaccatagagaaaaagaattttttaaaaaagaaaagaaaaccatatcagaacctgactgttccttagtccctgacacatctccctttgttttgaataacaatgtggatagcattttccgtctttccacacctctccttcctgctcatcccccatgccatgccatacaggccagaaaacagtagacgagaggagataatagattgcttcagctaaattgcaaccctgcttcattacctagggcatccagcgaaggatcacagtgaccattatccatgagaaggggagcgagctccattggaaagatgttcgtgaactggtggtaggtgagtacgtttcatcagccaaggatagaaccaggacttacagagattttttttttttttgagatagggtcttgctctgtcacccaggctggagtacagtgatgagatcatagctccctgtagcctcaaactcctgggctcaagcaatcctcctgcctcaggttcccgagtagctgggaccacaagtgtgaggcactgtgccctgttagagatgttattcttccctgtttgcggtacatggaatgtgtagaagaccatattcggaaacacagactatggagatgcagaggccttgagtttgaaactctgtattcctgtttcttcgctctgtcattagtgatatgttatccaactaactaactcagttaccagggaatggttctgtggtagagtctgtgagagggcataaaagaaatctctgctggctgggtgtggtggctcatgcctgtaatcccagcacttttggaggctgagatgggtggattacttgagcccaggggtttgtgcctggccaaggtagcaaaatcccatctctacaaaaaaatatgaaaattagctgggcatggtggcacgcacctgtagtcttggctactcgggaggctgaggtgggaggatcgcttgaacttgggaggtggaggttgcagtgagctgagatggcaccactgcattcaagcctggacaacagagtgggactccgtctcaaaaaaaaaaagaaaagaaaaatctctgctaattgtgagcttgcattttagttagggagacagcatatatatgtgcagaatgctttgatgaataaataccaaaatgaggacaaaggaaaatctgtgctaagagagttaacagtgaaaacaagccaggaggactgaatagattcaagaaaaattagagggttttttttttttttccagacacaagcattttgagtaagagagtcaggaatatgtctaacatgcaaatgacaagaaaccccatggccagagtggagaaagtaaattaaggagtattggctagatagtgtaaactttagaatgacagtccgaggcaagagtttggaacttttgttgccatggacctctttggcagtaacgaagccttagaattatgttttcaaatgtgagaaataaagtatttaggattacaaaggaaaccgataatattgaaatacagttgttaaaacattaagctcttctttactgatgcatgaaataacaagatttagcagttattctaattaccataatttccaagtagtgatcaatgaaaaagatatcttgtgtccaggcacggtggctcacgcctgtaatcccagcactttaggaggctgagatgggcggatcacaaggtcaagagattgagaccatcctggccaacatggtg

SEQ ID NO: 116 - DNA, 1030 bp, Homo sapiens
gtaaatttccctagggtacttagtaaaatatacagggaaagatgggctttggttgaaatactggttattctaattttgcctccattagagtaactttaagaagtcctttaattcacgcccaacaacaggtcaggtgctacaagaaatgaatttggctttgttagaagcagcttatcttgtgagttagaatgagttcatcaaaaaaggctgaagtcaagaataacaacaacaacaaaaaacaccttaaatatttctgttctcatttaaactatataaatctacattaatttatcaaacttttgctggaaagccatggccttttctttaattataagatcatttactggagttctgattgtctttcttgcaaaaccacacccataattcatcatctatgactttcagtttggtggagcaagaattagaaacctgtgaagaaaatctaagttcaaaatcctttaaattttttatcatttattaacattaatcatttaaacattttatcattttcccctttcttttacatttgtctcacccaaacttaacagttatttttaaacaactcaccattttctaaccttttgaaaacattcaacttagttttcacaggaacaaaaattatttatgttttcatatttcattgatttgcctaatgtttaatgaagttagataataataataagtacaactggcataaacagatttgggaccagatactactgacatttgataagcactcaactcttcggagcgaagtgtctgggcaaatgagacatctttgtagtttagaatgctcaaggagaactagccatcaatctgtatattttagggatatggaaaacataggttaatatggtaagtggcaaaatggagtttggttaagagaactttcgttctgtttgtctaaggtttaatgtttaaagttgaacttacctgcaatttgggtatattatgtgtgtatcttagagggctttgctaatacattgatagtggggtataattgacaagggaccattcattattccttttc

SEQ ID NO: 117 - DNA, 1050 bp, Homo sapiens
gttcctattccagataatgtgttcagagggctttaatataggcagagagattgtgtgacccagtggccatcaatgatcaatttcctttcataacttcagaaggatgacaccagttgaacgcagagttaactttctgaagccagcttgtctcctcagctgagctctctgcaactcaagtttgcagctggggtttagggagggccattgtgttcctcccagtgaaacagtactcagtatgccttgattgtaactgattctcttgttacccttttctttctaatctctctattttaaaggaccccagaagccaattcccgggcctctagtccctgcccagaatttgaacagtttcagattgtcccagctgtggaaacaccatatttggcccgagcaggaaaaaacgaatttctcaatcttgttccagatattgaagaaattagaccaaggtgagtactatattgagcaggaatgccagctataaaaaacaaatccacaggaagaagtgactggccagctcttccctgtgaggtctgtactgtagtctgatgcaatctgtactgtagtctgatgcaagttgagtctggggtgagagggccagcctgggtttctccagttgggtctcataatgcatctgcaccctggcgcagcatgttgccatggcacggtttcgcttttgccgtattactttggcagataagattctaggccaaataggtcatttgcctgtttcatcgaatctaaggacttggcctaagtgtggcgtattttgatggtcctcagcacgattattttctttttgtgagaaactaacttttgtcatattgtcgtttttagctcagtggtctctaagaaaggataccttcatttcaaggagcctctttacagtaactgggctaaacattttgttgtcgtccgtcggccttatgtcttcatctataacagtgacaaagaccctgtggagcgtggaatcattaacctgtccacagcacaggtggagtacagtgaggaccagcaggccatggtgaaggtccgtcctgccctgccttggtt

SEQ ID NO: 118 - DNA, 1028 bp, Homo sapiens
attttcatattgaaaatcgtcagattttcttcagcctcaaaaagcgtgtttatgtaaaattaaatgagcgctggcagcgagctgcactttttttctaaacaggaaaagggttaacagcttgaagaaatgagaaatgtaactttgtttcactagggtatacatcggcttccagcttacttccctgttagagttaagattcattgcatttggccgggcgcggtggctcacacctgtaatcccagcgttttgggaggccgaggcaggcggatcacgaggtcaggagatccagaccatcctggctaacacggtgaaaccctgtctctactaaaaatacaaaaattagccggttgtagtggtgcgtgcctgtaatcccagctactggcgaggctgaggcaggagaatcgcttgaacctgggaggtggaggttgctgtgagctgagatcgtgccactccactccagcctggtgacaaagcgggactccgtctcaaaaaaaaaaaaaaaaagactcattgcttttttccccccttgattatttcagtgtattcctaggaaagataaaggatgcatttgatcgaaacccggaacttcagaacctcctactggacgacttctttaagtcagctgttgaaaactgccaggtatgtagcctagggctggtgccatggttactctacctccctggggccatcagttgtgatgtttggttttttgttttttttttttggttttttgtttttttgagacagagtctcgctctgtcacccaggctggagtacagtggcatgatcttggctcactgcaacctccgcctcctgggttcaagcgattctcctgccccagccttcctaagtagctgggactacaggtgtgccaacatacctggctaattttttttttttttttgtatttttagtagagatggggtttcaccatgttggctagactggtcttgaactcctgacctcgtgatccgcccacctcagccttccaaagtgctgggatgacaggcgtgagccaccgcgcctgg

SEQ ID NO: 119 - DNA, 1030 bp, Homo sapiens
ttaacctggctggcccctcgggggcgtgcgccatggactgtcctgaccaacctactctctcgtttcctaggctcagcgggattacttcggggctcacacctatgaactcttggccaaaccagggcagtttatccacaccaactggacaggccatggtggcaccgtgtcatcctcgtcatacaatgcctgatcatgctgctcctgtcaccctccacgattccacagaccaggacattccatgtgcctcatggcactgccacctggccctttgccctattttctgttcagttttttaaaagtgttgtaagagactcctgaggaagacacacagtttatttgtaaagtagctctgtgagagccaccatgccctctgcccttgcctcttgggactgaccaggagctgctcatgtgcgtgagagtgggaaccatctccttgcggcagtggcttccgcgtgccccgtgtgctggtgcggttcccatcacgcagacaggaagggtgtttgcgcactctgatcaactggaacctctgtatcatgcggctgaattccctttttcctttactcaataaaagctacatcagactgatgctctttctccagattcttagtctcacctcggccacatggagccattatccccattggcagaaagatttttctttaaaaaaaaagactagaataacacaagaaaccacatttaggattatgcttcactcagaggaggcaggcagggaggacacaccaggggctttaatacactgggcatgttttctttctccaattgggcaatgggtacatggacgttcactgtaacgtgctttttctttcgtcttttttttttttttttttttttttgctcctggcaagctgtgcgtgacattctttatggctttttgtatgtcaaatacttcatactaaactttctagagaattaaactttaatgatgggctcagcttggtctgatttatttcctttcccacacctgtctctacttgctctaagccaggcccagggattttgaacaagctaa

SEQ ID NO: 120 - DNA, 1041 bp, Homo sapiens
ctttggtgaggactgtcaggaacctcagttcttctcactggggattacttaccctacacaatgcatttaacagcacatagttcatagtagataacccctgagtatactgtattccattgatttatacagttacaaatcctgctctctcaaatacaaatctctctcaattggccagtcatcttagatctaaaggtgtttttcaacctgaagtcccccccgcttttttccaagttgctgacagtgactccagtgactccggtgtaaccattgttatgagactgcaaagacaagaatttactcctcttccttgcacctcagttttatctctaagtgacacatagtgaaaattatgaaatttccccaaaattgtggaattggtggtggcagggttgttttattttgctttgggtggagaaggggacagaaggtagggtcagagggatggggggcggggagaaactggtctgttttctttggagtttgttgtctttattttgattaaactagctattggtaattcgaggtgcactcattaagaactcagtgcaagaggaagggaaaggaacgctgattccatatttatcacaggctcaccagcaagcagcttcgacggcggcatcagcagcttagtgccagaattctccctggcttgctgcactcccacaacatgtgcaataaagttcctgtctccgttttacatctttgacattgaggcggaagatttggcctgaatttatgtaatttagttgggcacaaatataacccatgaatagtcacattcatcttctaattagaaaatcaaatgataatacaggacaggctgcaggcaccccatcatcgaatccaacaaaagcgtgttgtgtgtgttgggcctctgcagaggaaagtcagttgaattgcttcatgaaattaatgaaaagtgcccaacaataggtgggtgaaaggcacaaaccgagtgccctgtcagttatttagtgtgtgaagatgttagcattatgggtaaagagttttgcaaaatcttctcccatcgatgtatgaatc

SEQ ID NO: 121 - DNA, 1010 bp, Homo sapiens
aataaatgtttttgttttccttccaaccacttgattctgcagatgacacatcaactgcggagtcagccacacatcaagataattggactgtgtgtggggtttaagccctcatagaaccagtctatatatagaagcagttcttgccaggcaggcatcatatctggggctttaagcaggctgcaatccaggaggttagagtaacgtaaaaacagcaatagaatcagtccagaaagttagaggcttggaaattgtcgtcaataggcttgtgttgatttgacaccctatccagccacaaaatgtaggaggcagtctgcttccaaagatgtttggcaggctgaggatgaggtgggtaatagtgatgcttgcttgtgaggggggtgaggtgggggagggggatagagttgtctgttaacttactctaacatatctgttgcaaagcaagcttctaggaaagacaaacatcatctatttttctgtataaccctgcatagtggggcctgggtgctgttggctcacacttactgtgtccttctcaagtgtctaagtaaagggctttttcctgcctcatccaagaaatggtcctggttggggtaggcaaatgaaacaaataaaacacaccaccatactttctcattccaaaaggtgaaactagatcttatccttctactgttcctggaagtagaaaccccggtagcaaaaccgcctccttgctggaaatgaacttgaagaaacctggcggtcccaaccttggtagtgggctagaggtaaagggcttctctgtagaatatttcaagggggagtaaattcttacacagatttcaatttaactctcttttattacttttcttttttttatcatttacgtctatttcatgaggtagtttgcatgtccttgaatggaatctcgttaccatgaaagcttttttagcattgatttcataacagtcttaatttaatagctccgtcattactgagaagctctgggagtggggccctggctttccaggtca

SEQ ID NO: 122 - DNA, 1017 bp, Homo sapiens
agactccgtctcaaaaaaaaaatctgctttttagattcatttactctaagtttgttcatgcctgttatctatatatttatatctatgtttgtatcaattgttggttcccagtttagcacatagaggcagtatgattcactggaaaaatcatctatccatttactaattattaaatatccatttccttcatgtgccaacatttgtgctaaacataaaaatacaaaaataagatttaatatttgtagtttagtggggttccatgatatataaacagatgtggtgtgggtgataaaatattataggtgctataataggtatctgagtggaggcctggggggagagcgatcagttttgtggtaggggaggagaactagtggcgaagaggttaaaaaggtgcctccattcatggaggaggtcccctttatccgagccctgcaagaggattagttgtttttaaggtctgaagcggattggtgacttttgtccatgcagaggatgtgatggggcatagccactaaggcgagagatcgaggagacagcttggaaaggtgggcaaaggtgggatcagggaagacctggcatgtgttacctcaagagtgtggattttgttatgtggacagtggggaaaccacggaaaagttgtatgtggaataataagtttcatgctagcgttttagaaagctctctcaaaggtagggcgggcatttaggagaggggaatgatggatgaaccagggcagttattacggggatggagaggatggattagagagtgaggaagcagaatctcctgggaattggtggctgaatggatgcaagagtgaagaagagggaagagtctgggctcactgtccaaatttttggcttagggagctggtgtggaggatagcagatgaaagagtagaccaggagtgagagacgctgtgaagagagaaggcccagagggaggtgcgggggaccctgtcacgtggttagtggttggccagaggcggatgccccacagtcaggcagtggcgct

SEQ ID NO: 123 - DNA, 1054 bp, Homo sapiens
taaaataaaatacacccattttaattgtacaatttgagttttgataagtgtacatttccatataaccatcactacatgacagaacatttccaataccctgaaaggttcccttgggtcccatttccagtcaatccaccctccttgatcctggcttgagggcaaccactgatctgctttctattactacctattagatttctttcctagagttttttttctttttttaatataaatagaatcatacagtattgtactctcttgtttctattttttttctttccgctcagcgtagtgttgccgagattcacccaaattgctgtgcgcatccgaagccttttcctttttaccattgggtgggtggtattccattgtagggatgcaccacagtttgtttatccattcaccagttgatggactttgggttgtttccagctttgagctattacgaataaaacttttgtgaacattcgtatacaagtctttgtatgtttttatttctcttgggtgagcgcctagaagtagaattgttggtttatatgttaagtgtatgtttaactttataagaagctgctaaactgttttctggagtggttgcatcattttaccttcccaccagcaatgtttgagagttctagttgctacatatccccaacagttggtcttctcagtctttttaattttagcagttttagtgtgtatatgctggtatctcatggtggtttgggtttatatttctttgatgactgattaggttgaacctctctttgtgtgtttattgtccacttgcatatctttcttgtgaagagtgtgtttcagtattttgcccattattaacagtcttcttactgagttgaatgaggtttttaatgtattctggattcaagttgttggtcagatacatgtattatgagtatttcctcccagttggtggcttgcctttttattttcctaacattaccttttgaagagcacacaattttaattttgatgacatatatttatctttttttccttttatgattcatggttttgcatcctaaagaagactttgtct

SEQ ID NO: 124 - DNA, 1074 bp, Homo sapiens
cttggagcccaggtagggggcagagctgtcctcagctgcactgcggcctggtggcagtgtggggagtcacacttctgtccacctggcctcctctcgcctggccgccagccccagccccagccccagccccaggcccagctgcctttggctttgatctcaagtcaggctgaaggcagcgaagcctcggggcccaagcccctccccagccccctctcccggacagacgccttgcccagggtgtgtttgctgagtgtcttgactaccgtgacaccacgcatggccagagctagcgtccctactgcctcccgactcctcagtggaggaggagctgcggtccctctggtgtctgccatccccctccctccctgggcccggccctggacccgtcaggtgcctgtccccagccccaaccccactcatgccccgtcgtcctcccagacaaatgaaaccacgctgcgcttccgatgcccccgcttgccgtgtaatggttcagctaatcccatggcgagatgggggctcactccggaggaggagccaggcagcagggccttcctgaccaacagccagctctgtccttccccccaggaaacacatgttcatttgtgtgatcatgtatagacctcagaacggaagataggactgtatataattgtaataaataccagttgccactatttaatttctgcctgtggctccctgtctgctcatggcaccctgggcccgggggttcgtctcagcgcagcctccagctggtgaagtgtgggtgagggcccatgggcagcttccgccgctgctgagccagaagcagaggccttgttcaggtccagtggctgccggagggcgacactttgctgaccgcaggaggatcagggacctcgtgtgactgtatatagacctcatgtggagtgaggagctcttccttaaatggacgaatgcttcccggggaggggagtgtggcgtcctctctggctccctgtctcccctggctcttttcctcccagtctccctttccccttcacagagcatttggctaaaaccagaagagcagagccatgggctccttgaggggcgctc

SEQ ID NO: 125 - DNA, 1008 bp, Homo sapiens
ttttattacaaaagttgtgtatttgttgttgaatgtttaggaaagataaaagttaaatcttcatcaggatatacaagttgctgatatttaaagtcaaagtgaagtagaattatttttgttttgataaaccttttgagagggagagattgtaatccggaaatgctacaaaaaacaaacttggaaatcactgaatttgcaccagaaaagcacctcagacactaaacttaagcctttattctgtcctctagagcaaacatcacttcttgccaagttttcagtgtcttattcttcttagagtcttctttttgcttctcatttctagatgtaggaggtagtgtttttaaagaagtgctaagtgaagatttctaaaaggtttctgctcgttttatttagataacaaaagaaaaatggatgagacagatgcttcatcagcagtgaaagtgaaaagagcagtccagaaaacatccgatttaatagtgttgggtctcccatggaaaacaaccgaacaggacctgaaagagtattttagtacctttggagaagttcttatggtgcaggtaaacttcgattgcatcaaacagtttttctttaccagtgaatgagtatctagcatttatttattggtataaatagagatggggtatcactatgttccctaggttctggcgtcaaactcctgggcccatactgtcctcctgcctcgaccccaatgtgctgagccaccatgcccagccacaatcttgttacctttcttttttttttttttttttggagaccaagtctcactttgctgcccaggctggagtgcagtggcacgatcttggctcactgcaacctccacctcccgggtttaagtgatttctcctgtctcggcctcctgtatctgggattacaggtgcccgccatcatgcctggctaattttgtatttttagtagagacagggtttcacccgttggccaggctgttcttgaactcctgacctcaagtgatccacctgccttggcctc

SEQ ID NO: 126 - DNA, 1046 bp, Homo sapiens
gtttctcctgtaatattttatccctggacttgtcaagtgaattctttgcatgttcaaaacggaaaccattgattagaactacattctttaccccttgttttaatttgaaccccaccatatggatttttttccttaagaaaatctccttttaggagatcatggtgtcacagtgtttggttcttttgttttgttttttaacacttgtctcccctcatacacaaaagtacaatatgaagccttcatttaatctctgcagttcatctcatttcaaatgtttatggaagaagcacttcattgaaagtagtgctgtaaatattctgccataggaatactgtctacatgctttctcattcaagaattcgtcatcacgcatcacaggccgcgtctttgacggtgggtgtcccatttttatccgctactctttatttcatggagtcgtatcaacgctatgaacgcaaggctgtgatatggaaccagaaggctgtctgaacttttgaaaccttgtgtgggattgatggtggtgccgaggcatgaaaggctagtatgagcgagaaaaggagagagcgcgtgcagagacttggtggtgcataatggatattttttaacttggcgagatgtgtctctcaatcctgtggctttggtgagagagtgtgcagagagcaatgatagcaaataatgtacgaatgttttttgcattcaaaggacatccacatctgttggaagacttttaagtgagtttttgttcttagataacccacattagatgaatgtgttaagtgaaatgatacttgtactccccctacccctttgtcaactgctgtgaatgctgtatggtgtgtgttctcttctgttactgatatgtaagtgtggcaatgtgaactgaagctgatgggctgagaacatggactgagcttgtggtgtgctttgcaggaggacttgaagcagagttcaccagtgagctcaggtgtctcaaagaagggtggaagttctaatgtctgttagctacccataagaatgctgtttgctgcagttctgtgtcctgtgct

SEQ ID NO: 127 - DNA, 1044 bp, Homo sapiens
tttttcttagtgcctctgtgcatttgggtgatgttctatttacatggcctgtgtaaatctccattgggaagtcatgccttctaaaaagattcttatttgggggagtgggcaaaatgttgattattttctaatgctttgtagcaaagcatatcaattgaaaagggaatatcagcaccttcctagtttgggatttgaaaagtggaattaattgcagtagggataaagtagaagaaaccacaaattatcttgtgcctgaaatccattaagaggcctgatagctttaagaattagggtgggttgtctgtctggaagtgttaagtggaatgggctttgtcctccaggaggtgggggaatgtggtaacattgaatacagttgaataaaatcgcttacaaaactcacactctcacaatgcattgttaagtatgtaaaagcaataacattgattctctgttgtacttttttgtaactaattctgtgagagttgagctcattttctagttggaagaatgtgatatttgttgtgttggtagtttacctaatgcccttacctaattagattatgataaataggtttgtcattttgcaagttacataaacatttatcaatgaagtcatcctttagacttgtaatcgccacattgtttcattattcagtttcctctgtaaagggatcttgagttgttttaattttttttttctgcatctgaatctgcatgatttccaaaccctgtaccatctgaattttgcattttagcacttgcactattactcagcagcagtaacatggtaacacttaaaatggtactcggggacctccaaagactaaactgacaagccttcaaggagcccaggggtaagttaacttgtcaacggcatggtttaatcccttctttacacttgtgtaaatttcagttactggtcatagaaggctttcaatgttgagtggccttttattaacatgtttatggtactgcatagatacgggtatttattttaccctaagaagattttgaagtttaaaagtacttaaactatttggcaaa

SEQ ID NO: 128 - DNA, 1042 bp, Homo sapiens
agccctttgggaggctgaagcgagaggatcgcttgaggccaggagttaaacaccagcctgggcaacatagacccctgtctgtataaaatataaaataaaaaatattagctgggcatggtggtgcttgcctgtggtcccagctactttggaggctgaggcgggagaattgcttgagcccaggggtcaaggctgcagtgagtcctgatcacaccactgcactccagcctgggcgacagagtgagaccatgcctcagaaaggtagtatttgagttgagttacattgaaggaggtaagaggtgagggagttggccaagcagatatctgagagaggagcatttcaggaaaagcaacagcaagtgccataggccttcaggcaggaatgtgtccaaagagcttacagagcagcaagaagtccagtgtgtgaatgaaggagagagtaaagagaggtaaagtaagagaagtacgtttggggagggtaaggaggcacacacacggattatatagaccttgtaggccactggtcttggctctggaatggaggagccactgcaggactttgagcaagggagtgatgtaatataatgttttaaaagaattgctctgggtaaggtattgagaatggatcaaggggagtggggcaagggtagaggcaggaagaccaagtaggaagctcttgaataatccaggcaagcgatgtttggtggcttgtatctagcgggtggtagtggaagaggtaagtagccagattctaaatatgctttgaaggtagacagggtttgctgatggattggatgtgaggtaaagagaaacagaggaattaagcataactcaaaggtttttttttttcttggacacattccacattttatttacattttcagactaactttgggctgggtgctgtgcctcatgcctgtaatctcagcacttcgggaggccaaggcaagtggatcacttgagatcaggagttccagaccagcctggccaacatggtgaaaccttgtctgtactaaaaatacaaaaattagccaggcgtggtggc

SEQ ID NO: 129 - DNA, 1024 bp, Homo sapiens
ggcgggcacctgtaatcccagctccttgggaggctgaggcaggagaatcccttgaacccgggaggcagagattgtagtgagccggggtcacgccactgccctccagcctgggtgacagactacatctcaaataaactaaaaaaaaaaaaagagagagagaggttgcagtcctgattctgacctttggcaggggaaatagctggctctggctgccccagcccctcctccgttcagctccgggcttggagctggaagccagttgatgccctcccctctccctgcttccccgagccgctggcaggcactggtacttcccctgtgccaggctctgtgtcgagggctttacacgtattatctcatttaatcctctcacccacccagactacatagtctctcctcaatgactaccttccattcattcgccctgttctccgcttcctagccctgatgacaaatcatgatatgcttttgcttgtttacttgttgtctgtcttcccacttagactgtaaattccttttgttctctgcagcatcccgagcacttgtagaaggcctggctcactacattttttctttttaaataaatgagggacttaatcaagtgactaggctcagagtcattttctcaggatcacccagcttgtgtctgtagagctggaatccacacccatgttgctgagggaacctgctcccctgtgatgacaggagctgctgggaggagtttgagtttcaggcccagcacagaagccaagaataactgaaaccccagtgcctttacattcacctctgcacaatgaatcgagcttcccagtggtgctgggagcagagccggattctcccctaaactggaggctggccatcggacacccttcctggcctgaactctctttccttccctgcagggaaccccagccatggctgcatgctctggctgggagtaacagtgagcctcaggctggggaggcagagggacagcagagcacacacccctagatggatgtagaggatatgggaataaagacca

SEQ ID NO: 130 - DNA, 1063 bp, Homo sapiens
atagtttacaatccaatgtgtggtgggcaggttggggaggtggagggagcactagcacaaagatggttacagtgcagtggaagaagtgccagaactggggggtccaggtccctgaagcccagaggcaggggcccaactcagcttaacggttggggaagatgccctaggggagctggcagcttccccaaccccgagggcaccagccaggtaacagcggggaagggaaaagtgtttcaagtgaaggaaatagcataaacagcaagaacaaaggcctagaggagagagagagcaaaatgggggtgcagcctggaatgggaggccacggggaaggaggtgggggcttggagggtaagctgggaccagcctcacaggacctgcggggccacactgtgtcctcctgactcatctactccctgacccctcacaccaccccggggaatcccatgatgggaagaggtcagatcttcctgccttctgtccaggaagagggactgaggaacaggactgtttcccatgcatgagatcctgagtccacaaccccagccgagctccccttcaaaggtggtgggcaggggagcaggggactcggagacacacagggagggaaggagtatttttttttctttctttttgagacagagtctcactctgtcacccaggctggagcacaggggcacgatcttgcaacctctgcctcccgggttcaagcgattctcatgcctcatcctcccaagtagctgggattacagcatgcacccccacaactggctcatttttgtactattagtggagacaagctttcgccatgttggtcagtctggtctcgaactcctgacctcaagtgatccacccaccttgggctcccaaaatgttaggatgacaggcgtgagccactgcgcttggccgggaaggattctttatctttgactaggagtgcttgatgaaacaccggggctggggaaggggtgggaggatgagaagtggaccagtccttgcagtgtcaggactccctccctggggggccatctcctccctccctaacaggctgggtgcttggctccag

SEQ ID NO: 131 - DNA, 1071 bp, Homo sapiens
ggaatcaaagaagatccgggcttcttccccctctgcccttatttttgaccttgggcagtgccttccacctctattgtgagaggccagagaaaaaaatcagagctcaccttttattaaagtacctgatgtgtcccaagctccttggaccgccccagtgacccctggaggtaaggcatccatttacagagaaggaaacaggctgggagaggcaccatgctctcccgagataaatggcagagcagggatgaggcctgcagcatagcttttcaacagctacaggagggtgtccagaagccacaagccatggctgtggggaacatcaacgagctgcccgagaacatcctgctggagctgttcacgcacgtgcccgcccgccagctgctgctgaactgccgcctggtctgcagcctctggcgggacctcatcgacctcgtgaccctctggaaacgcaagtgcctgcgagagggcttcatcactgaggactgggaccagcccgtggccgactggaagatcttctacttcttacggagcctgcacaggaacctcctgcacaacccgtgcgctgaaggtggggtacaggccgggtctggcatgcctccagtacacagtcatgacaccaggaacatgtattgagcacttagtatgagccgggtactttggatggtttaacacctttacttctctcacagtaacccaaagaggtagctactgttagtgcacacatttttcagatgggcaaactgaggccaagagtggtgtttcttattcttactatactcttttttttttttttttttttttgagacggagtttcactctgtcacccaggctggagtacagtgacacaatcttggctcactgtaacctccacctcccaagttcagcctcccaagtagctgggattacaggcatgtgccaccacacctggctaattttttttttttttttagatggagtctcgctctgttgcccaagctggagtgcaatggtgcgatctcggctcactgcaacctccacctcctgggttcaagcgattctcctgcctcagcctcccgagtagctgggattacc

SEQ ID NO: 132 - DNA, 1050 bp, Homo sapiens
ttaaggggttataggaaaagaaacaacaacaaaaaaactatacaatagagatagtatgtgggccacaagtcctaaaacattttggcactttgccaaaaatgcttctcagcccctattcttactccagtttacagaggagacgaccaagggtcagagaggaaaagcaactggtccaaggtcagacaaccgagtactggtagagctgggactagacccaggtctgtctggcccacatcagagcgttctccatcacagaagaggtctggtcatttccatcaccatgtgtctcagggcccccagggaagtcacctccctgtgcctgcaacacaggaagcacctaatacgcggtgggcactgtgatctgcagcgtcccacagcacagggcttgagggcagccgccaagatgcaggcagaggagtggggaggaaggggcatttgggagaaggcggccactgaggggcttcccttcagtgtgaactctgcttttccatcagaggggttcgagttctggagcctggatgtgaatggaggcgatgagtggaaggtggaggatctctctcgagaccagaggaaggaattccccaatgaccaggtcaagaaatacttcgttacttcatattagtaagatccggggacttggggtaggggaaagcccaaatcaatttaccctggggtctctcccaccctggaaggggcagtcctagcccctcactgccctagtggtgagcccagcccctcccacccctctgcctgcccccagcacctgcctcaagtcccaggtggtggacctcaaggccgaagggtattgggaggagctgatggataccacacggccggacatcgaggtcaaggactggtgagtgcctggggcgagggtctggggtggggcatgccaatcaggcgccccacccccgccctgcccccaatctccgaggccctgatgggccctccctctccctgcaggttcgcagccaggccagattgcgggtccaagtaccagctgtgcgttcagctcctgtcgtccgcgcacgcgcctctggggaccttcca

SEQ ID NO: 133 - DNA, 1085 bp, Homo sapiens
cacttgaacacgggaggcagaggttgcagtgagccgagatcgcaccactgcactccagcctgggcgacagagcaagactctgtctcaaaaaaacaaacaaaaactctggctggatagattgattctgacatttgtgtctgggctctgttgtttgtaagctttatgaattgggccaatttacttaatctctcagagcctcagttctaccccatacagttacacggatgacatgagttaggggcagtgcagtgtagatgcatggcaggctggtgcttgtcagtagcaggagttgctgctgtcgttgatgatgcaggatccctgccccacataggtatttaacagttagtaaacggatacttacagtgaccgtccagatagatgcttgtctctggcagttgaggcacccccgtgggacaaatgggtactgcctccgtttcgcagaaaggagcctgaggccttggcgcctggaccagcacccaggtttcctgttccagcatagcatcctgggaccctctgctgccttggtccattgacccctgtctgggaaagagctgggcggcctcccctgggctgagcactgtagtgagagtccaggggctcaggtccgtccttcctgcccagctgggaaaggtcctggccctgccacccgtttagctcaggttccttccctgcttccagctcctctttcaggccatacctgagaatcctgtgtctctttggctaccaggaagctcccccagggccaaaagacagtggttttgtcctgacagttactggcccctctttccctgggctgccaggaagtgcagggcccgtttggctcagtttctccctggagtcttcctgcacattaaggcctctctgggtgtcctcctgttacacagatgaagaaactgaggcaggggaggcttaggcttctggacgtttcttttcccaggggcttaagaggagcaactggtgctaactttgttcatatttatcaaaccaaagtgacgtcacgcagaggagactgtgtgtgtgctaaggatctgcagtatttccaggttacgttgttttcttccctaacagagatggcagaggtgtgg

SEQ ID NO: 134 - DNA, 1044 bp, Homo sapiens
atgctctttgaccttctgtcccagggagtgagtgggtaagagaacttccttctaggaaagagactgtttagcaagcccttttctcaccttaaccccaaaacaaggtctggtgtttttacacgtttataaatctgtggcaccttaacctggatagagtatgtatttgccattaaactgtttgcttttacagcttacagagagacttagagtgaaaggcactggcaggcagtatgtgcccctaacaggtgtgtgcttataaactgttaaggaggccttgcttctcttctaggagagcttgcttttcagatattttcttgctcaagcagcttctctctgacatgttcttgattaagttccacctttcatgtatgggattcttagagtatgtgtttttagtaaagccaacactgctggggtgaaacaacatgcgtgactttttatcattaaattcttaaacgtaataaagaaggtagagaaaagcctataactccattcattaaaagatgactgttaacaccttactaagtatctttctacatccttacccatgcttttatatacatgatacatgctttttttaagtaacaaaaatgagattccactaaatcatctattttaacctgtcccactcaccccctttattatactttttgtatcattaggtaattttccacaaccttttcttttttttgacagagtctcactcttccataaattcttcatgctgtagaatttagtgtcagcgttaggatttgtagcacttttttgtttaacttttattatgaaggatttcaactatatgcaaaaacagaataatctgttgaaaccccttgtcctcatcacacagcttccacagtgatttagctcaagcccagtcttcttttgtctgtgctttcgttatccacttctcctttctcatattattattttttattgtatgtgtgtgtgtgtttgtgtgtgtgtgtgtgtgtgtgtgtgtgtgtgtgtgtgtgtgttttaaagtaaagacagtctccctatgttgcccaggctgttctcgaactc

SEQ ID NO: 135 - DNA, 1054 bp, Homo sapiens
gctggaggggcttacagggaaagccctggcctggtgaataacattgtcatttgtcattataacatttataacattataatgcaataacacttgtcattataatcaagagtgccttttcttttttcccttttttttttttaaatgaataatcctggcacagtttttcacacttcccctgcttttgctttgtgaaatgaaagcgagacacatgacaatggtgctcttgaagcgctcaaaggtttgggcaggactttatcttttatgatatgattatggatcataatctctaatctacctagtaaactagatgtctccctaatgggtagataatgcattgggtagagtaaataatggaagttaaagttacttttttttttcttttaatttaaatagagacagggtctcgctttgtcaccctggctggagcacagtggcgtaatcacagttcactgcagcctcgaccttctgggcttgggtgatcctcctacctcagcctcccgagtggttaggactctaggcaggcatgagatcgctctttagggaaaaagcgaagtcgtgggtacggaactgtgaacatcgtgcccttcatttagcacagcgtgccagtgaacagggtggcacaccatagctattgatctcatgcagggagtttatggtgctatcctgggctcctccccgtacgtcgttaatgttatctagaagatagagccagcagctgtgagtgaagggatatgcccgtatgaacagagttggtggaggcagcaacttcacaggtgaatcaaagacaaggcaagattggaaacatggccaaagatgaggatagcaaaaagtctggaaccaaaactgccgacttcacattgttaaatatgaggaagagaagctggaaaaatcagcatcagtcaaaaagatccatgtcaaatctgattccggtcagtacagtgttgggatagggtatctgtcctcagtaacagcctgttgaccacctttatcttgaactggccacaagcctcctacttaatttgacatgatatgcctagaaaatgtacacatgtgt

SEQ ID NO: 136 - DNA, 1012 bp, Homo sapiens
cccaaagtgttgggattacaggcatgagccattgcacccagtcatctcaggcagtttttaaaaaatttttatatatagagaaaaagtgcactcagcagccagcatgatccaaaggagaagcagctgcaccctctcaagtgatgacggggacacccctcggctgatgaacaagtttccttaacccagtttccgcagcggtggaggagtgcagccagaaaggctgcctcgctctgtctctccttgaactcctgggttttaacctcacctttgtcttcctggcaagcctccttgttctcattgaggtgaggtggtttggattcacctgctcgcttaggaggttttagagtcccgcactccttttccccacctccttccagaatgtcaggaaactgagaatgcagattcctgcagaaagtggcctcttgttcactaaaggtaaaggtttcacctctggtgagattaaagaagaaaggcctcccaggtgatgctcattcacagggaacttgtacagattctggggggaggaaaaaagggggaaagggctgaaaacaaaactgttgggtgccatgcgcactacctgggtgacaggatcattcatgtcccaaacctcagcatcatgcaatataccctcgtaacatacctgtacatgcaatccctgaacctaaaataaaagtggaaattatttttctttaaaaagtgcaagtctggccactttgggaggccaaggcgggcagatcacctaagatcgggagtttgagaccattctgaccagtgtagagaaaccctgtctctagtaaaaatacaaaattagccggtaaaaatacaaaattagccgggcgtggtggcgcatgcctgtaatcccagctactcgggcgactgaggcaggggaattgctggaacccagaaggcggaggttgcaatgagtggagattgtgccattgcactccagcctgggcaacaagagtgaaactctacctcaaaaaaaaaaaagaaaaaaaagtgcaagtcctcc

SEQ ID NO: 137 - DNA, 1034 bp, Homo sapiens
ccttcaatgattcgttgttattattacccccatcctcagatggggaaactgaggcttagagaggttgaggtactagctcgagacctcaaagctcccattcttgggggctactccagatccctggctgctgttggagaagtctcagttccctgtgaactgtcactcttagtcatttccctctccagtcctgagaagagggagttattgtggttgggagtctctgaggtgaaggagggaagattctttcgtccagagctcgtcttttggtctctctcctgctactgccttgagcaccagatctggcagaagtgagccaaggggtggaaggccaggcgtggagtgggcatcagtgtgcacctttgtggggcagacagaggacaggctctgggcccttctcttcctggcgctgctgagcagagcagactcggtcttctgcaacagcttccgcgtccccttccctcagctcagccatttgcctttattctttcagacttgttgactctgcacaaaatgggatttcagaaggtcctagaaacacgagggcaggaaaaataagctcctcccaagggtggggggtaatctccttttttcccaagtttttttattttcattttttgagacggagtctcactctgttgcccaggctggagtgcgatggtgccatctctgctcactacagcctccgcctcctgggttcaagcgattctcctggctcagcctcctgagtagctgggattacaggcatatgtcaccacgcctggctaaattttgtatttttagtagagacagggttttgccacgttggccaggttggtctccaactcctgaccttaggtaatcagccgtccgcctcggcctcccaaagtggtgggattacaggcgtgagccatgagctaccacgcccagcctccttttttcccaagttgctgttctggactttccttcctgcagcacacttacccaggtgtgctcaagcagaggggcctcccctgatgccgtggattcccatagtttcagtcctaggctgcccctga

SEQ ID NO: 138 - DNA, 1066 bp, Homo sapiens
cagttcatgactaggtttaggaattgggcactgagaaaattctcaatatttcagagagtccttcccttatttgggactcttaacacggtatcctcgctagttggttttaagggaaacactctgctcctgggtgtgagcagaggctctggtcttgccctgtggtttgactctccttagaaccaccgcccaccagaaacataaaggattaaaatcacactaataacccctggatggtcaatctgataataggatcagatttacgtctaccctaattcttaacattgcagctttctctccatctgcagattattcccagtctcccagtaacacgtttctacccagatcctttttcatttccttaagttttgatctccgtcttcctgatgaagcaggcagagctcagaggatcttggcatcacccaccaaagttagctgaaagcagggcactcctggataaagcagcttcactcaactctggggaatgctaccattttttttccaaagtagaaaggaagcacttctgagccagtgaccactgaaaggtatgtgctatgataaagcagatggcctatttgaggaagagggtgtctgcccttcacaaacacctctctctcccctgcactagctgtcccaagcttacatacagaggcccttcaggagggcctcctgtgccgcagggagggtgcgtggggaagatgcttcctgccagcacgtgcctgaaggtttcacatgaagcatgggaagcgcaccctgtcgttcagtgacgtcattcttctccaggctggcccgccccctctgactaggcacccaaagtgagcatctgggcattgggcattcatgcttatcttcccccaccttctacatggtattagtcccagcaggcatccctggggcagacgtgctttggctcaagatggccttcatttacgtttagttttttttaaaaccgtggaggttgcccacgggcctcggcacctggccctggcagcacagctctcaggcccagccctgggcgacctccttggccaagtctgcctttcaccctggggtgagcatcagtcctggc

SEQ ID NO: 139 - DNA, 1101 bp, Homo sapiens
tttttttttaagttcaaaaaaattctttacttattaggctaattgtgcaattaaaaaaaaaaaaaaattgcaaaaaccgcaattacttttgcaccgatctaatagctcgcccactgtaagtaaagcaggtaaagtcagcctttttcttctgggaccagactctgctctgccccgcggtggtggcctcaggcgcagcgctaaaacgcatgaaccatttaaggtatttcctgaaactggagcgtgattggtgagactttatttgcatacccacaatgcattgcgcactaaataatgttcgtctttaaaattatttcccctttttccttcaacatatctttctcggaaccgagattgctgtcccagaattgtctgaagaaaaaggctgaagtcaatagctcttttgggccgaaggaaagttaccattacccgtttaggagtagccgttacctgagaactgtagtgtcgacgactgatgttatactctggtttctcttcaaatcgtataaatctttcgccttttactaaagatttccgtggagagaaacgagtgtgagtctgaaaccaattttttgaggccttgcgtttcttagcagggcttattttaagtgttttaaaaacagatgcgattccgttaaatcgcgtgtggagctatgtaaagtgtattatagaacaaatgcgagttacggtttttcagcttttcgctttgttaaggtatgtgatatcaattgtattgcatttctgagcagttataatattaagatgttggggtggcttactgcttttgaccaagaagtagggtttgttggttgattacaccagtggtttttaaccccagccactgagtgatggagggttaccgactcacaagcgagcattaacgcctgaggtccgcctgctgtcagggcagcaaggcatcagattctcctaggagcgggaaccctattgtgaactgcgtatacgaggtatctaggtgcgtgctccttttaagaatctaatggctgatgacgaggggcacagtttcaacctggaactgtccacaccccctacccaccttcccccgcccttggaaaaactgccttccatgaactgggtcccttgtgc

SEQ ID NO: 140 - DNA, 1030 bp, Homo sapiens
caaagcaatatcttccatcacagggaactgggagaataaaaggcaacatccaaacaggcagatatccctagagccgaggtcagatgtcccacagcccttcctcccgtttgtagaaacttctagcagatctccagctcctgcctttccctgtgggccttgatttggccgtggtgagagaaggacagctgcagagatcagaggctcagctggccgttcaggtcatgctgttccctactagagaacagaagggtcccaggagtcagtcaggctgcactggatggtgtgggggtggggccgggtctggggagacctaagtgggcagctggccccggggaggctaaggttggctcccacgtgcagggcatcccaagctcctgccagaccctgttcctggcttcagttcaagcctggggtggggatgaaggatgggggaggggagagggcggaagggcttcattcattcccgcctccccagggagcagactgggtgtgtcatgactgtgccttgactcaggccacacagtgaccacccacgccttgggctgggactgcttggggaggagggggcatccggtggcacagtcaaaccaggggtgcccagaggtcccattcttccaggagctcatcacatacgcacaccccaaccaagccctcaccgtcagtctctccacatcattctttttctttttctttttttgagatggagtctcgctcacctagtctggagtgaaatggcatgatctcagctcactgcaacctctgccccctgggttcaagcagttctcctgcctcagtctcccgagtagctgggattacaggcgcccaccatcatgcccagctaatttttgtatttttagtagagatggggtttcgccatgttggccaggctggtctcgagctcctgacctcatgtgatccacccgccttggcctcccaaagtgctaggattacaggtgtgagccaccgcacacatcattcttctcttaaaagtttttctaaattttatttttttgtacagacagggtctcac

SEQ ID NO: 141 - DNA, 1072 bp, Homo sapiens
gcaggcaggtaggagtagagggattgagaaacctgagatggagtttggtccctgagctgctgttgccaccgtgtggctttgagttgccttgaccgtaagctactaggttttcagttcctggtttgctattggaatggcttagcttggttccctagacttcccccaggtggagctggggaggaaagggccaaggtgggatgaggggcattaggaagggctgtcgggtccaagttcatcagacagcaggagcaggtggcctgctgagggtgctaggccctgtgttctctccgtgagaatcccaacacctgttcctgtcctggaaagttcaggtaccatttttttttttcttttcatgtgtgtgtgtgtgtatatatatatatatataaaaagaaatatatatagattttatttatatatatatatatatattttttttaaataatagagacggggtctggctgtgttgcccaggctggttgtgaaccaggcacaatttcattttatttattttaattaattaattaattaattaatttagagaccgagtctcactctgtcgcccaggctggagtacagtggcgcaatcttggctcattgcaacctctgcctcccaggttcaagagattctcatgcctcagcttgccgagtagctgggattatagacgtgtgccaccacgcccagctaatctttgtattctttatttatttaattgtgtgtgtgtaaattttttttttttttttaaggcagtgtctcgttctgtcacctaggctggagtgcagtggcatgatctcagctcactgcaaccttcctttcccaagttcaagcagttttcttgcctcagcctctccagtagctgggactacaggcgtgtgccaccatccctggctaatttttgtatttttagtagacactgggtttcaccatgttggccaggctggtctcaaactcctggcctcaggtaagctacccacctcggcctcccaaattgctgggattacaggcgtgagccaccgtgtctggcctaaggcacctttttattttatttattttttttattttaatgatcccaga

SEQ ID NO: 142 - DNA, 1927 bp, Homo sapiens
ctatcctgttctgtttaaccctcattttacagaaggggaaactgaagctcaggttggtcacagttagtaaagagtggaggtgatgtctgcccagggctgcctgactccaaggacagagctcttgatcacttactctttgggtttttttttttttgagacagtctcattctgttgcccaggctggagtacagtggcgcgatctcggctcactgcctcctgggttcaagtgattctgtctcagcttcccgaatagctgggattacaggcgtgcgctgctacacccagctggtttttgtatttttagtagagatggggtctcaccatgttggccatgctggtcttgaactcctgacctcaggtggtccacccgccttggcctgccaaagtgctgggattacaggcgtgagccaccactcctggccactactcttcatttagtgtcttccttagcagcgcttgtggctgtcactccagaaggcatccccaggcaggcagtgctgagggccacttggccatgacaggagatcatgacgggagaacagacgggcaggggggcggtggggaaaggccactgatgctttctgtctcccagggcgggggctgtcggttcctgcgctacaactgttccatccgagccccaaggaagggctggaccctcatgcaccctggacgactcacgcattaccatgaggggctccccaccaccaggggcacccgctacatcgcagtctccttcgtcgatccctaattggccaggcctgaccctcttggacctttcttctttgccgacaaccactgcccagcagcctctgggacctcggggtcccagggaacccagtccagcctcctggctgttgacttcccattgctcttggagccaccaatcaaagagattcaaagagattcctgcaggccagaggcggaacacacctttatggctggggctctccgtggtgttctggacccagcccctggagacaccattcacttttactgctttgtagtgactcgtgctctccaacctgtcttcctgaaaaaccaaggcccccttcccccacctcttccatggggtgagacttgagcagaacaggggcttccccaagttgcccagaaagactgtctgggtgagaagccatggccagagcttctcccaggcacaggtgttgcaccagggacttctgcttcaagttttggggtaaagacacctggatcagactccaagggctgccctgagtctgggacttctgcctccatggctggtcatgagagcaaaccgtagtcccctggagacagcgactccagagaacctcttgggagacagaagaggcatctgtgcacagctcgatcttctacttgcctgtggggaggggagtgacaggtccacacaccacactgggtcaccctgtcctggatgcctctgaagagagggacagaccgtcagaaactggagagtttctattaaaggtcatttaaaccactgaagggaagatgctcagggcgagtgggtgtgtgtgtgtcttggtgtgagtgtctgcagggagagaggttttaagagccctctttttttttttttttctttttttgagacagagtctcactctgtcttccaggctggagtgcaatgacgctatccccgctttctgcaacccccgcctcctgggttcaagtaattctcctgcctcagccttccgagcagctggggctacaggcacccatcaccacgcctggctaatttttgtttttttattaaagaaagggtttcaccaggttggtctggctggtcttgaactcctgacctcagatgatccacccacctcggcctcccaaagtgctgggattacaggcatgagccaccgtgcccggccaagagccctctttttagagcctttaagaaaggtcatgctagcctctcgacccctgagtagct

SEQ ID NO: 143 - DNA, 1061 bp, Homo sapiens
ggggcgtggtggtgcatgcctgtggtctcatgtactcaggaggctgaggtgggaggattgcttggacccaagaggttgaggctgcagtgagctgtgattgcgccactgcactccagcccaggtaacagcgagatcttgtctcaaaataaaaaataaataagtaaataaaatgttaacattgcttatcacaaaatgatggggttatgggtttttttccccttcagtttccaaattttctgtagcacacctgtgctatactaaaatagaccaatagtttttgtgtgtgtgtgtgtgtgtgtgtgtttttctttgttgagacttggtctggctctgtcacccaggctggagtacagtggtgcgatctcggctcactgcaacctccgcctcccaggttcaagcaattctctgcctcagcctcccaagtagctgggattataggcggccaccaccacacccggctatatttttttgtatttttagtagagacggggtttcatcatgttggccaggctggtcttgaactcctgaccttgtgatccacttgcctcagcctcccagagtgctgggattacaggcataacccaccatgcctggctgtttttttttttttttttaaatagagacggggtcctacattgcctaggcttgtctcgaactccaaagttcaagtgatctgcctgccttggcctctcaaagtgctgggattataggtatgagccactgaacctggcccctaaccaatagtgtttttatgtggtcttgctctgtctcccaggctagagtgcagtggactgatcataggtcactgcagccgaaactcctgggctcaagtgaccctcccacctcagactcccaagtagctaggactgcagatgcatgccactgtgtcatgctaattttgttttattttttgagacaaaatctcgccctgtcacccaggctggagtacaatggcatgatcttggttcattgcagcctccatctcccaggttcaagtgattctcctgtctcagcctcccaagtagctgggattacaggtgtgtgccattgggtctggctaa

SEQ ID NO: 144 - DNA, 1059 bp, Homo sapiens
tgaatacaagtaaaaatttagtttcttaattgcactagcacattagccacgtgtgctcccagtgctcagtagccacatgtggttagtggccactgtactggatatcgcagatgcggaccatttcaccatgctgggcagcactgctttataccatcccttatcatgaatcttatcctccctggtttgataataagttgataagatcccttaaaaaacaattagggttgttttacattaggaaatattataaaatagtcacccatgactttggagttctttcttaacaaagggaaaaatagttaaataacatcatcataactgtgatcagtctgcttgctggtgcttttttattcttccacgttttttcttacagtcttttctcccttaccatttaggcactgaggagttttttgaccccactgcagatgcctcgtgtatgaacacgtatacaaagcgagatcatgtctttgccaaactgaatttgcagttgcagcgaggtacagtgactctgttacacaaggagcaaggaactcctcaaatgaatgaaagtgctttcatgcagctcgagttttcaggtacactgcccccaagaaactacctgccactgttgtctctctgtgggccaatgtccaggcgattctcattatttgctgtggggatagtctagaaagtcagtgcgaaaactgtattagctaatgtggaaccattgctcttaggggaaatactgggttaggttcatgtgaacctctggtcataacattcatcaactgatcagtacctaaccttaatttttaaaatgcgtgtctgtatttaaagacatttaatatagatatacagacagtccttgacttaggatagtttgactttggatttttcaactttacaagtggcacaagagttatacacattcagtagaagtcatacttcggattttgaattttgatcttttcctgggctagagataggtagtatgatattctctgaagatgctgggcagcaacagtgagccacagctcccagtcagccatgcggtcatgaggtaagcagctaatagtctac

SEQ ID NO: 145 - DNA, 1068 bp, Homo sapiens
atattattatactgttagtaacagtatccaaataatacacatgttttgcattgacacagagcagaggttgcagagtggtggcccacagatggaatgttgtctgcagagtgtcttttggttgatctacacagtgcttttgaaaagtttagattcatgctctatcagtcaacataggttaggttatgctgtagtaacagacaaccccaaagtatcagtgacttaaaacagtgaagatctttttctccctcatactctgtgaccattgtgggtctgggctgctctgcttgttgtagtcgcttagggtgacagagcagctagtgttttgatgtgccagcgggaaaaatgagctctgaatggtgttgaatggcaactaaatgctctggcagactttgtggaactaaaatatggtcccacacagggtgatggagtcagaaagtcctgtcttgctgtgtgtctgagtagttacggggtgggagatgcagaaccacttgatgtgcagcattgatgccttgctggccaacattttcaaagttaggggctaggcgcagtggctcaggcctgtagtcccagcactttaggaagccaaggaaggaggattgcttgaggccaggaattccagactggcctgggcaacatagtgagagaccctgtctctacaaaaaattaaaaaactagctgcgcatggtggtgcatgcctgtagtcccagctactcaaggcgttaaggtgagagaatcacttgaaccaggagattgaggctgcagtgagccatgatcacaccactgcactccagcctaggtgacagctgaaacctggtccctcccgccccaaaaagttgcaggattttatataaaaggtttgtatttagcttcttttgaaaaactggaagctttggcaatactaggtccatgttctcacttggaagcatctggaagcggagtagcaattgctcccttgaaatggggcatatgcttacctagtccttcgcttatttctgtcacttccttagtcagtgtaaatgtatgaattcgtgattactggtgtggaactttaaaaagtgcatttcacac

SEQ ID NO: 146 - DNA, 1045 bp, Homo sapiens
tcttttacactttctggattttacaaagacaaatgttaatctcagaagacttccttctgtttttctgtatttgggcagtacccaagccattgtttggatattaatctaggaggaaaataacacagaaggtaaatcatttaatgttttgcaaagtcctacctcattatttctaattttaattgtgttggatgttctttatttaattccctgccagtagagtagaagacaagcctttttcagtttcgttgtaaggaactcaggggctttatgaatcaaggataatttccagcagatactttcttaccaaattacaggaagtttggaaaattggataggttattatcacagtctcaggtgaatgtttttaataatgtttctagaggcttaggactgatttttcttagtgacacactttgtgatatcacatctgagtggattatctgtttttgtagaactttttagaatttttttttttaacagtgtataggatgtttactccctttaaagttgaatggctttagggttttatgactgatttcactgaagaactatagtagtaataagacacttttaaggtagacattctgatcgatattattgtattttatatgttttttcagaaacataactattttgtctttatcgctctttcacagttctcttcactcccaccagtgcgggtggtctttgcagtgactatggaaggcagtgcacggaaagtcatcactgtccggtcagccctcattgtgaggaacagacttgagacaccaatggaactaagactggatagcccatcagctccagacagtatgttttgattgtctagcatatagtaaatgctgataaatacttcttgactgttgtcaagtctctttttccccagtggtatcttccccagcagtcagtatatatggtctgtcttcttttgtcctgagatggtcaatctttggggtggaggaccattgcctgaaagtgttaacccttatttctgtggcagagccagtggtgcttcctgctatcatgccaggggattcgtttgctgtgc

SEQ ID NO: 147 - DNA, 1029 bp, Homo sapiens
ctattttgacaaatagtgagaactctgaaagttaatagtttgtatcttctttaggggtatcactggagaatttccccctctgtaaagaattgctcattccacctggaacccaaaactatatggtgagaatgcgactctatgacgtcaaccgtcggcagctgaacctcaccatccggattgtgtgtcgagcagaaggatccttaaagatcttcatttctgctccatattggctgattaacaaaacaggtacatacaggggctgctcaagtaggtctttggcgttagtcatgggaattcagatttatttgcttagctaactaaatggagccaatgcaaatagattacttcaacagtctgagctgctgaaacattcctgcttccatcataaatgcttaatcatgctcaaaactgtctttttaggcaagaaactgagcccactaaatagattcagttttcactcttttcccgcttgatggttttattcattcaccatttgcatctctttcagatagactgggtggtattgatgtaaacttttctctccttcctaaagggttgccactgatcttcagacaggacaatgccaagacagatgctgcaggccagtttgaggagcatgagctggcccgtagcctgagtcctctcttattctgctatgctgacaaagagcagccaaacctgtgagtacagttatttatgggaaggggaaataagctcccagggaagggaagaaattagtaaaggctataatatatccgtgtaagtagaaatatactgtagataacaatcctgacttggcaggggaatagaaccatgacctaatgggatttttggggatctaatttctatgttatttgatactgaaaataaaccatttggttggtttataatgaaagctagttttattttacatgcattgaagtagttttcctattcataactctgccaacgaagagaaagccacgagttctccttctctgctctgcagtttttcttcccctgtaaacttggagcacaggcacaggagct

SEQ ID NO: 148 - DNA, 1042 bp, Homo sapiens
cctcaccttttcatttggaaacaatttaaactataggaaagttacaaaagtagtaaatgaatatccctatatcttgtacctagatttaaccagttttcagcatcttgctacatgttgcttctctcttcacatacatgaacacacattttcctttctgaactatttgaaagtaaattaaagtcatcatgatacttaagccataaaaacctcacttatcacccaaaaatagggacatttttctaattaaatataatactattgtcacatactgatgaaatttaaccttgatatgttttctaataaatagttttcatagactgaatgaatgactagaatgtccttcatagcaactcccttcccattgatctaggatccagtcaaggatcatttattttagttgccacgtgtattctcttgtcttctttaatctagagtagtcccgctttgcccattttgtctttagtgacattgacatttttgaagactccaagcaagtttcttgtagaatgtcctattttctgcatttgggcagtgatttcctgtctgtagatttgggtcaaatattttcgatagctatactttctatgtgatgctgtgtgtttcccaccatgtcacatcaggatgcctgtgatgtctgttggtctcattattgttggtgataagttgttcttcacctggttaaggtggtatccagcaggcctcttttttgtgaagtttcctttgttctttgtaaataagaataatcccattgagggaataatttaagacaaagtgaatattctgtttcccaaaaacctttcattcaatggtttaatggttcttgaatcacttattacattggtggttgcgatgaaatttatttatttatttatttatttatttatttatttttggaaacagagtctcgctcagtcgcccaggctggagtgcagtggcacaatctcggctccctggagtgcagtggcgcgatctcggagcttctcgggaagctccgcctcccaggttcacaccattctcctgcttcagcctcctgagtagctgg

SEQ ID NO: 149 - DNA, 1079 bp, Homo sapiens
ggatggtctcgatctcctgaccacgtgatccacccatctcagcctcccgaagtgctgggattacaggcgtgagccaccacacccggctgcaatgcagatttttaaaaaattaattattttatttttatttttaattgagatgaggtctcaccacgttgcccaggctggtctcgaactcctgggctaaagtgatcctcccaccttggcctcccaaagtgctgggattataggtgtgagccaccatgcccagccagaaatgctgatttttaattctctaatttcctctacatttattcactgatatttttccgttaaggtaaactttccattcccttcagcgatttttctgtatatatacacacacacatacatacatacacgtacattacatccatccatcctcttctttacagcagaatatcagcgtataaatgttgaggaaatgggagaattagaaaatcaccattttgtaatcatattaccaatttctacttttttcagatgatggaggaacacacagtgggctgtaagttcagtggtattgactgaggcccaaacagtgttgtgattgtcagaaatatgagaagtaagtggatggcatcttgtctcctacattttatgtagcctcttttgtttccttgtcctgcagggataccttgggaaaatgcttcttcctacgagtggaaattactctccgaggagctacgtataggatctcatttagtgacacagatcagttacctcctcctttccgaattgacaacttttctaaggtatcaagtggagctgagagccagtttgactgtttcatgtgtgggagggtggagtgtgtactgcccttgacacaatggtacaatacattttcaacttgggtttaaaggaaactatatggataggttctttatatctggacaagcctagaaatccttaccattaagaggtgttttctgctggttattttgattgctaggcagccttgtccaggcagaagtaatcttttagctcccagatttatttattttggctagagtggttggttgacactgtgccttctgtagacatcccgttcaaacagagga

SEQ ID NO: 150 - DNA, 1050 bp, Homo sapiens
catggtgaaacctcatttctataaaaaatacaaaaattagctggacctggtggcaagcacctgtggtcccaactacttacttagcaggctgaggtgggaggtcctgagcctgggagtttgaggctacagcgagtcacgatcacaccactgcactccagcctgggtgatagagtgagatgtgcacctgcgcgcgcacacacacacacacacacacacacacacacacacacacaataaccctgaaatattgggaaagggctatgatgggtctgaccttgagacagacgtgctgctacctaagttaccacactgtttaccaaaagcagatagttacaaatgataaactttctttcttggaggagtctccacgcacaagctagctgttccagcagcaaactctggaaaagtgggagccaaccaggggttgcttcccatatttctggtcctttatcaccagtgctgatgggaccaagcctgcctgtagccctcggatccacaagcccagccatgctgctccttaaattagctgccatccatctgagcacacaccataaagttcatccaccacagtgcatctgaggctggaatcctgactaatgaggcccagattgcctgggaaccaaacaatagaatggcaaaccatctattaaacatcttttggagtttttagttaatcataacaatatagagagagataacccagaaataatttggcattatagttataaagccacatgattaatgaaagcataccatgtcattgaggccttcttaatagcacagatgaatgttccttctggtgttcacactttaaatcagaatttctttatctctagcatctgatgatcacagctcagagattcacagtgcaaattgaggagaaactgctcctcaagctgctaagtttctttggctacgatcaagcagaatcaggtaatgttgaatgttctatgtctgtgtttgggaattggtccaaagatggtatttttgagtctgtttgtaaaaataggtagccccttggtgtctgataggctccctttccacatctca

SEQ ID NO: 151 - DNA, 1050 bp, Homo sapiens
ctttattttttatccatttgtgtgtctgtctcccatactatactgagttccatgagtacaagggactaagtcatactcgtcttggtatctttaaccctaagcacttagcctgtgatctaggaagccctcaagggtttgttgcactgaaccagtctgttctgtgtcaaggtcaacttaccggaaggggctgcaggtagtacagctccttaaagcaccttctattactagtccttcagcagaatcttacccagtgagtaaacccatgcaaaacttttgcatctctcctgaaagcagaacaagacctgcccccatgaaaagaaagaaatagggaatccctttataattagatttagtgggcagtggtgagatgtagtagagatgaaactttaatagacacatagtctttgggtgatgccaaaattaatctaactttgtgggttaaaatgaattttaaaatttttctaaatgttcatatgtttttctctgtatgttgttagaattgtcatcgggttctttctaaaggctgtgtgaaagaaaagagcaagccaggtgcggtggcttacacctgtaatcccagcactttgggaggctgaggcgggcggataacctgaggtcgggagttcgagattagcctgactaacttggagaaaccccatctctactaaaaatacaaaattagatgggcatggtggtgcatgcctgtaattccagctacttggaaggctgaggcaggagagtcgcttgaacctggggaggcggaggttgctgtgagcctagattgtgccattgcactccggcctgggcaacaagagcaaaactccgtctcaaaaaaaaaaaaaaagaaaagagcgaaaacatctttagtactggttcttgccctaggacagaagtggctgtttgctgtacctctcagtggacactgaaaatgtggatgtgtccagttgcctgctgtccagcaaccctggaagaacttgtgatggctttgtcttcgttatgagaacactttgatctgaacccctttccttttctgaatcctttcccttttttttt

SEQ ID NO: 152 - DNA, 1043 bp, Homo sapiens
ctaaaaagccaattgggagctcttggtttgaggctgagggggccttactgtggaatgatcaagtggggacctgctgactctgggctcctgttgagaggagcaaaactgaatggggatgagagaggggacctgaagctctaactgcttcccatgcagccttttaaccaatcttcctgttttcacctcactccaggcctatctgtttctcctttatgctccaggccttcagagctacttgctgcctccatctttctgaaatgcagtggaggccaccatcctaattagctttctgctttgtggcttccactccctcaaggcttacatttcagcgccacgtgtccatctgcttttcagcttctaaaatattgttgacaccttctctttatccttttggatttgtgccatttgtatccctttgctttccctttagaggggtctctggactagatctgtcatgtttaatcagaagtcctataatttagacttttcactaatttgtgtttcctttcttggtgttctttcccctttacccccaactagtggctctgaattagtgtggttttatgaaacccatatccattcagccatggttctatgtattatctcatttaggcatcacagcagcttttgcacagcatctgctcaggcagtctgtggctcttctttccccgaaagattgagaatacatctggtgagaagccgttgccagtcccagcccctgctttgagtctggtattggtctttaatctctcattctgtgtgttgtaaagaaacaggttgtggaaggctcttgtcagatcccaggaacatgaaagaaatagcacaccctacggtagtgacatggccctgtcaccacccctcattgaaccataaaagctattcagaggggccagcagctggggagcgactgtacttagatcctgggtgctgatgggtgttttgtagtttccaagggaagttgctgaaagttttcttatcttgacactccaagggcaagaggtctttcttcaaagagaagcgcttgtttcagaaaaagatgtgga

SEQ ID NO: 153 - DNA, 1107 bp, Homo sapiens
acaaaatgaacagttgaactcaggccaccaaacctggttgagttgctgggtggagggactctcctgggctctgagcctttgtgtgtgggaaccgcactggaaaaggtgtgcagaggccacgaacttgctctgaacccacttgtgaagagcaggtgaccccaaactattgttagtgtctgctgtaaatgatatgcctctgggttcgagcagagttcagccaaaagccccacatgacatggaaatctgtcctggagccaggtttgtcgggtaaaagttatgtagcaaatgtctccaaacattggcatctgttgtctgccgagactaggacaaccgagaatgatggagtgcttaaggaaattaggatggggcatgcgaccctgtaacagctgataaactgtttcaggccaccgtggctcatccagctcttttgataaacagctttaaaagcattacgtggtttggaaagcattcttcaaaaatggttatattttccagacgcatgacagtccactgttcagtattatttaagggttttaaattgtagaatcagattccttttcagtggggctcttggaactgtcgagggctgatctgtctgactcccaccaggacaatctcacaacaatattattatgtaggtcggggtcccctaggtctgttaaaaaaaaaaaagttcagggctaagcgtttaagaggaaaaactatttctttcatttctagctaagtctgatgggccctttcaaacactgctttcatcatgcaccttttatttcacgatttctgcataatgaaaatacaagatcgataactgtggattatcgtaatgccttgagcctttgaaaatgaacattttctagattataaatgttccctttgtaattcatttcaaacttcatcctcccatttgtcctaattcccgaaatttaactgttgccttttgagcctcctaggaaattctgggtatcctttaggcaagggaggtagctcttgggggaatagcattcaggccacaggcaattcatttgcgacttgggctcttcttagaacatatgataagtacaacgcactgtagtgacagattttttaaaaaccctattaaagcccaat

SEQ ID NO: 154 - DNA, 1029 bp, Homo sapiens
agtggcttcgggctccttgcctgtctggttgatgaggctgggggtgctgaagagcaagggttggagaaggagcatctccccagtggacgagctgaggtcccctgaagagggcctggcactcagagcgacactgggcccagacatggagtcagggccataggtggacctggggtgggtaacgcctaggggtagaggagcctgttccaggagctctgagtcaggcttctgattttgaaatgactccagagggagtagaatcaggtatataaatgagttaatatcgaaaaaaaaaaaaaagagcaggaggaaaattaagtagagtggctgaaacagttacttggcagatttctccctgagagaagctggtcatgagtctgttttccatgtggccttctagagagacatctctctccaatctgctgatgagaggatgtgtggggaaaggaggggtcatcccccacaggtttggggtaactgggcacctgttctcaacagaagagctaccattaactgcggatctcttctgtgtggggcacgtagattagctcacaccatcacagtggccctgcagagtagacccatggggttctacacatcaggatggggaagctctgggcaaagtgagaggcggagacgactggcatcagggtggctggctcccctggcgaggctgcagtgtggcttgggaggacgttgtgacctgccccagaggaggcctgaggctgctgttgatgctaccatggctgctgttgttgagaatgccccgtggttcatggtttatggatgacattagtgatggtgcattctactaaggcggcactggctcctggcagattcacccactcttagcacctgtcatcttggaaaagggtgtaagctggtgctgcagccttcccttctctcagaagaaactttctgacactgagccccaagcccagagtatcctctttctctccttaaaggggagttaaaacttttttctttcttcttcttctttttttttttaatagagatggggtctcactatgt

SEQ ID NO: 155 - DNA, 1032 bp, Homo sapiens
tctgccagttttataacattcactttctgcctctgaggaaagatacagggaacaaaaatcaatttgtacagtcttaatattaaaagcagcttgactaaatacctgatttaaaaatagaagacatccccagtcctcatgacataccgcaaatatctgtggggtcctgttgaaaagaacaaaataaaggagcccaaggggtcattctgtctcagcaccatccagcctggcacttctcttcccatatatccattggatttttttttttttttcctaaacaaagtttttacactgagcagatgctctgtcatgatggcggttgtgcaattctggtatcctctaaatttgtaagcattcataaaacaggaaaaagtaaactatcattcggaagcacagcccattcctcccattttttgcaatgatgtctggatgttattttaaacagtgtgtctgtgtgttcccaaatccagctggccccaccagctcagattccattttttttgtgtgtgtgtgtgaaacgtagtctgcaactctgcctcccggcaattatacatgtgtcaggatgtcaaaaagcaattctcctgcctcagcctcctgagtagctgggactacaggttcctaccaccacacccggccaatttttgtatttttagtagagatggggtttcaccgtatcggcgaggatgatctctatctcttgacctcgtgatctgcccgcctcggcctcccaaagtgctgggattacaggcgtgtgccactgcgctcggcctcagattccatatttgaacaccagctgattgagagaaggggaatgagaagagctggatgagtttaaataactcattgttcagattcctgaacaggagttgggataatggccatcttttctttcctatcctttcttcccccctcactgtgaaaaataacagtccaccccaagtcatacactggacccagtgcctgcggggacaggactgtgggtttcttggtcacacctgtgttggtgctcaatgcagtgtagacatgttttcaaat

SEQ ID NO: 156 - DNA, 1040 bp, Homo sapiens
ctgtgttttaatatatggttacctgtgtgtgtcatggagctaaagcatgaagatcgtgttaagtaattacacactgcatcttgaaagatactgatgagttaagcatgtggcagctgcttcccttctcctatgacacagaggcattaggaactgtctggcagatttatcctactgtaagaaactatcagtaggtatggtgggtctgtgttaactgaatacacactgttagtctctgatattaatgcagccttggattagcttttcttttccctaaattttactcagaatacaaattgaacagaacatgtttcttcctttctgccaaatttttctttggagatattaattgttgaaaagaagaagaaagtcatgttttaggattggtaatgaggttatggagcacattcagggacatgagtgtgaggaagcgtggagtgttgctgcatttctttgttgagcaaaggccatatctccctcattttcatgggtcacattctttaagaagacagatccggacgggcgcagtggctcacgcctgtaatcccagcgctttgggaggccaaggcgggcggatcatgaggtcaggagattgagaccatcctggctaacatggtgaaaccccgtctctactaaaaaatacaaaaaataagccaggcatggtggcgggcacctgtagtcccagctactcgggaggctgaggcaggagaagggcgtgaacctgggagggagggtttgcagtgagccaagatcacaccactgcactccagcctgggtaacagagcaagactctgtctcaaaaaaaaaaaaaaaaaaaaaaaaaaagacagatcctcacattatacatggagatattctaaggcagaatttccagcctgttaagatggatggttgttgctttttgcaatagatagcaaaattgctataaggcaagtttctctttattcacttacttccattaaaaatgtcataggttggagaatagtctatggaaaaaatgatctccatggagttgaacacttttgatgagcacacatttcaaa

SEQ ID NO: 157 - DNA, 1051 bp, Homo sapiens
cgacccggccccgctgctgaatcacggccgccgcgcgctcgggctgtttcttaacttgtgacttagctcctgggcggcagaaagtgcgcggacggcgttccggggccggacgttcccccgctggcaccccaagccgcgctccgcagccgcgcgcacggcgggcgcccgagctttctcgcggctagcttgacagccccggctccgcagactcgggcccgccgcgcaggacgcgggccgcgtcggtcgcggagtcggggtgtgggagtgggggaggcagagacagtgagagacagagacaggaggcggcggggagggcagggagactgcgggtgcggtgggcttccgaaaggatgcccagggggatgtggaagttagagagcgtgttgttttgtcgttttgactcaattctcatagttttacgacttctgatgatttcgaacaaaaggtaaagtgtagtcacacttaaaaagggaggggataatttctgggtaggaaaatagtttggttggctgtatcatatttccagtgggcatactgacacgttggggcttttttttttaatgaagaattttaatgtgaattggggaatagttcatagatcccagtttgaaaatatgccaaggcacagtatggttagtttcttattgatacaaatacaggtttgtgttttttgtttttttgtttttttgttttttttttgctctccttaggtcttaagtagatttctttttagtcatctgaacgaacgagtccatcctttatccagaacattgcaaagtgagttgtggaagtcatactgtaaataaaatcatatcgtaaactcgatttgggaaaatgttaaaatcggcattaaggaatgtaggcaagaagtctgttctgatttttcaagtatgtattctttgtatgtcaccacaaaatggaaatagaattaattcccccgtgaaacagttagtaggcctattactgaatatgcattgtctatttattgaatgtgatgtagtcactgcttcagagcattaaatgcttttgatcctgaatcagacgatcagag

SEQ ID NO: 158 - DNA, 1050 bp, Homo sapiens
ccaaaatgtttatttgcagaggtggatagcttttttttttttttttttttttaactttcatttaagaggaatgcacatgaactatttgaagcagtaccttcctaagaggttttgtttgctgataaagctttcctattctagctgcttgactcataccagaggagaagcattaaagaagaccagaaggtgaaaagagtcaccctaacctatccatgtgtgctcttgaattttcctaaggaggggcacgcgttgatttcctcattgtctttatcccacaatagattcttagaatatgtatgtctatataaaatttttaaaactgcttgagtttgtagccaaatgtaatgtggctttttctacttggaacttttactgagagtactttatttgattgttaagacttagtaagtcgtagccaggcgcggtggctcacacctgtaatcccagcactttgagaggcagaggtgggtggatcgcctgaggtcaggagtttgagaacagcctggacaacatggtaaaaccccgtctctactaaaaatacaaaaattagctgggcgtggtggtggctggagcctgtaatactagctactcgggaggctgaggcacaagaatcgcttgaacttgggaggcggaggttgcagtgagccgagatcgcaccactgcactccagcctgggcagcagagtgagactttgtctcaaaaaaaaaaaaaaaaaaagtaagtagttaacacccgccccaaccacccaaacatactgtaggcaaggcagaactacagtttgtaatctatgctttcaattttcaaaggtctttagcatttttctttctgttctaacctgttctctgaaaaataggagaaggtaactttgtttaaaaggttaaaacttggtgcgtatattaagaaaatatcctaagggattctgggtaagagactagaaaattctcagtgttctggagcatttattgtagctgcttgctattcctgcttctgtggccatgatcctgaaatttaaaaatattttgatgaaagttttaataatctagtcaacgt

SEQ ID NO: 159 - DNA, 1060 bp, Homo sapiens
cgcgcgctcctcaggcttcccggctttacctggctcccttggtggatggaactttacatcctcccctgcgattatgtggatgatgtgtcggtccgtgagtgctcatagaggcacagctgcaggcaggaggtggctggggcacagttgagatcctccacagcagtgggatctgtttgatcagcagcagtggagctgagtctgaaaacctgtgctggaataaaagtgcctcatttcatggtgggccgagtgattaggtagcttagtatctctgtaaatgctcttgtttttataaacctctgctaaaatgtggcatattcaaatgccgttgcttagtctttgcatttttaagagaagcaaaataaaggctgaggtaaagaatgatgatcacagccaactgccaagacatcgacccttaggttaatactggcaggcattcaacatgattgtttaaattagatatttgatttaaataatgatgggtataagaaccaagtgcggtgaacaggaaaaagaatatggggtatgtggctgtttggaaagaggaaacagatgatttttttgtttgaagtgatgatgtgtagcatggaattgaaagatgtctaccaaaaggttaacagggtaatttgaatgctaagcatttttggctatttaatggtatctcttgtatttttaatccctttaaagtctttataactgtgtgtccattgtgggtttgatgttactggggattgtggtttttttcctgaacggttttcctgagttttatgggtaggcagtagacaagagagaaacacttgagcagtactttttgccatctaggccaagtacaaagtagaggctttttccaaatagcacttgtaaaactgcgtattttacaaaattttaaagtgttatattttgtctcaaccaataaaaacattttcaattatctcattgtttttacttttgttggcgtcttctttatgaaaaatcatgtattcatttttttgtgtgtaatgtaaccaagtgctcatctgagaaaatacaatcagatagaaatatcatacccttatcaatactc

SEQ ID NO: 160 - DNA, 1299 bp, Homo sapiens
ataagaaaattcactaagatgatggcatgtgcctgtagttctagctacttgacaggctgaggtgggaggatcactggtgcccaggagttagaggctacattgagctgtgatccccccactgtactccagcctgggtgacagggcgagactgtctctaaaaaaataaaaataatgataataaaatgaaacatatgattgcatttaaaaatagcatgaagttcaaaaccatcaaaaaatagtgatagcaaggacatgaggaggcacctggggtgctcgctgttttctattattcatctgtggaatggtcacatgggtatatatatttagtgaaaattttatcttgctatatactcaactatttgtacactttaatacatgtacgttttatacttcaaattaagcatttacttacaatgtcagagactttgatttttgtataacagaacaaaaagtatacagaatgaagtgtgtttctgttttttgttggaatttaaattcttattttgtctcttcgtgtttgtccccttaaaattttctcctttatagtccctctggtgataatattctaggcctgccacgacgtaagaatccaaccaagaggcatggattgaaagttaatcagaaagacagcttgccctctgctcattgcagttgggccaccatattgagactattgatacagaagggaaggaggtgtgtcttaatttgccatgggcaaatttttgcagattgcagcttacttgagttgtttatagtgagccaagtaggcaaatttcagaagacaggtttgtgactcttttaagaaatatttgtagaggaaaataaccagaatattttggatgcctttcataaccatttttaagcactgtttgtgatgataacattcataaaagatataattttctgtgaaacaagaatagtcaagttcatttcccagagtcttaagactaagttctgcctcctcattgcaggtgtgccgagagttttttttgaacaacaaaaattactaaggaacctcactacctttggcggtagaattagaaaacagattcagcagtcacctactccccttcagtaattcgagacaattatttttctcctgacacaacatcaggtcccatgaaaaatgacacttgctggcctggcgcggtggctcacgcctgtaatcccagcactttgggaggccgaggcgggtggatcacaaggtcaggagatcgagactatcctggctaacatggtgaaaccccgtctctactaaaaatacaaaaaaattagccaggcgtggtggtgggcgcctgt

SEQ ID NO: 161 - DNA, 1046 bp, Homo sapiens
ccgataagaatggccaaaataactcatgttgaggggaaaaaacctaaagctgtggccaagaatcattctgctcagctttccagcaaaacatcacggagcctgcacgtgagggtacagaaaagcaaagctgttttacaaagcaaatccaccttggcgagtaagaaaagaacagaccggttcaatataaaatctagagagcggagtggggggccagtcacccggagccttcagctggcagctgctgctgacttgagtgagaacaagagagaggacggcagcgccaagcaggagctgaaggacttcaggtaagctcaggagctggtgggagggaaagaccgggaaggcgacagtatccttgcctacgggtgttttttggtttcttgttgcttttttttttttttttccccacttaaaggaaatagctgttgtataagttaaaggcatgaagggtcattgctttggctgcttttagagatgaataaatagttctaatttcagacttaggactcacaaagcagtgccacttctttaatgtggccagatgtaaattgaatttaaaactatagaaaagctctcaaaagtactctaagaaaagatgcaatcctctcaaacttcctttatgtcttgggtaatagctcagtgtcatgtgtcttattttccgatcatagaacatttcttaggttaagacgggtcactaagttcattagtaaaccatgttacaatcttgtttaatatttctgtgacttcagcatagatctagtacctgacactttctttcagaattgccaatgcttaaattttaataattgattgcatcggtcaaaacaaaacatagtcctttaaaaaggtcttatgcactgtcccccacctcctgaactcagccgtaggacggtaaacaagtcaggatctggatgggaagcagagcaggagagacatgcttggaactccaggcaggacccttgcagctctttcaggcctgtgtgatacccagggcatgtcagcctcatttgtcagtgcctttgtttccccagtaatgatagaaggat

SEQ ID NO: 162 - DNA, 1050 bp, Homo sapiens
agccaatcctgagccgtgtccacttggtggaaagaggaggtggtgggccttgagggtgaaggaaccacgggcctaatgtgtagtttctctctggcttatgttgattccaaggcccaagcccccttgggccttgcccttctggtggcttgacctttcctgaagggtttgcctcacaagcagaaccttgaatacacagtattatgggataagaaaaataaaggtccagattggtgggaatgatgacgtgaccgttaagattttagacagaacatctaatgtcaaaatagaagttgaatacggtttgaggtttgagtgggtggcatgtagggaaaaaagtgcgaaactgctccttggtgccatggatctctgtgctgcagtcccaggcccctaggcccgatccttgctgccacctacacagggtcatgtcacttcctccctcccccccttctgcccttgtgccgcttcctctgagtggtggtggaaatgatctgagaagctttagggtggattcagtctggctttccaatgcctgctgtttgctgggtactctgctgagcatctacaagtcttggcaatgacagcctgaggttggtgtcatttaccgatggagaaacagatttggggaaagtgattttgttccaagggcacacaactctaaggtggcaagttgggatttgaactccaagctacactgtgcagtccatcgtttttataggtagggttttttttttttaagggattttatttcttctaaatatagaaaacaggacgcagtaccttctccataaaagcttttccaagcattagtgaacaagtggaacagtcatttgtgggtaaggaaatcttcctggtgcagcgagcctttattagtcaggagttgctcctggacccatttgcttttagtttccctctcactgtggaataaacttctacccccatcacagaccaattagttcaggtcaatcaagctggcttttatagagccatgtggttcatcaacggcaacgtgactgtttaacagaagccaagctcattatagtaatacccttt

SEQ ID NO: 163 - DNA, 1107 bp, Homo sapiens
ggagatgtggaggaagaggggagacggtgagcagcagccatgtgggtaatcaagggaacggcaccagggaacagagaagggctgccaggaggcatatgcgctgggagcccaccggagttttggggtcatgaatttaaaatgcggtcaggcagcatgtttgtgtgtttttctccatcaaaaaggttgatgaacacacacacatccctctatttctaattaagaaatgcttaaatgtacccatactgactccctgctttgagtgaccagctgctgggccggctctcactgaaggagggttggggggggtctcctctcataagagcctctctggattgaactccattgagctcctgctctgttccaggcaccatgcaggcagagttgggaatgcttccccagctatacgaagttggcgttaggcccgtttcataaaggaaactgtactgagggggcaggtgacccgctcaggctgctggtggtggagttaggactgtcagactctaaacctcatgctctctgcctctccaggagcaccaggtcaaaccagatgggtcaaaagcctccacgtacctagtgttccagtagtgccccctggggctggagaggaggccgtggtggggagggcactgcaggcaggggcatcgacgtgagcgaggactgaagtgacatcctatggagggggcaaggggagggttcaggccagggcccttctgtgcaggaggccactctcctggaactaagtagggataggctttgacaaagccatcccttgcagaattccccttgtgcgttcacagcgtatgtttgcttggctcagcactgtaacccacagtaactggcagagtgagcggtcagtggctatcagataactaagggaaatatgtttggggtagatgacaacctgtctcctcttcttaggaatttacactgcctgtcagcacatgaaaggctcagaaattgtgcagagacacgcccgtttggtttcacaagcctgtgcactggaggtaaatggctcgggcttccatcccagttctgccgcctgccagctgtgtgttcttgggcaagttgcctaacttctctgtgccttagttcctcatctgtaaaatg

SEQ ID NO: 164 - DNA, 1049 bp, Homo sapiens
attacaatagcaaattcgtggaaccaacccatgtgcccatcaatgatagactgaataaagaaaatgtggtacatatatgccatggaatactatgcagccataaaaaggaatgagattatgtcctttgcagggacatggatgaagctggaagccatcatccttgcaaactaacacaggaacagaaaaccaaacaccgcatgttcttactcataagtgggagttgaacaatgagaacacatggacacagggtggggaacatcacacaccagggcctgttagggggtcgggggcaagaggagggaacttagagggtgggtcaataggtgcagcaaaccaccatggcacatgtatacctatgtaacaaacctacacgttctgcatatgtatcctggaacttaaagtaaaattaaaaaaaaaaaaaaagaaaattacaagttgaacctaaaatgtatgtggaaatgcaagatgctaggacttgtcaaggcaatctagccagcacttacacttttatatagaaagaagtgaaaatagatgaaggacttagactactagataccaattcctatttaaaaacatagtaataagagtataatactgacacacggatggacaaagacagaccataaaaagagaaagtccagaaatatacccacaaatatacagtcatttgatttgtaagaccacacactgcagtgtggtggtgaaattatttttatttcaataaatgctgccaagttaactggctatttatatgaaaaaagatgacaggtgcatggtagacctaattgtgaaagcaaaagcaagcaaaaacaaaacagaaacaaaaccagaaaccaaaaaccctcctagaagaaaatgtaggagagcagatttatgattttgaggcagtcaacattgttttaaatgagatccagaaagctctaaccataacgaaaaaaggaactggtaaataggactacattaaaattgagagcttctgttcttcaacagatactattaagggagttaaaaggcagttcatggaatggaaaaagacatttgcaatatat

SEQ ID NO: 165 - DNA, 1025 bp, Homo sapiens
gcttggggaagttgttgctttggccttgttgaattttcaaggaaaatgaaaagatatgttttaggacattcaccatttcctcctatgaatgagaggcagaagcttcctgcttttattcagttctgttgctggctagattcttgccacaggatttgaaaataatggagttgggttgtcatggcaacacatcccacgttgtaattttgatattttgaccaattctttgacgctacttttatctcatgaattgcttaaagtttcttgagactctgcttcaagggcaggaggattgacagcattcgattcagatgaagaaacaggtattcagtttgctttccttcctggacattgtatgaagtggaattctggagtttgtgtgcttgagagaaaaacccaaagaaacttgcttttcttgttaacaaaaccatcttcatacccttaacagctgcctgaattgctgggacaaactgttttttgcccaaacaaaataattccccaaattggtaacttgaatgttacgtctggatggctggctggctgttaaaagatcatccataccctctcttctcttccttccccaaacttggtacttctgctggggtctccccaccaacctcagaaaacaacttcccatcccctggctacccaattcttcttggactcctcccttctgatctgtttaatgggtcagggaacccaattatttctcataacaataagcaacacttgctgtttgctttgtgttagacactgttctaagtgcattacatgcattaacaaacttaactttgacatcaaccaacactgtgaggtcggtagcattccttgttatcttcaagatacagacaggaaaactgaggcatcagaaggtagaattacttgctccaggtcacatgaacagggatggcagagttagagttccaatccagattggctggccccagagcctgtgcccttaaccactgtaccctgcagcctatctcagagccttctccttacctgtagaatccaccaacctctgtctg

SEQ ID NO: 166 - DNA, 1962 bp, Homo sapiens
gggatgatatgtgattttgagttttgaagtagacacgtaaaaatatgtcatttttaaaaaaagactctttattgggcatttcgggggctaattcacttattttccatctgtgctttaacactgcttcttctctcaattccaaagacaaatgattgtactcattttcatacactaagttcatcaagagtgggaggccgatagaatgtagatataacttatctgaacatcctttcgttcagtctgcattttgtgatattaataggcatctcttaggtttttgtgttgcaggatgtaagcctttcaagggtagtaaccacatccttgaacttggttggtataatagccctctcagttccatacccacagggcccttaatagtattagatgatgatgaaacactctgacatcagcttgcaagtcgaatgaagtcaggcaaaaagtgttccacagaacctggaggctgcttgagagtgactgcttaaaatgcataatcgattcaagtcacatctgtttggaagcaataaatcctgcttaggagaacgtcaaaggcaaaagcattgccggactatgaaattccacctctgaggattataaaacaatgtgcacagagcaaacacatctcccaagtataatggggaagccagagatgattggcaggcctgacaatccatcctggaaaatggaatcgcgaagggagcacctcacatgggtagcccagaaagcccgcaattaggtgttcgtcccctaaacgttttgagcatggaggtgtctgaagaggcctagcacctctatttgcattccatttcctttttagtttgcaggcccccaaattcaatggagtctgccattcagatcgcatttgaaacccgatcttgtggctttgattcctgagagccctgtctaaacccaaaatgccgactcagcctcctaagtgattagattcgtaacaccgaagaagcgattctttctggtagagattaattcttttactcatactgtgtgactccgcatgctaagaggggttgattacagcaaattaaatctctccttggcagttctctccctttaccccccaaagacctaatatcattatttattaaggggagaaaaatgcttggaaaaataataagattgctttgttggcaggaaggtccccctcttgaaggccgagtgctaaagggtagagaactttctgtgcacctaggggcttccttctgcaggccatggaacaaagggtggctgagggagagtctgtgctctgctgacctaaggaggctgccctgggtctggacaggaagtgggtagcctctttgcctaaaacttggcctgtactgggactaaaaggaagagcttgctttaagggaggctgaatcgttggtatacccttcccagaggtccatctctagggatgaaagtaaacccttcaaaataaaaataaaccacacaactgtcatctctaaacaaatctcgaacaaagtccatcgttaggcggaaaagacctgaaatttgctttactcttcaaactctccgtttttccttctgcccttgtctcctcttcccttttctttttgcttttctttgtcttctccctctgccctttttctccccacccgacccagcatctctcctcctcccctcctattttctccttctctcaaatctattcccctcctccctccctcgccttctcttcttttggttggcaaaataaatgttagctgagatgtggaattacattctgcatttttcacttccttctcttccttccctttcctgttctttccttgtctgtctttctttctgttatttgtgttcggggaactggaaagcacatttgccaaaagcctatattcccccttgccaagcaagagcggaagcagcagcaggagggaaacctggcatttaggaggcagatcgggagccctgccaggatcagacactgcataggatttgggtggcttc

SEQ ID NO: 167 - DNA, 1048 bp, Homo sapiens
ggtgcaagcctagctttggggccattagatctgaatttatgcctaaacatttttagaaacttccagaagtcactatgagaccccattgggctgtagaatattatcagtgggctgttatagtctccataccaaaaattaaaatataatttgtgaaatacagaggaaattttggcatttggggattcagcacagatctcccaagagggatgaatgtaaggctatttatttcaaaatctaaggatgacgttctttcactaccagagttggtctttgaatctacaaaggtcatgatgtcccagtattttgaatctgcaaatattatgatgaataggtatctcaggataattttaaaacttagtatttatcatgctcaaagccttttgtaactatcattattattatagtcatcatcatcaacatcttcatcatcattattttaaatagataggtttaaataaataattattaagctatagtaggagactataaaaatataaagagaactctaaaggtactctagggctgagggagcttacccaaggagaggcagacatggaaggtgcatccctcttcaaaagttgggttcagacttttttggagccagtgtggttgcagctgttggatggtggaagagctctctggattgcccagggaagaggtggtccacagtcacaggacaaagcaagaaacaccttttggggcactgaacacctgttatcttgctgaaacaaagatggcagcctgaaatggttgttagcatcaagttcttttgaaaatgcttattttcctaaactttgcaaaaatccagctatagtaggctttttcctggcacaggctgtgatcccagtgccaatgcctaaggaacttatgtgctgtctattttgggtctgtgtaaagccaagctgtacaaaccctgtcatcagcaagccacttaagagagaccccactttgtgccattttatactggctcacccataatgtacatttcctgcccatgctccttttggtgtgacagaactccataatctatcattataattttctcttt

SEQ ID NO: 168 - DNA, 1047 bp, Homo sapiens
cacagacacaaagaaagacaaggacacacacacccaaagagactcgggacaaaaaaccacacatgcagaaagtgggagactcagagatacgcaccaaagagtcacacagaggcatatacacacacagacatgcagagagacccaggaaaagacacacacttatagacacacaaacccatgtgcaccaaagagccacacagagacataaaaacacataggcatgcagagagacctagggaaagacacacaaacccatgcacacacacacatgcgcagatacaccaatacctagttaattcccaaacatttttgagatctcagctcactttctcagggattccttcctgacatcagatttcttggctatgcaattgcagagaaccccatttctttccttcatgttgcttattttggtttgcagttatacactccttagctagatcacggggtactgtctgcctcttctggagttcaacagatactccatgcataggaactacattggcatcacccagcgcactgtggattgcccagtttggaattctgacctcactactttctgtctgtgtgacctggggcaagttcacctctctgtgcctcagttttccataaaatcatagtacctacctcatagggttgccataaggattaaatgactttgtatagggacagcactgaaagtagtgccaagcttagaggacataccatgtgagtgtaagctatcattattgaatgaatgaatgtctagcataaagaagacacaataaatggtagctgctactactgttattactaccatcactgcatgtgggtcaacttttcaggcaaatgctgcagtggtgggttagggccttttcttgctgttacagacgtgacaatgtaattatttcagctcctccgtagaaaggccccagtgggtaagagattaggcttctgcatcagcctgtctgggcctaaaccccacgtctacactttctagccttgtggcaagtgacttaatctctgccagcctcagtacatttctcatgggcctgttactgcccacac

SEQ ID NO: 169 - DNA, 1014 bp, Homo sapiens
gactagcacagggcaagatggagaagcagctgccctgtctcagtaaagtaggtgctccactgaggtcacagtcctcaccattcccaaggtctctccaaatgaggctgaaagatccattgccatttatcatcttgcactgagcccactttgtttgttaatttaccctctaggcccctatagacatttgagtttgagacccctgaatgaaagaaacagccctacagtgaaaatgagcaaggtacgttcagggttaaagaggagataggccttagattataatgtagctgatcaggggatgtgaggtagggacagcctggcctggcaggctaaagagcatggatctggtagagtaggcagagaggagccattatgctttgttaaatagtgacaagaggcccggtgcggtggctcacgcctgtaatcccagcactttgggaggcggaggagggcggatcacgagttcaggagatcgagactatcctggccaacatggcgaaaacccgtccctactgaaaatacaaaaaattagccaggtatggtggcaggcacctgtagtcccagctactcgggaggcgtgaacctgggaggcgtgaacctgggaggcggagcttgcagtgagctgagatcgcgccactgcactccagcctgggcaacagagcaagactccatctcaaaaaaaaaaaaaaaaaaagtgacaagaacaagccttggaagaacccccagtctccaggatgaggtttctgtcaccctctggatctatctgacccctgagtccactttggagtcaaacagaggtaggcatcaagctgtggccactgattacccatgaccttgggaaagctgtttaaattctctgagttttataaacaatgatgaaaagattgcctaagaatatgaccatgaggattacacagaatgagatgcagtgagtgctcggcacagagcctggttcctcattatggctgtcaccatcactaataaccttgtaaacagcctaggacagtagttaccatg

SEQ ID NO: 170 - DNA, 1065 bp, Homo sapiens
tttctactgattttaatgagaataccttctgtattcaccattaaatatgatggtagttgctggttttagctcgatattatttgtcatgctgattaagtggacttgcattcctagctttcaaagaggttttctttcctttttaataaggagtgggtgttgcatgttatctaatacattgtcagtgtgtggctatttataagttctgtgtgattataccatttatctatataaatgtcccctttgttctatttaataatgcttttcccccttctgaattccactttgaatttgaattctactttgtctgaaatagatcctgccacccctgcttttaaaaagaaaaaaatctttttgcttgtattatttaacttttttgcctatccctccctttttaatcttttcataccattgcttttcagtgtctcgagcagtaagacatttaacaattatcagccccatgcttactttgtgccagacactggattaaacaaaaatggaaaaagaggatagaatgtgctggaaggggtacattcaaacccagtctgaactggccactgctgtgagcaggtttggggacagcagtagatcctagaagggcctgaccagctggggaaactggccaggctgtccagaggtgacaagaggattgtcacccagacttgcccaagaagagtgaatctgagtcttggagagaacaggagtttgggttcttctgggcccagatggcctcagggctccctggaatttggggaccccacagttggtcgccaccatgaattgaggagccttgcttctctccacactgtcttttccctgcctcctcgtggcttctgcttcactcattcactcattctgtcagtgaatgattcttcagcacctgccctgcataggatgccattgtaggtgctgggaaatcaacgggaagaagatggaaaacgagacttcccttatgaagcttctgttctacagaggtgggcagacatggccagaaaaagcacaaggccatttccaatggtggaagggccaggactgctgccctttctgatagcttctctttacacttag

SEQ ID NO: 171 - DNA, 1044 bp, Homo sapiens
aagactccatctcaaaaaaaaaagttctggaggtgaatggtggtgatggttgctccacaatgtgaatgtacttcatgtcactaaactgtgcacttaaaaatggctaagatagcaaatcttatgtatattttacaacaacaaaaaaattacataaaaagtgacctagagggtgaggaggacaggccagaaagatgataccacttgggcagataatgatgtctttttgtgcatctgtgccacacagtgggttattctctttgcttaagaggacatgttttttcttctttacttggaaaactcttagtcttcaaggcccagctgatataacccatttctgttaaaccagacttcactctcccatggtgacttaatcacatccttcctatatttctatagcagtatatatgtcatacgatgctattactatacatcacatgccatgatcatcgtttatacctttgtctctcccactggcctgtgaattccagagcagaaccatgagaacagtatcatatggtggttcagacatcagactgcagagccccaaatcgcagttctgctgcgcactcacctgtaacctcgagcaaattgctttctgtgcctcagtcctttcaactgccaaagtggggatcatcattatatttatctgggtggctgttgtgaggattgaatgaggaagcccacataaagcatggtatggattgctgacacatcataagtgcccgataaattttagctctcattgttatcacttactgtcaaacacggtgccagggacagtgctttagaatgcatgaacaaaataagaaaagaaataaaactgtgtgtatgtatatataaattgtcagctataagaaaaacaaatggagccaagattaaataggaaaagatacggtggctaccgattggacttgacagtggtctcagctttgcaaaggaggctgtctgtattggttccaaatgccattcaggaaagattaggctgagccctagtgagaacactaggaaggttgaccagccatcccattgtggtgcatccgcata

SEQ ID NO: 172 - DNA, 1050 bp, Homo sapiens
gtgatgtaaatgggaatgatgggcagaggcacactgttgacatcatggtattcaaaggaatacaataatatttgtgttcactttactgagagccttctagatgccgggcactgagctgagttctttgcttacattaacttatttcagtgccacagcaattctgggggccgggagggggcaggtaggattatcatccccattccacagatgaggaaaactgaggctcggaaaggtcacatgacttgccaagggcacacagtggagaagggtggggacaaaggtggcttgactaaagatcctatccttttgatcaccaccctcctcagataatctcttctcaaggctggccctctgtagagtcgtctggttccagctaccaaagattctggtttaattactcctggatgaagtgggagtgtgtgtgtgggggcgggtgttatttttaaagttcctttggtgattgtatggggagtgagggttaagaaccactgtcctgcataaatatatgtgtgtgtgctcttgtggggacctaaaaaaagaaaaaaaatatgtatagatgtacatatatatgtgtgtgtgcatattttatcattttatcagtttctgagggctactgtgacaaagtgctacaaactgggaggcttcaaacaacacagatttattctctcacagtccaggaggccagaaatccaaaatcaaggtgccagcagggttggctcattctgggaggtctgggggagagactatcccacacctctctccccgtctctggcagctgccagcattccttggcgtccttggctcacactctcatcactctagtccctgtctctgtctttacctggcgctctcccctatgtgtcttcgtctccgtgtgtcctctcctcttctcacagggacaccagtcattagaccagggcccaccctcatccaggatggcctcgtctcaacgaatcacctctgcaaagaccctgtttccaaatacgtccacattctgaggttccctgtagacatgaatttgggggggacaccattcaacccacaacgtgt

SEQ ID NO: 173 - DNA, 1886 bp, Homo sapiens
atgcaggattggcatgaggctcggctccacaagccctcaagcacacgatgacttccgtctccccaccagaccatgcctgcggtgtggcctgcatctctgtgcctcaaggtggtgctccagctgtcaccaccccacccccaaaaacaaaatggaagagactagaagaagcagccagggaaagtctaccaaccaaaatttcaggaggatttctggaacacaacaccctgttcagtctattgaccagaaaacttggtcacataccacccttcgttacgagaaaggcgaggtgtggccatgagccacttgaaagttccattacacttggacacgacaccaaaagcacaactcatgaccaacaacatttattaaattggacttcatcaaaattaaaaacttcttctctgcaagaaacactggtaagagaatgaagcaacaagctacaaactggggagaaatatttgcaagtcacgtacgtgacataggatatgtatccagaatatataaagaattctcaaactcagacatcaagaagacaagtccattttaaaaattggcaaaagacatgaactcaagaggatactttgcagaagaggatatatggatgacaaagaagctcgaaaagatgcccaacatcattagctatgagggaaatgcaaattaaaaccacagtgaggccaggcatggtggcttaagcctgtaatcccagcactttgggaggccaaggcgggcagatgacaagctcgggagatcgagaccatcctggctaacacggtgaaaccccgtctctactaaaaatacaaaaaaattagccaggcgtggtggcgcgtgcctgtagtcccacctacttggcaggctgaggcaggagaattgcttgaacccgggaggcggaggttgcagtgagctgagatcacgccactgcactccagcctgggtgacagagtgagactccatctcaaaaaataaataaataaataaataaccatagtgagataccaacacccatcaagttaacacggcatgtgctcactcatgtgtggaagctttaaaaagctgatctcatagaagtaaaaagtggaacagaggatactggaggctggaggggttggggaaagggatagatagggagagatgtgttaaaggatacaggtaaataggagaaataagttctagtgttctatgccactgtaggataactatagtttacaataatatatgatacagtttcaaatagctagaaggaagatattgaatgttcccaagacaaagaaacgataaatatttgagatgattgatatgctaattattctgatctgatacattatatgtataaaaataccactgtatcccctgaaaaagaacgattattgtcagtttaaaaacaaaaatataagggtttaaaaaaaatggcctaaatgaaaaagacagacaatactaagtgctgatgaggatacagagctactggatcttttataggaacataaattggtgcagccactctggaagagatttggcactgtcttataaagtgaaacatctatccaccatgtgactcagcagctgcattcccgggtacataaacccctgtgttcacacaacaacctgtatgttgtgaatgtttttagcagctctgtgcataataaccccaaactggaaacaacccaaacattcttcagcaaatgaacagatgaaccatgactccacaataaaaaggaatggattttttttaacttttattttaggttcagaggtacatgtgaaggtttggtatataggtaaacttgtgtcacaacgagggggagttgccttacaggttatttcatcacctcggtattaagcccacccaatagttatcctttctgctcctctccctcctcccaccctccacc

SEQ ID NO: 174 - DNA, 1039 bp, Homo sapiens
gttgtctttcaggatttttatagttgtggattttacatgtaagtctttaatctgtcttcagttaatttgtgtatatggtgtaaggaaggggtccaatttcaatcttctgcatatagtcatatgccagttaccccagcaccatttattgaatcgggagtcttttccccattacttttgttagttttgttgaagattgggtggtcttgggtgtgcagccttatttctgggctctctattctgttccattggtctgtgtacctgtttttgtaccagtaccatgctgttttggttactgtagccttgtagtatagtttgaagtcaggtaacatgatgcctccagctttgttctttttgcttgaagttgccttggctatttgggttcttttttggttccatatgaattctaaaatagttttttctagttctatgaagaatgttggtggtagtttgataggaacagcattgaatctgtaaattgctttgggcagtatggacattttaatgatattaactcttcctatccataaacaggggatagttttccattagttgtgtcttctctgatttctttgagcagtgttttgtaattctcattctagagatctgtcacctccctggccttcctgatttggctcttgccttggctattgttggtgtatatgaatgctagtaatttttgtacattgattttgtatcctgaaactttgctgaagttgtttatcaactgaaggaacttttgggccaagactatggtgttttctagatacagaatcatgtcgtctgccaacaggggtagtttgacttcctctcttcctatttggatgccctttatttctttctcttgcccgattgctttggctaggacttccaatactacgttgagtaggagtggtgagagagggcatccttgtcttgtgccagttttcaaggggaatgcttccagcttttgccctctcagtatgatgttggctgtggatttgtcatagatggctcttattattttgaggtatgttcaaaaggagtggattattgatacatg

SEQ ID NO: 175 - DNA, 1088 bp, Homo sapiens
ctccactgcgtgctgctttagggcactcccagcaggatgcagtttactgtaattcacacaggaatgtttaagagactggcaagagcttccactttcacctgctttcacgttatttatgttttaaaagaggctgccagggctgggagcaatgaatggctcacgcctgtaatctcagcacttcaagaggccgaggtgggaggatcacatgaggccacagttcgagaccagcctggccaacatggtgaaaccccatctctactgaaaatacaaaaattacctgggcatggcggtgcacatctgtgatcccagctacttgggaggctgaagcacaagaattgcttgaaccccgttgtagtgagccaagatcctgccactgcactccagcctgtgtgacagatcaagactcttgtcttaaaataaaataaaataaaaataataaataaataaataaaagagactgccaggaaaggacagaatctagccaaaggaatgtattacaaatggtggaattagagatagttctataggtcactcaggcgaggagatggccttttaaccttaatgaaatctaggacactctggggttttatgggggagtcacatggggggaagtattgggaagataagggaataaaaatcatcacttacctagcctctctgctcacctttaagtccaaagagttccttttcctttgctatctccgtaggcagcactttatgttgtgttttttataatcagaggaaaccgatggcaccataaacttctagaaagtcaactaccaccttggttctgtgtgggaaagtaaaattttatgttttccataaatacaagatgaagacagcatttaaagcctatccctgaattggatagatcattttaaagtgagtttgttgcatttagaaaccatgatccctattggccctacaacaaggcaattttcatatcaggcaggtcctggcatctggggagactggctgtttcctttgttgccagggaaatcatttcaaaatggaaaaaaccctgaatgccagcccccagcaatcttcaaaacaatacacattctttaaaaaaaaaaaaagaaagccaa

SEQ ID NO: 176 - DNA, 1051 bp, Homo sapiens
tctgggggaggatacttccttgcctctttcggcttctggtggctccagacactccttggcttgtagcaacgtcactccagtccctttctccctttcacggggccttctccgtgcctctgagtcctctcctcttctttttttagtttttgagacagagtctcactctgtcgccaagctggagtgcagtggcatggtcttgactcactgcaacctcagcctcctgggttcaagtgactcctgcctcagcctcccgagtagctgggactacaggcgtgcgccaccacacccagctaatttttgtagttttagtagagatggggtttcactgtgttggccaggatgctctcgatctcttgacgtcgtgatccgcccacttcggcctcccaacctgtcctcttcttataagagaaccaaccgttgaatttaaggcccaccctaaatccaggaagacgtcatctcaagattcttaactaatcccatctgcgaagatgcttttccaaataagttttccattctgagattccagatggatgtgaattttttgtggacaccattgaacacactctggctgtttactccatctgccagctgggatactcacaggacagatgaggaaagtgaagcatacggagccctggctgtccatggaaatagaacagagtccatcagcatcctcagagcacatggttttcagctctccttgaaggcgcggacctccagaagggttcacgtcaccttgatgaggggactcgaaggtgaatttgcactgggttccctttcagccaagcatcagtttgctccaacctcttgagcacacagaagttgagaaaaattgttattttagcaagaacactagaggactgtgctgttctctgaaccacgttcatctgattatgcatttgagggtatgaattaatccacgacacaggaacactgaataagttgtgctttgccagtcgggctgcctgtgttttatctgaacaaaacatctgactttaaccccaggcagatttctcttcaggttgtaattattctggaacaaacagagaat

SEQ ID NO: 177 - DNA, 1031 bp, Homo sapiens
ccatcacctggaagaggaggatcctaagctgagagagggaaattcttaaatcagctcatgctggactcgtcttacgttgttttaccctgaatctggaaagcatagcagagtcatggggtgggactgcctgaaacggcggtctaaccactgctggtatagaaacttagatcttgcccatcaccttacccttgaccttccctcttcttccataaaccgtctgtgggatgagtgtgtgttgtgcgtgattcagcttacaccagacttgtcacctgtcattcaacagggtctgtaactgttgctttagtttcagaggcacccgtttttcttgggtgtttggaggcgagtctggaagtatgtttcagggaagggaccagatatgtatttcaaggttcagcatgttaagttgtgcttgctctccaggcgctcagctcagcccccattaaaaaggctgaactggagaattgtaacaacatacagaggggtcctgagagcctgccccacactgcgaccatgatggtctgttactggagaaggtttaaaatgtagcatgcagtctaagcatgattttaactcgaggcagtggtgtggttttagcaccaagctagaaggagatgggttattaatccttttgacattccctttgaatagcatcatatttcaatcctgttaagctgtggggccgttgtttatcggactccctccaaaagcaggacctctgctgtgctgaagctgcaaaacactgcccagctctgtgcctttcggtcgacagtcggcttcagccttctcagctgacccctccacctcatcagctctgagatcaactcaggcagctcccagctgcctcagctcacccatctgtcactggccaaggaagggtcaatgggcctggtgccctttagttggaatgtcgagaaaaggaagaaggaaaactgcatctagaaaatacttttttaagttggagggtaaggtagtcaggcatgctgaagaatccaggattctaaatgtgactatctccatgccttcagctgtct

SEQ ID NO: 178 - DNA, 1892 bp, Homo sapiens
caaaatgaggtgacacttggcaccaaagaatggcacagcctggcagcgaagctgtttcctccattcgcagcagagctgttggaagccggcagcgcacacatcatcctcagaagggactcctccaaaacctcagcgctccgaaaacaggctgcgtgtgtagcttgatgttcgggggctggcagatgagccagtaatggatgtttcctatcctgagagcacatttttctccgaggaccatatcacctcttagggcctaatacaggttgatatttttcctttaccctgaaagtctctgcagcaaatgtgcagtcagaaccatttttctgattgaactaaaagtatcgcagcttcattttcttttccctttgggttaagtcggtatttaaaaggcctctccgaagagtgaaactatctctaatttagaaagctccaaatctccatcacagagacgcaggccgcggtggttgacaaggttccgggctcttgtttctaaacattgaagccatctctacacttaaaatggacgctggagtgtttctaaggatgggggtgaaagcggtgcaactgaaggtctttaatcaactgtggtcagcaaataaaaggaagtgacatttcccttgaaatattgaaaggcttggatttcttcatcagaagtgttttaagagcaaactctcaggttcattcaagtggggcactgccttccaaatgccaatatccactacttaagtgcagagaaaaatgtgtatatatgtgcatgtgtatgtatgtacacgtgtgtgtgtgtgtcagtgtgtgtgcattggaagggcttctcagcttcccacccaggagtctctgtttgcaaaataagtgtgtaggtcatgattatttcacatttaaattaatggaagtggatttctctagacatttatcgttcaggcaatgcagcgttctctccaaaatccctgctgcctaagtagaaatttttcaagtcatcttcagctctttcctctccctcacttgagggcatgcagtcagttgagcagattttcttcccctttccaatcttttttcacatctgtctgtttcattccgttcccactgccgcccagaaatcaggccctcataatccttcccttggaccattgcagtaacctccctgtcggcagccttgtgctctaatccatcctggattcagctgctagatgaattctctggcggcaactctctgagcaggtagctcttgtcatcaaagcccactgctcagccctcaggcggagcacctgaaaggctggcatttcaccatgtgcctgagccgtcctttcctgtgttccctgctgtccctagttaacctacatcctcccctctagggccctgctctgcaaactgtgctctgtgaatcctctgcaatcccagacatggctctagccaccacagttactgacccacttggttttgttaaatccatttaccagtcaaagtttctatgtcagtgtttgtcaaagaagagggtgccactgccgggggaatgttccctggcagttcccttggagcatcttatgctttctggcctctgagacttgactcacagcagtcccgccctctggaatgccttctcctccagccctgcccttcaaggcccagctgggaggctcccttgcccatggagggagaggtaacatccttggacacctggccagatgtgagcgctctctcccctaggcatctctgatttatctgtgtcgtccttggatgtgcatgcttgcagcctacagcattattgtctcataacctcccactcccccctactcactggatgtggactctgtaggcacagggattcgtgtgttcatctcatgtgtccattcaacaaccatgtaccctggcatgagctttcccataccaggtgctgg

SEQ ID NO: 179 - DNA, 1107 bp, Homo sapiens
gtgcccatctccctggtttatgttgccaccacatttgtcctcccgcttgatgtgaattcaaaccgtggtaggcggtgtgccctcgggactccactcagcattttgtatggccccttaatcacctgcttttcagagagtacagaccagatttcccccaacctggcatgtggacgtccttgcggggacttttccattttggagggtttccgcatatcacaatatcctttttgtaataaaaggaagagaattgctgacaattttcacaaatttaggctcttgcgagaataattttctctgaattatgtgtgattctcctttttatgtgtccctaacatttagtttgcttttggtgcagccgctaagctgactgttaaatatttgtctctcctgccacttggtcttcaagctgtaggtgtttagcacacgcgggcagtgccaaggacctcacatggcgaatgtcactggccttctggatccccacaaaccagaagcagtgaaggaggagacagaactggggtttaatttaactcctaaactactgaatccgcaccctttcctttctgcttttatcttagggctacgtggagggctggatccttaggggacatcatgaaagcaagaaccaccccactccgccccagttgcgcctgttaggatgggttggttggttgacatgacataaaaagagaaggtagggggtttgaggtcaacatttttcaacttcacagtctgagttgagggctgggattgtctgagtctctaagggtgcaggcttggtttccaagaacagcgggaacctggtgtggctcccatcataatctacccacagtcgccataggaccaacccacactcaactttgcacatgtactctctgcttgctggtctttccacagactcagcttctgcaaggcagggatgatgcccagcatacaaggtagtaggcaatgaataaatcttggtcaaattaataaaataataaccaattttgattatgattattcagttataggttcatgaccatagtcaacacatttacgctgagtgcatagcatgtgtcaggcacctatgtttgatgttggggacatggcaggaaatagagcaggcaa

SEQ ID NO: 180 - DNA, 1031 bp, Homo sapiens
gccctcactctctcccttgtgctaccatggaggtcctgtgtgctgaccaagcacttgtcccaagttgctggagcgggtcgtttatttgctctgcatccgaggcctgaatatgattggtgcttcacttttaaatgcgtgcatgaataaatggacttgtctttctcccctgtgacataatccagaagaggaactctatcttgaccatctttgcctccccagcacccagcaccatgcctgaagcacacagttgctcaatgtcgggcatgaggatgctagaggagggggcagctggtggcacaggtggctatggttgcctcagctcaggcaaatcccatgggcatgtggagacccagagacctacagtttttttcttgggtttgttggcttttagagttctaacagttccagcctcttctcttgggcctcctggaagggaatgtctgtcagaatctcccatcaggtcctgaaatttgagagcacaactatttacatattgaaaaggtcaggatagcgtgtgacagttttactttgattgaactagtatctttttatttttctcttacatgaggctgagctacttgctgaactgaaaaggagagggagggagaaggggcacttccccccggggtttcaagacctgctgagcttcatagccaagaggttctcactccccactcaagtgtcagctttccagaatggccccttgaagacaaaaactctttcaaggcatattaaacaatagcaaactctgataaaattccattctggtggcatgttttatgagaaactgatgaggggccctgaaatgcatctcaaccttgatgtttgagccagaatccaaatattccctttctgttaaccaattcaatgttgcttctctcttgtggttgtttttttttgggttgttttttgttttgtttaggattttccttgtgggaagccacattcaccttcttgatactatgaaatggctatacagaaaaatagaaccatccccaagcaaagattcctccccctttggaattgtccca

SEQ ID NO: 181 - DNA, 1065 bp, Homo sapiens
tggttccttatgtgtgggcatcattaacctggccatttgcacacattattaataacactagcagcattaataatggctacagagatgctttatgtgttttccatgcactggctgagtatcttactcagtattatcttatttagtcttgactgcaactctgtaaggtaggaactattggccccattttacagagaagggaatcaaggtccagtgaggttaggtggcctgtccagaatcacatggctaatccctgatggtggtagttttttttgttttgtttttgtttttttgttttttaattatttaagtgtaacaggccaggtgtgatggctcacgcctgtaatcccagcaatttgggaggctgaggtaggacagtcacttgaggctaggagttcaaaaccagcctgggcaacatagcaagatcctggtactctacacaaaataaaaataaaaaattagccaggtatggtggcatgtgcctgtagtcccagctactcgggaggctgaggcaggaagatcacttgagcccaggagttcgaggctgcagtgagctgtgattatgacactgtattccagcctgggtaacccagtctctttaaaaataaaaacaattctttaaaaaagtgtaacatgcatccagcaaagtccatagttcataagtaaataactagaaggattttcacagggaccaaactcaagcaagcagcactgacatcaagcaaaagaggaatatcaccagcacccggaggcacctgtgacccctccaagtcactacctgtccccaaggtcatcactgccctggctccttgcagcagtgatcctgcagctgacccagaaccgcctgagcctggagctacccatgggcagtggtaacttactacagatagaccttgaagttcaagtggcaggagatgatatagatgaaaggaagtcttgctaggaccattgaatcgccttatgacctaaccaaaaggtctggccaaaaatccagacagatcctgatctggacagtgccctgcaggccagcacccagcaccatcccagtgccctggacctgggagtata

SEQ ID NO: 182 - DNA, 1025 bp, Homo sapiens
gtgtgtgtgtggcatgttaaggcggtggaggccactgatggctttcagcaggataggaatggacccccgacttcggtggcatggaggaggcaaggatggaggcagagaccagttaggaggcaactgcagtggcctgggcaggaaatgatggcagagcaaatcagcaccaggcgatggcatctccgggggtagcctggctttgctagaccaaggaaagagaggattgagagaggagccccaaggacccactgcattttcccaggctcctttaagatgtttttccacatgcacggcacgtccttgtgcttcgtggctgacttctgcagcgcctactccatgcagcttagaagttaggggctgagaatctggaggcagaccagctgggttcaaaccccaactctactagctattagctatatggccccaaaccaattcattcacctctctccctgtatctgtttacctagctataaaatgggaatgggcataacaagagtacctggttatagggttattgtgaggattaagtgagtgtgtctgtgcctagaatggtgggtggcacacagtatgtgctccataaatgtttgctttcattcttcctgctcagagctttccttacgctctgtgacttgagacagatcagaacagggcctagtttgtatttggaagccagtctttcattcttcctgctcagagctttccttacgctctgtgacttgagacagatcagaacagggcctagtttgtatttggaagccagtgagacctgagatataaatcacacttgtgtgccttccgggtggctcctcctctggcaaacaagaccaccctccccaggccgtgccctcgcctgttaggggccccatgaaaccacacagcccgcagcctccacctgaggaaattaaaaaccagattggttatttcagggtaatcaaaagtaacaccacaggtcctgaccttttgttcacgagcagttacataagcagcgtttgctaaaatctcaccttgagcctcagctctcctct

SEQ ID NO: 183 - DNA, 1047 bp, Homo sapiens
gaaaaaaaacaaaggaagagcaatatatcatgacctgtgaaagttacatgaaattcacgtttcagtgtccataaagacttattggaacccaagcgtgctcattcctttagggcttgtcgaaggccgcttttgtgctacagtggcagagttgaatagtcaaggtggactatatggcttgcacagctgaaaagatatttattcatctaaaattttattttaaaaattgataatgaataatttacttaatcataaataaaagataaaattaatattctatttactcatctttatagaagaagcttgccaacccctggtctagactgtgtagccagtgagatgcctcagtcgagtgcccatccttggagtgggttgaggcagagggagtgaaccactcaccgagttggaccatggcgtgacagtggcagtgggtttctagcagacagcaggtatccatgctggacagaaagaacaatgagtgtccatgcccccccactgtcttgggctgggatctcctagaaacagaccctgaaacaaatgtgtgagtacttgacctttatgcaggagggcatccctgggagcactggtgtgtgtgtgggcagcagaatgggagtgagacagggaaggaaaggggaggggaaggaaagaagtcaatatagggtacattgttgagcagtcaccacaagggttcaatcctgctgggtgtctcagtgtggagcacacccctcagatatcccgccaaggggcagggaaagtagggtatccgtcctctaccccccccaggccctcatcataagcatatgggttctgtcttttctgggtgattgtgaggcagcccctttttccatctcctgtgcagtgaggatttcatgaagtcttgttgatgtacaggtgcccgggggaaagcatgagtggtgaccaggagcctgaagatgagagctctcttgttcctcgtcccggaacccttgctaatagaccctggagccaggtgttgccgctccaaggctctgatgacatccatgcttcaccagcaggtggtggccgcctcgt

SEQ ID NO: 184 - DNA, 1040 bp, Homo sapiens
atgaaacaagatcagaccagcagctaaaccagaaagttttgagttttctctaccctactgcccttcaccctttctggtctctggttcttaaagaccaaatcgagtttctgagaacttccatgatggctaggcattgaggacagcctgccgtggaaatggttctgaaaccatcggctgttacaaggggctttcctctaggagggcgatgggaactctggctcaaagctgcaagctgaacttgttgctgaaataaacatttcagccaggctgtgcggtggctcttcctcgaatctcagcacttgatcccaagtcaaatgtggtgctcagtttaaggagctgaaagaggtgccctgttggatgggagagtctgtgaattggcactttcagagatgtggggaagggaaaagatagagggggatgctggcttggtgggatggaggcccgaacaccttgaattgctcagggagaatgtcctgagatcggcaggtgatggccctgtgatggtgacagctctgacctccagggtgcgtgacccagggactagagcaggaggtgcagacagtggatgtttgcacaatccgcacctgcttctgcctcgattgcgttttactctgagatgttccacaactcactttccctgttggcaccaagggaataactccttctgaaggacggatcattccagagccccctcagagtgaaccaggtgctcactggaggttcttaaactgggaacaggaatccggttctttgatctttcattgtccattcattcggtcacatttcttgagcatctgctccgggccaggcactgttgtagctgccagggatatggcagcaaaggagatgactgcagccctggtttccatggagcttatagtctgtgggaggagatttccagtaggcaaataggcacaggatatgtccagagatggtgtaagtgctatgcagaaaaataaagccggggaggggttagaatgatgggagcaggtgctgcttagtttttaggtagggtggacagaggagcacgttctagaatg

SEQ ID NO: 185 - DNA, 1037 bp, Homo sapiens
tgcagggtgtcttgagtctggcagcagtacccacaggagaaagggaataactcagtggttacaagcaacagcaaacttcctatgtttaactgcatgttctctctgtggctcagtttcttttgtaaaatggggacatcccctagggtttttaaggggattgagaattcatgcacatgaagatttcagtcaatctcaacacatgtgaaaggctcagaaagcataactgttatcacctgggcaaaggcgacaagcacattcaagatcagagcaaagatgcatttctttcctgccacgtgctatgcccacacaagtacagaaccgaggaggtgccctagtccactggcaaagactcccatcccctctgccctgggcagtgggctctgccggcctcctcatctctgattcttcctttcagaactcccctcctctgctgggtacctgctttgttgaatacgttaataacattcatcctgtcactgcttagccttggggtcctgggagtccctgtctcttaatatgactttgcccatgagagtcattgtgtctctgtctttttttttaatttttattttatttatttattcattcattcatttattttagacatagcctcgctctgtcacccaggctgggatgcaatggcacaatctcggttcactgcaacctccacctcccaggttcaagcaattttcctgcctcagcctcccaagtagctgggattacaggtggccgctaccacacctgactaattttttgtatttttggtagaaatggggttttaccatgttgaccaggctgacctcgaactcctgacctcaggtgatctacccgcctcagcttcccaaagtgctgggattaaggcatgagccaccatacccatctgtgtctctgtcttaaagctttaaccctccaagggcaatatgattccttatttttaggataagcatcattccagtgtactaagatcacatttggacctgatttgggcccaactcaataatagcaagagtggtggccaagggagcactcacaacctc

SEQ ID NO: 186 - DNA, 1046 bp, Homo sapiens
ggcctgagagactggccttggctccattttcagataagagatcagaggttgcttgtccacaggtcaaatagctgggaagtgggggagccaagactgagccccagctggctgaccccaaacctgcatgcccgcctcagaactgcactgcgtgcctcccaagaacacggcacagagcatggtgtcgggtgttgggtgtgagcagaacagagtccctgccctcatggaatggacaggctgactccatggccacacccttctccaggggctgtgtggggagtgtccccagtggagggccagaaccaccatgcgctgagtggctgactcactcataccctgctgaggggcatgcccccctctgctggcatccaccaagccaagcctggttgccacctgggccctgctggttcaggaagcccttgtgtcacccacagaccttgctcctctccttttggaaggtggtagtgtgggagttgaggctggaggtgctggaaccagaccatctgtgtccaaaccctggctctgctcttcaccctgtgtgaccttggccaagccatttaactcctctgtgattcaacttccccatctataaactgtggatgataaaataggatctgcttcatggagctactgtgagaattaaactagttaagtaggtaaaatacagcaaagcttagaacatatagtatgtgctcaataagtgttaagaaagatgtaattgttattataataaataataatcataatattattgttacttagacctttggcttggggaggctggatttacaaacctacgattcaccaagagtcttagcagtctgagaggtcgccttctgttaaaaggtggctgctgtagctctagccattgagtccacttcccagaagtggagaaagtggagaaaggtggagaaagaggtaaagccttatttttgtaagagtcattcctcctaaaggacttttttctgcacctcactgcccagaagtgtgtcacatggacaaccctagctgcaagggaagctgaaaatagcatttttagaaagtgggac

SEQ ID NO: 187 - DNA, 1056 bp, Homo sapiens
ttttccaagtggccaaccaggcctgtagatgagagtctatcccataggcattcctgcttcaaggagttctaggctgcagagactgtcttaagtccagcggggtcggtggggctggaagactaaagctcccagcaggtgcagccatgccctggctgcctttgcagatgtcaccaggcctgcagacagtggggtagtaggtggcctgagaggctgttgaatagaacgatgtgtcatctgtgctggggcggccatgcccacttgctttcttagacacacatccttgtcaccacagcactgtgtgggtttgaaaagctacttgatgtttcctgtgtcccttcccacatccgcactccattcttagtctcattccctccatcaaagacgtgttcatcttctatgcagttcatcacctggggttgaatgtgtatgttcctctttagtaaattcatacgcttgaagctactgctgtttctttagcctggtggctctcggggctgctgcagggggcccaccctgagccagcccctcggtcccacagccctgacgtagaagactctttgctggtaaatctcggaactcactggaagcttccacaaagtttaactctacagacagaatgtcttccttacatactaccggctgcttttaaatattgttaacagatcccccttaaaggcttcttagactccacattttgatccagttgataataattgatggtcaggtggaagaattgcccaggctctgttgttgttctgttatagttgccactggacctgctttcagcaccctcaccctggctgcttcagagggcagctggattcctaaaaagaacccatgccctaatgcacaagtactttttattttattttatattatttttcgtggggggacagagtcttactctgtcgcccaggctggagtgcagtggcatgatcttggctcactgcaacctctacctcctgggttcaagcgattctcctgcctcagcctcctgagtagctgggattacaggcgcccgccaccacgcccagctgatttttgcatttttagtag

SEQ ID NO: 188 - DNA, 1013 bp, Homo sapiens
aggaaaaatgagggaggcaggagggggaggtggggtggctggaggaggctggtggctcctagactgcgtgtcttcagtgtgagcccctgcaagagcatgtgacgccctgacaaggcggcgtaaccaggcaaccgtcattactcatccccatggccactgggtcttccagtggagcaccgtgctcctgggggtcagggctccccagagggacagggcagcctcctctgcagaacagcggggcctgagagatgccaggaaaacgtgcttgctccaagaagggaggggagagtagttaggagctggaggcccagccttgccgggaaagtggtgtgccacagcatagctgggagctggggcctagctcccaaccctgaatgcttagtggggtttctcgctttttgctgtctctgttcctaaaacggatttttaaatttcaagtgcgtgcttgacccagtagcacagttctgtgcattaaagaccttagcccatgaagcatagaccagtcttgtgtgttttgtaaatccatgttttttaggtattaacagaactcccactagcttatatggagtttttatgcaaattggaaaaaggtacccactctgtgtagacagataaggaaaaggtgctcttctatcattgaacacagtcctatgcaaccccatagcctggtgatcaggcagtggtatctgcatgcaaccccatctctggggggttatagccctgtggcaggtttgctgcggaagcagagagatgcctcctcctccaggttgccggagccctgcgctaagctgcacaatatgacaaacacaatactggctgcatttcagcttccacctaactcacctatcaggcacttttgggcagtacacaagctgtgcgactgtccatggcagccctgggtataagtcacggccatccttgctggttgtggttggcataaggagcaataccctctggatttcatcttaaaagaatttaaggaagagaaaggggatgcagtgccttttcaacat

SEQ ID NO: 189 - DNA, 1056 bp, Homo sapiens
ttttgtgattacagagtagagcaaatgtggctgggcatagtgactcacacctgtaatccaagcactttgggaggccgaggcaggcagatcacttgaagtcaggagtttgagaccagcttggcaaaactccatctctactaaaaatacaaaatgagccaggcatggtggtgtgcacctgtagtcccagctagtcgggaggctgagcatctacatgggaggctgaggaatgagaatcacttgaacccaggaggcagaggttgcagtgagctgagatcatgccactccactccagcctgggaaacaggcaagactctgtctcaaaaaaaagaaaaaagaaaaacagagtagagcaaataagtaaatatatactgttaggtaccagggttctctctgtgggaaaagggccttctcatatggaatgggggaaggcggtggattggagttggggccatcattatgctcttttgatggtataaatatgcaattgacaagtcataaccatagaaagaagagcaagaagccatgtccccctgtagcaatgcatgtatctagtgcccacatctctctatttcttgatgccagtctccatcagaaggagccaggtctccttggacaagtggaggatgccaggcatgaggcagtggaaagtaaaatgcaactagagccctttgtccttccagaaagcaagaatgcattcaaagacagatgggtccaaaagacccaggcactggctgaaagggactcctgctggcaaagatgggacaattgaacatccaataaaataataaaagaaatgggtgattcaagggggaaaggagggcctgtaatcccagcactttgggaggccaaggcgggcagatcacgaggtcaggagttcaagaccagcctggccaatatgatgaaacctcgtctctactacaaatacaaaaattagccaggcgtggtggtgctcacctgtagtcccagctactcaggaggctgaagcagaagaatcgcttgaacccaggaggcagaggttgcagtgagccaagatcatgccactgcactccagcctgg

SEQ ID NO: 190 - DNA, 1058 bp, Homo sapiens
agccgcttatgagatacaggatttgcaaatattttctcccattctatgagttgtcctttactttcttgatgatatcctttgaaacacaaacggttttaattttgatgaattccgatctatctgtattttcttttgttgctctacacttttggtatatgtcttagtgcatgtttttaacgtaatacttctccccacggaagaaatgaggcaggaggggctgttgggctggactgagtggttccagtggactcagggtggcccagggttccttttgagagggaactgaggccctgtccgattcctgagccatgggcccctggagcccaccaggcctcagttcttcgtcattgaacactcagccagcttagggctgggaaagcagtttcgacaacgacttgctccctggtcagattgacacagctgagaggggagaatcggggctctcgacataggtgagcctggcttggaatcctgggaaggccaccaagtggcaagggcacatggaagggacatttcgtctttctgagccctgttttctcacctgttacaaaggtgacggcggtgatgccacttctcagcactcaggcatctggagaggacagctggggtcttgggaactaactctctcctttatccccagccatgaaagctgatcggaagcgcttaaagggcgagaagacagacctggtgagccagatgcagcagctgtatgccacactggagagccgcgaggagcagctccgagacttcatccgcaactatgagcagcaccgcaaggtcagccgccgccctgccctcccctcccctcccgacacaccagctcccacctcccctgctggctggccaccttcacaggctctgcctcttgaatccccaaacacagatagggaggcccttgatgtgtccagccaggcctaggcaccgagataaaaccggcacaacccccggagagggatctccatgtctcctgggcaaacaggacagcgtggactcaggagtccggggggttcagatcctggctccttgtgtgtgtgccctcgcaggtctcgcttgacctc

SEQ ID NO: 191 - DNA, 1030 bp, Homo sapiens
tcgttggtcatgccgttcagtggtttttagcatgctgacaacattgtgcagccaccactgctgtctaattccagaacagttgcatctccccaagaagcaccccgtcttcatgcgcagtcactccagtgaggtctgtattcttacggtttcggagctggagatcaggcgatcctgtactccatggggtgacggctttgccgggaggcttttgacgggagtccagccatggcctgaaggaggcagctcccttaccagccttccctcagtccacaggcctttcccaccagcctccctagtcacatgtggggctgggagacagggctgcctgctcctgagaccatgggcatcccccacacactggtcctgtccctgggagcccggctcacacggacctcgctgctgacgagcgcggcttctccagcacgggaaatgctcttcagtttacggtgctctctgtaaacaagggcaccatagacgtttggggccacataacagtggtggggctgccctgtgctctgtagggtgtgtggcagcttccctggcctccacccaccagatgccagcagcaccccctccaccccagccccccagtgtcacagcagtagactccagacatggccagatgtcccctggagtgcagaatcaccccagactggaagcacccctccatcaagtaggacattttgcaagaatcagacgttcctatctgtctgggcctgggctgtttgagtctagcagagtcccagtttgggtcctgttattttctgtctgtgtgacccttgacaagggacttaacctttctgagcctcagtttcctcctgtataaaatcagaactataggccaggtgtggtggcacacacctgtaatcccagcactttggggaggccgaggcaggtggatcacctgaggtcaggagttcaagactaggttggccaacatggtgaaacccgtctctactaaaaatacaaaaattagccaggcatgatggcaggcgcctgtaatcccagctactctggaggctgaggcagg

SEQ ID NO: 192 - DNA, 1013 bp, Homo sapiens
ggtgcactgtggcctccggatcagcggaacctcaggccctcctggttaacaggaactgccattggccccagccaaaaggcaggtgagggcagggccctgtgctgccatctccccttcctgcctcatgggtctcactgcccaggctcagggagcgcataagtaatcctaactgagcactatggctgctctgagacagtgggccagaccggatccttgaccctggtgtgaattactcctcacatcatccctgcttgtgaaatagagactctttaataacaatcgctaatatttgttgggtatttttaccctggaccaagcactttcccagcaaccatgtgagggaggaactgtcattatccccgttagacagctggaggaacgaaggcacggagaggtgtggagcctaccttgggatcccacagctcagagtggcagagccagaaccaaatccagacagagcccaagctccaaagaactgtgccagggcctggccacctcatcacacaactccagagggtgctgcttacataaacatggtccctcttgttttcaccatcttatattgtgggaccttgaagttcagaatggtggagtaatttgctcaaggttacacagcaagttaagtgggagaaatggagtttgaaactagttctgtctgacttttgtcaaatggatgcatttgtgtcaagttaacaattcccaggagcttgacgttccaagttctgagtgcttggaagaggctggaggctcagagaggagaagagaagagtcagaacccaaggggagttcccagcattaaattgcatttagtggaagagattagtcagagaaatgtgtcaattgccacaggagaggatctaatgcatgtgtgtgtgtacgtgtgtgtatgtgtgtgtgtgtggtgttagtctcttctcatgctgctgataaagacatacccgagactgggtaatttttaaagaaagggaggcttaatggactcacagttccacatggctggggaggcctcacaa

SEQ ID NO: 193 - DNA, 1034 bp, Homo sapiens
aggcttttgtacacctgtaggctattaagggttccctccacacccacgtaaggcagggctggcaacacaatggaaatgtcctacctgcccatcctagggacctgtcgtctgaggctccctaggaaaaagggaaggagttcagacccctcctggggcagcccaaagctcaggaccaagtatgcagttaccctggagctcctgcctggaaggagcactgtgccaggaggaatctgacagcccccaattggagctgtagctctgcatccaattagctccacggtagtggactgtctgctgcctctcttgatatctgtgaatagggctaacgagtcctgcctgcccctgcgcaaactaagagattcattgtgtcggttgtgggggaagctagaggctacgtggtctcccaagtttgtttctgtcccaaaattctctattttgtgctttttctataaaagtacatttctttatgaaaagcaccaagtctaaccaagctctagctctaactcagaggacagactgggacaggaacttagacgccctggagtggctaatttgttggtcagaagatgctgggggttgagaggccagactgggcaggagaggaccccaggaactctagggaaactccaggccccatcaataagccatctgggggtatctgcttcaggagatggggggtgggctccccactgcagaggcagggtggcccctgagagatggcatccttccacggaaggccccacaccgcacgggccgcctctgctctcctgtgtcacctgtctctgctgtttcatcttcctcttctcctctggctacagggcgacagtcccggcccagttcagaagaacctgcacaaccctattgtacaggtaggtgtgccctccctggccacttgaaccctccctccaccccaccttgactacaacttcaccctctgttcccctgagcccacatccatgccgcacacccaaggtggagaggatttatgccacttccgctgagcccacgtccatactgcacacccaaggcggaga

SEQ ID NO: 194 - DNA, 1057 bp, Homo sapiens
acagtacaaatgaccacagctgctcactgtactgaatgcctgtggcacaccagacaccgtccttggggtctttttctttcttttttttttttttttttttttgagacggagtctcactctgtcgcccaggctgcagtgcagtggcgcgatcctggctcaccacaacctcctcctgggttcaagtgattctcctgccttagcctctcaagtagctgggatgacaggtgcctatcaccacatccggctaattttgtatttttagtagagacagggtttcaccatgtttgccaggctggtctcgaactcccgaccccaggtgatccacccgcctgggcttcccaaagtgctgggattacaggtgtgagccaccgtgcctggcctgttctcagggtctttatcctctctttagcaacatcctcgtggcaatcttggaagggtcttactgttgtccctgagaggttctgtgactggtccctgtttgctcagtgaatgaggggctgaccttggcattccagccctggaggtggcttctcagccatcccagcccgtccctgaccccactggcttaaagctcagagaggccttccccaccccggatcccatccactgcagtctgcaccccagctaagcttggctttcttcttctcccccaccctcttccacgtggctcctgactcctcagtcactagaggatcttgaagaccaaaaacggaaaaagaagaaagagaagatgggattcggctccatctcccgcgtcttcgccagagggaagcagcggaagtccctcgaccccggcctctttgatggtaccgcccctgattattacatagaggaggacgcggactggtgatacgcgctcccctgcgcctgctgcccgcaggcgtgtctgtgcgtgtgggcgtgtgtgcaagcgagcgtgggtgcgcgtgtggccgtgcgtggggtgcgtgtgcacgtgtgcgctggcacacatgggtgctgggtgtggccgagcgcctctaacaagtgaaaacacgagtgtgaacctctctcccctgcgtcgccacctctgtaattg

SEQ ID NO: 195 - DNA, 1030 bp, Homo sapiens
ctgtcaaaagaacccatcttccaccttgactcttacattcttctgttttcttttccagacatcttgtgataggttatccctttacttgtttgtctctttcaggaaaagagaagctttgtgagaacaggcctttggcttgttcacttctgtgtttgtagtgcccaacaacccagtggttgctcagtcaatgtttattgaaatgaatgaatgaagtcaacagagatttgttgaggcttcctgtgaacagtcctatgcccagtgttagaggagtcccagaaaaatataaaaagccccagaggcggcagtgagaacacaggtgttcagccctgcgtgttaaactttagttagagagagaaagcgggaatgaaaccagcaccctcaagacgactctaaatggccggtagcaattggctgatacaaacaacctgcatgaacagaacttgagagccactccccgctggccatggcaggaggcttctggaagaaaggggaatagaaccggatgtggaaggagaggccttcaggatggggtaggggaggagagaaaggcaagacacagagagtggagggctgcagaggctggaagatagacccaggaccgtttccctccttggacatgttcaggacattactctggtcttcccctgagagagaacatgtttttctccaccctgcatcattggtgcctggtacagggccctgcacaaagtgcatggtcaaggaattaaagaattcaggttggatgaggtagttcacagcctccctggggagctggggctttatcctgtgggctgtgagggacactgaagttctgatagacacagtggctggagggttagcatggctgggcctgaaagctagggaagacttagaggagtcagttatcaccatcagccaggcctgagaagtgagaaggagatggatgaggcaggaagaatcactgaaaaggactctgacaaaaagaagcaacgtatttgggagccaactgaacatggatatgggcgggagttgcagatgtctgaaaggagcc

SEQ ID NO: 196 - DNA, 1084 bp, Homo sapiens
tgagggtcatggccaaggagtttggattttatgctaaaagtaataaaaacacattgatgggcttttggacattcttgttacaaactatttcagtcattcaaaagagtatatataagatatatgtgaattgtaatgaatagtataataaaacgctcatgtacccttcactgttcgcctccccagtactattcttcactcttcatttctccaggaggtagtgtgtgtgtgtgtttgtttgtttctatgtttgttgagacagggtctcattctgtcacccaggctatagtgcagtggcgtgctcaaggctcactacaggctttacctcctaggctcaagcagatcctcccacctcaacctcccaagtagctgggactacaggtgtgagccacacactgggctcattattattattattattattattattactattattattattgtagagacatggtctcactatagtgcccaggctagtctcgaactcctgagctcaagcgatcctcccaccttggcctcccaaagtgctggcattacaggtgtgagctactgtgcctggccagaaggtagcctgaatttgtcctgaattttagtttatagtctttgcgtttcttcctaatattacaaaaatagagcaacatattgtttggttttgaacttcatttaagtggatttctgcagtgtgtattcttctgcagtttgcttttctgttcaacattatgtttgtcaggatcatcctcactggtgcacacagctgcagtttactcaccttcactgctgcgtacgtaatactccacagagtgacacgttgtggtttatcctttctcctgggaccaatttctaatgttgaaccaaaccctgcattcttgggataaacccaacttgattatgatgtgttatctttttaaaaaatatggttgggctgggtgctcccttctgtaatcccagcactttgggaggccaaggcaagaggatctcctgaggtcaggagttcggaccagcatggccaacatggtgaaaccccgtctctactaaaaatacaaaaattagccaggtgtgggggtgtgcgcctgtagtcccagct

SEQ ID NO: 197 - DNA, 1127 bp, Homo sapiens
tagacagactgtcagccatcactggtctcacacctagagtcattcaggttcctcctgagagagacctgaagggttgactccaacccctctccccatttgacagaagagggaaccaagacccagaaagatgtggcggtgacttgctcggggttacggagaggttctcagtgaggctgaaaccttgtatgatgaggagagtggtcccggtgtctcagggtggggctccgaggacatgacacacttagagttctgggccagtgccaggcacaaggaggctctgcgtctccctggccctcgcagccaggactctccatccccgtctccgtgcggcctcaggctacgtccagcatctctgatcccccagctgctccctccctctctttgctcctccagggctggctctggaaccctcctgtcagagaggcaaagagaatggccctggagagcctcgggagtgcccacccctgggctgacaacagcctagcgggggctctggagggttttgtaagttgagacctgctggaaaggtaggcagccgtgtaattctgaacctgccgtggaatctgaggacgatgccctagatccctgtctcccgcctagcacagccttgcaggccctgtccccactgtcatccccagccacttcatctcaggacaccttacgtcagagaggcaggctttcctttccttctggccagctcttccctgcacaagctctggaagcctcccgccctcttctccacacctccacctccaggggacacacctctcccaggagcccttcctggacgcagtcagcagggcctctggagtctgcagccctgggtttgaatacagctgtgggctgtggagcccttctgagcttctgttcctcacgctggaacagcggggacagggggacccacgttacagggttgttgtatggcgcttagcccagtgcttggcacagagcaagtcgttactaaatgactgtcaccgccatccccagctcagcatacaccctctcctgggcccctcatagggccctggcagtggtcattgcggctggctcagaggcagctccacagtgcccactggctgcctccacttaaccaccagcggagcttccaggtctgccaggttgtcgac

SEQ ID NO: 198 - DNA, 1040 bp, Homo sapiens
aagatgtcctctctttttgcatctgcaggtatgatgccgggcgggacggcttcatcgacctgatggagctaaaactcatgatggagaaacttggggcccctcagacccacctgggcctgaaaaacatgatcaaggaggtggatgaggactttgacagcaagctgagcttccgggaggtaagcccggcccccagccccactcccctaccaggggcttcacctgaggacctggtggcccgggagagaccaacccccaccctttgtcaatgaatgaatgacattgccattgaacagcagctgtgagcagctgctgcttggctgagtgaggcttcagagggcctgttacagcaggcaccagggagggttctgagatcctctcggggaggaagaggagggagggacagcccttccttcacatagggagcatatattgagcgatttctgtatacttgaccctgtgcaggctctggggtagagaaaggccctgtgctcgaaggttcctggaagtgtagagggggagacaccacagaaggaaatcagggctgtgatgcagaggaagagggccacggcactgggtgacttcacgcccaggatctcactccgagacaggagctaggggcaagccggtttcgcagggaaggaaatggaggcccaagccagacagcgatgatactggaccccaggaagtacagggatggaccccaggaagcacagggttaggtgtggggactcgaggcccaactggggcccaggaggtctggcaggaagcatgaaggatgcagggaaggagagaggtggcaggggcaggtgggggagtgcgagtggctgggcgggaggtgtgggcagtgcagggtaacagcttagagttcgagagcagggttccatccctctgacacgttcaggcgctgagacttggggtgtcttttactgtcatggaggctccctcattctgtcatgacacctgtaggactcaatacatggaacgcagagtaggttcactgggcaacagcgggagacagaggtaagaggtaggctgaggcc

SEQ ID NO: 199 - DNA, 1010 bp, Homo sapiens
ctcacctcaacctccgcctcctgggttcaagcaattctcctacctcagcctcccgagtagctgggattacaggcatgcgccaccactcccggctgatttgattttttgtatttttagtagagacggggtttctccatgttggtcaggctgatctcaaactcccgacctcaagtgatccacccgcctcagcctcccaaagtgctgggattacaggtgtgagccaccacgactggctgcatttattttcttcctatgtctttcaagctgcttacaaaaaagtcttttggatgaaccttttgttgttgtttagatttttttcttcctttatagattctttcaaatgaagaaaagagatcaaattatgatcaatatggagacgctggagagaaccagggctaccagaagcagcaacagcagcgagagtatcgcttccgccatttccatgaaaatttttattttgatgaatccttttttcacttcccttttaattctgaacggcgggactcaattgacgaaaagtatttattgcacttttcacattatgtgaatgaagtggttccagatagcttcaagaaaccctacctcatcaagatcacctccgattggtgctttagctgcattcatatcgagcctgtgtggaaagaagtcattcaagaactggaagaattgggtaagataattttattcactgaaagatatttatatagatgactttttttttttcaagatggagtcttgctctgttgcccaggctggagtacagtggtgtgatctcggctcactgcaacctccacctcccgggttcaagtgattctcctgcctcaacctcccgagtagttgggattacaggcacccaccatcacgcccagctaatttttgtatttttagtagagacagggtttcaccacgttggccaggccggcttcaaactcctgacctcaagtgatctgcctgcctcggcctcccacagtactgggatgtcaggtgggagccaccatgcctggccccaa

SEQ ID NO: 200 - DNA, 1062 bp, Homo sapiens
tctaattcaggtttctgtgtgcgctcggtctggtataacgtatactgaatggcacagttactagaaaggcatatttcccaggatcagttcataaattggcattcaatctatatagcaatccctggtaaggtcatttagggtgagtcagtcactgagaaattgatccctctaatgttcagaacctggggcagaactggtcattggaggcagtaagaagtccaggctttgtggtcagctagaactagattcagatcctggttccactgcacacaaaccatgatgcctcaccctcccccagcttcagtttccttagccataaagatagcaatacttaccttgcagaatgattgtgagtatgaaaagtataatgtatataaagctctaggtgtgctaaagaaggcactcaagaagtgataatccctcccttgggcctttgtcttgtagccagttgacctccctaggtgatgtctcttctgtctttacgaatgaccaaatctcccaatgtatgtgcctgctttattctttttctttcttctgctcatataattctctgtatgcttccatttattgacattgttccatagttatttttaatgactgcagtgtgatatagtatactgtacttggctctagagaagagccaagaatccaatttggattcttgttctgcaattctgtcagctctgcaacctggaaaaagtcactttacctctctgaacctctctctgtatctgtaaaatgagggaagcggactatacaattcctaaggctcctcctttcctgcccttgagagactgcaacagtcaaagtcaggtagcctacagagagcttggtttagtctgctcagcagttttaaaacattaagtttgggatccctgccatttactcagcaatttcattttaggaatttactaattagaaaataagcgcacaagagcacaaagatgtatgcacaaagatgtatgtacaaagatgtacaaggatgcccgtcagcattccttataatgttaagaattaggctaaaagcaactttaatattgtgctttataataagaaatatat

SEQ ID NO: 201 - DNA, 1072 bp, Homo sapiens
aaggcatgacacttattaattaattaattactcaaactaaatcgtttaagtgaagtctgtaggagactaataattgaaacagatgaagtacagagactgaaagaattaattcctattaatacccatcttgcagaacttacactgtcataggaatctgagcctaaaatgacagtgcctattttctaaacaaaaaaattaaatcacatgttagaaagaattagggatttctttctggctcataaatttgttcatgtgaagatatttgtctttatgcaaatttaattatatttggttatatgtttaacgatcatatctatggaaaatgccagattccatgaaatcaaatattatttttgaaacttcagaaacttacagtgacaataatatgaatgaatttcacaaagaaaaggttgaaatagagaagccagataaagttcacattggtctattatttccatatttaagcacctaatatgtttttttcaatatcttaatttagggatcaaagtaactaggaacggactctcattttgctttaaataattcattctcttaagaatacagggaaagtgaacataaaaaattttcatcgtatttctacatgtgctattcctagactgtcctactgggatcattatctataggagaaatatttgttggaattaacttaaaagtttgtcagagaatattggaggcttctaaaatggtgatagattgtcctgatagatcctcaaacatttacataaaatatctcttctgtgcccggcatagattaacatagccgtttcaagcagctcccaagcgggtggttatttccagtatgttggagcccatcgtaatgagttgggaaaggcttcctggcagaagtgacccttggaccaggttgggttgcaggcaggcagaaatctggagacatgaaatagcccgctttgtaagaagttttcactggtgagcagcagaggagggggatggagaggttattaggaatctccctgtgagggcctcagagcaccttcacgctcctttaaggaacttgggccttggcccacatggagccgttgtaggggtttga

SEQ ID NO: 202 - DNA, 1072 bp, Homo sapiens
agtgtgtttgcagaaggcttttaaaatgtggataccctttatcaggttaaagaaggtccttctactccttgttgactaaaagttctaaccacaattggtatgatttttatcaaatactttttctacatccattagattattctgatttttcttctttaatctatattgtgctaactcatattaattcattctctaatgttaaacctaacttgcactcatgaaataaatccaacaagattatgatttctattatgctttcaatatattgctggattccatttgctaacattttgcttaggactttgacattcatgttcagaaatgagattgacttctaacttttccttatcgtgatacccatgtgttgctttttctcttctcaggaagactttatgtgagattgtcttccttgaaagtttgattgaaagcatctgtaatgccatttgggccttgagcttgggtttctgggtttcgctttaaggaaagatttttgactactgattatttaggttttctgttttaacttctgcattgtaggtagtgattccttcttgtcatctttgagaatgattattttatgccttctcttttgttttcatggttggttttaccagaggcttgtcgattgtattagctttttcaaagaaccagttttgtctttgttaattcttcttcttatattaatatattcatttcttgtttcattaatttctatttttatctgtattatttcctttctacttttatatttttgctgtttttgacttgacagatgtttatttcattaacttcttttctattatgttaattgtaaaattccccttcaagtactactttatatgtatctcagagttcttataaatagtatttttcatcagtcattaaagttcaaaatattttctaatatctgataggcgttcttgttttggttttttttttttcttttttagtcagtcttgctctgtcacccaggctggagtgtagtgatgtcatcatggctcactgcagccttggcctcctatgctcaagtgatcctcacccttcaacctcccaagtagctgggactacaggc

SEQ ID NO: 203 - DNA, 1033 bp, Homo sapiens
tttattatcccttttattgtttcctcatgcagaacttattgagcatagcctattatactgagatacaaaatcaaacttttagaataagctgtctgtgaattagaacactgagcaatctctaccttcccctccaccacctccacccgccaagaaaagctctgtttgcctgaaattagtaagcgtttattggtgtgaagagtttttggtttgggatttttattttatctttttttagctggagagaagaaattttaacttgagctaatagtttgttaatttggttttaggagggaaatgatgcccctgctgtccctgatcttctctgccctcttcatcctcttcggcactgtcatcgttcaggctttcaggtaaatgtcctgtggcttctcggtgcaccaccatggttggtgttgacactttttttgtaaaactccttttttcttactttagcgactctaatgatgagcgagagtcaagccctccagaaaaagaggaagcccaagagaagactgggaaaactgagccaagcttcaccaaagaaaacagcaggtttctctaacaaaacaccagactcacctccccggcacctgccccccagatcctgtcatctgataacgcagcattggaacatagagtgtagagaagaactctcatgcacctcctcccatgtaaactgtggctacagggaaaagtcactgtgatttgtgtttactaagaccctgtaggtgtttagatgccttagatttcataatgaaggcagaaggaaagaagcctatcaggcaagtgttaggtgagccagaagcaggacgtggtttatccctgtaaatgtcaatgaacgtaaccagtcttgtgcgcacacacacccagcagcaagaggccagggtctccgagacaaagaacatagactgaatgatagttgtcttcttcattctgtcctagagcaacttctgcacctgaaaagcagcatcaagcagggcacagtggctcacgcctgtaatcccaagacttttaggaggcctaggtgggaggattg

SEQ ID NO: 204 - DNA, 1096 bp, Homo sapiens
cgtatttaaacaactatgacaatcagtaaaaaccacatcttcctttggttaatttgatgagattattaattccggaatttacttctttttttttttcctctgcattgttgtttatggacaagagagcctgtaacaggttggggcaggagtgatctggtctattaagtaaacatgtttttgagaattattctgaagtgaatggactctcaagataatgtataacaggagtggagataaaatttcttgacctgcaaagagggcccacccatatatgtttttctggctggtatagattaactacctcacagagatcatcctcttcacttcaccatttccttggttgggagttgaagaaagtggctagttgaacccctgctaaagggtagaaatgttacatcatgagtttaagcattctctttttctatctgaggtccaaaaaggcttcaggatagtcccagacttgagacaagtttgtttgttttttgattttttagtttatttaaaatccttaatagtgcaaggattgtgctataattctgatcactgtggaattgcttagtgtactgtcatttataacattaagcacagttatccttaagaaaagtattcagttgttcagacaagtttgaccatcaactatattttttggagttgaaggaatgtcgattgactcaggcctagcccctcattctggctctccttgtttacttttctctttttcatttttcttttttaaataacagttttattgagatagaattcatgcatttaaatgatttttttttactatattcatgagttgtgtaaccatcaccacaatccattttagcgtattttcattaccttaaaaagaaatcctatacccatttatagtcatttcccatttccccctagtctccgcagcctagacaactacaagtctactttctgtctctatgtatttacctatttggaacatttcatataaatggggtcatacaatatgtgagtccgttgtgtaaggattaaaattcccttttatcttcctttcattttagtaaggtcagttccacctggcatatagaacctgggagttgtagcttctaaactgtggtag

SEQ ID NO: 205 - DNA, 1059 bp, Homo sapiens
aattgaatctcagctgagaaagaaatttggaaagggactgttagatatgttcactcacctttactccataagatttttttaatcacctaattcgatcaggtggatctactttcttcacctgtctcacatttgcccgtgaattctctatgtgtagaaacaaaattaatttctttacaagatctattaaaaatctgttgaaattaacagattgctgtgtgtattgtgagagaatggaagcaaccaacaaatattttggatgtccaaactacagaaacatccctcaacttggaatctaccagttcctgattttaaagatggcaaaagaacggaaactataaccctgcatgctgtgtggtttgcattgttaacccaagtttgcttgtctgtttcctaattcacacagagcgtcagaagccatgatgcatgtagtgtgtgtgtactgcagctggagtgggccccagaccaggtatttatagacaccatgttaagccttccatccagttgtcatctgtgatctgacagtctgtatccgcagcagtttgggaagttagcatttgtcattcaccatttcaccttgttcaatctggttacaactagcctatatgcatttgtattttggcatgcatacatggatatgtaacataaactcctgtttaaaaatggattcgttattagaaccatccaacagggagaaaatcccagttaaaacagtgtctattatatctaccccatcttggctactataaatatcacatcaagaatattggcctcacaacactttgttgttggagataactatgctttcatgggtttcataagtgcctttcctctgaaaaactgaaagctgttcttttacattactgcatacaactacctggagttatagagggttagaaattttaattttgttgaagaagaaatggaaacttaggccagaggacttgtcaggggtgactctgaacaacaggaactaagactttgcttttccttctgtctctggcctgacagattttcaggaagcactctgcttccatttcctctgatgtaaataatggtaaa

SEQ ID NO: 206 - DNA, 1088 bp, Homo sapiens
atagactccctcctaaagggccttccatgtaagcagaacgaaccttggcacacaattcagtgtggatatttgggaaacagttccaagtggaatatataatatcagtcgggaaaagatttcattaggatagctttttgtgtatgtatatgtatatttatttttaggaatagatctatagttgtacatgaattcctgttaggaatactctgaatgagcttaacccacttgccaaatatccttgtcccttccatcattttatttttgagatggggtcttgcagtgttgcccaggctggactcaaactctggggcttaatcatccttctgagtagctgggactacataaaggccaaagtataattgcttttgatttttaaaatcttcttgcccatcatttttataaaaataaagctgtttgtccaacacggtgaaacctcatctctactaaaaatacaaaaaattagctgggcatggtggcacacgcctgtaatcccagctacttgggagactgaggcaggagaattgcttgaacctgggagatgggggttgcagtgagcctagatcacgccactgcactccagtgtgggcggcagagtgagactctgtctcacccaaaaaaaaaaaaaaaaagctattgacactgttaatattttggatgacttaaatttagcagctctagaatgcaaagggtatattaaggagcattacaatagtgaaccttcatcgtcagcttttattcaattaagagctccagaaatgcagaaattatgggttaacttctaagaataccatcaaatccctgtgaattctggttgccaacagtaataaccagtaatgggcacctttaccggacagctcctttaccataaccagtagtgggcagttctgcggtcagcacttaactacaagggcggtctctgtttcttcaccagagagagaagattttcctgtgtaatttgtgccatttccctgaagttggttcttgagcggaaagatgtgcttggtaaccagacagcagctttacataggttatagattttgctcattgatgctgttaagaattatttccactcatacctgttcagggct

SEQ ID NO: 207 - DNA, 1051 bp, Homo sapiens
cctggagatggagggcacacagagtggtcctcaggctcaccttgactgagttgattcacagttatcctgcatcagaccattagatttctttagtgctatgattataatagggatttttgaatcaccaaaaacagtttttagatgtttatgttctttgttttactatcaatgttgtgctggttaagggagagaaaagttcaagaagatcttacatatttgaaaggaaattggtactcttgaaggctatgcaacatgagtctttgaacaagaattccttgctactttgattcattcatcaaatactgagtgcctgtgtgccaggcacaggtgaactctggggattcaggggtaactaaaacagattggaaccctgcccttgtgaagctttcagtctagaagggagacgtgaaacaaattttagcttcaaaagcaacatctatttttgcctgttagcatgcatttattttaaaagtcatattagagttacctggttccacttcagagcagactgggaaaatcaggcttacaatggaatcagatgctgtgggcctaaaacagctctttaaaaatctatttttttaggccaggtgcgttggctcacacctgtaatcccagcactttgggaggccaaggtgggtggatatgaggtcaggaggtcgagaccagcctggccaatatgatgaaaccttacctctactaaaaataaaaaattagccgggcatggtggcacatgcctgtagtcccagctactcgggaaactgaggcagaagaatcgcttgaacccgggaggcggaggttgcagtgagccgggatcacgtcactgtactccagcctgggcaagagtgagacaccgtctcaaaaaaaaaaaaaatttttttttaaatggaatcagagaaaccaacaaaatatgtaacatgtataaatgcctgaggagatcagttattgagaaatccatttacaatgctggaggagaggggatggccaggaaagaagtgcaacaaataaatggaagatgaccctaaaaatgcaccagtgacagtcagtcaatcca

SEQ ID NO: 208 - DNA, 1509 bp, Homo sapiens
atggtgctatctcggctcaccgcgacctctgcctcccaggttcaagcaattctgcctcagcctcccaagtagctgggattacaggcatgcaccaccacacccagctaattttgtgtttttagtagagacggggtttctctgtgttgaggctggtctcgaactcttaacctcaggtgatctgcccacctcggcctcccaaagtgctgggattataggtgtgagccaccgcgaccggccaaaaccatgtaatttttatgtgatatctagctggtttttagtgtgtggaaatatgctttgcagtgagtgaaaagattttttggatataattttaaagtatctcaatattcagattgttctccctacatgtattcctgtctgccaagttgaagattacaagcatctaaaaaaaccatagtggaatggctctataaaatcctaacttaaatttagtgaattcttggatttaattacttatgatttcattttgagtatagaaatgaaatgaactctagcatatttaaagatttgtattatatagtttaaggaactgctccaatccttagaattaaggaagatttgtgggaaaattcaaatgagaaacactatttcttatcctgtgtacctggtgctagatttttagtccagccttaaatgcaagggttgcatgtgcctgtctttgtattagatgctgtttgggtcactagggaacattgccaaatgatatgaagattcttttaattatacattgtattgactttgattgttatattcccattatgttacacataacgtatgtacttttacatataatacatttatagtttctttgattcttaaaattgactaaaagtgattttttttttacacatcatttatttttcctttgatttaaaaactggggcttatgtactcaaaaaacattttgcagtttacaaaactatatttaacatatagcgatttgtcttttaccaatcaaattggtaggtagaagtattttgtctgaaccagtaatttttttaaattacactgtttgcagctgggtgcggtggctcatgcctgtaatcccagcactttgggaggctgaggcgggcgggcggatcatgaggtcaggagtttgagacgagcctggccaacatggtgaaaccctatctctactaaaaatacaaaaaattagcctggcatggtggcaagcacctataatcccagctactcgggaggctgaggcaggagaatcgcttgaacccaggaggtggagggtgcagtgagccaagatcatgccattgcactccagcctgggtgacagagcaagactctgtctcgagaaaaaaaaaaaattatgctgtttgcagtgaaggctcatttgcattcaagattatttaaaagtgtccttggattaaaagataaaagagtaatttattactttattgtgtgaaaaggatgctagaacttttttttttttttttttttgagacggagtttctctctcttgcccaggctggagtgcagtgg

SEQ ID NO: 209 - DNA, 1061 bp, Homo sapiens
gccaccgtgcctggcgtagttaacatcttaaggcatagacttcagtgactgtttttctttttgagacagccttgttctgttacccaggttggaggggagtggtataatcccagctcactgcagcctcaacctcccaggctcatcaagtgaccctctcatctcagcctcccaagtagcttcagaggtgtgtgtgtgtgtgtgtgtgtgtgtgtgtgtgtgtgtgtatgtgtagctaaggtcccactgtagtgtgtgtgtgtgtgtgtgtgtgtgtgtgtgtgtagataaggtcccactgtattgcccaggatggtctcaaactcctggtctcaggatatcctcccgcctcagcctcccgaagtgctgggattacaggtgtgaccattacaggtgtgtgagtctggctattagtgacttttttttttttgagatggagtcttgctctgtctccaggctggagtgcagtggcacaatcttggctcattgcaacctccacctcccggattcaagcgattcccctgcctcagcctcctgagtagctggactacaggcacatgccacgatgcctggctaattttttgtattttagtagagacggggtttcaccatgttggccaggatggtctcgataacctgaccttgtcatccgcctgcctcggcctcccaaagtgccaggattacaggagtgagccactgtgcccggacttttgttttgttttgttttgtttctgagacagtcttactctgtggcccaggctggagagcagtggcacggtcttggctcactgcaatctctgcctcctgggttcaattgattctgccacctcagcctcccaagtagcttggactacagttgcgtgccaccatgtccagctaatttttttaaaaaattgctttttggtagagatggggtttcatcacattggtcaggctgagtgacttttttttttttttttgagacggaatctcactctgtcacctaggctggagtgcagatggtgtggtctcggctcactgcattccacctcccgggttcaagcgattctcccgcctcagcctcc

SEQ ID NO: 210 - DNA, 1010 bp, Homo sapiens
atggtgagaaacagaaactcatatttaggggccccagatggatttaaagttttgggcattctcaatgtttcctattttgggttggaaacggaagtgatttatatcccaatggctggtatcttatggaatcgtagaggatatttcctgcagctgattggatatctgttcctgagatataatgtgatggaagatttcctatggaagcttcatttttggagttacctgtcttctagaattacttattccttctcttggataatgttaagtccttccttggatatatcccttctacctgatggagctatttggcttttgtgttcatactatatggaatatttctggaatattagagcctacagattcttttagaagttgatatctgcctctccattttcactacataaagtgtacaaacaaattggattgtaacaaaaaatctggcagaccataatgattcaaccacttggattctacaaacaatactttaacatggaaatgtgtacttggatgaagaagagagaaggcaatgcctgatttttccattttggatctacacaatttctgtattgttggaattacactctttgatggaatggggaaaaattaaaatgatggatgtttcctaaatcctggaatatagccattcttttctaattgctgggatatatgggatgtcttgctgtcaagattccactagcccagggaaagaggattactatatcatttcttaagcaagttgctgtccaatcaaaggtactttagctttgaacacatggtgatgatcagttgtggatacagcaatcaaaattgactgggctggatggctacaaaagtgaactattggcgagcaactgtgccttcctcattcgttggaattgtagaggatatttcctcttctgccagctacctgattcatacttagggctggaaatatttatgaatgtggataaatttctaattgtctgctatctcaagaaagaagtctgggggtttgagagttacagtttgtc

SEQ ID NO: 211 - DNA, 1059 bp, Homo sapiens
ttttcttgtggttcatctaaatatcatttgacacccttgcccattaagaaggtggattacccccataagaggggccaaaattggggaagttatgttcacaattctctccctagatttaattgggattataggtcgtgtttccacacttggaaaaggttggtatgtcctgacctgtgtatattagcccctctcctaacccaagtcaaactctctttttttccccactaactctagaagtatttagtactaatagtgaatcagagaatagccattagatttcagctctgctagctcttgtgcctgccttctgtatcttcttaatggataagaactttgcatatttataaaatagcagctgtagcagtaatcgtcctagaacttttttgcctgttgcttctgttaaatcattaataatggctttcactgattaacatttgatagggtgctaaagtaattatttatggcattttaagtctcaaaggaaaccctcttatttgttagacattgaaatataaaaatctcagaactgtagtaaataaaagagaaactcatttaatacatttaagtaggaaagatatagaatgtttatcatgccagttgtttttcacaatagcagcaaaaaaagctaaactaagcctaggaaggtggggttgctactaagtgaaatgatgggtgaaaagaatattagtggagagacctggaatctaagcatgtactggggatctggtattaattgttataagattttgccagatattcttcattggagagattctaattctttatgtttcatgattccttaatcccttttgatagaagatagatccagagatgggttgaagagaaactccagtgaaatggtcttttaggaactcaggagctgagttctagttctctacaaaagtagagaacttacgatttctttataggattataactagtttttaatattaacacataattgcatgtgtgtaatcgtacatgcaacgtgttttgtactttttaggttgacaggtattcacatcctactaaatgattgtttaagttaagctattttgc

SEQ ID NO: 212 - DNA, 1030 bp, Homo sapiens
gatagcttgttgagatctctgctttagaaaggcaactggtgacttatccataatctctgtttttcctactcttggtacctcagagaaggaaaatttggaacaggtgggagagacattgtattaagaatcagattatcctgatgtgtaaaaagcagaatgaactttctggtgatatgaaagaacaagactgagtggcctgaatgcatatcacagaacctagtatattgcctttctcagaatacatgtccaataagtagttgaaatacttagatacagttcttagttaacatgaaggataaagcaaaattgatgtagatagctaaaagtttttgtcatttaaattgtgattgaagcaagtgtacagaaataatcctctggtgttcagtttacattattcccttttatcagatgttctcttttcctctttaattatattgaattcaaagtgtaatattttgagatgttatgaaattcagaatgttcagttttccttttggaagaaataagttatttcttgtgatctttacaacttgtgaaactgtgacattcctgaaagtcctttaaagatgtttaaagttagcactcgtatagtggacaaaatatagcttggttttacctatggaaacaagtttgtcttctgtctccatgactgatggggaaattaatcaccctccatccttattaatagttacacttttgatgaagagattgctagtggggtatttcagatgagtaaacatgggattaatggcagtctagttgtgaagtccttataaataacacatctattgtttctgcaaaaccatttacagtattttactggtgagaactgggccttcatggctccatgtgctgctatgtactgctcgacgtctttttgtttctctgtcatggccgtttattgagccacatttcctttcaacagaacattttaaatgcgtaaattccacagaagcatttattttaaaatcccttgattgaagttgaacatactttatttctatagttccctattattggattcccgccc

SEQ ID NO: 213 - DNA, 1055 bp, Homo sapiens
gttcacgccattgtcctgcctcagtctcccgagtagcttgggaccacaagcgcccgccaccacgcccagctaattttttgtatttttagtagagactgggtttcaccatgttagccaggatggtctcgatcttctggtcttgatctcctgacctcatgatctgcctgcctcagcctcccaaagtgctgggattacaggcgtgagccactgtgcctggccgaaaaaaatttttaatgttgctaaaaatcagaaagtcaagcctggtctgatggtatgttcctgtagcttctctggaagttgatgtgggaggcctggtgtttgagacatagcaagacctcatctcttaaaaaaaaaaaaacaagtccttcaggtacggtggctcacacctgtaatcccagcagtttgggaggctgaggcgggtggatcacttgaggtcaggagttcgagaccaacctggccaacatggtgaaaccagtctctacgaaaaaaatacaaaaattaactgggcatggtggtatggtggacgcctataatcccagctgctcgggaggcggaggcaggagaatcgcttgagccctggaggcagaggttgcagtgagccaagattgcaccactgcactccagcttgggtgaccgagggacactccgtctcaataaaaaccccaaaattaaaaataataacaagtaattacgcagattaaagttttaaataacaaattttattttattttatttatttgtctttttttttgagacggggtctcactctgtcacccaggctggagtgcagtggtgctgtctcagctcactgcaacctccacctcctgggttcaagcgattctcttgtctcagcctcctgaaaacaacaaatttaaaaataaaaactgccatgtcaaattgtatttgtttgacttggaagcaaactatgtaaactcttttttttttttaattttattattttttttgaggcaagagtcttgctctgttgcccaggcggaagtgcagtagcatgatctcggttcactgcagcctccacctcccaggttcaagtggtt

SEQ ID NO: 214 - DNA, 1117 bp, Homo sapiens
agctaaatttttttttttttttttgagatggagtctggctctgtcgcccaggctggagtgtaatggcaccatctcggctcagtgcaaggtccgcctcctgggttcacgccattctcctgcctcagcctcccgagtagctgggactacaggcacccgccaccacgcccggctaatttttgtatttttggtagagatggggtttcaccatgttagccaggatggtcttgatctcctgacctcgtgatctgcccacctcagcctcccaaagtgctgggattacaggcttgagccaccgcgcccggccttgttttttgttttttgtttttaagcgatagggtctcgctatgttgcccaggctggtctaggtctcatgacctcaagtgatcctcctgccttggactcccaaagcactgggattacatgcatgagccgctgtacctgggctaatataaaaaccattaagaaaaactaatgtcatggtgtcatgttaataaattcacatatatctcagtagaactgtttaaaaatatacacatcaagttctggagacctggtttttttaaaaaaaaaaaacttatttatgttggctacatgttcaaatgatattttgaatatattaggttaaataaagcatattactacattaattacatctgtttctttttactttttttttttttttttttttttttggagatggagtctcgctctgtcgcccaggctggagtgcagtggcgtaatcttggctcactgtaagctccgcctccccggttcacgtcattctcctgcctcagcctcccgagtagctgggactataggcaccttccaccatgcctggctaattttctttttgtatttttagtagagatggggtttcaccttgttagccagggtggtctcgatctcctgacctcgtgatccgcccacctctgcctctcagagtgctgggattacaggcgtgagccactgctcccagctcttcgttttactttttaaaatatgactatttgaaaattaaaattttgtggcttatatttctactggacagtgctcttctagaagcaagctctattaagctgtaatgtcacaaaataatttgtgtatcaatttagtgctt

SEQ ID NO: 215 - DNA, 1038 bp, Homo sapiens
tagaggtttaaaatatgtctgtttacatactggtgctaatagactggaattcagttgttggaattagaagacagaaataatacacatctgtgttgcttctaggcatcatttgtataacccaaactggaggagttctgtgattctttatatgttattttcgatggtggtagggaggggcagattagcttcctgaatatgctgtgtcatggtgtgtggagccatcttggactgtagctttgtatctgtcactggaagaaactgcagagaagtaattatatttaagcagaagaattttagcctgaggtttcttactgagtaattcgtagtcatttataaataaacaaaaaagtataccaaatagcggatggcttaggctttctggtagggagttaggtgcctttctaactccttgtccctgcaactgccctaatggagagttcagaagcaggaaagagcaaacttctttttcattctggatagagaggagatgtcattagtatcaaagttaaattgaaaaaaggccagtacactcaagcctgggcaacagagcgagaccctgtctcttaaaaaaaaacaaaaaaaagcaagccaattgcagtggctcccgccgtaatcccagcactttgggggaggctaaggcttgaggatcacttgaggccaggagtttgagatcagccttggtcaacatggcaaaaccctgtctctactaaaaatacaaaaattagccgggtgtggtggcgtgtgcctgtaatcctagctacttgtggctgaagcttaagaatcacttgaacccaggaaatggaggttgcaatgagccaagattgcactactgcactccagcctgggcgacagaaaaggcaaaaacctcaaacttcaaatttgcttatgggtttggtaaggctacatcagttgtatgtgaccacttggaattaaaacacacacacactcacttgatctgtgtgctttcttggcctgtgccttctgaaacattttagttttttcatacaagaaatatcagattctatataccgtgtgact

SEQ ID NO: 216 - DNA, 1080 bp, Homo sapiens
tttgtttgatgtttataaatattcagaggtgaagtctagatggatagtaggagagctttaagaagttaatttctgaggtccagattttgtactaagtaatctttaggaagtgttattagttgtttatatcagcaataaagggtcattgtaatcagaggaaaaattactagcttgggcaacatagtgagatcctgtctctacaagtaattttaagtgttagcctggtgtggtggcgcatgcctgttgtcctagctacttaggaggctgaggtgggaggattgcttgagcccaggaggttgaggctgcagtgagccatgagtgcacctctgcactccagcctggatgacagagcgagaccttgtcgtgaaagaaaagaaacattagtgttggtggttggttatggttctctttccacctccagctttgtctagtaagagaaagctttcttcctttgtcagtttcactctactaattcagttaatcattatcatatcagctcttttcccgttagaaatctttgtagtttctgatgaccggagaaatctgatagaccaaacaaagttgaaattaaaatattggttacataataaaaactttgttttttggagatggagtctcgctttgtcgcccaggctggagtgcagtggttcaatctcggctcactgcaacctccacttctgggttcaagcgattctcctgtctcagccacccgagtagctgggactacaggcgtacgccatcatgcctggctaatttttctttcttttttttttttttgagacggagtttcgctcttgttgcccagggtggagtgcagtggcgtagtctcggctaaccgcaacctccgccttctgggttcaagcgattctcctgcttgtaatcctgagtagctgggattataggcaccagccaccacacccagctaatattgtatttttagtagaggcggagtttctccaagttggtcaggctggtcttcaaacttccaacctcaggtgatccccccgcctcggcctctcaaagtgctgggattacaggcgtgggccaccacgcctggcctaatttttgtattttttagta

SEQ ID NO: 217 - DNA, 1006 bp, Homo sapiens
tcagtaatgcacaagggttccaatttcttcacatccttgcatttgttattttgtttgcttgtttttttgagacaggatctcactttgtcatctaggctgcagtgtagtggtgcgattttggcccactgcaaccttgacttcccaggttcaagccatcttcctgactcagcacccccgccaagtagctgggactacaggcacataccaccatgcctggctaatcgtttttggtaattttttgtagagacggggtttcgccatgttggccaggctggtcttgaactcctgagctcaagtgatctgcctgcctcgcccttccaaagtgctaggattacaggcgtgagccactgcgctcggcagtttgtttttaataatagccatcctagtgggtgtgaagtgatgtatcatgtggcagagttttttttttttttttttttttttttaagatcctgtgttgtttatgctgaactcgaactcctgggctcatgctgtccttctgcctcaggctcccaagtagtgtcaactacaagtatgagcccagtttcacatggttatgatttgcgtttccctaattattagatgttgcgcattttttcttgtgcttatttgccatttatatatctttggagaaatgtctttgaagtctttgaccagttttgaatcaggttgctttttgttgttgagttgtagtgtggtttctatggttgttgttttatttttttattttatttatttatttatttttgagagagagtgtcactgtcacccaggctggagtgtaatggcgctatctcggctcactgcaacctctgcctcccaggttcaagcagttctcctgcctcagcctcctgagtagctgggactacagctgcatgccaccatgcctggctaatttttgtattgttagtagagactgggtttcagcatattggtcagggtggtcttgaactcctgacctcaggcggtccaccgtcctcggcctaccaaagtgctgggattacaggca

SEQ ID NO: 218 - DNA, 1067 bp, Homo sapiens
tacaagccttaaagatggccttttccatgaatttaagaaatttggaaaagtaacttcagtgcagatacatggaacttcagaagagaggtatggtctggtattctttcggcagcaagaggaccaagaaaaagccttgactgcatcaaaaggaaaacttttctttggcatgcagattgaagtaacagcatggataggtccaggtaagacacaagcaagctgagtttgagttactcatcacacacactgtttgtgttgcagtgtatgagagggcagcatatgatcctgaatgaggacactattctggctttatttattgacatatttccattgtcttctgttttaaaagatggttctatttattgttcaacttaataaaaaacattgttttggttagggaggatagatttttctgttgctgtaatggagccttgctgactgttaagagtctgaaaggcagaactgtgtagacccttattgagtccagccttcccaaaaggattgaatttatcaaaactaggaggtagctcctaggagtgtgacaacagaattaccttgaattggaaaggaaactacttctggttgggcgcagtggctcatgcctgtaatcccagcactttgggaggctgaggtgggtggatcatctgaggtcaggagttcaagaccagcctggccaacatggtgaaaccctgtttctactagaaatacaaaaattagctgggcgtggtggcgcacgcctgtaatcccagctacttgggaggctgaggcgggagaatcgtgtgaacccgggaggtcaaggttgtagtgagctgagattgcaccactgcactccagcctgggcaacagagcaagactgcatctcaataaataaataaaaagaaaaaagaaacaaattacttaatattgatgtgggggacttgttagaccagttttatttctattatgtccaatacaagttgggtctgtttttccagcttgcatgaccttgaagacagagtaacaggaataagccttatgggtgcaacccactgagaatttccagggaacatttattatcttgaacctacctg

SEQ ID NO: 219 - DNA, 1027 bp, Homo sapiens
tgtggattgaaaggaaaatctggaagagaaaaatgtttgtaaaaatgaagcagcaggctgagcatggtggctcacacctataatctcagcactttgggagggtgaggtgggcagatcactttgagctcagaagtttaagcccagcctgggcaacatggtgaaaccctgtctctataaaaatacaaaaattagctgggcgttggtggcttgctccagtagtcccagctactcaggcggctgaggctggagaaccacttgagcccaggaagcagaggctgcggtgagccgagatcacgccactgtactccagcgtgggtgacagagtgagaccctgtctccaaaaatagaagcagcaaattagtgtatgattgttttgtgatcacagtgcacatcagaaataccttggggattactagaatatggatgtcgtctgctagcagtttaattctattaggaagtcttaatttgaatcactttttatattatgcaagtcattgttagattaaggggtacaagaagttttctgttcctttatgacttaaaattagagtcagtttaaaaatgaaaatattttggtcacagctttgtaatcttgggatatactattattatttttttagacagagtttcactcttgtcacccaggctggagtgcagtggtgcgatcttggctcactgcagcctccgcctcctgggttcaagcgattctcctgcctcagtctcctgagtagctgggattacaggcgcccgccaccatgcccagctaattttgtattttttagtagaggcggggtttcaccgtgttggccaggctggtcttaaactcctgacctcaggtgatctacctgccgtggcctcctaaagtggtgggattacatgtgtgagccaccatgcccaggctgggagataacattttgtaagatatcagcctttctcatctcctcaaaatctttcatagaatcgtaacttctgtagaaatctgcacatgccttctttcttggttcagccacagcaaacttatagagaa

SEQ ID NO: 220 - DNA, 1006 bp, Homo sapiens
ttcacatttacactaaatatgtaattagacttttttaaatgaggggaagttcacacaacagaatattcatctaaccaatgatttttatgtaatacatccataagcaacaggaaaagggtctccagacccaattcagtgtgtgaaggtaaagctttggttccttaaaactatgtttactctgtggtaggtatattgtatacccttgacaatgcttttttttttttaaatttatttatttatttttaattgagacagagtctcactctgtcacccaggctggagtgcagcggcgggatctcagctcactgcaacctccgcctcccaggttcaagcgattctctagcctcagcctcttgaatagctgggattacaggtgtgtgccaccacgcctggctagttttgtatttttagtacagatggggttttgccatgttggccaggctggtctcaaactcctgacctcaagtgatccacctgcctcggcctcctaaagtgctgagattacaggcactgcgcctggcagacaatactttaaatgtagcttttgttgtttagagaaatacacatcttaaagattgcctgtataaaaaaatccacagccttaagacagttatgctacttgtagccaaagttcacagaaattctttgttgttcttaatttttccttcctttcaagggtgttttttgctgttgttggttttgcttttttgttttgagccaaaacaagacgaatactttactgaaatacaatatagtggtcagtaaacatggaaaacaaagtaaaatacagaagaacaaaataaaggcataatatctcaagccataatgtctatgattctaaacagtccctgcacattttcattttattgtgttcactacagtgtgcatcacacttttttttttaatagaataaaatatataaaaatatattttttctcatccgtgtccttgtggcttaggattttgttgggactgacactaagtccagtggatgaggctcttactt

SEQ ID NO: 221 - DNA, 1088 bp, Homo sapiens
tctgacacccagggcctcatagtatcagtccagcatcctgaatgatatgtctttctttcctttcctactctcctgaagagtgggtagccacttaaagcataactttatgtccagtgtatgtttttaaaaacttgtattcatggtagtttgaaggaatttatgcacttaactatgaaataactatgattgttaggttgaaaaaagtattttaaaaataagatgataagctatttgatagctgatgagcatcatatgctttagtaactttgaggcccagctgtgaataaagtttaaaatgttcatccatattttgttttatattctaactgtagttttggcaacagagattgctggatttagttgatctgattacttaattgccatttcagttttccattttgcttttttcactccttcacaattgggtttgaaactttataaatttcattcttttatcacggtttatacagaatttgagagatttcaggttaatatagtttcagtgatgaggactgttttacttgagatacattgctgtttcctgaaattttctcagaagggctatgttgtgaagaatttacaaatctgataacatttttccatcattaaaatttgaaacttgcatcaaacacctctttttttttttaaaggtggattttgcaaatcgggaaagtcagctggctttttatcactgcatggagaaatctggtcaagacatcagagacttttatgaaatgttagccgaaagaaggtatgtattttaaacttaccagtgtagcttgagttttaatagttttaatacagaaacttaagatggcattaaattttatttttcactctttacccctactttcatcttctagaatagagaatgcttctcttttatcacttcatatggaaacacaggtttatttttttgaatctagtttccaggtaattcctatgggtttggagcaacctgtctggatttctcactgaatgctcctagaacttgaaagagttactgttttgccaggtgataactttatgtacttttttttttgagacagggtctcactctgtcacccagactggagtgcagtggcatg

SEQ ID NO: 222 - DNA, 2002 bp, Homo sapiens
aggattccaggcgggactatccagctcgagggagagagttttattcagaatgggaaacttaccaaggagactactatgaatcacgatactacgatgatcctcgggaatacagggattacaggaatgatccttatgaacaagatattagggaatatagttacaggcaaagggaacgagaaagagaacgtgaaagatttgagtctgaccgggacagagaccatgagaggaggccgattgaacgaagtcaaagtcctgttcacttgcgacgtccacagagtcctggagcgtctccctctcaggcagagaggttgccgagtgattctgagaggaggctttacagccgatcctcagaccggagtggaagctgtagctcactctcccctccaagatatgagaaactggacaagtctcgtttggagcgctatacaaaaaatgaaaagacagataaagaacgaacttttgatccggagagagtggagagagagagacgcttaatacggaaggaaaaagtggaaaaggacaaaactgacaagcagaaacgcaaaggaaaggttcactcccctagttctcagtcttcagaaacggaccaagaaaatgagcgagagcaaagccctgaaaagcccaggagttgtaataaactgagcagagagaaagctgacaaagagggaatagcgaaaaaccgcctggaactcatgccttgcgtggttttgactcgagtgaaagagaaagagggaaaggtcattgaccacactcctgtggaaaagttgaaagccaagcttgataatgacactgtcaaatcttctgccctggaccagaaacttcaggtctctcagacggagcctgcaaaatctgacttgtctaaactggaatcagttagaatgaaagtaccaaaggaaaaggggctttcaagccatgttgaagtggtggagaaggaaggcaggcttaaagccaggaagcacctcaagcctgagcagcctgcagatggggtaagtgctgtggatctggagaagctggaagccaggaaaaggcgctttgcagattccaatttaaaagcagaaaagcaaaaaccagaggtcaagaaaagcagtccagagatggaggatgctcgcgtgctttcaaaaaagcagcctgacgtgtcctctagagaggtcattctgctgagggaaggagaggctgaaagaaagcctgtgaggaaagaaattcttaaaagagaatctaaaaaaatcaaactggacagacttaatactgttgccagccccaaagactgtcaggagcttgccagtatttctgttgggtctggctcaaggcccagctcagacctacaagcaagactgggagaactagcaggtgaatctgtggaaaatcaagaagtccaatcaaaaaagcccattccctcaaaaccacagctcaaacagctgcaggtattagatgatcaaggaccagagagagaagacgttaggaaaaactattgcagtcttcgtgatgaaacacctgaacgtaaatcaggccaagagaaatcacattcagtaaatactgaagaaaaaattggcattgacatcgatcacacgcagagttaccgaaaacaaatggaacagagtcgtaggaaacagcagatggaaatggaaatagccaagtctgagaagtttggcagtcctaaaaaagatgtagatgaatatgaaagacgtagcctcgttcacgaggtaggcaaaccccctcaagatgtcactgatgactctcctcctagcaaaaagaaaaggatggatcatgtcgattttgatatctgcaccaagcgagaacggaattacagaagttcacgccaaatcagcgaagattctgaaaggactggtggttctcccagtgtccgacatggttccttccatgaagatgaggatcccataggctcccctaggctactgtcagtaaaagggtctcctaaagtagatgaaaaagtcctcccctattctaacataacagtcagggaagagtctttaaaatttaatcc

SEQ ID NO: 223 - DNA, 1208 bp, Homo sapiens
gtttgtcccaacaacctctggccccagcaccccaccaggactggttctgccacacactgaattccagccagcccccaaacaagattcctctccacacctgacttcccagagacccgtggatatggttcaacttctgaaggtaagcatgagcaggggctgcccttcctggcccccaagttttatgccatgtcaaatgtcctaagattccctagttaacagacccacaagctacagcctctggctgtgtccagcatggctcagcgaggggccatgagctcacttcctgtttgtttccctgtgagcagaagtaccccatcgtgtggcagggcctgctggccctcaagaatgacacagctgctgtgcagctccacttcgtctctggcaacaacgtcctggcccatcggtccctgcccctttctgaaggagggcccccactaaggatcgcccagaggatgcggctggaggcaacgcagctggaaggggttgcccgaaggatgacggtaagactctcaggcccaggtgagcaactgccccacctacagggaggaagacgtaggtagtccctgccagcccatctccctggcctgtcatggaagcattaactgtattcttgttgttgttgaaacagtctctgtcgcctgggctggagtgcagcggtgcgatctctgttcattatagcctctgcctcccgggttcaagccattctcttgcctcagcctcctgagtagctgggattataggcacgcaccaccatggcaccaccatgcccagctaattttttgtatttttagtagagatggggtttcaccatgttggccaggccagccttgaactcctgacctcaagtgatctggctgccttggcctcccaaagtgctgggattacaggcctgagccactgtgcctggccagtaacggtattcttgaagtgagcaatgaagggtccactatgcttctacttggtggggggatgtaaagtacctctagacccagaaacaaggctttacagtttttaaaaattattattttttaaatcagctttctcaggttgaaaaaaagctttttttttttttttttttcattcaaatatcagggtagcctttaaagtcatctcagaggtgggggtttttgtggacctgatactgtgggttggatgtgggctgctgtttgactaggaggcccctgctcactggcagctggcctctgcct

SEQ ID NO: 224 - DNA, 1019 bp, Homo sapiens
gatcttcccgccctgtgagttctctgagagtcacctgtcccgcctggcccctgacctccttgccagcatctccaacatctctccccacctcatgattgtcattgcctccgtgtgagccactgagtggttatcacctcagtgaatcttcccagggctctgcagtaaaaacaaaggacaacccagccaagcagaggaagaagctgccgaaggggacagactccactgccagacggccagccgtttgctgtcctgccgcccggctcagtcggccagacttcctctaggagtggtgctgctaccttgtatgtttacataatgctttagcccaaggacacatcaccaacccatggactcgcagacaccggggctgggtttctctttcctctttttggagaaaaggaacagggcagtggaatgaaaattttttgtttgtttgtttttaagaaacaagaaaacagaactgcctttgcactaaattagtgacttggacttttgcccagtgaagacaggctgtgacactctggatgtcttggtgtgtgtagacacacattgcagactcttaacgcaggaaggacttcaaacttctgctgagaccttggggtcaaggaacatttcattggttttttttgtccacccccatctcccttgctcatttggatgcgtcaccttaattctcctgctgccaccgtctttgattcaccgggatgtacagtttacagttgaagagcaaacagaaaggttttctcttggtgggatatgcagaacttgggatgtgtgtatatataaatatataatatatataaatatatataatactgacttaaaaaatcaaatcccccgacatacgttttttttaatctgtgccaaaaatgtgttttcagaggaaatcttattttcatattcagactttgtattgcccactcatttgtataagtgcgcttcggtacagcacgggtcctgctcccgcgatgtggaagtgtcacacggcacctgtacaaaaagactggctaacccctctt

SEQ ID NO: 225 - DNA, 1028 bp, Homo sapiens
gtttcatcagccagtgttgcagaactcggcccctctcaggctctgcacgtaccccatcccccgacaaagcctagctctccctctctttctgattcatgggaactacctagagttgcggagtcttctgactccagaaacctgtgtcctggtggccatcccaggagaaacaactttgatcctgaccccaagagctgctgacctggccacaacttctctgtcaagggcctcacttaatgcctggaaatcccacaagtgaaaatgctcaggaaaattccatggcccagtgccgagcagtcttgaaccgcacaagccgtgactaagtaactatctaaaacagctctccctcccgccccaacaccacccagagtgggcgtcaacatcagcaattgtctagggaaaataagcgggccctcttttctagaaagaacccatttcagaatgtttgaagagaaaaatcaacacccactgtctggggccacattagacagattcaactgggcacggctgtcacgccctggcccaggatctgctaaggggtagtgagttctctgcctactcctcctcttctctgaggcctgagtctgcacggggctggctccccggcttctgggcaggtgagagggacactttggggctctccgcccccagtttcggcagctctgccccggctcaggcactcccctgtgacatcagcatcttggggggtgaatcactgccgcagctctgaagctgctgtggccatgcatggctgtcgggctgtgatgagtccggaggaagccacgcccctcacaccagcacaggtcggccttgaagggcgccaaggcctcccaccacgtgatgtctggaaacttttcacaagtgggggtatctgctgagcggggggaagtgacgcaacaaataacggggagcatggcagtggcaacaggcatgagccacagcgcaccagcctccgagccacaagttcagcgttgctgctgctgccagaggcccagaaacagctgttccctccccctacacatccccgcgca

SEQ ID NO: 226 - DNA, 1029 bp, Homo sapiens
gcagtgtgagtccggacaggcacactgacacagcggaacagacgcggcagaaccgacacggcggaacggacgcggatgatgcagagcccctctcaggatggccagccattcctcccctgccagggcccaccacgcctcccatggagagacggtgtctgtttccctcctgtcggaatctggatggcccagagacgactctgacatcaggatgctgggactgtgccaattccagacctaaacctaaagaagcctggaagattctgctgtggctcctgggaatccagtcaccgagctggaggaaagtccaagctcccgtgtgagtgggagacacatggaggggctctggggagagggcacatggagaagagcagagaggccactgacagcaccaatgctctgtggcgagggacacactttcctggacctcccagcccagctgtgcgctgctgcacgcacggcctcaaccaacacctcggggagcaagcgactgcctgtccacccatccaactaagaaagactgactcaccgatgacttatgccactgggttttggggtgctgtgctgtgcagcaggagataactgagacggacggtaaaaccaggaagaaaaggaagtgattcagccaaaggttcaggatgacggttctctctggatgggggagggtaagcaggggacttctgagatcctagaagagttctctttctttacttggagtcccctggatttattacttaaactaaatgtgtatatttcatatacatttacatgaaaacattccaattatttaaaaaaatgtatttttttttttttgtagaagcaggatttcaccatgttgcccaggctggtctcaaactcctgggctcaagcaatctgcctaccttggccttctaaagtgctgggattacaggcgtgtgctactgcacccagccatttttcaaaaattttaataagaaaaaagtgaggttcagttgccagacttgatccagtcatggcacagagtgtgctggccaaggctgggttgctcccaac

SEQ ID NO: 227 - DNA, 1014 bp, Homo sapiens
gggaggggcactgagtggagagacatctagagctattgtctctgccaggaggcactttatattgaacaactgttctgttaaaccccaagagtgctcccagacaaaggctggagtgcatgcccagagtgctaagtggccccagagagcacagctccatgtcagagtcaaatgggcacctgtcaaacatgaaatgttacccaggttattagtatgcactaaactacctgcagggtttccaaactgccacaaagggaagccattaagccaggaagcaactggcctaccatagggagacactgatctttacaaacaacagtccccggctcccagaacaagctgctcccagctctgagccttgacatgagccatcttgtgtccaggtgcttgaggaacctaagggcaggtgagaaggatcaccatttggcttccagttgctcagcattcttgattttctagaaatacaggtggatcaacataaacttccaaaggagccaggcacggtggctcacacctgtaatcccagcactttaggaggccgaggcaggactgtgggaggtctgagacaagcctaggcaacatggtgaaaccctgtctctacaaaagaaattttaaaattacctgagtgtggtggcacacacctgtggttccagccactcgggaggctgagacaggaggacagattaagccaggaggtcgaggctgcagttagctgtgattgtgccactgcactccagcctgggcaatggagcaagaccctatctcaaaaaaacaaataaaaaacttctggccaggtgcggtggctcacgcctataatcccagcactttgggaggccgaggctggcggatcacttgaggtcaggagtttgaggccagcctggccaacatggcaaagcccatttctactaaaaatacaaaaattagctgggtgtggtggtgcgcacctgtagtcccggctactcgggaggctgaggcaggagaatcacttgaacccgggaggcggaggtaacagtgagc

SEQ ID NO: 228 - DNA, 1017 bp, Homo sapiens
agcccccttccaacatccccgactccctgagggcgcccctcattctgctcggccttgccttccccattcggccacatcctcctctctcccaactcagcttcgacccccaaagcctttccctaaccatcggaaccacaggcttttctccggcctctgagtgccagtcttcaactaggtgtcttttaaaaaatcaaaaagcatctcatcctacgggatgtgtgtgaaaaaataaaaataaaataaagaaaaagggggccgggcgcgggagctcacgcctgtaatcccagcactttgggaggcctaggcgggcggatcacctgcagtcaggagttcgagaccagcttgaccaaactagagaaactccgtctctactgaaaatacgaaattagccgcgcatggtggcgcatgtctgtaatcctagctactctggaggctgaggcaggggaatctcttgaacctgggaggtggaggttgcagtgagccgagatagcgtcattgcactcttgcctgggcaataacaagagcgaagctccatctccaaaaaaaaaaaaagaagaaagaaaaaaagaaaaagatagcccatcgctcctccattgcagacccaaaggctgtcagctgaatggaaggtgcttcctcacgacctttgggataagtaaatttgaagtaatagaaatagccagctgggcgcggtggctcatgcctgtaatcccagcactttgggaggctgaggggggcagatcacctgaagttaggagctcgagaccagtctggccaacatggtgaaaccccgtctctactaaaaataattagccaggcgaggtggcgtgcacctgtaatcccagctactcaaggaggctgaggcaggagaatagcttgaacccgggaggcagagtttgcagtgagctgagatcgcgccattgcactccagtgagccgagatcgcaccattgcactccagcctgggcaacaagagcgaaactccatctcaaaaaaaaaattttttttgaaaaataggcca

SEQ ID NO: 229 - DNA, 1072 bp, Homo sapiens
gtccattgagtaaagccttgcgtgcctgcgcccgcgacggaggcgcgcttcaaagcgcaggcgcggggagggggtgggggaggagggaaagcggcgagtaagatggaagatgaggaggtcgctgagagctgggaagaggcggcagacagcggggtaaggaggagccgccgtcccatggcagggccgggcgagacctggcgtgaggggagcctccggggagcgggtctggagatagttctccccaaggaagggccccatacgccgggctgggggtggtggagaggcccccagttcctgagcgccgtgaaggcctcttaaaggggccgcgatccatttctctcctttcctttgcctggtgcgcctccctccgcccactaacgcgcgcgtcacccggggcgccccacccgccacccggggcctcctttcctgaccccccgcgcccacttgctggccgtgggcctctgtgactctttccgatgagccttgtggcccgaggcaccattttaaagttcttgtgctctgaccgggacggacacaccatgtgggtggtggtggggcttgcgcggaccaaggaggcatgtccggcttcgcaggaaagcgggaggaggcagccgagggcggggggaaattgaatcctctttgggctactcaactctgctaaaatcccccaccatccgtcacggtggacgagtcgggttttttttctctttcacttttactccaagaagagtttgtgggcaggcaggcaggtctcacggggactctgccaaagcaaccgaaagctctgcggggcagctcctctgccactcagcgatccgaggccccgggaaggtctaggagttcgcttgtcggagtccagggtgtgatatgtaaaacagccacattcttgggagaggagtggggagatggaccgttcgacttgtttttggagtttttgtttgcctccagaaactgtaggaaaatagtttatctcaaagaggatctgtcaattctcttagatttgtgaataatttggtcttttcagagtttgtctgtggtgacccttgtgaatatggggagatgctttttttgt

SEQ ID NO: 230 - DNA, 1090 bp, Homo sapiens
cacagatccgcatcctcaagaggcccaccagcaacggtgtggtcagcagccccaactccaccagcaggcccacccttccagtcaagtccctagcacagcgagaggccgagtacgccgaggcccggaagcggatcctgggcagcgccagccccgaggaggagcaggagaaacccatcctcgacaggtgagtgtggctggcagggccggccagtgatggctgtcccagtccacccgggaagaggagagcatcctggctgcgtgtagagtagtgagaagcaagcagagtcagggtaggaaccatgcagctccacttgctgatcccagcctgctggcactagttcactgtgccgcattggctggagagggctctgaaagccttgccagggaggaggtggcagtttgctggcatgctccctctgcggttggtagtcaccgggggcactgttgtgtagagagtgaaggcacagatgagcttgtgtcaaaatctgcctcttacctcttctttagaacgacttgacctctctgggccttagttttctcatctgaaaaaatgggataataatagtaccaaccttatcaaggtgttgtgcaattcagtgagtaaatgagcataggatgtggagagcctgggctggcagagtggaaagtaccccagataagtgctttgatgatattttctgggtctccagtatgcccactgtgatgtttttgtgaattttctaaattcctttttactcttaacatttttttctctgcagtattaaaggttgcatcatataagtttatcactttcgaatcaaacagtattcattaagatggcctccttctaactttgaggggctgctatggtttggtattctgggacttgaagaaaaaatctgcgtaccttctttctagctcttcataattttgaagagatacctgttctttttgttgtttctcctctaagtcttcacctttccagggtggaaaaatagtcatatgagtcaaccgttaaccgcagagtttggagaggagtgggagggaagaattggggggcgggggatgtgtccctctgctgagctcttgattccagttctttactttggcc

SEQ ID NO: 231 - DNA, 1076 bp, Homo sapiens
tcatcatatttgaagttagtctctttgtagccagtatgtagttggttcgtgtccattgacctactctgccagcctgtgtcttgcaactggtatacttaggccattgatatttaatgatattgacatggtagggcttaaatctgccattttatttttccttttctgtttgttctccctggtttcgttttctggatatgctttctttttcttaccttcctgtcatgacttgaacatctttgagaatggtgttttgccttatccatagtgcttttgagtatgtctgtttgtatagccctcttggtttttccagacattcgtatatctgtgcatctatatcttaaccacacggtatactggtgtcattgttttaccaatttgagtgaatgatagacgagttacctcccttgtaggtctctttaccctcccagtttataaccatttcaaacattttctttatggagagttagaaccacattgaatggtgctatgatttttttctgaaaccgtcaagcatagtttagaaaactcaagaggagaaggaaggcctattttgctgttttctttctttccgatgtcccaaggttccttctttaatcatttcctttccgtctagagaactccccttagcccttcttttagggtagaactgctggtcagagatgtccttagcttttcttaatctgaaactgttttgatcttctccttaatccctgaaagatgtttctgctggagagaggagtctgggctgacaattttcttctgcggcttgaaaagcactgcacaacttctttctgcctccgtggtttctgatgagaaagccatcatcgtcggaattgtttttcctttctaggtaaggtgtcacctttctctgttgctttcaatatattttctttgtctttagtttccaacattttattttttcacgtgtcttgccatagacctctttgggttttatcctatttggggtcctcacagcttcttaagcatataggtttatgtctcttgccaactctgggaagcttttagccatttacttctttatgttttcaggcttgtcctcttcctcttccccttcc

SEQ ID NO: 232 - DNA, 1063 bp, Homo sapiens
tccagccagaaggatggggtggctcccactcctgctgcttctgactcaatgcttaggggtccctggtgagtgcccccaaccttgatccccatctgccttcaggaggggcttggccccattctcctattctgggatgagaaaaaagtcagggagccagaggctcagtgggcatggggcagtgaccttggcctcttgagcacagctgggaagccctaggaacacatagacatggcccacttaggcctctattagcacgtctgctctagcactgaagcagtgttaggaccacacagatgcacgcacacagcaggcagtgacccctcctgagcctgatctacccctctaacctagcgtatgcctttgtgcaggtgagagcccagctttggagtctgaatgcctagccagggcccctggctgggtaatgtgatggctctgagccttagcattctcatttgagagatgagatggggcaagctccatcacccactgctctcacagagcgtgtgtgttagatctgagcccggtgcctgggccactacacagaggcaccggtgataactaccaagtctgggcctgcttcccaggggaaattttttgacaagtatctgtgcaggggggctagactggcccttgaaagtgcatacagggtccatcccagaagccttgtagctttgatcccctgaatgaacaaactgtggacatgccaatacacattactgacatgtatgcccacctgacctgcacccactctgcagggcagcgctcgccattgaatgacttctaggtgctccggggcacagagctacagcgccgctacaagcggtggtgcccgggccttggcaggaggatgtggcagatgctgaagagtgtgctggtcgctgtgggcccttaatggactgccggtgagtggccactgggcatagataagactgggggcaggggagcctgggccgtggcgttaccttgtgccttcttctctccagggcgttccactacaatgtgagcagccatggttgccaactgctgccatggactcaacactcaccccacacgaggctgcggc

SEQ ID NO: 233 - DNA, 1003 bp, Homo sapiens
aaaagactaacttagtggaccaacctttgtttcttcattatctgtacattgattctgtccttttatttcgtctttcttctaattctgcttctgcttcttgtttcctccctggatttgaactttatttacctaaactaccagttaggttaccttctcagaacctctaaggcagcagtttgagattgacaatggaagatttaagattagaaaaaagaaacatgaatgaatttctgatgttttattataggggtttataatgcaggtagaaagacctttttcagacttaagagtttgatccaccaaatgagctattttgatatttataactttgtctagtaaaagtttcctataaaaacatttggtttggatatgtttgttagcttttagtcgacacttgaaaaaggcggttggaaggttctaagtctttttggatactcttttctcttatcccccaggccgtgggtgtgtagaggccttggtggtgcagtggtagaattctcgcctcccacgtgggagacccgggttcaattcccggccaatgcagcaggtacttcttcatttcattatggccttttacccgtcttttacgctgcaaaattatactgcataacctaatagtgcatttaggggcttggccaccacaaggtaaagtgacaacattactcacgagagtagcggcaagagacattcaggacactaacccaggacccatgcaattgttggactcaaacagcttagcaaagtggcaagcacgaagtctttccggtgagtcactgcagttttgatattggtacctgttactttcatctattcacggggcggatccctgcaaacccgaagaatcatcaggttcctgattcgcgtgctggaccttgggcttactgctgagccactgtagagaggatcaagaaatgacgctcttggaaggagagaagctgcgggcaggacagtcacgtcagaggtccaagaggcttcagcggcccaaagaaagggaaggtgtgtg

SEQ ID NO: 234 - DNA, 1035 bp, Homo sapiens
catgtgcccactgtcccttgccagtcctgctgccggccacagagatggcatcgctgctgtcgctgcaggaggagaaccagctgctgcagcaggagctgtcccgcgtggaggacctgctggcccagagccgtgccgagcgcgatgagctcgccattaagtacaatgcggtcagcgagagggtgggtgccgcccaggtggtggactaggccagggttcccctcgttcaagggcagggaggcatctagaccaggcccacacacggggcaaaagatgggccctggagtcaggttggcctgggcttggattgaggctctgccaccttgagtggcgttgagcaaatcactatgctctttaagcctgttttctgtagtggggattgtaatgggacgtggaattgtaggaatcaaggagataatagaataaagtgcctggcaccaggggtattttgttcccatctgtcccaggcctgttaggggtgtgggacacggagaatgagatccctaaagattcctgccccttgagtttctgggcatctcccattgccacgggccttggggttgaggcggtggctggatgctggctcgaggctggtgtgggcacccgcggtgttctgcagcccatctggggcagccacaagacctgccgccactgcctattggaatgagttccaggcagggaaggaaggagaagcaggcctgtcttcatgtccaggcaggattcacatcacccgtgctgcaggcttgtgggggtcccagggtgtggggcgggagctgggtgtgagccggtgcgaggggtgcgggatgctcttgatgcactgtctgctttgggcctccgggtggccgggaggtggccctgggaagttggtggtggctgaagattggtaagggacactcgcagctgggacagagtgtatgtgtgcagatgagaggcatgcaggtggcaataacgtattaacagtagctactgtttattgagtgcctactatgtgccaggcgcgtgctgagtgtttcacatttaatacaccaaggtcgggac

SEQ ID NO: 235 - DNA, 1063 bp, Homo sapiens
attcagcttctctgcaagtttagagtaatacaagggttctgttactcccagagctgagtgagggccctcattttttttgtttcattttgttttgtttttgttgttgtttttttttccagacagagtcttgctctgttgcccaggctggaatgcagtggcacgatctgggctcactgcaacctccgcctccagggtttaagctgttcgcctgcctcagcgtcccaagtagcagggactacaggcgtgcaccaccacgcccggctaatttttgtatttttagtagagacagggtttcaccccgttggccaggctggtcttgaactcctgacctcaagtgatccacctgccaaagtgctgggattataggcacgcaccaccgtacctggctgggccctggtttttgtacacacgtgcattgcagatctagagaaggtcatgacttgcccaagtacatgtagcacatcagggcagaccctgggctcaaacccaggccttctgccaggactgggttaggcccagagttggggtgctgcacgatgaacaagctgggggacgctgggagtgctactcagtctctgggtgggggccagctctcccggcagctgagcgggcgggagcaggagctggagcaggcccggcgggaggcccagcggcaagtggaggcgctggagcgagcggcccgtgagaaggaggcgctagccaaggagcacgctggcctggctgtgcagctggtggctgcggagcgtgaaggcaggaccctgtcagaggaggccacacgcctgcggtaaggccttgggctctgcccaacccgccctggggggtcctcctggggccacaccatgaccagccacacgcaggcacgggcccccaggggcagttactaaggagtctggcttgccgactcgtcctagctgtggctcaggcttccccagggagtgtgggcctggccaggcaggtagattggcacttggcccatgcctggccactccctgagatccacagtttcctggggccagggaggctgagtcccagggcctcagggactgtatgtgctgcagcttgg

SEQ ID NO: 236 - DNA, 1027 bp, Homo sapiens
aggtgcagtagctcatgcctgtaatcctagcactttgggaggtcgaggcaggtggatcccttgagcacaggagtttgagaccagcctgggcaacatggtgaaaccccgtctctatgaaaaatacttagctgggcatggtggtgtgggcctgtagtcccagctactcgggaggctgaggtgggaagatcactggagcccggtaggtcgaggctgcaatgagctgtgatcatgccactgcactctagcaaggcagagtgagaccctgtaaaaaagaaaagaaaaaaaaaagaagaagaagaagaaaagaaagagagcttgggctttgggctgtcatctgcctggttttcattttcctaatctgtaaaaggaggagcagtgattacgtcacagggtgacacacacaggctcttatcacaggtggtactcagggggcctctgttttatgtctctgtagttctggggtttttatgtgtgtttgggggacagctatgtgtgccagtgtgtatgtgcgtctgtcgggcaggaaactcaggccctggtggtgacagtgcagccaaagctcccctctgccctccccagcctgtccctctattactgcttccccccaccacccccgcccccaaggcctctggcctggggccgagcttagctggattgttgtgtctgcggcttcaaccctggccatgggcccagccgcaggggctgcaggaggaggccaggaacaaagctgggcaggagccagagtgggggccccagacagggcagggctggggctctgggcagggtggcagaggggccaggctcaggataggggctggggaggctctaataacaccccctgttgatccaccctgtctctaggatagtaccagggatgggaggacccctagtctgccttcctgtcccatccccactccccaggcctttttcactggctgaccctgggcaggggagggggaatcaccacctgaaaccctagaacagcagggccccctcagaactgtccggctcagctcagtttgcacga

SEQ ID NO: 237 - DNA, 1050 bp, Homo sapiens
ctagtcccatccccaaaggtgaagttctttcctttctcatatttgttatgccttgtcctggcaagggccccagaatgcttgtgcgtgtggaccatgctggccaggaatccttagcttgttctggttttgggggtctcctccccgaccacccacatggtgcagcctctgggaagggacccttggaggttcactgagaaactggggcctgtagcagcccctgcaggggtggcgggtgccattctctggagtggggcttcttatctttaaaacaggctgggggcccggcgcggtggctcatgcctgtaatcccagtactttgggagtactaggcggatccgaggcaggtgggtcacctgaggtcaggagttcaagaccagcctggccaacatgatgaaaccctgtctcaactaaaaatacaaaaaaaagtagatgggcgtggtggcacacggggacctacccctccctgccctgctgctctttggagagagaagaggtggggcacaaaggtgcttggagctctgtggaccagaaacgcaccaggtggccttctggtgcacttgaactcctctgccggcaatgtaggttgctgcttgggggtgctgggaggggtcctttcctctcttccctgcttctgcatctgcttctgccttttcctccccatctcctgcccctcaccatggattcagcttctttcctttgcattcaggttgctggccttactctcatttgcaagctgagaggcattaggagagcaggaagctcagataagggtgagataattgcctcttactggtttttatggctcttttatgacccggaggcccctgaaggagtgtttgttcacagggagaattagacacggcagccctgcgtggcttccatggacagcggctgggagaggctgctccgggtgggtacagggtgggtccagggccttggcaggcatcagggagggtcacgggtacaggaggggcccccagcctcatttcttgccgtgccctctttgcatgcgtgtcttgagctggaacgttgctcgtgtccctgctcccc

SEQ ID NO: 238 - DNA, 1048 bp, Homo sapiens
cctcttccctcaggcctgaactttcccaatcagtaacccagtggagcctggggccctgccagaccagttcctcctgacccctcatatctgagagtggctccctgagctccaagctgagccagagccagccccagccaccatgctggggaccagagcgtggggggcagctgcagatccaccccacgttgtgcctttgcagaagcgcaacacagcaggattcttaagttctttattagagatatttttaaaaggcttttaagtatttttttcttcccccacaccagcaaatgaaataattgcataattagtaataaatttgttcctacactaagtgtggatttttttagtgtgtgttaacaatttattgcacttccttcccctgacccctttcttccactcgcatactcgactggtattaatgcattttttaacctaaactccctcctccttttaaccagacaggtcattaataaaatgttctccaagagcctgagctttttaaagttgtatatctccagatagatggcttgggtgagttgaacactgccgcattaagtctctgtgataaaatatttattcaccattagaattttttttttctttcggactgtttgtgaagtgtcttgctcttttccttgaggtggagggggagggggaaggccccagaatgaggtctgcagatgaagccatttctcaattccggcatctctttcggtttcttgcttgccttcctcccatttgtcggttttgccgtccagtgggggctgggaggatgcaggggcagcaggaaatggtctcctgccggtctccatgccctgggggtcttggagagggaggcgatgaggcttgtggaatgaaaaattcaccactgtcccctctcttggcttaattgttcttgtgggtttatggctctgatggagctgatcttaagacattagcgtccagatccttttaataatcataaacattatcctaatagcctctatttattgattgtatactatgggctaagagctgtgctcaattgtgtatatatattatatgtata

SEQ ID NO: 239 - DNA, 1021 bp, Homo sapiens
gctggcctaaataagactgggaaggaactgtgaagacggtttcaaattcctaaagccctgaaattctccccctaagtttaggaagagcttttgttcttggtgtgtaacactgataaatgaattggtacctagtgattaatctgcacttttattaagatatgacctactttaccttttttgagacaggatcttgctctgtcgcccaatagcccaggctggagtgcagtggcagagttgcagctggctgcagcctccacctccctggctcaagtgatcttccagcctcagcctccccagtagctgagactatacaggtgcaggccaccactcttaattttttttgtttgtttttaagagacaggtctccctacgtagcccaagctgttttcgaagtcctaggttcctcccaccttggactcccaaagtgctgggattacaggcttgacccactgcgcccagcctgcatctttacattcgaaataaaattcagtcaagtcaaagccggtcttggaggaaaatgtggctttgatgacagcagtagggattttccttcagtgcctacttaccagaggataataataacagcaagtttcttaaacataaaaacatcagaaatgaaaaagaactttccataacactataaatattgcagtatttcaagatactgaaccagagccctaaggaaaggctggagacccagaattttataatggctttgggacatgaattttattttaaccagaggacaaaattaatctgcaaaagctgtcttggagaaatttcaggaaataaaagatcaaatgtatctgctgtcctcccttccctctccaggagaataaaaggcaaatgcaaactatcacagggagattttcacctttacctaaattatttattatatactttatatttctggttaatagattgggagagagcactccagataaagaacttcctttataaatgccacatttatttcagtactggaggtttggtcttgtgttgccacaaagatttggaatgg

SEQ ID NO: 240 - DNA, 1067 bp, Homo sapiens
ttggcctctaggctaaaagccaaggataggacagcattgggggtgagagccaggggctgagtgtggaagagcagttcaggcagaggaagcagcagatgtacagagaaggggcagctgcgtttatatagtggacagagtgtgtgggggtcagggaagggagaggtgaggtcacaggagtcatcaaaggccctgtggcctaagcggcatgctctgctcttaagaaatgtgctctttatcctaagggataaagacaagggtttgatcaggggcttgacattgttttaacagctttattgggagagaattcgcatttcatgcaattaacccattcagtgtacagtcattggttttagtatagccagagttgtgtaactgtcaccacaactaattttaggacattttcgttagcccaaatggaaacccatgcccatcagcagtcattcttcatttctcccggaacctctcagtccctgccagccactagtctactttctgtctctgttgatttgccttttctggacatttcatgattcatataaatggaatcacacaggacctgttgtgattggcttctttcacttaacataatgtcttcaagattcatccatgtcatagcatgtatcagatcagtacttcagtcctttttgtggccgaatactgttttactctgtgtatagcacatttggttatccattcatccattgatggacattgggttgtttctactttgtagccattatgattaatgttgctgtgcacattcatgttttttttttttttttgcctggtgcagtggctcacacctgtaatgctagcactttgggaggctaaggcgggcagatcgcctgagggcaggagttcaagaccggcctggccaacatggtgaaactccatctctactaaaaatacaaaaattagcggggtgtggtggcgcgtgcctgtggtcccagctactcgggaggctgaggcaggggaattgcttgagcccaccaggcagaggctgcagtgagccaggattgcactactgcactccagcctgggggacaagagagagtctccgtctcttt

SEQ ID NO: 241 - DNA, 1069 bp, Homo sapiens
acaccgctgctgagtgctgctgggcccgtggctgcccctagggaagccttccgggggcgggcgctcctgtccgtggagtcgggcagcaaggtgaggcgtgggcgtggcggtcgaagggatggaggctggctcatccccagggctctcccctgcacagcctcatgggtgctaaatggggtgggggatcacctctggctcctacgagacaccaagtgcccccttctgccccacagcccttcacccggcaggaagtcattggcttcgtcatcggctccatctccagcgtgttgtacctgctttcccggctgcctcagatccgcaccaacgtgagcctccagcaggggctgggtggggccgagtagaggagagctggcctggccacccgggccctctgggctaaggagtagcacagcataggagccttggttcagaaagtctggtctactcccgctgttggcttgggcaagttaatccaatctccgagcctccatttctgcttctggaaaatgggcgtggcgtggcctgccagccaggctacaagaggcccatgtgtgtcttgggggagtgggaggtcaggggaaggtgaggggctgagcttggaggcctgaggggagaggagaagctggggagtcggggaggggaggcttgctgggcagctagagcctgtgtggggtggaatgcagggtggtgtggggccacaggcctggcacagccacggtctcccgtggacctgggcaggggcctgggggggcttgtctgtgggtgggaggaggctcttctgtgtgtcgggcccatatccctgggcacccagggaaagattggctcagagcaggtgcactgtggtggggcaggtggacatgtggacagttacaatccagagtgacaagaggcctgttcgaggtctctgacctgacctcctcctgccccagttcctccggaagtccacccaggggatctcctactctctgttcgcgctggtgatgctggggaacacgctgtatgggctgagcgtgctgctcaaaaaccccgaggagggccagagcgagggcagctacctgctgcaccacct

SEQ ID NO: 242 - DNA, 1016 bp, Homo sapiens
tactcgggaggctgaggcaggagaatggcgtgaacccgggaggcggagcttgcagtgagccgagatcgcgccactgcactccagcctgggcgacagagagagacttcgtctcaaaaataaaatagtaataataataatacagtgtcgggtagtgattagagataatgagaaaaattcaagcaaacaggtaggcaggcaaggcctaacttagcaatatttgatcatatagctgaagggaaggagggagcaagccgtgtggatagcagaggcacaaggagcagcaagggtaaaaaccctgaaggtgacagtgctgcatcagcactggtgtgttttcaagggccagacaggaggccagtgtggctagcctaggtcgagcaggagctgaaggacagggcaatgacaagatttgacctaggctttaaaaggatcatgaggctgctgtgttctgaatggactgtagggggactagggccttagaaagccatttctatattgaggacatttatttatttaaaaagcactgatatggcacatcctatgtgatgaacactgttaagcaccttacagataataagccatttaatcctcatgacagaagcctgaaaaggtaaggagcttgcccaaggtcacacagcagagagatgaagctggcttagaccagggtagtagcattggagatggcaagaagtagatagtattctaggtatttcctgatgtattggtggtaggcatgagaagaaaggaatcaaggatgatgctaagattttttttttcatatttaaagactttgtcttctgttgttttttgttttgagacagtgtctcagttctgttgcccagactggagtgcagtggcgcaatcatagctcactgcagcctcaacacccccggactcaagtgatcctcccacctcagcccctccccacccccgccctgagtagctgggactacaggcgtgcatcaccgtgccaggctaatttttttgtagagactgagtcgcactgtattacccaggct

SEQ ID NO: 243 - DNA, 1016 bp, Homo sapiens; identical to SEQ ID NO: 242

SEQ ID NO: 244 - DNA, 1016 bp, Homo sapiens; identical to SEQ ID NO: 242

SEQ ID NO: 245 - DNA, 1016 bp, Homo sapiens; identical to SEQ ID NO: 242

SEQ ID NO: 246 - DNA, 1016 bp, Homo sapiens; identical to SEQ ID NO: 242

SEQ ID NO: 247 - DNA, 1035 bp, Homo sapiens
aattcgtttttgacaaggcaatttaatggagaaaggaaaatcttttcaacaaaccatgctaaaacgactaggtttccatatagagaaaaaaatgagcctcgcttaaaagggtcgtagacctaaatataaaagctaaaactataaaacctataagagctttcccgtgtggagtctggagacgacgtgcagaaatggcacctggaaaggggaaggaaaagaaggaagaacaggtcatcaacctcggacctcaggtggctgaaggggagaatgtatttggtgtctgccatatctttgcatccttcaatgacacttttgtccatgtcacggatctttctggcaaacaaaccatctgccgtgtgactggtgggatgaaggtgaaggcagaccgagatgaatcctcgccatatgctgctatgttgaccacccaggatgtggcccagaggtgcaaggagctgggtatcattgccctacacatccaactccgggccacaggaggaaataggaccaagacccttggacctggggcccagtcggccctcagagcccttgcctgctcgggtatgaagatcgggaggattgaggacgtcacccccatcccctctgacagcactctcaggaagggggtcaccgtggtcgccgtctgtgaacaagattcctcaaaatattttctgttaataaattgccttcatgtaaaaaataaataaaaaaagtgaaacctgtaagagaaaatcctttgtgaccttggagtcagaaaagattttggggaatacaaaaagcaagtttcaaagaaaactgatatactggatttgataaaaattaaaaacttttgctctttgaatggcaccattaagaaaacaaaaaggcaagccgcagaatgggaggaaatatttgtaatacacatatctgataaagggcttagaatacataaagatctcttaattttaaggttcccccccacccatagactcagggtctcacatgttgctcaggctactacttctggcctcaagcaatcctcctgccccagtgtccgaa

SEQ ID NO: 248 - DNA, 1035 bp, Homo sapiens; identical to SEQ ID NO: 247

SEQ ID NO: 249 - DNA, 1031 bp, Homo sapiens
tactcttgcccaggctggagtacagtgacacaatcgtggctcactgcatcttctgcctcctgggctcaagcgatcttgctgcctcagcctcctgagcagctgggattacaggctcgtaccaccatgcccactaacagattgatcttaacggatactgagagacaaggtatatttgggaggagtcgaaatctagtgcatttacttcaattttctttatccaatctaagccattaggatgcttaggataatttatagttattgtaacactctgacataattgtcgacagatttgtagacttaccttactttgataaatgtttacaagttagaacaaacgtttctgattgtcagaacctgcacatataaaccactcagaattcctgtttgatagattttaaatgattaactaaagcaactgatttaagcaacataattcactttttactaggaaggtagtcttaagaaagctgctagtttcttggcatcatttcagatgactaaattgaaattcatttgctgtaggaattttttatttatttctctttttttttttgagacagggtctcactgtcgcccaggctggaaggctggagtgcagtggcacgatcttggctcactgccacctccacctcccgggttcaagcaattctccttcctcagcctcccaagtagctgggattacaggcgcccaccaccacacctggccactttttgtatttttagtagagacagggtttcaccatattggccaggctggtctcaaactcctgacctcaagtgatcccccaacttcagcttcccaaagcgctgggattacaggtgcaagccactgcgcctggtcaaaatttttaatttctttaccatttcagcatagtcctgtatgtgagaaaccatgagcttgttagcttataaatatcctattctgattagatgcaaaaacatattactgtttcaatcacatattttgtcttgacactaaaataaatgctactaattctatgtattcccagaaaagattatgaagaacttat

SEQ ID NO: 250 - DNA, 1031 bp, Homo sapiens
ctgtctagtccagatagccacaggaagggtaaggtcttgtaaaatagccaccttcttagtatgtttcctaaatgctctttgtcagtgttgacttttgagaagctgattaatacagactaaattcaccatctctgggtccttggtctggcactttcctggttaattcacatgaatggcatttacatgtggacacctgggacaatctgtcttgtcctcaaaggattaagtaacacagtttgaagctgactttaaactattttttccgtcattaatggggccctgagcatctttcataaatcaggaatgtgtcttggaaatgtaattctcactaaactcagttccaagggtattttctataaaagcacattcttgtttgttctgtcataacacatgcatttgatgattgtaatagcattgacagaaacacgattgaacaggaagcacggccattataaataggtcagtttgatataaattcatgttcaaagcacaaatacagctttattagacacaagacaactctaggaaaatattgattacattttaaagcaaaatggtctagttaagcagcaagtctgaaaggatcctctattaaaaaatatatatatatgtatatatatacacatacacacacagcaaagcccgatgtgtcatataaacaattactgatgtcaatgaaatacagtcaactgtgcaaagggtaggaaaaaactggttctgattttcagctgtggcttatccacagtgtgatcctacgtagccagtgagttgtattttaataaaggattagctattatactacacttttttttttttttggcaaggtctcactctgttgtccaggctgcaatacagtggtatgatcatggctcactgcagcctcaactcccaggctaaagtgatcctcccacccaagcctcctgagtagctgggagcacaggcatgcaccatcatgcctggctgatttttatttatttattattattattattattttgttttgtttttgtttttgtagagatgcagtctga

SEQ ID NO: 251 - DNA, 1078 bp, Homo sapiens
cccagctccgcaggaccggcgggcgcgcgcggtaagtcccgcccgggtcggcacgcgggcgcccggcttccagaggcttcggccgcgggggcagtgccgcgcccccagcccggagctgcgtcccccggcgcgtccggcggccgcgggcaccgggtggaggcgccgccgccgagctcaggagccctgggggacctggcgggcgcctccggacgccggcgctggggacgtgggcgcggcacggggtggccggggggcaccgccgcgtccggagcccgtccccagactcgccccagggttccgtttctggatcggagtttccgcggccgggggagagagggagcgagggagggagatgcgtggccgggcgggccgggctcgcatgtcccccggccgtgcccgggcctcgccgcgccgcgcctctcggctctggacgtttccgcctcccgcggccccctctgcttcggtccccacgtccgtgtgtctgtctctccgtcgctccgtttccgccgctcactttcccctggtctgcccgtctctttccgttccccgcctgcctccgtgttcggctgcccgcgtttgtgtctctgcctctggcttttctctccctctctctgtctctgcgctgccctctgtgggggtctcgccctgtgtctgcgcctctccctgatcccccgccctccgatccagacaatcccccagtgtcggaggctcgccttcccccagcggggttcacgaatagtttcctagaccgggtgcggcaaaccctccccctgcctcccgccggccccgaggcctggcccgggtcatctccctggaattgagtctggggcagggagagccagcctttccgggggctcagttttcttaagaattccacccccgcgaggccggctggacgacaggccctgctgcgggccacctgcccggcccgctcccagggcggggcgattctgatcgtttacaagcggcggcaaagggggcagccgcctgccttggcgtggccggaggttggcgggcatcaagggagaaagccacacttccaggctttcggaggccctcgctccccaagctggacgcc

SEQ ID NO: 252 - DNA, 1071 bp, Homo sapiens
acagcaggaaggccctgaaggccagcctgacgctgggcatcctgctgggcatgttctttgtgacctggttgcccttctttgtggccaacatagtccaggtaatgccacggcagggggcaggtgagtccggcccttgcaggagaggccctggatcccagcccaggcatggggacaggggagggtaggctgcctctcgtggtgcgtgtgtgtgtgtgtctgctccatacatgctgggaagggtggcctgggtccctgccctgggaccaggcatgatgcatcccctccccccaggccgtgtgcgactgcatctccccaggcctcttcgatgtcctcacatggctgggttactgtaacagcaccatgaaccccatcatctacccactcttcatgcgggacttcaagcgggcgctgggcaggttcctgccatgtccacgctgtccccgggagcgccaggccagcctggcctcgccatcactgcgcacctctcacagcggcccccggcccggccttagcctacagcaggtgctgccgctgcccctgccgccggactcagattcggactcagacgcaggctcaggcggctcctcgggcctgcggctcacggcccagctgctgcttcctggcgaggccacccaggaccccccgctgcccaccagggccgctgccgccgtcaatttcttcaacatcgaccccgcggagcccgagctgcggccgcatccacttggcatccccacgaactgacccgggcttggggctggccaatggggagctggattgagcagaacccagaccctgagtccttgggccagctcttggctaagaccaggaggctgcaagtctcctagaagccctctgagctccagaggggtgcgcagagctgaccccctgctgccatctccaggccccttacctgcagggatcatagctgactcagatatcgtgttctgaaggatgctccactgttgagtgtaacttgtgtgtgcagaggatgggctggaggactctggatgttggggagaaggacctcttggttcaggttaggatgaaaacaatcatgacctttgcccattc

SEQ ID NO: 253 - DNA, 1050 bp, Homo sapiens
atatgtggctcttttcctgcacggtgcacttcgtcaacatagtgttaccaaatttttaaatccttttcattgttaggggaaaaattgtttacttaacctagttttaatttgcatttctcttatttatgcatcttttcctgtgtttaagacatatttctattttttgtaaatggtattcattttctttctccatttttttcctattaagttgtcttaatgattttggggagctttttatgtattagggaaattagcctctgtctgtgatatgagttgcaaatagtttttcgcactctgtcatttgtctttttgttctttctcctgtggtctttgctatgaaagaattttagatttttacatagttaaatttgttacgattttcttatatgccctttggattttgggtcataactgggaaagtctttcccactctgaggttaaaaagaattctcccatagtttagaatagtactttcatagtttcactttatttatttatttattttttgagactgggtctcactctgtcgcccaggctggagtgcagtgctatgatcatgtttcactgcagcctcaacctcccaggctcaagcgatcctcctgagtagctgggaccacagctgtgtaccactatgcctggctaattttttattttttgtagagacagggtctcactttgttgcccgggctggtctcgaactcctggactcaagcaaccctcctgcctcgaccacccaaagtgttgagattacagatgtaagctactgcacccagctcatagtttgacttaaaaaaaaaattaaatcttggcttcatctgaaatttatattgaaataagggtaggaggctatggatccaactttatatttcccttgtgattacctagttgtacccaaaccattgattaattatacatcttttctccactgatttaaaatgccactttctttccatatactaaattcccatatgtatttgggtctattcctagacatttggttctggtccactgatctccctgttcacatgttgatgcctcattgttttagtt

SEQ ID NO: 254 - DNA, 1083 bp, Homo sapiens
atgatcaaataaggcttgggaaccagagggaagttgtatgtaggtttcttcaagaccagcaccgtttttgtgcaaaagttcaccaggtgcgagtatagaggatcgttttctgttaagctcacggctctgaaaatcagctgaggtgactgtgtgctgtcagaggcagcagtcatttgccagtgttggcatttagacatgggagtgcgaatgcctttcttactgagcagttattctgtcttttgggcctttcttttcaattcctctgttgtgactcaaagtacaatgagtggataaaatggagcctagtcattgctgttctcttaaggttgtttctagaaggttttcccctatatatatgaatttttccagattagagtgtcttgtgttaaagattctgaacatagtttgattctcaacatagttccctgattattacttgtttcctttagtttcagatgcttcatcaagatgaatcaaataaaagagaaaagatcaagacaaagggaatggactctgaagacgacctgagagatgaagtagaggatgctgtccagaaagtttgtaatgcaactggatgttcagttagtatttctgtcttgcaggaatgatttagaagcaagcattgctgtgcctagcttacttcttagtttcgtagcacctctctagcatatcagcaccttgtgggccaaaataggcccatgagatttgtagtttgattagtgtatgtggcttaatgagagctgtttattaatttccctgttgtttgctagacttcacccagtactgctcaaaggtcttaggaagtatgtggatttaatttttcctgactagtgtttacagtagtacaaatgcagttttatagagggaattcatttataagtgtacattagacggttatttcaagggaccaaccttattggaaatcgacatttttctaaatggaaaaggtcctgaaaccttgtgttaattctcactattacatctttatgtttatgattattgaagtagagctaggcagaaaaatatacccagagttttgaagtggtttttttgtttgtttgtttcttggataggattttaatt

SEQ ID NO: 255 - DNA, 1021 bp, Homo sapiens
cccgagtggaggcccagtatgtctagtcctgggatgactgttgtcagcagctgttactctagtacaggtgctcctgtgaactctttattaggaactgaatgtgtcttaacctctgtgttacatcttggctggcagagatttatgttacatgagattgtcttggtagcttgtagtgtggtcaggagaaaggggatggagcagtggtgcatagctgcttactgctcttataaacggtatataaaggttttacggattttgaaaatatttttttttagaggtcaaaataaataccattttagtggcaacagctttgaactagagaggtagatgtattaaagcagcatagaaccataacttctagataatgtagttgccactaggagatattagaaagttagaatgtatgtgtgtatttagtttttcaataataatgaacatacactttcaggagcaaagtatggttgagaaattgtggcagaaagaattttaaatgttagtcgaagttgtctgtagtttctttattaagctctgaaaacacttccaatgccagtttgattctgagggcttgggaagtgggatctcccttgtggagcagctggagctggctgggagggagcctctccatgggtaatttattatgcctgccctgcttcccccagggagctgcttcagtgtgaaatgatgtgattgtcgggggtggggtgggaggagggccaccttcagtcggggagttgctcacatattacacaggtagcatcaggtggacttcagcgctgaactgtactagtagtgagtccctgtagtcaatgtgcaatttctctaattctgagaaactctgtagactctgcctgggttttactgggtcagcatagaatgctatcagtttacctctgtgaaatattcagtcagttgaaggaaacttggattcctagtcagaggtgactaaaagttaccctgaccaaaaggatctctgcggggggaagagaatggagcttcctgattttaatgtgttgcgtcagtg

SEQ ID NO: 256 - DNA, 1050 bp, Homo sapiens
gtgccatccgggaagcgccagcccctggcccatgcccctcacccctcccagcctgcattctcctcccctctgctccagccaccgctggctcaggcaaaactggcctcagggtcaccctggtggcaggaagggggcagcctccagtgtttggcatccaccacaccctcggtagggccaggctcaggggcatccagggagcttggggttgccagatggggcagaaggctgaaggtcacaaagatcacttacccaggaggcaaaggaacaccagcacgtggggagatttcatcccaggttggggggaagggaggtgcacaaggagcataaaaggcagcagaagaaagcagcagggccacctctgatctcagggagcctcctaattagttaaatacccaggtcctgtccactccctgtcattaacccgtgagtgcccagtgatgcaacgattcttccaggtctgacactttggccaagtccccggggaggggccagctggggcctgtgggctctgcttccaggcagtgtgggggatggcgggcaatctcgtggctctttctactcacacccttcccatcacccaccctttccaaaaaatcatccattgaccacgctgtgaggcgcgggctgtgccaggtgcttgtcattcttggtatcttttcctcatctccacttgactgagactcagagagactgaaaaacctcagttctcacagcctggaggtgcccagggccaagtccgtcctgtttcagagtttccacccgggcagaaccggaggcaggaggccctggcctggcctggcgcttcccctccccgaccctcctgctctggtctgtgactgggatcactgaccctgcacctccgtcaccgttcagggcctgggagtcgctgggtctgtggccttggagtcctggttccactgcgtattaggcggccgtgggcaggtcctttcccttgcttggaacctcagttttcctgcctgtattatgaggatagaaggtgtccctcttgcctcccgcacaggaggatggaaaactcacacgcaaccaggc

SEQ ID NO: 257 - DNA, 1066 bp, Homo sapiens
aatggatgggaaatctactaagaaatcaacttagtaataattagaaaagctctagttctgaggacagagacctgatggagtcaccatagtgggaatttatgacctggcatccggttcagatacctggagcttcttgagtgagggaagattggatcccttgaggaagagtgaagccttcaatgctgccaccagtgtatgctgtaaatcttcctccaggccttccccagaaggccctgaagccatttatgtgggtgactgaggaaagggaaatactcagagcttctgtggcttgttggattctggctctgaagaatgctaaactaagggcacctgtggtggccatgaaaatgcactacttgcatctccagctgcaggaggcctaacgaatcagcagccccagctgctacactccgaatggaggacttgatgacatttcccctggatctgcactagcccatgaggaggaaagcctcctatcaagtcctcccagcagaacacccatgatgactcatgaggatgttgaaagtgttttcctgtgtcaactgtgactttctttcttcaaagtctgttttgttcctgcacattaactgatttatatcaaataagagaataaatgcctagactcccatgagtctatcttttactgataaactcaatagttctgaggacggaagcctgatggagtcagtatagggggaatttataacctggcatccagttcagagacttggagcttcttgactgaggggagatcgggtccctttggggaagaaggaagccttcaatgttgtcacaagtgtatcctggaaatcttcctctaagccttcctagagagacctgataatatgacttatgatacagtgaccccaaattcagggtgttcttgtctactctcaagaatgcaatatcttcttcctctgaattgaacgtagtaccaatatttgtgtgtagctatgcaccttaatagaccatagctaattagatgaggaatggtagacccaattcaaccatacaggcgtcaaccatatcagcatacaggcatccctctcccaccgtttccttcttg

SEQ ID NO: 258 - DNA, 1050 bp, Homo sapiens
tccttttttgaccacttccttatgttacccctgaaatctagttggggctctgtggtgtctgattttccctggctgcttctttagttttgtctccttttccaggctcaacgaggtgctgatggaagcagaagagcctgaagtcttgcaggactcactggatagatgttattcgactacttcaacttactttcaactacatgcctcattccagcagtatagaagtgccttttactcatttgaggaacaggacgtcagcttggcccttgacgtggacaataggttttttactttgacagtgataaggcaccacctggccttccagatgggagtcatattcccacactaagcagcccttactaagctgagagatgtcattgctgcaggcaggacgtataggcacatgtaggtttgaatgaaactgtagttccctttggaagcccagtcataggatgggaaagtgggcatggctctattcctattctcagaccatgccagtggccacctgtgctcagtctgaagacgttggacccaagttaggtgtgacacgttcacacgactatgtagcacatgccgggagtgatctgccagacattctaatttgaaccagatatctctgggtagctacaaagttcctcaggggtttcattttgcaggcatgtctctgagcttctatacctgctcaaggtcagtgtcatctttgtgtttagctcatccaaaggtgttaccctggtttcattgaacctaaccccattctttgtatcttcagtgttggtttgttttagctgatccatctgtaacacaggagggatccttggctgaggattgtatttcagaaccactgactgctcttgacagttgttaacccactaggctcctttgagtagagaagccatagtccttcagcctccaattgatatcaatacttaggaagaccacagctagacggacaaacagcattgggaggccttagtcctgctcctttcaattccatcctgtaaagaacaggagtcaggagccgctggcaagagacagcatgtcacctgggactct

SEQ ID NO: 259 - DNA, 1035 bp, Homo sapiens
ggaaatcgcaaaagaccttcccagcctggacagtctggggctgcgtgctctagaccgggggctccctaagggcaaatacctgaccctgtgagtcctgccaggtacaagctggggcataccagctgatgctccctggaggcacatcagtttattaggctgcttggtagagccttggagggtgtccttggagcaggcctgggagctgggtgggcttggatggggaaggcccccggctgagctgaggtggagagagcttggcacaggggtgtccctgggtaggtcccacatggaggcctgtgcagggcctggcccagtacctgccatcgatgtgacctcttcaccatggccaagtggacctccattttctcacctgtaaagggggacagctctgtctcactctcagggttgttaatgaggacacagcaggtcaggtgtgtcacagtcagcacctggtgcaccgtagttcttgaatgggaaaccaatgttagacgccaaaggaaacagtttcggaggtgcagggactgacccagcaacacacacctgggaagtggtggagcttgggcttggatcagatttgctggctgtgtgacagctcacccagtgacttcattgctaggccttggtttcaaaatgtggtgactgagagtggtgctaaggccctaagtttgggtcacactctcacctaagtgagaacctgaccaaaaagggggaattttaaaacaaaattatgagctgggcgtggtagctcacacctgtaatcctagcactttgggaggccgaggcatgtggattgcctgagctcaggagttcaagaatagcctgggcaacatggtgaaaccccgtctctactaaaaaatacaaaaaaatcagctgggcatggtggcatgcgcctgtagtcccagctactcaggaggctgaggcacgagaattgcttgaacctggaaggcggaggttgcagtgagctaagaccgtgccactgcatgccagcctgggcgacaaagtgaaactgtctcaaaacaaaaacaaaattatgag

SEQ ID NO: 260 - DNA, 1033 bp, Homo sapiens
tgatgactactagttctcttactctcctaaaaattattcacttaatgtttgtttccttatcttcctttatttctttgtttgcaaataacttttaccgcttgttcactactgtatcagattcctggtcatgttatgctttgtgtcttactagtttctacttttagtttctcataccttcagtccaaaatatttttactaaagcaattttcattacttgccatttcagctacctctgctgctgctgctgctattttaagtcctgaatgtcaaaactcttctgggacattgatctcaaactgcttattccgtgaagtgaaaccaggctttctgccaccaatgtggcgtccctttttgcaattttagaaaaatattttttaaatcaaagatttggcattagccattatactaaagtccagaacaatttctaatagagcagaaaactatattgttcagccatggtattcactaagcactggtgctctatcaccttaagacaaagtctgatttaggctctgttactgttgttctgtaatgctttacactttaaccttgcatccttttctgtaaaattaagccattgccatttgccatttcaattctgctgtgtgttcttgattggtatattgctactataatgattaaaagcatagactctggaaccagactgcctgggttcagatcctggttctgccacttattaggtatgtgcagtctaagtaacgtctttgtgactcaggtttacttcctctaaaataggggtagcagtagtgcttacctaacagggctgcagtgttaggaagattgaattaatatatatgaagtgtttaggactgttcactggcacatagtgagtgctgtatagatttttgctcttggcacaactgtgaggacccttccccgccatctttgagaagctgtgtttctctcaaacataaacattttaataaccatccttctcccggactaatctgatgaatccaaaaacatttcttttttcttttttgagatggagttttgctcttgttgcccaggc

SEQ ID NO: 261 - DNA, 1776 bp, Homo sapiens
acgaccaaattactctgtgctgattctgaaaagatttgtctttttggtgcatgtataagaacataagttgcctgatcttaagagtttttttctgattgggtatggtggctcatgcctgtaatcccagcagtttgggagacctaggtgggaggattgcttgaggccagcagtttgagacgagcctggtagcctggtcaacatagtgagaccgtggctctatttaaaaaaaaaaaaaaaaaaaaaaaaaaaaaaaaaaagattttttccgaacttatccatttgtctatggtacaaacctatcctctaatttttcaaaccaaaaaacgtctttataactttgtccttaaacactccacctccaacctgatgacctattctctatttctatgctactaccgcagggcagatcctccatttcaatcttagattattaccctagtttcttagctgacttccttgactatctggttgtctttggcagcccaccttggaatacaggcacaatattgatactcctaaaacactgttcatggatatggaagaagtgactgttctgcttagcttttagagtctatatgacttggactcatagtttttttttgtttgtttcttttttccactttgcatgcttgcttgtgccttttctcctgatactcctatctaactagagatttattttcacattattttagattactctcccatgtttactctgaaaatctgtggcactcatatttcatagtgtaaaattgtagcaatctgagactactacagttgttagcctcttctccttataaccagtaaagtatactagatgatgtatgatgaactttctagcatagaatttggtacagagtaggcatttagtaaattattgaaatgtgttaaaggcctttgaaggcaagatttctgttacccagtgtaatgctgtagtaggcatttagatatcttacttagataacttttgtaataagttaataggatttcgttcttccaagaacctactctattttaacagatgttttaggtcctaacttgtgtcctaattagatagagagggtctgttaggtgcttgggatcttgttcttcaactgcacacataccagcacaactactgttaaatttcttttgcgcttttttcccctttaggacaaaaaaaggatttaacagttatgtgcttttaataacattgtattactttgttggtaaccttcacaacttttttttttgagacagagtcttgctcttgtcatccaggctggaatgcagtgatgccatcatggctcactggaaccttcgcctcccgggttcaagtgattcttgtgcctcagcctcccgagtagctgggattacaggtgcgagccaccacaccggctactttttgtatttttagtagagatggggttttgccatgttgaccaggctggtctggaactcctgacctcttatgatcttcctgccttggcctcccaaagtgctgggattacaggcgtgagccactgcgccaggccttcacagtcatctttagtatgtataacatttcatcctgtggtgtattattacttgttttttttttgttacattaactgttttgatgatacagcatctcattgtttcttgataaagtatttccttctttttggataaattacctgaagtggaaatgtatgtgtagggcattaaaaaaacaaaaaaacaaaaaaccttgtgttttcctaatattttgagggaaaatcttactgtaatctttcttcccttctaatcaaatactcttgt

SEQ ID NO: 262 - DNA, 1027 bp, Homo sapiens
atactcttgccctaagaagatcatctcagaatttctactgacctgttataaatagcattagaggcttgttgattaacaaaggtgtattttaaaatacctttttttagtgggtgcctgagataactcaccactgtccaaagactcctttcttgcttgttgggactcaaattgatctcagagatgacccctctactattgagaaacttgccaagaacaaacagaagcctatcactccagagactgctgaaaagctggcccgtgacctgaaggctgtcaagtatgtggagtgttctgcacttacacaggtaagaatggcatgaaaccccatgtgtatttatggtcgagtcatttattagagcattaggatacaggagttatttctaacagtgatcagcagtgctcaaagatgcccagcaagaatatgaacagcttcatattgtatgttcttttgttagaggcctctgtgttttttggagaatattattagttcctaaaccccttgtgttggtaagctctcgtattgtactgaatgattcgtagtggtcagggttgtgttaaaacaaaaaccttacaggaaaggttcagataagcataaacttgcaagagacgatgtgaatgattttttttttttctaaacacttaaattttcatctgaatatgtctgatcttttcttgccaattctgacaattgatactatactgtttcttgggcaattcaaccaggatagggaattagtcataataattgagactttaatgtcaaagaaggcagccatggctatttctgccacagttctcaagcgtgctttatatagtgtccctattcctatatttttggaagtattccttcctcatgcattccggccgtttttgagtgatttaattggaactccttttgtagtttgatgggaaactcagattttgaagatagggagcaatgttagggtatttggaatgggacttgtaactgatgtgtatggtttaaactttttcaccttcatgatatcgctgattccgtcctttgagt

SEQ ID NO: 263 - DNA, 1045 bp, Homo sapiens
gggcagtttagtgctattatagaagcagttatttaaaagtttagaagattttacaccttctcatgcatagcaactgttttgagagttttaaaaaatgcctggtgcttctctgtgtgttttagtaacattcccagaaaagtgtgcctgtgtgtgtatattgggggagacaagggaaagtcatgtgtgaaacactcatgtccatgttagacactaattctgtgtgcttctgatgcatacctctgttctctagatatgggttgctttgagggaagacacataggccctgtggattcacttttaggttactagtgatgctttagataattggatgcttttaatgtaagatttttacagtatcaacaggtgtatatagtaaatccgtttgtagagagtatgaagtttaaaaggtcttagcaggtacatttttcttaccagagtttgaagtatggagaagtcaaaagaggggaagttagaaaatggggtctgtggttgtgtttgggagctagaactttgaggcttacagattctgtttgttgattcctctaaaactaaagtcttaatataaacagatggtggtcaagcaaagattagttttgtttcatagagcatttgttgatcttcgtccatggtaagcaagaaaggaattccttcttgttaagggatacactccagtttctaatagtcctcctcctctttttttccttataaagtatatttccctttctgtactccttccttccttttatattttactgccagagttggttcctagatgtgcagaaagaattgcagtggaattttaacttttatgtggcatttctactttgtaaatgatgtagaaagaggaaggctttttaacttttgctgcttttaaagaatttactgctgtttctgatttattttgtgtctaatgtgacatgtgggtaccagtcctgtgggatgtcatggatgggggcagggtggaggtgggaacacttggggtggtctggggttggcacttacaattggagctgtgttctgggacttttaggacatatttacttgg

SEQ ID NO: 264 - DNA, 1711 bp, Homo sapiens
tgcctacataacactaacaatgcagttcattcctttgttcataaattcatttatttaacaaacgtctgcttagtacctgtattcgtctgttctcaatgctgctgataaagacatacccaagactgggtaatttataaaggaaaagaggtttaattgactcacagttcagcatggctggggaggcctcaggaaacttacagtcatggtggaaggggaagcaaacacgtccttcacatggcggcaggagagaattgcagagcaaagtggtggggggtagggggaagccccttataaaaccatcagatcttgtgagaactcattatcacgagaacagcatggaggtaaccgccctcatgattcagttacttccctccaagtccctcccatgacatgtggggacatggggattatgggaactataattcaagatgagatttgggtggggacacagccaaaccatatcagtacctctcatgatgcagtaggatgaccaagacaaaattcttaaactggcgggacttacattctagtagggggaggcagacatgattaaaatgtgtatgtcagagatggtgttaagtgctgtagagagaaagtacgggactccacagtcccatcaggtctgattacttacacttctcggatttaaaaaaggagatccttgaaagtcttaaaaggctataaggaagaaaaactgcttctcaaaatctaggttttgtatatatcgtagaactgtaagtattttaaagagctagaagattcagattatgtttatttcctctctgattttaattgctttgaggatattatagtcttacttggttcaagttagttgaacttggttcaggccaagttatcagtaatgggaatgataatgataggtgagtctctctttaaaaagacaatgggaaggacttttagaggttatttagactagccctctcaattttggcggggtggggtgagtgtaacagctttattgagatataattcctgtaccatacaattcacttaaagtgtacaagtcagtggtttttagtttattcacaaaattgtgcaactatcacctgataaattttagaactttctctttccttcaaaaactcttttcttcaaaaacaccctttagctgtcataccctgaaactttctgccccatctgcccagccctaaacaaccgctgaaccacttcctgtcactgtagatttgcccattgtgaatacttcgtataattataatatgtagtcttttttaaccaacttgtttcacttaacgtgttttcaaggttcatccgtatggtagcatgtgtcattacttcattcctttttatggctaaatagtattccattgtatggagataccacattttgcttattcattccatcaaatgatggacacgtgagttatttctaccttttggttacaatgaacattgtgtacacatttttacatgatctctcagttttcaaatgaagtaaatgtagtggggtgatttgcccagttcccagtgtggttccaatgcattgtggggctccggaggaggcagtggtgccacctgcttgaccaagatcgtagctagctgtgaggagcttggagcatgtaggcatttctggaagaattgaaattatgtttagtttcagggccttctgttccttcaggaggagtgatacaatggcatgaggatggactttggtatcacattttctactgag

SEQ ID NO: 265 - DNA, 1025 bp, Homo sapiens
gtggaagccgcggccacagcacagcagctcacagccgtcgatggccttggacgtcttgttgcatgtgcggcccctcgtgcccagcacgccgctgcgcatgtcctgctcacagaagtcggggctaggctccaagtacaccaggtcctcatctgtgtgcggcttgaactgtgcgttgcgtggcaccagtgccctggaggagcccacgcggcgtggctccacctcagtggcaccatcaaacttctccttcagtgcgtgacccacctggcggaagggcggcacggctcgccagcacgtctttacctcacaggagcctgacaccccgtggcacttgcattccacccgcatgtgtgtcaggatggcctgtgggagagggtgggggagaggggccatcaggagatggcaagggaaggcaggggagggccgcggaggctgacagccgagcatcggggtccctggggctgacgctgcagtcagatttgccgttgtgcctcctcttaggaattacgcggtactgggctgctaagcagtgttgtgacaggtgaacgaggtactgtccctgcacttggggcactgggagttgaagaaagagaagcactaagggtggtgtcctatcaacagtgagtgacaggtgtggggtggggagaacactgctgcatttaacctccacgggaaccttggggagtaggcatccagaaggcaggtggcattacagttaggcacatgatcttcgtggtgatggagagaaaggttcacatctagctctgctgctcttttggggaatgagtgtgtgtgagagacagggatggacacatatatgtatgtgtgtgggggggccatatgtatggagggggccacttaccccattctgtaacgcctgcctgcctgtctgtacccccctctggcctgtcctgaaccccactggcctacagaaggtgccaggtgctggtgagagcctgcacaaatgttttctgagtggccgtgtgggtgggagagtctggggccctgcccatgctatccctaccccg

SEQ ID NO: 266 - DNA, 1050 bp, Homo sapiens
catggaccagggactcctgggtccaaatgtcatccttgtgttgcttgaagcaagttagtgaacacctctgagcctcagcgtgttcatctgtaaagtggggagactggaattcctgcacgcaggaggcctaaatgaatgaaatctgtgtgcaggagatgctcgtccctgctgcagcattgtcctagcagcaccttcaagatgctcactgtcatcggtgccgtcaccacccctcccacagcctctcccagttcctctggccacccctctgctgcaccccagaccagacccatgctgacttctgctcatttgtgtgtgtgtttttttgcttgggtctcttggccctcttagtcctgggttcccagtctttttttcagctgatcatgcctgagaggtgggacacgctcccccggggtacagtggatgacctcagcagccatcccaatggcaggcttttgacagagtctccagatgaagtctgcagagtttgaggatgtgtttcctggcgactgtcagtcagaccctctgaggctggggagtgtgagagatgggtggaggggatggtgctgctaggacatcaagagctgggacactggggtgagggcagggacagtggtgtgcaggacaagctcaggagtgtcaaggggacttggaaaccatttgtgggcatcacagagtggatgcatgggaccttcacttatactctgcaatcaatagtcacgtgcttcagtatgtccttagtgcaacagcacagggctggctaggcaggtgtcttcccctctgtttcgcagatgaggaaactgaagctcagagaagcatgtgtttgagcccatgcagcctgcagtggaaggtcaggatttgaaaacgggtcactctggctcctaagccaaagatgacccagggtactgaggcatgaagtttggcagtcaacagacagtgacctgagggaggaggcctgattcttcccttgatgggtctttctagagccccatgtcttttctgaactacagtgaggtgtctgggctgtgttcaggagtaaggggtgctggggac

SEQ ID NO: 267 - DNA, 1048 bp, Homo sapiens
agcccagaggtcatgaagctattctcttatgcttagaagcttttatttatctttcacatttagacagacagtttatctggaataactttgtgcatggtttgtgaagtagaggtcaaggctttttccttgtggggacacctagttgatcctttactgaaaagattttgcttcccacactgcagtgcagtatcacctttgtcatgcatccggtatcacaggtgtggggttgttcctggactccctaagctaattgatgggtctgtctatccttacaccaatattacaatgccttttttttttgagacagggtctcactctgtcacccaggctggagtgcagtggtgcgatctcagctcactgcagcctcgacttctctgggctcaggtgatcctcccatcttaccctcccgagtagctgggactacaggagtgtgccaccatgctcagctaatttttttgtattttgtagagatggggtttcaccacactgcctaggctagtctccagctgctggactccagcgatctgctcacctcagccgcccaaagtgctgggattccaggtgtgagccactatgttcagcctttttttttttttttttttttttaaatatcaacttttatttggcatctggtgatatcttgttcagagaacaagtcctctagcttgttcttcattttcaagtttgacttggatattcttggtgttttgcatttccaaacaaattttagaatcatcttgacacctttctgtctctctctctgtcacacacacacacacacacacacacacacacacacacacacacacttatgggattttaaatcataatttcactgaatttccacatcaatatgaggagaattgacatctttataatagggaatcttctgatccagcttatagtttgtttaaaaaataaagttgactttatattttcctttgtaaagtaataaagcagaagaattggaaatgtaaacatacagaaagaagtgagttttggccagatgtggtggctcacacctgtcatcccagttcgagaccagcct

SEQ ID NO: 268 - DNA, 1079 bp, Homo sapiens
aatgcacataaaagattggcttgtgagcaaaggattttattaaaacattttgatttctgttgctttaagaaaaagaccaaagtttcctgccataggatggcaaatgtattcttcatcactactagttttattgtgggggtctcactgaagggttggcatatccaatcaagcatgtagctctcagacagcatggatttgggagtgagagatgggattgttactcagttcagccatttcttaattatgcccatgggcaagatactgccttaccactctaaaccttgattttcctaatctgtaaaatagggatgataatagaacctactcatagagttattggaaggattaagtgagttaatttacataaagcacttagaatatgcctgtcatagagcactcattatgctaatgtttttattgttgaatctaaagtggggagaaaggaagcatccctccacttgtgctgttgatgacaaaggaattagtgatgctctggggagtgtgctggaaatcctctacagagaattagaaaactccagaatgcccactgcaaaccggacgagccagggtgaaactccctggaaagtgataaagtgtaatttaacttgaaagatgtaaaatgaggaatggagatgaactacatgatgctgcagagacagttagtcttgaaaccctggaggaatcccacctcctaggatgaaggtgggggtagtcaggtgactgctacactgatttctgatccttggagtctatgaccctgcctgttacgtaaagcagagtcttcacatttgttgctgtacacaacaaccagtgtttcactgatggctgcctatggtgttttcttttcctctccacctcttcctctcatggatgtcccgtgaaactagacatagaagatccttatgactgcaagaagtgcaggatgagtttccccactcttcaggatcaccggaagcacatccatgaggtgcactccaaagagtaccacccctgccccacgtgtgggaagatcttcagtgccccgtccatgctggagcggcacgtggtgacccacgttggagggaagcccttcagctgcg

SEQ ID NO: 269 - DNA, 1088 bp, Homo sapiens
accgccccccgaccaagtgaaagaaagcatggagcatgtgaagtggcggcgagcaggatggaagagcactggggaaacgtccaacaggacaggaggccggtggcagaccctgtccatccctggccgatggaatccaaaggtcaaggtctcaagaaaacagcctccttacatctgctcctttgctctccaaatatcgatagagtttcctctctggctgacagggtgctggactccggggcaggcaaggagacgggacaagctgacagggaaaagagtgggcgagacagagcatgatacggggtccaacgtacttcccagaggaggctgtgaaccccccggggcggcaggtgcacttgaggacagaacagggttatttcatcttttatgctgttatgcattgcctcattttctcaccacccattttccctgctatgaaactttcttagccacctgtcatgctaacgaactgtgttctcaagagttaaagaggttgactttagaacttataggatgtggagaattttacctaaaaaaggaaatagcatgtctatatgtccatagaaagacatggaggcaggatgatcaggtgcttactttgatgtgtctgaggagggtgggtgttgagggcagcagtgggggttgagactgagaatgggagtggggtggtcaggtcctgaagggctagaatggaaggctggggagtttggatcaaatgctgagggcagcagggagcccttgaaggttcttgagctatcaagggacctggccagattcatgcttggaaagatcactgacttgcaatgtgtggtgacgttcagatgagccagatctggtcctggacagtcacagtaaagccagcttgtcggttcccggctagactgtgagctccctgaagacagagacccatctggctcatctttgtgtccacagttctggtctgaagagctctgttcaaattccacctccccagaggccttccctgattctctcttctaaaacagacccagttctgcttctttccatcccacctgctttgttgtgcttcatgaaacccatcgccacctgaagaagcatcaaagacttgtttg

SEQ ID NO: 270 - DNA, 1050 bp, Homo sapiens
atgaatcaagtcatgttgttgctccagagcatttccacaactccctgttgcttttgggtcactcttccttggcccataggccctgtgcggcctgcttcctgcctactctgcctaatttccatcacccacctcagtctaggggttctagccactctggcctttcagttccttgcaattcctagactcttcccaccacagggcctttgcactgcttggtccctttagctggaatgctgttcccttatccttggataactctcacccatcctccatgttttcaaggaagtgttcccagagcatagctccatgggccaatcttttgctgcatttgtcaacatcataattttaaaataattaatgtgtttctttgaacatctctacctctcctaccagaccgtcaactttacaagggcagggaccatgatccaattgcttcatcacttagattccctgggcctagcatagcgcccagcccctagtaagtgctcaactgatatatattgattggaagaatgaatgaatgaatgcacggctctcagatgactgaaaggaggatatgcttctgtttgttcttttgggtgacagttggcagagtgctgtgacatccatcatctccctttaattgaacggagtgggattgaagtctgcaggggcttggcacagggccaggccccagggtgggggtgtgggatccgaggtgaattaggcatcatgggcctggccttggggagctcacacactggctgtgcacagccccctgggaggaaggtcccactggtattgttctcctggatggacagatgaggcttctaatactcagagccaggggcggaggcgggggtggcttgatgaggccacacagctagtcagtgggacagacgtgcactcagatccaacggatatcaagccaggtggcccttcccccacttcttgtgggcacttgggtgggaggtgtcagggatccctggcctttgggggtcttgacatcccaagctcttaccagccatgtggctgtggacaagttgcagggggcagcatggattgtcctgc

SEQ ID NO: 271 - DNA, 1076 bp, Homo sapiens
gaatgcaaagggaagccaggttccagggccacagaacagagcccaggattccagactcagcaagggcccaatccacaggtagaatgtggagcttggaaagtgcttgggaactagtggcaggagccagacagggcttagggtttgctccaaatcagtaaatttctttaagtcagtgatagtatctatttttgattctccaatacttttttctttttcttttttgagacagagtctcattcactctgtcacctaggctggaatgcagtggtgagatctcagctcactgcaacctctgcctcctgggttcaagttgattctcgtgcctcaatctcccaagtagctgggattacagacatgcaccaccacacccagctaatttttgtatttttagtagggacagggttttgtcatgttgttcagggtggtctggaactcctgagctccagcgattcacccacctcagcctcccaaagtgctgggattacaggcgtgagccaccacgtagagcctgattctccagtactcagcatgggcctgacacatagtaggtgttcaacacatgcaggctggctggatgggaggagtggatagcagatgtatagatgtataaatgagtgatgtgaatggatggacaggtaaatgaatgggcgagtggataaatgaatggaaagaagagaggtagggagggaggttgcttcagaggaagggaaaaaaccgaagtgggatgctgggcataggggtgagtggataaattggtggtgtaaggatagacagatgaatgtggtaaatgagaaaatgagtagatgaatagatagatgggtgagtggaaggcaagatggcagaatgacttcataaatagctgcttggattgggtgatttgacgaatagatggatggatggataggtgagtgtgtgggtgggtggaatgttgggtaagtgaatggatgggtacacgggcgggcagatggataagcgtatagatgtgtgcggatgggtaaataggtaggtgggtgagtgagcagatgtcaagatagtttatggatgattgcaaggattggatggttggaaagatagat

SEQ ID NO: 272 - DNA, 1034 bp, Homo sapiens
atatattaatatacataacgtatatgttatatacatactcatttaattatttagcattcactgtgtgccaggatccttgttgaatcctcaccatctctctgcaaggtagacatcattatccccattttacagatgaggaaactgactcccagcaaggttaggaggcatctgccaggtcacacaggagagccaggatttgaacccaggactgtctaactctaagcttctgcttcttgcatagaacagacctccctcttggtctctggttgattgtatgtagcactgtattaggcaccaagactgcgcgaggagcaagagaaaacccagtgtgtgctgtggacttatgtggtgctccacagcaggcacagagaagaataagagcatgagaccccttccctgctctgagaagtatcattttgaagatatatgttggccaatatgtgagcccaaggtctggtcagcttgactggttctgaaggtagggtagggcttcacttaggaaacaaaccttgtgctgggctttgaaggttgaataggagtctgcctggtggagatgggtcaaagggcattccaggtggagaattcagcatggacattatagtgctttgcgtgctagggaagtgacccggagttcagcctgatggggtgtttggtaagatcggtggggttgggggacttagagggttggactaggcagctcttgtgcgggagacctgggcaccagccaagaagagacacaggagatgggagcgggaccctgccactgccaacatgatcctacggcaggaagggcctgctcaacaccatgcagcaggggccctgggctcggccaggggtcccccagccctccactgttctcctgtttcctgtgccccacagtggtggggtggagggagctggtggattgcttggccattgagcctccccttcgtgctgccctccaggagcttcacatccacctgtctggcaccaccccacattgggccattactaactcactctgtgacctgaggcaagtcacctctctctgggcc

SEQ ID NO: 273 - DNA, 1035 bp, Homo sapiens
gaccttggagctcctggaatgcccaggttcaggactctctcctgaaagcagcaagggttgttgaaggtttaaactgaaaggacaaagagcccagagatgggtgcaagtaggcaagtcacttgagtactgtgccatgtgagacatgcctccttgatggggagacataaggcacagctgtgggattgagggcagctgacaattctttgggagctcagaaaggcttttggagggacttgaggatgagaaggaggtttccagatggcagagtgggaaaaggcacttcatgcagagggcgcaaatgcccagtggtctgaagctgcatggtaagtttggggcacaatgaggtgcctcatgagattggggcatcacagggcacagggtgggaggattaagagaagaggtcagacaggccagcctcccacccacaaaccctcctctttctgtctcccagggcggaaagatccccatccgctggacagccccggaagccatccagtaccggaagttcacctcggccagtgatgtgtggagctacggcattgtcatgtgggaggtgatgtcctatggggagcggccctactgggacatgaccaaccaggatgtaagtctccaaggggataggcaaggcctctctggcccaccagatgggagagggaagatcggggctcctggccttgtgccagtctcccagagtgtgggacataggcttctgagatcatgggcctggctcccagggcagctgccagcccaatggtggctgattcgaatgtctgcacaggactctggactctccagggggtaggaagtaggaaaggccacccatccacacatcagcacgtcttcaggacgcatgcacctgtggccagccccaaatgagaccacatctgcccttcaggtgttcaccacctaactgggggacaagacgattattcagggaaccagatgttatgatcaggagcttttacgatcaggtgctaaatcagagtagcctggaggcactgaggcaccggcagcatgggcaagatcagccaggaa

SEQ ID NO: 274 - DNA, 1021 bp, Homo sapiens
ttacactcctttaccctcaatgacacattcactaagactgcttcctctttttgctaatgacatacctccctctcctttatagccagtgtgaattagtagtaagacctgtatcctccatttccacgtcacttattccttaatttatcttatttttatttttattttttttgagatggagtctcactctgttgcccaggctgcagtgcagtggtgcgatcttggctcactgcaacctccgcctcccaggttcaagcgattctcctgcctcagcctcccgagtagctgggattacaggtgcctgccaacacacccagctaatttttgtatttttagtagagaagggttttcaccatgttagctaggttggtctcgaactcctgaccttaggtgatcctcctgcctcagccccccagagtgctgggattataggcgtgagccactgcacctggcctctcctaagtgaatttttaaagcaaatgcaccttttcatagtttcagtttgactgttgttattttccactccatgccctccatttggtttttggaatttttttgctattttcccctggagtagtagttagaagcacagacttggctttagacagacttggtattctagttaactatatttttgtctgagggtcattttattcttttgttggaaattccagtatgtgagcatgatacacacaattaaaaaggtttttgaggagttgtagagagccttagagtcaatgatttgaatgtcagtgctatgatgtaaaacttacagattagtttgaacctgaactgacacaagattgtttcatgagggctttgtttttaataactacctattatgagctgccttgttccttgttgtatgcttacttcccttaaaatgtgaggttaacaatttacattgactgatggttccaaatagagtccctaattttaaatgttcactgcatttagctttccctggtatgatctccatataggtagagtacagagagatggatgaaagcttggccaacctctc

SEQ ID NO: 275 - DNA, 1050 bp, Homo sapiens
tgacctgcttttcttaatgatgtcatttcattgatttgttgtactttttattaaggcaaaatagtaatttgtttagctgatcacctttatttttataatttatttgaattctttttgttgccatcatttattgggtctgatcatgttgtaatagaagaacaagatttgtaaggattttctcgtctacaaaatgagacttgttatgagaatcaaatgagaaaatgcgaaacccacctttatgtataaacatcttgtatttattaagcagagttgattgaacaaagaatagggtggattggtgttttatttaggaaaaaaatcagggcagctttagaccagacagacacacatactgtgttactttgggaaagtgtttgtggtgggccattttcagtaatgagtcgattatgaaatagataactttttaagcatctggaactgtttgtgtgtgtgtgtgtgtgtgtgtgtgtgtgtgtgtgtaaaacttaaatcttgataataatcttttaagttaaatcatgagaatgacagactttgggactttctaacatagtttttttttctttccttaagagaataatataattgaaattcttgcatcggctgttgagttataagaaatgttttgtaagctttgttattaaccagacacaccttaagcttggtagttggacacataacatctgaattgtaagctttctctggaacattttgaaaagtgaacacaaaccaagactgcagcaaaataagtaaggatcaggaaaatttctactatggaatgtggagggaaataatatgtgaaaaagtaaattctttccattggcttctaaagctttgcatttctccctagcttgtagggccttttactttcttttgataagatccttgctactacccagtggaagtcttcaagcacatatctgtggtgttattgttctttcagcagttcagtggaagttccaggcaagctcctgcttcaagcaaaacaatttttctttttttctaaaccttaagaaggctgttttacttcagtattttacatgatactgt

SEQ ID NO: 276 - DNA, 1048 bp, Homo sapiens
tagtaatattagtagtatatagtaaagcatttctaatgtttctgccagcaaatgtaaattccttgcattcttctgtcttattgttgtctgcttaatttctctcactgcttgccagcgttgaattatgattactaatggatgatactgttgatgggattgtgattttctgctgttgattattaaagtcatctttctgtttcatgctgtaatcctaaaagaaggcatgtgattgtgtttttcgctccacagcttcttttgctttcctgttagtgcattttcctttattctggttctttagttttaaattttattgtacacctgtcagtagtgctaattttaattagatcatctaatatgataaagttattttatggacaaagaaactattttaaatgctttgtcttataaggtagttgtttcactcagtaaagtataaactttggaatgttaagctcaaataagtggctaatatctaaggaagtttcagcttttgagacaattgaaaattttttaaaaaggtcagtctgtgagtgaggcaaaggaatttaagcgtcatcactacccgttttgtattcacttgcacttttcctagatgtcctttgctttcttcgttaggtgtggagggcgcagctttccagagccgacttcctcatgaccggatgacttctcaagaagcagcctgttttccagatattatcagtggaccacaacagacccagaaggtttttcttttcattagaaaccgcacagtaagtttccatttcagctttttcacctggattataaaaagtatatatggctttgatagagaatatgggaaaaataaaaagagaagaaagaattctaaaattatctataatactattattacccagagataacctttgttaatagttatttttcatttgggtatttaaaaaatgtatatataatttttgttttcataaaattgagatccttcttggatacattcttttggatcccttttatacttcacaacctcataaatacacattaagaatatttatttaggctgggcgtggtggct

SEQ ID NO: 277 - DNA, 1047 bp, Homo sapiens
ctgaaccagtcaacccctcccctccgcattgccctgcccatttttattaaaacagtgataatctatgctcctataattggccaaaaccatctcagttctttttcatttcttggattactgactgcttttcacattagtcatttgtatttcttctgtaaatttttctttcatatcttttattcatcaggaattcttatttagccagagagtaaatggatgagggaaaggtgctattcagaacatgctcatgttactctagggtggtacaacgcagaagaaattaaccttgtgattcagctaacttgaatatgaatatagctcagagatgtcattgatatgtctgctttttagccaccaccagcttctttgttttggctattagattgcaaaaccactgcttaatttcgattgttaaagcaattgataggttatcctgggtttttgtaaaacagaaaagaacagtgaagaaaagatggtgagttttttaaaaagtgaacagaaaattcttagtgtgtagtcgctgatttgtcttataattgaatcagtttctgtgtatagcatatcaacatttgctctaagtggatttttttttagacaaaattgtcatttttttgtttgtttgttttatctgaagagagttttcactttttacttagatttgagcgatggatttacagggatctctgtcttttctgattcaccaaaaatccagatttggggaagggtttcccgatgttagatttgtggtctctggctgtgaaacagaatgtaaatcaacctctactgcaagaattttatcagttctctagtcttaaactataatactttaaaactgcaactttaggattattgaactagactgtgacctaagtgttattttgtaggaggaggaggaggaagacttgtgttgggagtgaggaacttgggcccagtgtgtacttgaggaaatccatttaccttacagtggccacagagtagagtatctgtgtggatttggtcataatcccttagtaatttggtttatttacatatagccaaattaatttc

SEQ ID NO: 278 - DNA, 1081 bp, Homo sapiens
gtttgtttggagttccagagtactcttacattatttataatcattaaattatcgctacaactcagccatacttgaaaatccctcgtcagcagtgataaacctgggcctatttagggataaaaggtattgtgaacaggctatgttcagtatggactctctgcccctgggcatgggggtgcactggagaaccatttgtcagaaaaattatccatcagatttttccccgctaactttggggatcagggtgtaagagtcagattacagtggtagaaagttggtgtttaaatagtgttgggatttgtgaacaaatattttctatatgggtggccctgtacattaaaaggtattatagacaactggatagagtggtacctgtgactaaatttatcttccagctgtcaagactgttttatatcacatcatttaattctgtgtcgtttagttatatgacatttaattatatgtcatttgttgcctgcttctccttcaaatagtcttcaagttaaacttcatttgttctttgtgcccatagtactgttgattgcattccatgtaaactctacatctttatttttaaattatagaagacagagccgtggtatggtactatgccaggtttgtggttaaaacagaattgatgattttggctacttaatttctgaaacaggatcgtgtgggtggacgagttgccacatttcgcaaaggaaactatgtagctgatcttggagccatggtggtaacaggtcttggtaagtagctattggtttgtgctatatagtacatggtctaagactcataaaagaaatttaaagccagagatgctattttaaaatgtattggtttagaatagtcatcttccgtttagtgagaggtatagcagtatgtggaaaatgtaaattgtacatatcttttgacctagagtacctttttctagttctaggaaattatcatatgaagataagtagataatgttgtgtttgaagctttttttttttttttttttgtgagacagagtctcgctctgtcacccaggctggagtgcagtggcgtgacctccactcactgcagtctcctccctcag

SEQ ID NO: 279 - DNA, 1803 bp, Homo sapiens
gtaacataaagtgaaagccaaggattagatagaagaacaaattgctatggaagaaccaaggtggcaagagggtgtatgaaggtgtaagggaaaggacactaagagatctggagggaaggagagcatttgtaaatggcaaatcaggatttcaacatgtgtttatggaagggaaaagcattgctggcagaggaggtttaagtcttaagtagagaagtctgtaaaggagggtaggattataccagcgagggtaggaagatagaaagtttagggtggggccatgtggtggtggatgttacttgctaggcttgattgtaggttggaacttgagaggtttgagaacaggggaaatgacacgattaagtcagtgttaaaagtataatattaatagtaggcaataagtacagaattgaggtgaggggagggaagcaagtctccagagtggctattaccgtcctcaagaagtgataagagtccacagtaaagattaatcactgatcattgagacgccatctttttctttagacttttctgaatgtagagcaggttgattaagtctttctaacgtaaagagagaacttttttctagtagagatatccagagaaatggactgctttcttggtattagatgagctttagcgcattttttaaaacatttgtttctgtaccactgttgtcctcaggtggggcctgcactggctgccagtctgtgaactgtcaattaccagtgtggaatgagataaagaaattacaccactaaccacactgttaattcagatggtgacttttttttttcctggtagcaaaactctcagtgaagaaagtggtgcgttgatttatccacatcttaccaggaccagccctttgagtagcactataaacagttgttaacctcatgtgtggtttttagcattttgaatgcagggatatttttcccaacgaaattggtagttgtcattcaactctgatctgtataggatttttctaagttgatacatttgtatttggtgcagtagccaagtgataaggaagattttaaaccattctcaaatttgggaagggattctttgcagctttgagttatgcttgccttagttaatcaaacataaggcatgctaatatttctgtactgctgtctccagtagtctgtctcagagcaagaatggaaaactgttgactaataaactagcctttttttttttttttgagacagagtcttgctctgtcaccaggctggagtgcagtggcacaatcttgactcactgcaacctctgcctcccgggctcaagtaattctcgtgcctcagcctcctgagtagctgggattacaggcatgcgccaccacgccccactaatttttttgtatttttagtacagacagggtttttccatgttggccaggctggtcttgaactcccaacctcaggtaatccacccaccttagcctcccaaagtgctaggattaccagcatgagccactgtgcctggcctaaactagcttttgaacaagcttaaaggacaagtacaaagagccccactaatttatgcttataattacaaatacatttgatggctttagaaatctaaagagataggtcagtagctttattctcttattgcaggagaagaaactaaagctcacacacgtgtttgcctaaggttatcataatcagtaagttgaagagccagaatccattgcctggtgttcttgttcagattcccatacttgtttgactacacctggctgacatttcagggaagatggggtgaggttagtgtatgcacctctttctaactgcctgtgtg

SEQ ID NO: 280 - DNA, 1061 bp, Homo sapiens
ggtggctcacgcctgtaatcccagcactttgggaggccgaggagggcagatcacgaggtcaagagatcgagaccattctggctaacatggtgaaaccccatctctactaaaaatacaaaaaattagttgggcatggtggcgggtgcctgtagtcccagctactcaggaagctgaggcaggagaatggcgtgaacccaggaggcagagcttgcagtgagccgagatggtgccactgcactccagcctgggcgacagagtgagactctgtctcaaaaaaaaaaaacaaacacacacattatgacaatttgtttccgaaaataagtttaagttacattagcaacagtttcctttttgtggagattaaatttatttcaatactgggttttttctttgtttgtttaaattaatgggacactcctcatccttctcattcgttttagaaggcagcactgatcttacttatcagatagagttgtggtacctttatgtcaagccctataagatttctttcctatttcccaaatggaatgatgtaggttagaacaagtacttaagaattctcaggaccttgcattgtagccctgttttgttgggatagcagttttgaggagccaaaaaagggtacatgtgatgtagacataaactacattgctatctggaatggtaaatttgtatttttccttcttagatggtaaatttgaaagagaaaattaaagaactccatcagcaatacaaagaagcatctgaagtaaagccacccagagatattactgccgagttcttagtgaaaagcaaacacagggatctgaccgccctatgcaaggtgtggtatacatacatgcctaactggttttacttggaatcctaagaaatagcacagatctggggaattttggaaaagagagccactagccaatcacaagtgccttcagtgcaatgaagacgatttggtacataaggagccatggggatttaatgggttagttcggtttaagacctgcttgtcctgcagaattcttatcctgtcttaataatctcatcattttatcttaaatctcaat

SEQ ID NO: 281 - DNA, 1029 bp, Homo sapiens
cttgctccccatccccagttctttccattactcctcactgcccagtggtgaatggtctttcacaccccagagcctctaacttcacagagggggaacttggctccctgagcacattgctttctgagagcagcagcgtgtcttttcccttccccatccaggctgtcaagtcctgtcagtgctagccttacaatctcttgcaaacctatttacttttttctattgcctacctcccagtccaagccattcttacctgttgcctggacggttaccaatagctactactgctattcctgcttcttttagtgactttctactgctgaaagaaaatgttcaaactccttatcttggcccatgctaaggttcttcattatctagctcatctctacttccttgtccatccccagattccaggcacattcggctgttctcacatcctggaaggcaccatgctgctttctgcctcagagcctctgcgtgtactgtggtctaggcctgggggtgctgcttctcccaccccctcgacccccttccttcccaacctgtcttactcagcattcaggtcttgacataaatttcaaagtatttcaaagacgacttccaggacacatctccactgccccaaatgtaaattaaataccccatattcttttccgtgtagcctacgtttttcttcatagcttttaagttaataattgtctgtgtaattttgcatctgttgctctattggagtaatagtttatatcatattttttatcccccttttctagtactgtgcctaccacctaagtctgttgcataattactcaccggatgggtgactgaagacagtcctgggcttggaggggcctgggatggctaaaagggatgtagtcattgtcatggagctatccaaggtagtcaaggttaagaattctgtgccaaagtaaagcgatgcttaataattcccttttattagcaagatctgaaattatatcttcagaactgctgtattttgccaggttagaagcagtgaggtgcctgagaatctta

SEQ ID NO: 282 - DNA, 1050 bp, Homo sapiens
tacaagaataaaggtatatgtgcagcctgccaattttctctttttcccctaaaatagccgattccacgactcttctttgcgggagaacatacgatccgtaactacccagccacagtgcatggtgctctgctgagtgggctgcgagaagcgggaagaattgcagaccagtttttgggggccatgtatacgctgcctcgccaggccacaccaggtgttcctgcacagcagtccccaagcatgtgagacagatgcattctaagggaagaggcccatgtgcctgtttctgccatgtaaggaaggctcttctagcaatactagatcccactgagaaaatccaccctggcatctgggctcctgatcagctgatggagctcctgatttgacaaaggagcttgcctcctttgaatgacctagagcacagggaggaacttgtccattagtttggaattgtgttcttcgtaaagactgaggcaagcaagtgctgtgaaataacatcatcttagtcccttggtgtgtggggtttttgttttttttttatattttgagaataaaacttcatataaaattggccctctcttttgttcctttgagttggagttacatacaagatgggggcattactcctttggaaatgccaagtttatcctatggcaatagtaatacatgttttctccatgtttaaataaggaagaagatgttcatataaaagagaaaaatggtttgatcaggtcagaagataaggtaggggggccggtcctgtagaagcagtggacttcctggtcagtcggactaggcttcctcacttgggtgggggtggagtgtggtggtgtgccaagaacatggttattaggaaactttggatgcactttcaagatagaacacaaaagagctgaaacaaagtctgagcctttgggagaccagtctgcctttattcctgattccctccatgggtatgtgctaaaacttcccaattctactaaaggtggtggtgtacattttgggaagcgcactacataggatcaagggcttaggtaacagctggtttaacag

SEQ ID NO: 283 - DNA, 1034 bp, Homo sapiens
gggaggcttcacggaggaggtgacgtctgagctggtaagactgtaggagtttggaggtggagaaggtgggagggaaagcattccagtcttcaagaacagcatgtgcgaaggcacggaggcgtgaaaggccagagcatgttccaggctggtcaggattggttatggctagagggaatagtgtgggggtggagcagcagggggaggaagcagagcacggagagtctcctatgtccccttgcctgtctccctgtttgtctctgcctttggctgtgaatcgcaatgctaatgatgaggtaaagatgcggggctgcccagggactggcctggggtgaggcagcagattgactctgcagaggagggggaagtggagatgattgggaagctcttatgacctcatgcatttcagctggttttctccaaaaagaatcaatattttctaaaaatgtagacaattgcattaaaaatgcaatacaaacttatttagtattatttggcctacttaaagatatcaaacagacccatactcactgaaccctattctgtagcagctgctgagctgggaaataggacaccacccctcacgactgcagggctgctgcgtggattaaatgtgagaatggtacagaggatggccttggcataccatggccatcactattatggggggaggaaaaacacatcacagatgttctgtgaggtgaacatattgcaaagtggctcagagcatgacctgggctctgggttcaaatccaggttctttctccaaaaacaaatgacttggctcacgcctgtaatcctagcactttgggaggctgaggtgggcggatcatgaagtcaggagtttgagacaagcctgatcaacatggtgaaagccgtatctactaaaaatacaaaaattagcttggtatggtggcatgggcctgtaatcccagctactcaggaggctgatgcaggagaattgcttgaacctgggaggcggaggttgcagtgagccaagattgtgccacgcagtccagcctggacgacagagtgag

SEQ ID NO: 284 - DNA, 1059 bp, Homo sapiens
tgggtataagaaatattacttctgctagcttgcttccctttggtgcaaaaatgaaaatactttccctgtggtgattgtcttttttttttttttttttttttgagacgagtcttgctctgttgcctgggctggagtgcagtggcgcgatctcactgcaagctctgcctctgggttcacgccgttctcctgcctcatcctcccgagtagctgggactacaggcgtctgccaccacgcccggctgattttttttatttagtagagacggggtttcaccgtgtcagccaggaaggtctagatcttctgacctcgtgatccgcccgccttggcctcccaaagtgctgggattacaggtatgagccatcgcgcccggcccctgtagtgattttctatatctaactgaagtcgatgctcaaaagccgccatttttgtttgtttgtttttggtggtggttttttttgagacagagtctctttgtcacccaggctggagtgtgcagtggcatgatctctgcaacctccgcctcctgggttcaagcaatcctcccacctcggcgtcccgagtaattaggattacagccatccaccaccacgcccagctagtgtttttttgtagagatggggtttcaccatgttggccaggttggtcttgaactcaccatcccaaagtgttgggattacaggcgtgagccactgcacctggcaaaagccatcatttttctgacgcaatacttggccattggttcatcattttcaatttcaggtttaaattttggagcgcatgttaattcagttagataatttactaatttgtgactaattagagttcagttgtccttgggccacccgttcattgctgttcagaggttctcaaatttgctgcttttgtaggtattttgaaacctggaaatagattatttggtgtgcctcatttttaaatgaaaataaagttaccttatcctgtaagatgagctctagttggtgaaaggggagaatcgtggaacatgttgccatatactttttatttcatttaaaatatgagcttttcatttctcaatcttt

SEQ ID NO: 285 - DNA, 1095 bp, Homo sapiens
tacagttgcatgccagcatgcccaactatttttttttttttttttttttttggtagagaaggggtctcactgtgttgccaaggcaagttatccatgttctgattttggttctgctttccctgctagcgttacgaccatgggcaagaaacctggcaagttacagtctggccctctaaagtggagtatgttggatttttgcgtataaccctttatcttctaaactgtgtgcttaagcttccttttcttgcagtttaacactctggctagtcctaacctgctaaactcaacgcaaatgctgaggtgctccagccaactggtggttgaagaccagaatgagtagtctaccaaaggcaactgagtgctacagggttaaggcccaagccttctaggtactctggcccagaaaccacccacacatagtttaagctgccagccactggggaccatgctagtgcctggggatacagaactagtcagagctgcttgttatggaaaccacaatgtggttgtcagaggggaatccagcctaagatacctggagggcaccaggagaactgaacttgactctgcttaaggtggcaaatgcaggaaagcttaggaaacaagtataaatggtttattttcacaaatcagtgaaccaaactgatgtgtgatgataccagttgacctttaacgattttaggaagttttgtaattaccttttgtcaagattgatacttttttttttttttccctgagacggagtctagttctgtcacccaggctggagtgcagtggtgcagtctcagctcactgcagcctctgcctcccgggttcaagctattctcttgcctcagcctcccgaggagctgggattacaggcgtccgccaccatgcccagctaatttttgtatttttagtagagacagggtttcgctgtgttggccaggctggtctcgaactcctgacctcgtggtccacctggctcagcctaagattgatacaattttttatgcaataagtatgtaagtagttaacctggaatctaaaaggagcttgaaaggcaaaggcattcaacaataggcacaaatgaaattctagaccctctcagttacc

SEQ ID NO: 286 - DNA, 1034 bp, Homo sapiens
aaggctgaggcaggagaatcgcttgaacccgggaggcggaggttgcagtgcactgaggttgtgccgttgcactccagcctgggcaacaagagccaaactcccatctcaaaaccatatatataatataaataatataatatataatatatacaatataaatatatatagtataatatataatatacatattaatatataatatataaatatataaatacatatataatatataaatatatattacataaatacatatgtaatatataaatatatattacataaatacatatataatatataaatatatattacataaatacatatataatatataaatatatattatataaatacatatataatatataaatatatattatataaatacatatataatatataaatatatattatataaatacatatataaaaatatatataaatacatatataatatatacacagattcctgaactcttctcagaaacttggtttttgtagggctcaagaattcacattcttacaacactgaaggttgagaatcattgttttctcaacagcagtggctttcaaaggtttttgactacagttcacagtaaaaaaaaaaaaatcccttcagagtagcggaagggcaaaaaatgtattttgtatatcactacatacatatatactcacctctggaaaaagcttcatgaaacaaccttactacaggtaatgcagtcctattgtatagttgtttacttttttttcctaatgctgatctctctctctctcttatttatttatttatttttttgtttgtttgtttttagacaaggtcttgctttgttgtccaggcaggaatgcagtggtgtgatctcagctcactgcaacctctgcctcccaggttcaagcgattttcctgcctcagtttccttagttgggactacaggtgtgcatcaccacgcccggctaatttttgtaattttagtcgggttttcagcatgttggccagtctggtcttgaactcctgatctcaagtgatctgcccgcct

SEQ ID NO: 287 - DNA, 1132 bp, Homo sapiens
tagccaggcagaggccgggcatggtggctcatgcctgtaatctcagcactttgggaggccgagacgggaggatcatctgaggtcgggagttcgagaccagcctgaccaacatggagaaactccatctctactaaaaaaaaatacaaaattagccgagcgtggtggcacatgcctgtaatcccagctactagggaggctgaggcaggagaatcgcttgaacccgggaggcggaggttgcggtgagctgagattgcgccattgcactccagcctgggcaacaagagcgaaaactccatctcaaaaaaaaaaaaaattagccaggcatggtggcgggtacctatagtcccaactactgcaggagaattgcttgaacctgggaggcagaggttgcagtgagccaagatcacaccactgcactccagcctgggagacagagcaagcaagcctttgtctcaaaaaaaaaagagaaaaaacaaaaagaaaaattttttaaaagtgtgtccacggccgggcgcgctggctcatgcctgtaatcccagcactttgggaggccgaggcgggcagatcaccagatcaggagatcgagaccaccctggctaacacggtgaaaccccgtctgtactaaaaatacaaaaaaaaattagccgggcgtggcggcgggcgcctgtagtcccagctactcgggaggctgaggcaggagaatggtgtgaacctgggaggcggagcttgcagtgagccgagatcgcaccactgcactccagcctgggtgacagcgcgagactccatctcaaaaacaaaacaaaagtgtgtccactaaagtcacttatccagtaacttttttttgagcgtctaccatgtgctgggcactgtttaaggggcataggatacatcagtgaacaaagacaaagatccctgccttggagcttacattctaatggagggagacagacaataagcaatccacgagtaaattacagagaatgttataggatggtatgtgtgttgggaaaagaaaaagtagagtggggtgagggggtgaggaaaggctggtcagaggaggcctcactgagaagatgagatttgaagtgggtaagggttgggcacttggatctgtgaggaggagcttttggag

SEQ ID NO: 288 - DNA, 1060 bp, Homo sapiens
actccagcctcagcaaaagaacaagaccctgtcttggccgggcgcagtggctcacgcctgtaatcccagcactttgggaggctgaggcgggcagatcacaaggtcaggagatcaagaccatcctggctaacacggtgaaaccctgtctctactaaaaatacaaaaaattagccgggcgtggtagcgggcatctgtagtcccagctactcgggaggctgacgcaggagaatggcgtgaacccgggaggcagagcttgcagtgagccgagatcgcaccactgcactccagcctgggcgacagagcgagactccgtctcaaaaaaaaaaaaagaaaaaaaagaacaagaccctgtctcaactcaaaaaataagaataataatagtaataaaaagagttgtgaggaaacaagaggaattggcaaaggagaaagagggaccggtaaagtaggagataaaccaagtgcctggtaacctggaagtaaagtcagggtgtgtgaaggaggagggatgatgaactgaggtgagtgctcccaaagagtccggtaaaacgaggactttgaattaggcattggacttcacagcatgaaggcctctcgtggcctctctggagcagtgctgccagggtgatgggccagaaagcctgagtatagtgggcttcagagagaaggtgaggagagtgactggggacaactggtagacaatgcttccaaggagttctgctgtcaaggggaacaaaagtgggaaaaaaactttctatgactgagaaaatccagtagagagaaaaattgatgtgggagaagggagacctgcagtagcaatatccttgagtgggtgagaagggttggcttgtagcacacagagggggtttagacttggatagaagcgtggctggggtgttggtgataagttgggagcctgcctgtgtgagtgcacatgttggctggtggtagatacgggatggagttctgtggatgtgcccggccgcctctcaggcctcttaatgctgaagtaccctaagattcagtcctgggttcagttctcttcagttctcttcgcattgct

SEQ ID NO: 289 - DNA, 1053 bp, Homo sapiens
tatcttgaggtcagctgattagcaatttttattgtattaaaataaataaatttgtaatataaattgaaatgaggtcttgcaatgttgcccaggctggtctcaaacctctgagttcaagtgatcctcctgcctcggcctcccaaagtgctgggattacaggtgtgagccaccatgcttggcctgattagcaattttaattcccccttgccatgtaagataacatattcacaggttcctgggatcagggtgtggacacctggggtggggaggggacattattctgcctaatgcaggtgggaagaacagcatgtaggttaggggctagttctccttgtgccaccacatccccaagaactcttaggaatctgagaatgttaaatttaaacctagccccaggtcattatgaaggtatattcatcgaagtaagagaacagaataggataggatagagtaaaaactgtatttaatggtttgttagtttttaacttttaaatatttagataaatggtatgtgggcctctgtatacacttttgccatcagccatgcaaatattagaggtccgtctaacccaaagtcacatagccggtgaggagtcaaattagaacacagatgtgttactttcaccacacaaggcccctcttcaaggagaagtaaggcactgtctttctcagcttcgaggctctgtatctctgcctgtttcctggtggttacaggctatgtgctctggaaactcctgctgagaacctggcctcctagcccttctgaagctgcagttcttctctcacaccgtgtattgccctatgcggatacctctcatacagaccctccactgggccgttcaagtccacgtacttatgggttcaccagctagttagtgcccccagcagggatacagagatggtttagtcacagtccctgcttgcaaggagctcacagtctagtgaggacatcacacaaagaaatggacagtgacgaccacacgagagactcctccagtgatgggtgcacgataatctggggcagatctggggtggggttaggtacaggctgct

SEQ ID NO: 290 - DNA, 1058 bp, Homo sapiens
attgtttcttttcattttggttattgagctctctctggataacatctgcagaatgtttcatgtgtcccgagtatgtgccaggccaattactcagcaattctgcttcaagaatcagtctgtattccattacaccagtggtacattttcaaaatggaaggaatataaaatgtaaaagtatttgctacgcagaggagggagacactactgctgggactagaatcgaagttttctcacacccagttcaatgccttttctacaacatccctcagttgagccttagggtaccaagtggatggtcattagtcttgtatggactttatatccaatgctgattataaggtctagatgatgctaggtggcagagattcaaagttggacaggtcggttactgtacttgataaataaacagcccagtggcaagacagataaataaactgaccatttacaccctgaaaaggtggtcagttgcttagggaactgggggaggggcgccaaatggaggagtagggacatggtagagagggcttttcagcatagtgagtgaatgaatgctcatttgaagaaacaacttgtgtttaagatgtttttctttcttccagagctagaatctggaagaatctctgggctttcctgctttgagggagagatcaggctaggtgcattgccaatttgctgctgaagatctgattaggttctgctttgatgtgatcaaatgagatgtaatcagtgctggtactttaagtgagtttgcaactatttagttgctctttttagtagtagtattagtaatggtaaaacttagtgcttttaggatgagagtagacggcctgaagaataatatcttgggctcttctaatcaagccatacggctcattggcaagtcatcagaggaaacatctatctatctatacattcatgcaataagtatttatttagtgcctatgtgccagacactgtttgtggggaaaacaagacacatgggctattattgcctcatggaaggaactaagctgtttggattttgaaaaatccctttctctgggcctcaattcctcgac

SEQ ID NO: 291 - DNA, 1023 bp, Homo sapiens
attttcatacttgtaaaatagggatattacttactactgtaaataggcataatacttatactcattactgtaaatggttagcactaagcacttaataatcagatattcttgttaaagtgaatttgactattgaaattaatgttttcttctctgcagctattgaaatatttgaagaaactctccaccctgcctattacagtagacattcttgcggtaagaactgtgtgactttaaatattatataatgatatcccattcccttctcactggagagtgtgtagaataaggttacaagtatgggctttggaagtgaaagaaaccagacacaaaaggccatatattgtctgattccatttatatgaaatgtccagaataggcaaatccatagacagaaagtagattagtggttgccaggggctaggagaattgggaggaacaggatttctttttagggtaatgtaaatgttctggaattagatggttataatggttatataatattgtgaatgttctggaaaccactgaattatgtactttagttaaagtggtgaatattgttaaatgactttatttcaaaattagaattaaaagaacattgactttggcatcaattagtcccagattcaaatctgagttctatgactttaggctgttcctatgtaaaatgggtctgattcctgcttcacagggttattgtaaagactgattcagaactgtatgcaaagctcttatcttagtgcctaacacctgccctaatcactcttgttattaaagttctgaacttggtacgctttgctactgtgtgtcattagagatttggggcatagacacaaagtaatttagtgttaagatttgcagggtatgttgtaggaaggaagtattgcttgttgagtttctcaaagtagaaagccttatttctttagaaaaacgttagcctagttccagacccctctaacaattactttgtcaaattttaggagactggggttgggaaaacagtaaatagcttgcgaaaacacgagc

SEQ ID NO: 292 - DNA, 1029 bp, Homo sapiens
attttaacatactactaagatgaagaccaaaaaatttttgggaaactggtcactcctaggtaattaaataatcagaaaaagatatgaggctgggcatggtgacacacgcctgtaatcccagcactctgggaggccaaggtgggcggattatctgaggtcaggagttcgagaccagcctggacaacatggcaaaaccccatctctactgaaaatataaaatagctgggcgtggtggtaagcacctgtagtcctggctacttgagaggctgaggcgtgagaatcgcttgaacccaggaggcaagggttgcagtgaaccaaaattgcaccactgcactgcagtctacacgacagagcaagactctgtctcaaaaaaaaaaaaaaaatatggaaaagtgcttgtacacaaatgatgtcctggttctggtttcaggtattaattgaagaaacagatcaattatggaaagttcattgtcaccgagactttaaggaagaaagacccgaagagtatgagtcgtggcgagagatgtacctgcggcttcaggacgcccgagagcagcggctacgagtactaacaaagaatatccagttcgcacatgccaataagcccaaaggtaacagagacgggagagctgggggagaactggcaggatgagtgttctggtcaatagcagggtgttggtgggcttggctggtgtaggactgcttgcccctacatcaggtagcagggtgggtatttcttctgccaccgcccattctaccctacaagtggggtttcagggcactcaaaaagcccgtggattatttaaataacagtagcatctctgctcaagaaggcagatgttcatctccataattccacaggccgacaagcaaagatggcctttgtcaactctgtggccaagccacctcgtgacgtccggaggaggcaggaaaagtttggaacgggaggagcagctgtccctgagaaaatcaagtaagatctgtgttcttacctggcttttgtgtgctatcaacccttagaggtagcca

SEQ ID NO: 293 - DNA, 1033 bp, Homo sapiens
gcattactttacttctcttggttacttgtaccaccattccacccctatccctagcctgccccacaaatctaatattaggaagcctcttaactgaaaccaaatgaacatttgggtcaggtgccagatgtctgctgcctagaatagctttttctaggtgtctaccaccttgaatttatctcttaactgtgtgttcaagtctttgtcattgaaactagtttttcatatcttagattcagttgtgtatgatttaatgtcccttattaggagtctttaggcagggagggaagaaaaaacagatttgttcatagcaatgtcagtatccattttggcacataaagatttttgatgagccctgtttgcatagagccagatgttttcccctcccccaagagtatctacatcagggatgtgacttggtgcgaagagtcaggggaaagaggaaaaacccaatttctaaatgacctccttgcccagcttactaaaatggctgcagagcagacacaggatgaatttgaacctgacacaggatgaatttgaacctttggtctcatttatggaaaaacttgtgcaattttttttctgtgctacactacatacaaatcaccaaattacaaattacccttttgtgatccttggtgtactgagcagtttctttggggctttttctttctgggaagcgggagggaaaggagcaaggtgtcatcctgctcttcatttgtattttggtcccaaaatgtaaatacaattttctatgttacttttttgtggtaactaccgagatgaatattttaattagataagttatatgaaaaggaaaattccatgtctaaataaaaaacaaactccatatactgtgtcttccttacttatagcatcagtggaaagaagttagaaaatgcctgattcttggactgtttaaggcagagtttttttttttgtttttttttttgagatggaggaggcaatctcagctcaccgcaccctcctaaggcagagatcttaatcagcatccttgggctgggccttaaacgat

SEQ ID NO: 294 - DNA, 1048 bp, Homo sapiens
cccaggacagaacctgggtgctgtgtggggctgatggcctggtggcctcttgggccaggagtgtgtcctgtgcctggttttgctcttgaccgccgccccgatgtatgcaggcccccgccgtggagccgtgtggtgtatgtgtggtaacaccatgtctgtgcccctgctcaccgatgctgccaccgtgtctggagctgagcgggaaacggccgcggtaagggtcccctttcacccacggccagacactgtgggagcagctggaggaccggctggagggggtgtgggaaaatggaggtggcagtgatgagcagggagtatcctgaggccagcaggctcggggtagtaacctgtttggctgctacctgggttcccccaggtccttgggggtgggggaggggtgggcagaagttggaggacctaggggaagccttcctgtctccccatttcccatccttttccaggttatttttttacatggacttggagacacagggtaagtgactgaggaggggtgctccttaaggaggggtcctggcccagcagcggactggagaggccttctcttcctaccacatcggagccttttctcccgtccctcctacaggcacagctgggctgacgccctctccaccatccggctccctcacgtcaagtacatctgtccccatgcgtgagtgtcaccccagcaagggaggggctgaggctggggatcatctgggggtggtcctgtcatcccaggcctgttctctcctgtcagttgcatcctggggcttgggctcagggcagtcagaagtggcattttcagcctgagctcctgtggagcccccaggagtggggtccagcaccagcccccagccctagggcctcctagacctgagctctcctagaacccacacctccctttgccccttccccaagtactcaccgactacctgggaccccgtcacaccaagcgctgggctctgcttctccattactggcgctttgccccaaccacagcctccagccccacgtggcaggttgcctggcaacaccttaaacacaggcc

SEQ ID NO: 295 - DNA, 1027 bp, Homo sapiens
cgacccagaagccgaggcccgaggcgggagggggctgcgccctggcaagaggctttccggagtatcttccatctgtcaatacaggctacaggactcagtggccctaattcgagaaccaaacgtcccccgccggtcagtcttttcccccagggcagtcccaagggcggcgagcccgcgcgcacgagagccgagcggtaggaagagccgagagctagcggccggggcctcggcgggccaggggcgcggagaggccgccggagaaaggactaagacaccggtggaccgagcagttactcccggcatgctcctcctccccgggcagatttcaaaccctctgcagccccacctccgcgccttcgcccccggccagccccagcaacaggcggcggcccgcttctcattggccaggcccgcgctgtcgtgttttgattggccgcggagcctcccggccctgcttctgcagtcgctgccgactccattttgtcggtagaggcagaaggagaaggtcgggttgtagaagctggggtggccggcagctcgctcatcggtgttcgtgggctttgtcggtccgtgcctcgtctctccctggaaagggagggaggcttcgacgtcgagagggagccgctgccgcgttagttccgagcttgaagtcagtaagtagcggctgcgctaagggcgcggccatgttggtggccgcgctccccattgttggaggaaggaggcgagcggaggcgagatccgggtaacccgggcgggcgcgggcggtcacgggcggtcgcagcgccgcgacccctgcggctccggagagatggggccactgggaagccaagcccttgtggcgtcggaggaggcgttttccgggttcgagttgggaattactcacagtccggaaatggcaatttatttagggttgtttatctgtttggaaagctctcttacccctttgaaaggagggggcttaactatttggtaacttattttcttggaacatcaaattaaaaccaaaccttgaaagttaagctgttcc

SEQ ID NO: 296 - DNA, 1048 bp, Homo sapiens
taaattgtatttaatacccttaacagtaatatctgaaatgacaaaatataaaatgtttatattatggttatctatagatcatcagttggatataaaatatggacagaatcaaggccagatatgatggctcatgcttgtaatcccagcactttgggaggccaaggcaagaggatcgcttgagaccaggagtttgagaccagcctgggcaacagagtgagacctcgtttctattaaagaaacattttttaagatatgggcagaatcaaatgtttcctttacatttttcttctatcagtgtcttattttgttgtagtttctcctgaaatcagctgtttattcaggttatctatgaatgtgcaaaaaataaaacagttgcttttgttggattacaggcagaataatcccgattgcaattaaacactttaatttcaaaaaataatttctggctgggcacattggctcacacccatagtcccagcactttgggaggccgaggcaggtggattgcttgaacccaggagttcgagaccagcctggccaacatagcaagaccccatctctataaaaaaatttttttttcccagcttgaaaaagtttttgtctttataagcttctaactattggagtaagcttttacattcttccgaatagtagaataaataacacaggtgccattatcatgtaaatgtaatctttgctctagatcattagattttggctctatgtttttatcaatatttcttaaaaatagtgttggagggataataaatcatagaaaaataaactgtaagaaaaataggtggagaaaaggacttatctttcaatgtatatttctcagctatagggttgttaattttatgcatgtactctgctaatcaatagctccatcaggagtgcgacaggcttagtgcttcatttttctttgacagatttggatttgtcccaatgtgattgtatttgcttgtttgctgtctttaaccccagtttttttttttctctgtcttttaaaaaagcaacagggtcttgctctgtcacccaggctggaatg

SEQ ID NO: 297 - DNA, 2070 bp, Homo sapiens
aaaaaactaagctaaaaggaactttggtagacagaactctaacttgagcatttttttttaggattgtgaagttgtacttaattgtttctatgtttcatcaggtggacatgagcaaagtaaatttggaggttataaagccttggataacaaaaagagtaacggaaatccttgggtttgaagatgatgttgtgattgagtttatattcaaccagctggaagtgaaggtactaatatacaaatggctcttgtttctgaatatgtgatataatttgtgaatctttggaaactgaattttttctatggagtgcaaatatagaagggttattttacaatgtttgttgtgaaaagaattcactttgtaaacaactattaaggctggaagtttagtgaaggtgcatagttttgaaagctacacaggtgaaaaatcaaacttattgtttgtaattttgctgttacatgttaagttactttgacagcaattttctaatgataatgtgatttatgatttaaaaggcctgaaccaaaatggaagttattccttgcgtctgaagtatagcaccatcaccttattaggtcacagcagagtgagtgtcccaatgtcgctctgacccaactcccttgatgatgcagtgtgtgtttggaggtgagttgtgtaaagtggccaaacatcaacaacaacaacaaaaaacacaaacaggaaagagcaattgggtaaagctgtacactgctcttttaaaatactattatgagatggacatttatgtgaagcatgaggggcaattctgatttgattggatattgtttttaaaggaactaaggtctttgtagctgcatgtcagctagtcatcagttacattttagagacaggatttttgtttatacttaaacttcagacaaattggcagcatataattgttcctttatacatgagataatatgatgatataactgatgtttaagaacattcttattgtaagacagtttctgttttgccacagcaacccaaaggacagttaagatatgtaccatatgacctttttgcatatataccaatgtgaatttacttttacattaatcatttcccccaaagagttcaccctatgttttgacagaacagttggcatttcaactgataaggtatttctagttttaaaataatttggtgtttgtattttgttttgaatatttttaaagactaattttaagaatgcactttctataaagtatatgcatcttagaaaaccaggaacaggggagaaagttttttaaatgatgattgaagatagattttattggagaaatgctttactgatgtgtattttagtgcattttaaaaacctaagtatctggtagtattccccttgtagtgagcatgagattaaagtttagaactttttaagacaattctttttttgtggttgtgtactcattattgcttgttcgtcttttgcaatttagataaatgatataacattaaactcaaggtggttgagttgcagtagggagtcggaagcaagccaagggaacatctttctctacaggggacttggcgattccaaacccccaaggttccaagaagaaactgaagacacctggaatctgtacttgctttgtgctattgagctgtgcttgttatacagaccttgttgcttgaccaacggatttagcatttaaaaacccaattatttttgagaaatcttgacctcttagcactttgtggacagttgagaatttgaggcattgttataatagattttccttatataaaactcaggcctttagcttagccctcagaagttacagactgcatgcataacttgttagttttcataactggacaatagatattttatgcaaagctatctgtagtgttagggagcagtttatgtactttttccgtttctcattgggggaaaatttccaggcaagcaaatacttttcttgttagtaaatactagaatttgtggatgtttcatgatggtttttaaagttaataaatgtaaggcccactaacagccacagagtctaaaaatacttacgaaatccacaaaggattaacaggctgctctg

SEQ ID NO: 298 - DNA, 1032 bp, Homo sapiens
cttttcttttctgtaatgtcgatttgagagtattggccaggctgccgagacaccttaggtagtatatgactcagctaggatcttcatgtagttttgctttgctgtactgtatttaaacattcagttttggttcactgctcctccctccaaccaaacattgagtttagaatgtcattttcccagtctagtgatttgctagatttttacaaattcttaatatgtgagtgcatgtagcttaaaagaaatttgaatttaacactgaaaggtaagcataaggatttttggtttgttgtttttttgagacacagtttcagtctgtcacccaggctagagtgcagtggtgtggtctctgctcactgcagctttcacctcctgagttcaagcgattctcatgcctcagtctcctgagtagctgggattacaggcgcacaccaccacatccaactcatttttgtatttttagtacagacgggattttgccatgttggccagacttgtctcgaactcctgacctcaagtgatctgcccgcccttggcgggattatagacgtgagccaccgtgcccagccagcataaactcttaatatgggcaatacagatgaactcccagaaagaataaggtcaatgtgaaagtgattttcttttttattttattttttatttttatttttatttttttgaagtaagcttgaaaacatctctttagttcaggtcttagagattaactttcagtgaatatttatttgtaaatgagtggcgataataccagtcttaatgcgtatctgtagtgtaggtgaagaaagaacaggtctggttcaaaagaagaggccgatgaaatgataatagcattggtgtttaacacacgtagaaagtagtcttcagtttgttctcaaatgttcaactatgtgtattttgaaaacctggtctttgcagattgaacaagaaaaactggcatctatgaaaaagcaagatgaagacaaagataaaagagataaggaagaaaaagaaagcagcagagaaaaaagggagcgg

SEQ ID NO: 299 - DNA, 1624 bp, Homo sapiens
tttcttccatattgctttagttcataacagttaatttgggtttttaaaaatgtactctgactcactttttctttccatttcctttcttctaaaaagaaatctgtactcgaaatctgtactcattagccgttcatgtaatacttacctaattccctgttctgcttttcttagatggttgtactgaacccaaacttcagatcatttatttgttttcttcttccagtgagactattgttaggttcacatttttaaatccacggctcagcttctatatttgtggtgaaaggtgagaactccattaggctttttatttttagggttctgcttatttctttcataaatgtctgctggaattagtaaagagaagaggtaatttctttgtccctttcatttatatatttgatactaaaatctccttatggaagtaatatttatagagctaagcacaaattgtcatggtggtaactacttgactattgatgaagtatgtctgccattttccttctgtgtgaataagagaaaaacccttcgagttaggcaggctactgttaagaaagagggcttctcctctcgcaaaaaagctatcttctggatgtttgatgtatatttctcttttctgaagaacatgttgctttaatggtattagtcatttttctggcatactgaggctcttcctgatgaactccattgtaatctgtccgcatctaaatgttttatgtttgggagtttgatttgttgtcaaggattatcattgtttgctttaaagcatcctctttgcctctgaaaagttggtcttttgatctctgggaatgattaagaacctaagtctagagtcccaagttagtgcttttctcccttataactgatatactcgagaatgttatctttcatttgcttgtctttctcttccctgtcaagtagattaggttagcatgtcttatttccatagggaaacatctcagatataaacagtagtgtaactaaagattaatcctcacttctccctttgactcctctcttccaatccatgttatttaaaaacctgaaaaaaattactttcatcctagacgcaaatccagatctccttcccctagaagacgatcttcccctgtcaggagagagagaaagcgcagtcattctcgatctccccgtcacagaaccaagagccggagtccttcccctgctccagaaaagaaggaaaaaactccagagctcccagaaccttcagtgaaagtaaaagaaccttcagtacaagaggctacttctactaggcaagtatataaaaattcatttataaataatcacaattttagattaatagtgactgcaaatatgacatctgagttaaaataaaactacttattttccttttagattttttaaattataaaattagtttgttgaaaagaaattgtttaggagagtatattagaagaaaatgccccagagggtgaccattactatcttttggttgtattgtttcaggtattttatatattgtaacttgctttttttcctcaacgtattgtggacaacttcgcacttttaagaaatgtatgtggttgccagatgcgggggtgcatgcctgtaatctcggcacttggggaggctgaggtgggtggat

SEQ ID NO: 300 - DNA, 1026 bp, Homo sapiens
ttttataactggagagagaacacagacagaagtatttatcagattaagttgtttatattaatctcagaactagctgtttcctggcctaggttatggttttttcccccattcttttggactcatttatgtgcttagctacataaactcaaaagtcggattaaaatagctgtatttttgtgtaaactgttcatacctgtaaggccgttctttataagtgtgcaattagtgaatatgaatactttattccacagaagaagacgttcgtcagcatccttgtctgggagtagctcatcatcctcttcatctcgttcacggtcaccaccaaagaagcctcccaagaggacatccagcccccctcggaaaactcgtaggttatctccttcagcaagtcctccaaggcgaaggcacaggccatcacctcctgcaactccaccacccaaaactcggcattcccctacaccccagcagtcaaaccgtacaagaaaaagtcgtgtttctgtgtctccagggagaacttcaggtaaaggtaaaaatcaaacacatatgaaacatggtctctctttctttggctacaaagcgtagtcagttattgccccctgctcactctcaaagtatgaaatagctagataatatttgtatctaatactctctgtaggtttacttataagcctacctctttcctgctttaaaatcttggggcttttttatgtgtaaaagggttttgtttttagcaatgccctgtggcattgcgcaggtggagaaatcttttaccagccgtgggctgtttgagttggggtaacatatcaaagtttgcgttggcatgataagggatcattttattactatgagaccagttaacttttttttctcctgaagatttttggtttgatatcttaaataagaggacttcatattctcttttagttctttcttggtcgcattgcgctcccaagcaaaggacatggtgtcctcttaaaagctgatttgtttttttaatttaggttctaggcagggttcttctgagtg

SEQ ID NO: 301 - DNA, 1068 bp, Homo sapiens
ggttagaaacaaagaaatggggatgggcaaaattttcattatacattttaatgagcttgatgagaccagcattgctaattattcaccctgttgccttatctccccactccccaaggctgcaatgtggtgatacctagaaaggcaaattttgctttccttttttgtatctgtgacaatgaggcatagataagctgacagagtgaaagggtgaccagcagattatgatagtctgtaaaaagtaatgttttctgaattgtgacatttttattgtagtgataggttcattaaataagacatggccacttttgttggccccttagagaagcagctagtgaaagtagagaagcctgtaactgttccaggttcagtcctcagtttgagagaggggcttcgggatcactgttttcataacctcatgtaccatactgcttttcagcattgggaaaatttcagtccattttcagttaccatgtccaaatctgatgcccatggccctggcctattttgtcttttcctgtaaagtttgtacttctgaatatttattctttgtctggagccacaaagctctccagggaaaaaaacaagtgtttttacctgttactttgcaaaaacacatcaagtgatgatttttttctatttatatcatatagcctaagagttgcaaaagtacctgaacagagggaccaatccttgttaaaataggttgattgttaagaattattaggtacttttaaaaagcatctgcacagatgctaatttcttgtgttttggcatatactttttgcaaacaagacaagagtggatatgtacataggaaagaagtaagccatggtgaaaataagtatttctgtgggttttgggacagggcttccgtgttcaaacaacctacccaaagagaggcactacaggcagtgtagtcagtctcccctgtgaccactggagctgaatattggtttgacctacttggaaataacctctccccaccaccccgctaaatagagccagcatctcactctgtcactcgggctggagtgcagtggcccagtcatagctcactgcagcctccaa

SEQ ID NO: 302 - DNA, 1050 bp, Homo sapiens
acaattttaaaatatttttatttctttgaatttgttaaaatataagtattaagtatagtttgctatttgcactgtcatgattcctgatatctaattgagtgatagccattctttacccaatccagtgatttgtccaaatggcttattacgtagaaattttaagaaaagtcgctgggcgcggtggctcacgcctgtaatcccagcactttgggaggcagaggtgggtggatcacccgaggttgggagttcaagacccgcgtgaccaacatggagaaaccctgtctctactaaaaatacaaaattagccgggcgtggttggcgcatgcctgtaatcccagctactcaggtggctgaggcaggagaatcccttgaacccgggaggcggaggttgcagtgagccgagatcatgccattgcactccagcctaggcaacaagagcgaaactctgtctcaaaaaaaaaaaaagagagagaaagggaaaagtctgttcattgaaaaggcatactggtaaattcttcattttgacttctttagcaaagatgcgattactgtgttagatcactggttctctaattactgccccttggaataaaccattacagaattctgaatgtgagtgtctgttaaatgagatgtatctgtattctgagtcaaacattccatggcaattgctttaatcacacaaaacaggtatcaggatcctgagaggatcaaattgtctgtaggtttatttcttattgggatgttctcaagtggtgttttaggttaatttatggtatatatatgtttatatgtgaatatacttatgattttagttgtagcaatggatagatactataagcagagttagttgttgagattaaaacccatggcctaaaaatagattcttggattcacatcttagctcacttaaattgtctttgtgactgaggtgaagttgcttctttttaagcctcaggtttcctctcttgtgaaatggaacagggagaaagggatgtgatactactgtgttaatagtgtgtctaatacagcaggcttacaaaaggtagt

SEQ ID NO: 303 - DNA, 1030 bp, Homo sapiens
cactgatacagatcaggttttttgtttttttttttttttttttttttaatgagatggtgtctcgctctgtcaccctggctgctggagtgcagtggcgcgatctcggctcactgcaccctctgcctcccaggttgaagtgattcttctgcctttgccttccgaggagcgcatgcaccactacgcctggctgatttttgtattttagaagagactgggttttaccatgttggccaggctggtctcaaactcctgaccttaagtgatctgcctgccttggcctcccaaagtgctgggattacaggcttgagcctctgtgcttggcccctagaccagtttgtttgaaaggggaaaaaaggacaggtaaaatgtggtaaagggcattcttgatctcttctcaaaacctacgtgtgggaaatgcaaatgggggaaatacccttgtaaatatagttattttgaaagcagtggaccaggtgtggtggcacactcctgtaatcccagccttttgggaggcggaggggggtggatcacttgatgttgagaccagcctgggcaacatggcgaaaccgcatttctactaaaaatacaaaaattagccacgcatagtggtgcatggctgtaatcccagctactcgggagactgaggcaggagaattgcttgaacctgggaggcggtggttgcagtgagccgagatagtgccactgcaccccagcctgggtgacagagcaagactccatctcaaaaaataaaaattaaaaaaaaaaaaaagaaagtagagagggtgcagaggctgtggttgtccagagtggtatgttgaacagtgttaacctgccaagaggtatctgagtttgtaaaagaaaactatttacagttgaagcacatagcatgtatggaaattagaaatttggtggtggcgctaggggaaaggccaagagatgtaatggggctttgagcctacctgtctagctagcactgagcttcacatttaagagagagagatgagcaccttctcaaatagtatgactgaactca

SEQ ID NO: 304 - DNA, 1047 bp, Homo sapiens
caattggtagattgatacctaagaaggaaccaggagtgattcagatctatagtgccagggagacaagttatttaaaagttgaggatgagacttttaaaacctaacttgggtttttgttaatgtatacattttcctaacttttttcattctccccacactttcctgtgtttttggattgctgtctgtttaataacttttcagtggcacttgggaaggtgcaaatggattgtacagatggactgttttgacagtttaaagtgggaattctttatattgtttcaaggacaggcttcaaacttccccccgtctttgttttttctaacagaaaaaaatgaaataaattttctataggaaatgatgctgaaaactgttctggtaattaacaaaagctaactcaatattcagacaatattaccttgaatctaattgatttgccattcatttgaggtttccggggggaaaattcaggagacagaaatgaatgtaaagtatgaagttaatgaaaacctattattttaactttttgcctgagctgttcctgaagacctaataatgctacttttggcaaaggccaaatttgatgattttggtttaatgtaaaaacctgtgagaaaggagcctagaatggggaagaggcaggaggctttgagcctaggagactgagcacacgaaaagcttaacagagtatgaataatgataggaaagaggcaattgggagaagaacctggctgtcaggaaatgtcacagttggtttgggaagatgcctgcagaggtgcctagaagccagtaagtaaggatggtgagccatccttttccgcttcctgtttcgttagagctgtggagcctccgtgttctgatgtcccctgagtagggaattgtgagtccataaaaggaaaatgtgttaggcaggatgggaagtgtgattaaggcatgagttaagattttggtcaagtagaggagtaagctaggatgggtttgcctgttttagacgcttgcatagagaatggaaagggactttctgaaggaaaatgacattaggtcatggtt

SEQ ID NO: 305 - DNA, 2073 bp, Homo sapiens
cacatcatggagggccttgtatgtcatgtgaattttgtccttagtagaaatggcagttctcagatgggtttaagtgagggagcttcaggattagagttgcatcttaatatgagtagcctggctctgtggaaaatgaatttaagggaggcaagagtggcaataaggacaactatttggaggccattgccatcaagaaaggtgatggtggcttggattaataaggtgatggagagaagagaatggatttgaggtagattttggaagtggtgtcaataggaggatgttaaggaggtatgtgagagagaaaagtgtgagaaatgacttgggtttgtaattagagccactggtcaagagttgccgttcatggagagggaggaggagcagacagagttcaagttttgacttgttgagtataagatggctgagatgtcaagtggagatgttggtagaaagttggacctacagatctgttcagaaagaagtctaggcagggtagagatatttgggacttgatgacatacatatatgtatatatgacatacacacacacatagaatatttggtatttaaagtgtatgaggctggatgtggtagctcacacctataatcccagcactatggaaggctgaggtggaagatttgcttgaggccaggagtttttgaccagtctgggcaacatagcaagaccccatccctgcaaaaataaaaataaaaaatcagctgggcgtgatgtcacatgcctatagtcctagctacttcaggaggctgaggcaggaaggttcacttgaacccaggagttagaggctacggtgagatatgatcatgccactgcactgcctgatgacggagtgagactctctctaaagaaaaaaacaagtgtatgagatcattgtgtggatgagtaaagagtgaggaaaatgcctagaagcaagttctgaggaactctaaacacttaggggttgggtaatggaggagaagctagacaaggagaacaaagaggaactgtgggggaacagtagtgagtggtgagaggaaaactactagagtgaggtaggaagaagctaggagaggtttgtaaggagggagtgaccagttgtatcaagctgagtgtttgttggatttaacaccctggaagttactggcaaccttcgtagtaacagctttggtggagtagtggtggtgggaagtcataatacagcgggtagaagaatgaaataggaagtaagagactggagtcagtgtgtaaagccaactctaacaagaaacttggctatgtagaagacacaggttgatagctgcaaagggggatacatatgaagggaaggctttaaaaagtatgagctgtaagagctgggttgaatgctgatttattagagaaagaagtggaaaattaaagagagacatggtttaatggatgtccttcaaggaatctcccaaatggccacctattccactaggtccccctcagtggtatgtattgcttcttcgtatgaattttcatacaaccttccctcctacttctttacttgaggccaagtaaactctgtgaggaagaaattttgttcttcatctttgtataagccagactgtccaacactatgtttttttgaagaaccagctaagacaggttcttccttttcctgacccccacactctgcaagtgcaaaaaccattttgttggtctctactaaagaaagaattggctgggcatgctggctcactcctgtaatcccagcactttgggaggctgtggtgggcagatcatctgaagtcgggagttcgagaccagcctgactaatatggagaaaccccgtctctactaaaaatacaaaaattagccgggcgttgtggcgcatgcttgtagtcccagctacttgggaggctgaggcaggagaatcacctgaacctgggaggtggaggttgcagtgaatcgaaatcatgccactgcactccatgacagagtgagactccgtctccaaaaaaaaaaaaaaaaaaaaagaattaagttcaaatctatagtctggcattcaagtctatgaccttcatagtctagctctaattaattggacaaat

SEQ ID NO: 306 - DNA, 1045 bp, Homo sapiens
agattaaagcctttctttacatcttcagcatatacttcaagcaagtaacaaaagtactcaaaagaaactcacgacattaattccatttgttatttcatctagtagtttttgaatgactactttgcatttagcatttattcaaaagaagttctattatatttaagcagtttaacattttggcactgattagagacagtaatgagattatcatgtataaacattaaaaaaataattttcttaaatctacaaagaatagaaaagaaaaacatgcttgttataaaaagacaaataggacacaagtatataaaattaataccccaggctgggcatggtagcttacgcctgtactcccagcacgttgggaggccaaagtgggcagatcgcttgagcccaggggttcaagaccagcctgggcaacatagtgaaactctgattctacaaaaaatacaaaaattagccaggcatggtggtacgtgcctatagtcccagctacttgggaagctgaggtgggaggatcgcttgaacccaggaggtcaaggctgcagtgagccgtgattgcgccactgtactccagcctgggtggctgagtgagtgtttgtctcaaaaaataaaataaaaataatctcctgtccctacctctccccagatctgtcccgaggtaaacaatgttaattttggtttatagccctccatacttgagaagtatttccaagatgtaaattccagggttacagatctgtggtatctcttaaagggatttatttccctttccatcctctagcaaagtataggctcacccttactcccatcttgaggtttccttgacccagttgctcaaagcagatagtaggaattacttgatttctttctcccgctttccacatccaaaccatccacgcgtctttaggattatgctaccccaattcaatttaatctacacttttctttccatgtccattgcttttacctaatccaaagcacatttcaccacaactaccacaagaggccacccagcttcaattcttcatcatttgatgcctctgat

SEQ ID NO: 307 - DNA, 1035 bp, Homo sapiens
ctctctccccacctgccttttccagaaaactaagacccagagaggttaagtgacttgccctgtggttagataggttccaaatggaaaatccagcctactctgctagtcaggtattagccctggtccctaacatcacaacagaatcttttttttttcccctgacacgccaaattatttagtagtataatacagtaataaaaatttgtggccggtcgtggtggctcacgcctgtaatcctagcacttggggagactgaggcagatggatcgcctgaggtcaggatttcgagaccagcctgggcaacatagcaaaacctcgtctctactaaaaatacaagaaattagccgggtgtggtggtgcatgcctgtagtcccagctacttgggaggctgaggcaggagactcacttgaacccagtgggtggaggttgcagtgagttgagattgtgccactgcactctagcctgggcgacagagcaagagtctgtctcaaaaaaataaaaaagaaaaatttgtaattgtcttctgaaccagatataaccatctaatagcacttgatctgtaaaggactttggatcaccaaaattgtccttgacattctatttggcttagtttaagtatgagtttgtccaaatttaagacatgatagcgtgaagggaatagactgttatttaccaaatttgaccctaacaaacagtgaccagttactggcctacagatagctgagtccaaaaggcatcatgaggaattcaaagtttaaccatggggcaaacttcttcattccagttttgattttttttttttttttttgagatggagtcttgctctgtcacccagattttgtttatcttcagagtttttccacattcattctttaacttgtgtttcactctattttcatatgtttttgatgggagggtttttgtttgcttggttttttaaaatgaaagattcatgtccatattacaaatatcaaaaagtgtgaaaggtacacaacaaacaactcccctaaccccgtcccttgagtgttgtgctgt

SEQ ID NO: 308 - DNA, 1020 bp, Homo sapiens
tttcttctgctgtgcggaaactcttaagtttaattagatcctgtttgtcaactttcgttgcaattgtttttggcatcttcgtcatgaaatctttgccagttcctatgtccagaatggcactgactaggttgtcttccagggtttttatagttttgggttttacatttaagtctttaatccatcttgagttgatttttgtgtatggtataaggaaggaatccaattttaatcttctgcatatggttagccagttatcccagcaccattgattgaatatggagtctttgacgttgcttgtttttgtcagctttgtcgaaaatcagatggttataggtgtgtggccttatttctgggctgtacttgagggtggaggatggaaggagggagaggatcagaaataactattgggctctaggctttgtacctgggtgatgaaataatctgtacaacaaactcctgtgacatgagtttacctgtataacaaacctgcacataatacccctgaacctaaaataaaagttaaaaacaatagcaacaaccaccttggggcatacatgatgggactataaaagatttgtaccactctgattttaggaaaatctacctcatcattgccattcattaagtaggattagaaataggttattataaatatatcttttgctattttcttgctctctgaaggaatgtgtacaacaggatatgggccgggtatggtggtgcatgcctgtagtttcagctactggggaggctgaggcgggagtatttcttaagtccacgaatttgaaactgcagtatgctgtgattgtgcctgtgagtaaccactgcacaccagcctgggaaacatagtaagatcctatctctaattgaaaaaaaaaataaaaaaaaaacaggatataggatatttatttttatttttgaaatggagtctcactttgtcgcccaggctggagtgcagtggcacgatctcggctcaccgcaacctccacctcccgggttcaagcaattctcctgtctcag

SEQ ID NO: 309 - DNA, 1092 bp, Homo sapiens
ctgcttccgggattcaagcgattctcctgcctcagcctcctgagtagctgggattacaggcacatgccaccacgcccaattaacttttgtatttttagtagagatggggtttcaccatgttggtcaggctggtctcaaacttctgacctcgtgatcctcctgccttggcctcccaaagtgctgggattacagccgtgagccaccgtgcccggctgaaaaataccatttcttattcagttttatatactttaaattttagaaccactttgatctcttttctttttctttttctctttttctttttcttttctgacagggttttactctgtcacctaggctggagtgcagtggtacattctcagctcactgcaacctccgcctcccgggttcaagtgatcctccttcctcagcctcccaagtagctggaactacaggtgcgcaccaccatgcccagctaatttttatatttttagcagagatggggtttcaccatgctggccaagctggtctcaaactcctgacctcaggtgatccacccgcctcggcctcccaaagggctgggattacagacatgagccaccatgcccggacaatttatttattttctttttgagacagggtctctctgtcgcccaggctggagtgcagtggtgcgatcatggctcactccagcctcaacttcccaggctcaagtgatccttccacctcagcctccctggtagctggtactatagacacgcaccaccatgcctggctaattttttatgttttgtggagacaggatcttaccatgttgcccaggctgggtctcaaactcctgggctaagcagtgtcccacctcagcctcctgtagtgctacgactacagacgcaagccaccgtgcctggccaactttgagaatttaaagtattattgttgtttaagagtaaaaaatgatctgattttgaccaatattttgcccaacaggaagccagcagacctgcagaacttggctcccgggacccacccaccatttataactttcaacagtgaagtcaaaacggatgtaaataagattgaggaatttcttgaagaagtcttatgccctcccaa

SEQ ID NO: 310 - DNA, 1032 bp, Homo sapiens
tggtgattgctggttggggtggctgtggcaatttcttgaagtaagataacaatgaatttttctacattgatggactcttcctttcatgaaagatttctctgtaacatgcaatagtgtttgatagcatttaaaaattttaaagtaaatattctttgcctgaggctaatctcaagaggtcctgagaacatgcacccctgtttgatagtgtttttacccacagtagaacctttttcaaaattagaatccatcttctgaaaccctcctgctgttttaacaactaagtcgatgtaatattctaaattccttgttgtcatttcaacaatgttcttagcatcttcactaggtatacattctatctcaagaaaccattttctttgctcatcataagaagcaactcctcatccattcaaattttattatgaaggtagaacaatttgattacattttcaggctccagttctaattctagttctcttgctattttcaacacatatgtagttcctccctccactgatgtcttgaacctgtgaatgtcgtccatgagggttagaatccacttcctccaaactcctgttaatgttgctattttgacctcctcccatgaatcatgaatgttcgtgttttttttttttttttttttttggacggagttttcgttcttatcgcccaggctggagtgcagtgatgcgatctcggctcactgcaacctccacctcccaggttcaagcaattctcctgcttcagcctcctgagtagctgggattacaggtgcctgccgccatgaccagctaatttttttgtattttttagtagagttggggttttgccattttggccaggctggtcttgaactcctgacctcagatgatccgcccgtctcggcctcccaaagtgctgggattacaggtgtggtatgagccaccagacctggctgaatgttcttaattgcatctagaaaggtaaatcttttccaggtcactttgctttgctcagatccatcagaggaatcactttctatggccttatgaaatg

SEQ ID NO: 311 - DNA, 1061 bp, Homo sapiens
taatttttgtatttttagtagagacggggtttcaccatgttggccaggctgggacttcaagtgatccgacctccttggcctcccaaagtgctgggattacaggtgtgagccacagtgcctgcccttacttaattcagtgaatgctttgaaaaagcaggtgaatcttaactcttctgatgaatttttatttatttgtatgcattgaaacagcatgtttgaagtgggaatgtcgccttcttagtgggctctatggacccagaatgtgaaatgctaattaattagcataattttcatcatgcagaattgtttctaggggatgagtgggaggaggaagagtttctgggatcacaagctgcatttattttccttccctctattgtgctatattgttctagggcacccagggaccattctgtctcactgccttttccttccagaacaaggaggtctcaggtctttattgctagtcttcttcaggctctgcttgtaagactgtttctaaataggataaggagaaaaaggagaagaattgtgcaagcttgtagactggaatctagcatttctaataacatgtttttgtcatttgatgtactgagaactgagtggttttttgtgaacacttcctgatttaatcatgacaaatataaatacaggcaattgtctattctagagttgcttaacattgagaggctaatgaaaagctcaaatcagataacttttactggtatgtgtggctataggttttaaagtgaactttttcttcttctctggggaaagtatttttgtgtatgttttatagttcttgcttgaatgaagaaaccactttgctaaaaaactttgagacttggatttttaactgaaacagcctagatatacttagctaacttactgataaaaggataaaatagaaggaagcgagataaatttggaggggcatgctataaaatgttattaaaccttttttaaaaatgagacatacaggccgggtgtggtagctcacgcctgtaatcccagcactttgggaggccaaggcgggtggatcatgaggtcagcagtttgag

SEQ ID NO: 312 - DNA, 1055 bp, Homo sapiens
gagaaaggaataaaatgtgtttgcttcccctttgagggatgaggatggggcggggtgggggtggggcgggaataaaaaggttagaaagtgactcatttaagtataactttgtattctattttttccctatcaatttgttattatcttaagtagccacctactcttcctgtcctcagaatgctgtaaccaataagaacaaacaacataatataatacatggtacataatctagaaggctttatattaaattacctgctggtaaataaaagttccagttgccaagcaacttctctccacagggacctgttgaggccatgacactttagaaaacaatatttcaaatcactttggagcttaatgggccctccttatgtatgtttgccgcaggcctcagatccatttagtgcaatcaaatgcctttagtagtcctaggaaattagtgattctcctttttatttcccccaacccccacccagatgctgacaatttacacagagatgaatttgtcgttttacatggtaaatcagagtagacaagtctgattagttttaccacctattaaatattttcaaaatccaatatgtttggacaattttaagaccttttaggacttaattctaagtaagggattcaatgcctgaatgctacagttttgggctaatgaaactgaaatagaagggctagtggttaggttggggtacaaagtaaacaagtaaaatgtgaagaataaagggagagacactgatgatagatagataacacatatataattcttttgataacacgttcaagttgattgggagtaaaagtttatgtaaccatttaggcagtcaaagagaagctcatgggtaatttcttttgtggggatgtattaagtatgacctgtccccagatctcctactttttttaagttctgtgatggcattaatttatgtaatttgctaaggtcccaactgtgactagtcattgatatttataatactcagtcattgatatttataatactcataaaagagatgtgaacttagcattgttgaatgtactctgaggcatat

SEQ ID NO: 313 - DNA, 1037 bp, Homo sapiens
tcctggatatgtactaacgaatattaccaccagagaagagagctttctacaaaagtcactacagattttgctatattgctttgtagatagatttttacttttgcctaaaagcatttatccttcataccaattgtaacatctgacaccatgtagaagctaaaagtttagagggagtgagggttttctcaagaccttcctcaagcattttatctttagaagagaaactgatgggcacctgatactctgtctaaatacgtttgttatatgtgttttgccctgtgccattcatttggaactttattgcattctttattttaaaaagcttgtttttacgtaatcatagagcttgctatttgtacatctgttgagcaacactacataactgatttttagttgacttagctatagcagtacaatgattagtaatgtaaaaattaacacagaaattaacctaaggaatgaagggtgggtttgtcaaaatatcaagtaaatttttgtttctaaagtacatttaatgtagatgacctaaagaatgcgttatccatcctatataaaagaaagataaaacacaggtcaccaattttctcatttcaccccatttaccttgtatagaggattgttcattcctttgggactaagttatagttatggtgagtgtgtatttactgtagttttgcctgatctcactcattgcacttcctggagttaaattttccaacagccatgttgaggaatagcactctgcatgtttttgttttgtttttcggggttttttttaattgaagccctaaaccaggaattatttgtgttctaacaggaggatgaacttgctgaaaataaaactttgctatgtatttactcttttttaaaagacaaaagcaaaaccagactttctacgtactactccaaagactgtgattgtgactataatacatttttggtaatttttttatacctaatttgtataggaagtgctatttctcataggctgtttcttgaaattttaagtttattgctttaaaatggcagtgtttctc

SEQ ID NO: 314 - DNA, 1088 bp, Homo sapiens
aaaaatacaaaacattagccggctatagtggcacgtgactgtggtcccagctactcgggaggctgaggcaggagaatcgcttgaacccaggaggcggaggttgcagtgagcagagatcatgccactacactccagcctgggcgacagagtgagactctgtctcaaaaactaaaaaataaattagccaggcacggtgttgcgtgcctgtagtcccagctactcgggagcctgaggcacaagaatcacttgaacctgggcagcagaggttgctgtgagccgagatcacaccactgcactccagcctgggcgacagagggagactccgtctcaataaatttaaaagaaaaaagtatttattttagtttgtttatttatttatttttttttttgagatggagttttgctctgtcgcccaggctggagtgcaatggcatgatctctgctcactgcaacctccacctcccaggctcaattgattctcctgcatcagcctccccaagtagctgggattacaggcacacaccaccatgcctggctggtgtttgtattttctgtagagacgggtttcaccatgttggccaggctggtcttgaactcctgacctcaagtgatccacctgtctcggcctcccaaagtgctgggattacaggcgtgagccaccacacccggccgatatgttttcttagaattctcatctctttatctttttattttatgttccaatctgttaaacatttttgcatttcagttctcatgttttaatttctaagggcctttgtttccttaattatgaatgcttcctttagggatcaactctctctgtgggcctttcttttttttcttttcttttcttttcatgttagacgtgtaaggtgctgatgtaagaacaaggtttgagggaggcacatctcaaacatgcacatgaacacccaatcatcgtgcctaagaactacaaaagaatcaggttttccttttaaattaaaaaaaaaatgttttagaagtagggcctcgcttgtcacccaggctggagtgcaaatggtgtgatcataacacactactgtctcaaaatcctgggcttaagcagtcct

SEQ ID NO: 315 - DNA, 1081 bp, Homo sapiens
ttcactaccttagaatgatcagtttctgttttgatacatttcgtaccaaaatttcttctacaactcatcaattattcttcgttgtttgtttcacaccattctcgaaatctcacatactcttttctcaaattcagggagtcatgtgatatttcttgttttattcacagagggctggtttttaagtttggccgcactgaagacttatggcagtgaacacatctgatttcccacagcacaacagccctgcatgggtttgtttgtttttttactgctcactcccaaccttttgtaatgccattttctaaacttatttctgagtgtagtctcagcttaaagttgtgtaatactaaaatcacgagaacacctaaacaacaaccaaaaatctattgtggtatgcacttgattaacttataaaatgttagaggaaactttcacatgaataatttttgtcaaattttatcatggtataatttgtaaaaataaaaagaaattacaaaagaaattatggatttgtcaatgtaagtatttgtcatatctgaggtccaaaaccacaatgaaagtgctctgaagatttaatgtgtttattcaaatgtggtctcttctgtgtcaaatgttaaatgaaatataaacattttttagtttttaaaatattccgtggtcaaaattcttcctcactataattggtatttacttttaccaaaaattctgtgaacatgtaatgtaactggcttttgagggtctcccaaggggtgagtggacgtgttggaagagagaagcaccatggtccagccaccaggctccctgtgtcccttccatgggaaggtcttccgctgtgcctctcattccaagggcaggaagatgtgactcagccatgacacgtggttctggtgggatgcacagtcactccacatccaccattgaaggaaaggaaaaaagggcagagacttgacactccagtcttagacaggggacaatttctttgtagttgttctgataataaactgggttccatgttgcatttcatctgtgtactgaaccactagcctaatagaccagcacggtcaactagaatgacaaacat

SEQ ID NO: 316 - DNA, 1027 bp, Homo sapiens
ccagggactggtatgtctggtaatacatgttttccatgtgtggggaccattcagctgtttagagtagatgttattagcaatactcaggtaactatgttaggattagctaatagggtctgttaactgaaattgacctctaaactattttgtctaaacccattgatcaaatagttacattttctcctcctctcccattccagtgaaacagaacagtggaggaagcaataattactcaggcttttggagggcggcaacctagtctggggatggcatattccctcctcttccatttcccattgcaaccataaaggccgttcctaccttaaaaaaaaaattgctcagtcctgctttgaagtgtttctgggttccctgttgctaggttagtgattggattggagttagagtagtgtttcaaacgttttggtctcagggccccttttcactcgtaaaaactattgaggactccagagagcctttgttaatgtggcttatatctatccagatttactgtattagaaattaaaactgagaaaaatttaaaatacacacttattaatgcacttaaacatcataataagcccattacacgttaatagaaattacatttttaagtgaaaaatagttatattttctaaaacaaacagaatatagaagagtggctccatttttgtaaatctctttaatatttggctcaatggaagacacctacattctcatatctgcttctgaagtcagtctgttactgtatcacatgtcatgtaacttacagaaaattccaccatatgcatgagtgagtgtaaaaaaggcagataacatcttagtattgttatgaaaatagttttaacctcaaagagcccttggagggatctcaaagacaccccagaaatccccaaaccacatttagacagctgctggattggagcaagcataggcctgggcttgttcccttgattaatgtgttaattctgttgtgttctacagccacatcttaaaactataactcccacccaggcctggtgctttggtc

SEQ ID NO: 317 - DNA, 1026 bp, Homo sapiens
atttctttgaatacattatttagagttgagtttaatgtggacattttaaagttttcttttcttaataggttataatataccttcaaaaatatatatcttttttcgttatttgaatacaaactttaagctgttatgatttgatattttaattacaggcattgcaggtaccagctctcactctgaatatatctttttaaaaaaaaaatagttggactgatttctatgtaggtatacttgaagacagccatgtgccaaaaaagaaaaaaaaatgttcatggaatttcatcattgaaaggaatgtcatttagatgaacccttaatttggcaaaagaatcctcacagcatccctgacacgtggtggttttacctctgatggaaaacctacagtgacaaggaacttacctactgttcctggtaccctactctgtttttgggcagctataaaataaagttattcctcatattaagccagaattttcttccttaaattttgacccagtatgtcttcactgtttttgggctcgttgatttcttttttaaaaatttctatttttttttaagatggggtctcactatgttgcccaggctggacttgaactcctgggctcaaatgatcctcccacctcagcctcctaagtatctggactaagccacagcttgctgatttcttagaggatctaaagaggctttcccagaaaaatataagggaatgtataaaacttttccttaaaatgtcaagggggccaggcgcagtggctcacgcctgtaatcccagcactttgggaggctgaggcaggcagatcacctgaggtcaggagtttgaaaccaacctggtcaacatggtgaaaccccacctctactaaaaatacaaaaattagctgggtgtggtggcacatgcctgtaatcccagctactcgggtggccaaggcaagagaatcgcttgaacccgggagacagaggtggcagtgagctgagactgcgccactgcactccagcctgggtgacagagcgagactccatctcaaa

SEQ ID NO: 318 - DNA, 1041 bp, Homo sapiens
tagaagcagagggcaagaagctcacgatggacatgaaggtgaaagaagaccaaatcagagaactagaactaaaagtccaggtaaggggggaacaaaagacttcccttgtatttgaattccacttttatgctaaacttgtgctctgtgttgcagtgtagagatgatgccttttaatatagatcaaatctcattgcatctgaaaaatctctatgtgacaaaaagatttgaagttctaatcttgtccagctcatttcaagtcatattaatgtagccagattctaatacaaaccagaaatgttgacaatcccttggtatgttttataccaggatttaacttgctgtagattcatttaactttttcaggttataggccagattagtgtcctttgaaacttacacacctccttttagccccaaccctctttctattgccaggggactgaccctcctgcatggctctgagccttgcagattgttgttcatagcagtgaatgataggaaaggtgctagtgctatggacgtagcctgttttatgggctgtgtatactttagccaaatatttgtcatttaaactaatgtcatatattgtaaagttacagtaatttgagccaggtgggacaagtgaaaaattactgtcaagtcagtggactagaatgatggcctggagtacagtaccgaaaaaaatacgaaaaaaagtaaaggtggcatcagagatagatgggaaaggtaacgattagtcagtaaaaggctttggaatagctaaataactggagaaaaaaaattagaaactcatctcatgccacatataaagaaattccagatgaagagttgaaggcagaaaaaacaaagaataaatgagtttttaaaaactaggtggaaatatacttgaccttgaaacaagggaaagattttctaaacatacaagcaatgggaaaaaatcacaaagcaaaaatcataataataaatgaaaaaattgattggggaaggtatgaatattgcaacaaatattataaataaggaattaatattctcaacatatcc

SEQ ID NO: 319 - DNA, 1075 bp, Homo sapiens
tcccagaggccagctatcttgctgtcagggttagagtgggggtttaaacccacgtttcttcccctccctgcgtgactggggagttcagagctccttgtctcatttccaggacaccccctgaccacatcttagctgggatgagtgggaaccttggtggtcacgggggatttgtcctgaatttgggggcaagaagtggagtgggtcaacctttggcattgcagcttttgtttctgagacccccaggatctgagcattctccctataaggtgcttcctgacatccattgatgtagcattgacacctgttaacctctgttgacagctctgagccccagtccccatgccctatagcccttggaacctaggagacaagatccccttccctcccctgtcatcaaaggacatgtcaggtacatcacagtctttgtggtccccaggcttcctgctgcccatcaggacacactttagatattgtgtaagttgtaacaaatgatcgcaaatttagtggcttaaaacacaaatgtattctcttatggagaagaaaaatgtattctgtgacagaagtagatcaggagtctaaactaggtcggcaggattgtgtttttttctggaggttctggggggaatccatttccttaccttttctacctcccagagactgatcacctgcatttccaggtttgtgggcctgtcctcatcttccgagccagcaatgtagcatcttctggtctcctgatttcatcgtcacattgctgcttttagctctgactctcctaccccgctcagcactccttctgatgacatttggacactctgagtaatctgggataatctccatcgccacatccttaactcacttctgtaaagcccgtttgctgtgtaaggcagcattcacgggtctcagggattaggatgtggacatcttgggggcggacacacgattcagcccaccacaggtgtcatggaagaggcactgtaggaggagacagtctagcggtctcctggctgatttgctgtgttaccttggagaagatcctgcctttctctgggctgcttgcctatcagcagaatgagaa

SEQ ID NO: 320 - DNA, 1050 bp, Homo sapiens
ggttgtattcagtttaacttacagcttgggacttcagggcaaaaaggtaggaatgtatgcaagtgaacaatcagatttatgcaactacagtctaagcttgtgtctccagatttccagcaggcttaaataatggcgttttcatatccctgccacattgggtgtccagcccttgcttgggtggatagtgatctgacttgggctggtaattagcccatatttttagttcatgggcaattctcaatggtaactgggtctattaaacttgattcagatatgacagcttaaattgtaaacagctgcgaagagtttcatacttaattaccatatttaagttttgccataaagtgcctgtacttccatcaaaaatgtaaatgttggagacattcaaatgaggttttatactttcgtgaagtgtaattggcacggatcagtcagtttgtttaggaattttaaatatttttttaaaaggagttttaaaggcagtggccacaggtccatttctcaattaaattgagttgtctgggggagggcagggagcggggctgaggctggtgaggcctgaacttgtagacttgaaagaggctggtgctttcttctctcagccagggcttcagaaggaagctagatgtttccggctatagctacgaactctgggacttccactcccagaagctgagctgattaaccctggactggaatggctgagagaggaaggtgttgagatgaatatgggctggggataggtcctgggtggaatgaggcctgcacctcaggtgaatgtaattcacccagcattgttgccacctctgggaggctttggcctgctcccgagggcaggggtgttcagattgattcttgcttttagggtgcacaaagctgggggaaacacaggcaggggagccagtgacactttcacatgcatagtgccagagggaggtgggtggggctcgaggagtctgggactggtgacaggagaggtggtgacatctgagttgggtttggaggggtgagggagagttcccctggggtgaagggccgaggtgtggccct

SEQ ID NO: 321 - DNA, 1055 bp, Homo sapiens
ttccttctgcccttcctccaggagaaggggcccaaggtccccgtggatggtctccacctgtgcttggaaccagtgtaactggctgctccctgctcccagggactgacacggggatcatctctgtgaccgccctccgtcgggcccctgcctgccttctcccctccacgcaaggctgtgctcttcctctggtttctgtgtgtccgtttgagtgtctgcgccccgcctccccatacttcctgggatgatgtgtgaaacctgacacctagatttatttggaaatattctatgaccactttacagatgaggaaacaggcctcaagcgtggaggggtagagtgaagagtagaacccaggtctgatgccaaagctgctttcttctctgcctcctcctcacgcaactcacacctccttttcttctagctttgttgtcctcccaggaaccaaaaaaccccagctattttctgaccaaaatgtgtttcataacaaaccatctggtgcctttccacacagaactggcaggagcctcgtgtcctgctagctgtctctcttgttgatttccgtgaaaatgcaagtgtttgaagtctgctcattccgagggtgaaacaaaatccaaccctgtcagaatcatgctgttctctttgctgacactgtgaccctgggtcgggacagaccagcagcaatctgtctttagaatcgctttccttcctccccttttgcccccgtggggctcccggcatcctgaaagccagcaaagcctccagcatcttttccatcctgaggtgcctcccagtggcctggcttgtcggagcaagtttcatcagccctagggaaaacacggccctcctgggaacctccttacctggagtaaccggacaccttagacggaggtgcctgagggtggggtgggatttgcagggtcattatcagaacatgaggataacttccttgcccctgctctgtagccacctccttggcaccggcctctatttgtcataaggcggcgtgggcgaggcctgacacaggccagccttggcacgaggggggccaggggttctg

SEQ ID NO: 322 - DNA, 1027 bp, Homo sapiens
aggcgtgagccaccgcaccctgcccaagccttctacttttcagctgctgtgctcagaattgagaaaacctgatggtttcctcctttatacaaagcatacagccatcagcgacagaaatctcagctaggcctttcttttatggggagaaactgaaagggcctgtctctgaaattttgaaagagtccgggtgagccaccatcacccatagttgtacctcaaaagcaagtgcagggaagagaggaattttgtgaagattttgaaacacctgtcatgggccgtgggttcatttgtgccctgcgtatggcaaggtctgttttgcccactgacgggagctgccgtttcctgtagctggtttacaggccccagcaggaagtcccagatctggaggcagcataggaatgagaaaattctggtctcttgttagaaatcagagcagcagacctagagaaggtgtattcagttcttgggcacacagttagctgtgtgtccttggaattgttactgaaccgctctgaacctcagttttcttatctataaaatgggctcaatacttgcttctgggagtagcaatggaagattaaatgagataaaatatgtgatcacatctggcaaaagggctggtacatggaggtgctcaataaatactggcaccatcgggcacactggcttgtgcttttaaccatagcactttgggaggtcgaggcaggaggatcacttgaagccaagagttcaagaccagcttgggcaacgtatcgagaccctatcttttttaaaaaaaaattgtaaaaatcagccaagtgtggtggcacacacctgctacttggaagtcccagctactagggaggctgaggtgagaggatcacttaagcctaggagtttgaggctgcagtgagctactatcataccactgtactgcactcctgtctggatgacagagcaagactctgtctctaaaaatacacagatacaaataaatactggcttattctccagttcttaactgaaatcctttcacaggacaagaaac

SEQ ID NO: 323 - DNA, 1033 bp, Homo sapiens
gcgttggacaaatcactttcctcacccttccctgggactcagactctgtgaattgaacagtttggatgaatttgtgctgctcttcgccaggaggaagcatcagaattgcctgcagggcttttgcaaatgtagacttccatgttccgtctccagaaattctggttcattgggtctggagctggcccagggatctgcattaaaaatagcatctctgttgatggttctgatgcacaacccaggttgggagccacagttaaccgggttaggatcctgaagtgattggtccccttccctcactcccattagctcaggtggtgttttagcaaaggggaagctcctgccctctctgtgggtgctgaggctgttgcctgggtgggggtcccactttactaggtgtggcaggtcaccagttccacaggaagcagtggtggctggagaacagccctgaggcgtgagtggagccggcacatctaggagttttcattcagctgatgtttggtgaaagtgggatctgtaggctgggcgcggtggctcacacctgtaatcccagcattttgggaggccaaggcaggcagatcacctgaggtcgggagttcgagaccagcctgaccaacatggagaaaccccatctctactaaaaatacaaaattagccaggtgtggtggtgcatgtccgtaatcccagctactcaggaggctgaggcaagagaattgcttgaacttaggaagtggaggttgcagtgagccgagatcgtgccattgcactccagcctgggcaacaagagcgaaactctgtctaaaaaaaaagaaatgaaagtgggatctgcagatgggaggagaacaactgtgaaaatgaggtgtcctctggccatgtgatgcctgggggctaatcctaccttcaaggtatcacaggagattctcctcactgcttctgaagtgtgattgaaaggggctgaggtgtggatggatgtcagccctgctttccttcatggccacccagaagcttttggatgctttgggtaggacaaacctcc

SEQ ID NO: 324 - DNA, 1044 bp, Homo sapiens
gaattgggaccattggtgcaaactctaccatgagtgtctaggcatggctccggaacagagcacaccccagcctcgattattttcctgcaaacacagaatattttgcctaaacaaggaacctggggttctgccaccctgatttgcattcagttaaaagagctaatcctttacttgctactggaagaaatgctgcccatctctaaaacaatcagacatgatctctctgatagagtagtacactctccaggcccaggctggagctgtagatcacaggcaaccgatgaaatttgcttaattatttgattcaatcagaagttggcttaattattttcttgctctcacctcttttgaatccattctggaaactgattatgtctataacaccaacccagagataagcatttcaattgggaaatgtaattagccaaggaaaatgaatgtgggagctgccttttgtcaaagcaccattaaaacccagctctggtcaataccaatgtggtgtgaagacaaaaggctcagtttgctcctcttgtgactggagagggaaggcccagcaggaggtgggaaaataggtatcttgggatcttagcaaaaggaagctcattaattcattcattcagaggcttttctaggccagctctgggatggatgctagagatgcaaaggtgcactggccacgtcccttgcctcgaaagagttctcttcttagaggagggattcacacgtaattatgtggtcaaagtgctacgggaatacagaggaaggagccactgattctgcctctgggaacttcacagagcaggttacgttgagctgggctttgaagaataagctggagtctcccaggtgaggagggcattctaggtaaagggcacagcacgtgcaagggcatggtggcgtgagagtacaggagtacttgttaggggtccactagagcaagcctgctgagggcttcttgggttatcctagctcctcctagaataaagtgtccttgggccatcccacctcaacttttcagtgcctggggatcctgcctcgcctccc

SEQ ID NO: 325 - DNA, 1026 bp, Homo sapiens
atggtttgcaaggtggaggtcttgctcccactgtggaggatgaggaaactgaggcagctagtaagtggtggatccaagcgtgggtttccaggactcaacccattctgctggcccactgcctgcagctaagctatcccagcaactacaaagaccctccctggggctcagctccctaccaggctctcctggcactgcctctgctatctcttaatgttttacaggggtgaatgggacctctttgatttcctttcttttctcctttccaataatcatcattaatcttgttatcagagccatgcatctgcacctcttggctgtggtccacaggccgtgtttgccatgatcaatgcatagctctgtgtggccacaatgtatacccaagacagcactgcaaccctgtgtccgtgggcctgggaggctctggcactgtcaaagacagctggaggctcccccaggagctgaggtgaggcacctggctcacatgccctgtggtcttgttgaattcttgttcctggactggtaaacagctacccccacagctggggagcatctccagctgccttcacagggtctcaaagcacagacccaggtgctcctgcccccgtcctcctcatccgtaagtgcctagaggacaattcaccaaaccaagatgggtagctctggagtcccgttgggcccagccactcatcatacagcagccagtcagatccagttcctaagccatccagaccccctttcttgaagccccagggccatgtgtgatctggcctccaccccctcactgcccactactttccccctttcccgctgcacacaacctttatcttgggattttcaatgtgctgtgcattctgcccgccgtgcccttggcccctttctcctgggcctccttcaagcctctgcccgaacgctgcccatctcctggctgtgctcccccgccacacctaaatggagctcctccttagccactctgtttttctgcatcacacacgttacatttagatgtgtctctgtgtgtctttcccc

SEQ ID NO: 326 - DNA, 1047 bp, Homo sapiens
tcccatttgcacccgaatcacagcactgtttatcctccacatgcagaaccaccaatggttgtgagccatccggtgccttcagccagaggacagcaaccgggtgttctgtggggtctttgtggcccctgatagcattatccacatcatctgtaaattcagcataactcttgtaccaggtctcgagctcccaagtcttacaggggttgcttgatgatggagacaaagaatattccaagtcagacaggcctgggttcaaatgaacttcagtgagtcactttatctcagtgtcctcatcaggacatggggccagggaggattcactgaaattgtacggcgaaagctcctggttccatgcctgtcacatagtaggtgcccccaccgagcagctgctgttactgtcagcagaggagccagcctggccaaaggggggatgacgggggctgcttctgtcttttcagtgggaactggggctgggccacagccggcagcagcagcatcttggcggagtttggatccctgcacttggaattcttacacctcactgaactctctggcaaccaggtcttcgctgaaaaggcaagtctcctccccacccttcttcctgcggagcagagggatgagcgtgcggctgccacagggttttcagaggcgagtgggtcctccctcatggatcagcaggagggcagtggggagcccgggagcccaagctaccactaaggtagcaaatagtagctacctataccccaacgccaggtggcagggaaggtgagcacgcagagtcaataagattctacagagggaaaaggagagacaagattctgccggggaaaaggttctcactggtctgcgtgagctcagtggcaaccacccatatgtgaaatctggagaaagtgcaactgaaatctaggcaccaccttgcattggcaggaattggccacccactgcagaagtcccctttccagagacatttagcttttccatgtgagatctgcctgccttcttccctgtgcctgtttagctcatgccatcagcaggctggcatggcaa

SEQ ID NO: 327 - DNA, 1050 bp, Homo sapiens
gagctcactccagtccctggttattctggagtaatagctacccctgcctgagcacccgctatgtgctgggcactttataatggctctactcttcccaacaaccctatgaggtgggtcttcctggagttcccatatttacagaggaggaaactaagactcagagaggtcaagtcacttgccctgggccttccagctggtcagtgataaagccgtgattcaagcccaggatgtgctggctccttccagaccagattgatagagcaggctgcaggcttttgctctggagtccatccgtctatctctgtctcctctacatttacatactctggctattttcatcccccaatcatgcctcccacagaggcaattattggcagtcaacaaattggcccaaattctagaagcgcccgcaccctccaggggagctaatttggcctgcttcactgctcaccaccaggacagtcgagagtaacgcaggtacaagcacattcctgtccccgtaatggacttcgttaacataaatggatatgaaatctgacgtggcaaagccaagtgctgtcacctggaaaggaaggtctgcctgcagaaaggtggctctcccgcactcccggccccgtacacacataactctatcaacatgagacagtgtggtcccaagggcctttctctcccaaggggtcttgtgctggctaggacgtgctgagtaggatttaaccactgtcggagagcaggcactatagataaagccctcttgaattccacttctcaccttcatagccccaaaggttgcaaacccagcctctttctgctccagctggggcaggctgtgctccatggtcacggccctgatctgtgttggcccagtgctgccctgtgttgggcaggaatatgtatggtttatgttgtcagaattcattcacgtcctggctctgccacttaaggaccaggtggccatcagcaagtcaccagacctctctgagattcaggtttcttgtctgttacactgagataatcccttgtcggttatgagggttggagataatgtatata

SEQ ID NO: 328 - DNA, 1080 bp, Homo sapiens
gacggggtttcatcatgttggccaagctggtctcaaactcctaacctcaggtgatccgcctgcttcggcttcccaaagtgctgggattacaggcatgagctgccttgggaatcattattattaatatttatctgtgatatcagtaaaataattgaataagcaaggcttactaataaccctgcatattcctgttgctcccttcttcttgggtttctagattgcgttttggaaagttttacctcattgacttacaaatacagaaataagtgattcttcagaatagggatttggatcaggagcagcagggagtgctcattaaaagggcagattccagactctcacccctgcagattctcattcagtaggtctgaggtgggttgtgagcatctgtagtttaaaggcatcctgggtgattttgaggacttctggttgagaactgctttaatgcatcattcagcctgctagccagtcagtcagcaaatgccaggcatcatctctgtaccactaccctgccctgagagggcagacagggcaagacccacccccgccctccgctggctacactttgttactggtgactattactcaccccttttgaaataggcgtcatttgtcccttagcctttcaaaatgaatccttctatactgggaaggttatagacttgccagatctctgagcaggaaaagatccaagaaatcaaatccagccacactgccagtccagcccctcctacagctggggcaatgccccccccgcccccccccccccgccgcaaaaaaaaaaaaagcaggggaaagtgggtctcctcactctcaaaccagtgctctccctatgacaccaaagagcctgtttctgtttcttgcttcattcattactccggttcccttgactgagttcctctcagtcccagaagacctagaaaagggtcgtggttggtcatgggtttcgagtaaacaggcctgggtttcaatcccgattcccccaccatctagctatgtgacctggggaagtgactttacctctctgaacactttctcatttgtcaaatggagttggtaatgttattatctgcctccctg

SEQ ID NO: 329 - DNA, 1031 bp, Homo sapiens
ccttctccagagccggcactgtcccggcaaccaggggtgccccaggctagctcttctacctctggggcaccacggactccccttggccactcttgggactttggtccacgtcctgagccactgaccacggccagtctctctttttatatgtgcagaaaagtgtttttacacaaactttctcatggtttgtaggtatttttttataaccccagtgctgaggagaaaggaggggcagtggcttccccggcagcagccccatgatggctgaatccgaaatcctcgatgggtccagcttgatgtctttgcagctgcacctatgggaagaagtagtcctctcttccttctcctcttcagctttttaaaaacagtcctcagaggatccatgatccccagcactgtcccatcctccacaaaggcccacaggcatgcctgtactctctttcattaaggtcttgaagtcaggctgccccctccccagcccccagttctctccccaccccctcaccccacccggggctcactcagcctggcagaggaagaaggaaggcagacatctccgcagccactcctgggccttttatgtgccgagttaccccacttgccttgggcgtgtccactgagccttccccagccagtcttgttctcaattttgttttgttttgttttgagacggagtcttgctctgtcacccaggctggagtgctatggctcgatcttggctcactgcaacctccacctcccaggttcaagcaattctcttgcctcagcctcccgagtagctgggattacaggtgcatgccaccatggctggctaatttttgtatttttagtagagatggggtttcaccatattggtcaggctgatctggaacttctgacctcaggtgatccacctgcctcagcctcccaaagtgctgggattacaggcgtgagcaatcgtgcccagccttgttcttaattttgtatcatccagtcatcgctaatattacacgcaccttctcacttaatcctcacgacaagcctgtgaggca

SEQ ID NO: 330 - DNA, 1031 bp, Homo sapiens
agatagttaaaatctaaaggatagaatgctttcctaaaacagaacattagcctttaaggttaaatagactttacattgtatctaagttaatctttataaagcactagaatttttggtcaaaagtcaaaatagtattagaatattgaaattattgatagctttcataatctcagcttttttgaacttccacaatttttggaatatgtcataatttttttccctgtttcaaatgtgttcagaggaaatagaatgtaaaacatcacaaaaaaaattgcagtacataaaatttctggactatgttagttacttgatctggaagtttaaaatttggactaaaaggttttattgaaataaagcctcttaaaatgaaaaatcatatacttttaacatcacttttaagctaataaatataagaattcttttggaaattagaggtggaaacacactggaacctcatgataattgaccctctggatcaccagattagtttaatttaacagatatgtccaaggaagttgagctatagggagtaagaaaaagcatcatgataacgtctagtcaataacatggcacttcagcagagattcatagatgatggtatgcccatgcatcatttgctcttcaaatatctatgtgcttggagccacagtttcctaagcgcatagtttttggtcctgcctcatgtaaaatagttaatgattatcatttacttggaaagattttacctgtgaagtgaaattctttcattgggggtaagggtatgaggtgatcaggaagtttcttctggaattttatcaagtccttgtattctaaaatagccaagcaaaatgatagtaaattctttgtctttgttctttcagtcagaggtatttattaagtacctactgtgtgctcagcactaaaggtttgttgataaaatgacaattaaaaaatggcatttagccaaaggccttttcagccaggagtaagaaaagatggttagtgatatttggaaatacctggatatttgctagaggaaaaatgaaagcaaa

SEQ ID NO: 331 - DNA, 1038 bp, Homo sapiens
tgtattgtttggggaataagaagaaaaacaagtcttatgcacattcagtaagataccattaaaaaaaaaaattggttgaattcacaaacgtagaaaccacggatatggccaggcgctgtggctcatgcctgtaatcccagcactttgggagcccaaggcgggtggatcacctgaggtcaggagtttgagaccagcctggccaacatggtaaaactccatgtctactaaaaatacaaaaattagccgggtgcagtggcatgtgcctataataatcccagctacttgggaggctgaggcaggagaatcacttgaacacgggaagcagaggttgaggtgagctgagatgacgccactgcactccagcctgggcaacagagtgagactgtgtctcaaaaaaaaaaaggggaaaaaaaagaaaccatggatatggagagctgactgtatattaaacacataaatatatgtatgcactgtgcaggcatattaagtagataatatatatttcaaataagtaatattttagaaaaatgacttgttgaattctggggtattggtaaagaagagggcacgtttaattcaactcagggtatgttttatttaactttaaaatctcacagtgccttactcagcgtagatatttggtaaatgtttggtgtattctcttaggcatgctgccttgcatagagtaggcaccattataagctttggttgaatcaattcaagattcattcagcagaattttttttttttttttgaaatggagtctcgctctgtcacccaggctagagtgcagtggcgtgatctcggctcactacaagctccgcttcccgggttcatgccattctcctgcctcagcctcccaagtagctgggactacaggtgcccgccaccatgcccagctaatttttttgcattttttaatagagacggggtttcaccatgttagccaggatggtctcaatctcctgaccttgtgatctgcccgcctgggcctcgcaaagtgctgggattacaggcgtgagccactgcacccggcct

SEQ ID NO: 332 - DNA, 2116 bp, Homo sapiens
tcaagtttattactcagagcaaaagttgcccatataatacgttgctcttcaatttttatttctgcatggttatacagtctgaatgactagtttacaatcccaggtggtattataagttttgcttttactggccaggcatggtggctcacacctgtaatcccagcatatggggaggccaaggcaggcgaatcacttgaggtcaggagttcgagaccagtctggccaacatggtgaaaccctctctgtactaaaaaaaatacaaaaatggccaggcacgatggcttacacctgtaatcccaacactttgggaggctgaggagggcagatcacaaggtcaggagatcaagaacatcctggccaacatggtgaaaccccatctctactaaaaatacaaaaaattagctgggggtggtggcgcacgcctatagtcccagctacttgggaggctgaggcaggagaatcacttgaacacaggaggcggaggttgcagtgagccaagatcacaccactgcacttccagcctggcaacagagcaagactctgtctcaaaaaaaaacaaaatgcaaaaattagcggggtatggtggtgggctcctgtaacctcagctacttaagaggctggggcaagagagttgcttgaacccaggaggtagatgttgcagtgagccgagatagcaccactgctctctaatctgggcaacagagtgagtgagagtctgtctcaaaaaaaacaaaacaaaacaaaaaaaggcggggggcgggggatgtgactgttggaaggggaaaagtcctcgctgacaaagaaatgacactaatgaaaataaaatcaagaatgatccactggtaccacagatgatagagaagcttgtcagtgagcagttccctacttcttgcagcaaaggggagcatgggctaaaaatattttagaaaaatcaaacggcacctgcaacacactcttaaataaaggccaagcttgcaaactattcctcctcatccatgttgctcaaatgtgaaggaattctatataaggctaaaatctagtgaatcttctcacttcaatttccacctctctggctcaagtcattcttgtgacttagcctcccaagtagctgggatgataggcacatgccaccacactgggctaaattttgtacttttattagagatggggtttcaccatgttggccaggctggtcttaaactcctggcctcaggtgattcacccaccttggcctcccaaagtgctgggattacagacatgagccactgcgcctggccctcactgctgctgctttgtggaatacagtttttcttcaagtgagactaggacaatctcttcatattcttttagttcctgggatgttttacagtactctgtccaatcacatctacatctctagacaagtgctccatcatgctttcaacagttgtggttggtgcataaaaattcaccaagaaatacccacctctgctgtgctgttgacgaagatcttataaggaagtgctcatttgcccaggttttgcaagtccctcactattgctcctctgttcatcagggcttgtatcatacttttcaaagcagcagtagtctctggctgcggcatggctgtcaagattaaagccagcttatagccaggcattcccaagggcttggtgggcggctcagaactgggatggttcccgggaagcaaaggagcaggatggcagggacctggaagtggctgggctgaatggctgccggatggcaaaagctacaaaaaatttttaaaaattagccaggcatggtggtccctcctgtagtcccagctactcaggaagctgaagtgggagaatcactcactggagcccaaaaggtcaaggctgcagtaagccatgatctcacagttacactccagtctgggtgacagcaagacattgtctcaaaaaaaaaaaggaaaaagatcagtagttctgtgccccagcacaaccccacaattgtgtatctatcttgagctcttctctttcacctgatatatatatatagttgaccttggaacaatacatttaaactgcacagttccacttgtacgtgtatttttttcaaccaaacacagatcaaaaatcatgtattcaagaga

SEQ ID NO: 333 - DNA, 1047 bp, Homo sapiens
agctgtgactgaaggatgaatgggagtccttagaaatggaatggatgcagggatattccagacagcatcaacaaagatcctgggttcagggaaagcttcctagaggtggcgacacatttgggcaactgccagcattatgtgtggctgaagctggggctcaattggactggaaggaaaaggttggtgtgaggaggggcctggcaatataggacgggccttgagtgccagcataaggaacctggctttatctcaagaaccactggaacatttcaacagggaaggcagcctggaggatggtcagcaggggcaggagtggcagtgggaggcagctgtctgggagagacactctgaaccctagactagggtggtgggtggtgggaatgtggagaagggatgcatctgggagaagttctgggggtggacagaccagacaggacttagcaatgtgtgggtgagggaggcagaggaggcctgagaaactaaggtttggtgcctttcacaggtggacacctaggaggagaagcagaatagggagcgaggagacagaatgatgagggccaaggagagtctgaggcaaccacgaagggagtacccagtactgagttggatattttggcctagaccttgatggggtggcctgggccttgggctcacccctggcctggactctgactttagccctcttacagctaacccacctgctttccggggcccagcccgtgccctcaccagcctcacagtttccaggagacagtggagcaacagctctgagggactcatcaggtgcctcaagcttgagccttctgacaagacactgttctggcaggctggaccagggctggtgctaaagttcccccaggagggctgggggagttagcattggcctcacctgcaaggtgtccctgatggggccccggatgtcaatcacctcgccttgccggatcacaaacttggggagcctgttcagaaatttctcagcagtcatcctggagcctacaggcagagttgggaaccggggcccaggaaggactatgagtggtggtggag

SEQ ID NO: 334 - DNA, 1041 bp, Homo sapiens
tcggggctcgggctccagcctgcgtggggactccaggggcagaaaggtcttaagccagactcaccacgcagggccgctagccgtcccgcagcgccgccatcttgttgtcacgcggtttcctaggcgaccaggacccgtgcacttctcattggctagtttgagggaggcctgagcaacctgcagacagcgaaggtggatacagtcgcctgtgctcggattctattggcccacagagtcggtattcttcgcgggcgaatcccagaatgcaccgctctgagagggctccaggtccggggcggggtggggggggggggtggttcgttcctaccctcaggtgcgggaggaaggagcctgggattaggttaatgaaactgctggcagcctcacattcaggacctgaatgtgtgatcccgacagtgccgctattttgctaaattgatcttgggaggaattatccctcttagcttatttccccatatgatcagtattgtaacacgaagtactgtaatacttcacggaggctgctttgaggatggattgcaatgatgcaagtacttaataaatgtttcctaaatctgagtttctgtgacaaatccttgaccagattggcgcccggaagggcggcccaaattctagttcccttgtgttaagagttgggtaagacaatttcccctcccagagcctcatctgtaaaattgtgttggattagactcagtcaccaaaacagctaaaggcagttaagaccacgaactttggaattaggagtcctggctccttactgtgtgttcttgggcactttatacaccttagtttttatatctgtaaaacagtgataatacctacccccactgggttgccgtgaggattaaataaggtaatgcaaagtacacgattttaaaggggaaagccgaaacagaaacacctgtagagagcactttttcaaaaacgtttcctgctgttaatcatcatcatcatctcttcaccctttcagctgtgatggtctgggagtttatgatttctgatctcaggcactcacttctt

SEQ ID NO: 335 - DNA, 1627 bp, Homo sapiens
gggggctggagacggtgtcgggcagctcggggctaaccctgagcggctcggctgcccgcgggcgccagaggccatattggaggagcggcggccgcggcgggaggagccatgttggcggctgtttatcccgctctcctcgggctcgccgcccccgccccgtgccccctcccccatcgcgagggccccttccctcccctccctgcgggcgggcaattcaaacccgaaagggcgggaaggcggcgctcggggttggcgggcgggggaaagcgctgccgccaaaaaaccgccgccgtgaggggcggggcttgtgcggtatggccccgccccctcgcccacgttccccgcgcacgagacgcgcgctgtcgccgcccacgagttccccgggctgcgcgcgcctccctctcccgccctcgacggctgccatagcaacggcgctgggctccgcctccggagggggtttgtttgcgccatctgcagctgttgctcctgcctgtcgcggtggtgcgggctccgctgccctccccggctgcgctccggtccagccctcgcttctcggggtcggcgagccggagctcctgcgcgcgcttcgttcttatacgaacgtcgggctcactcatttatgtcctagaaaagttgtgtggacgactgctttaattttcatttttagcactctaaagtttgggaagtaattaagaaccacctcaaaatctgcagttttttgttcttgtttcttataggctgaaggggatgctaagggagataaagcaaaggtgaaggacgaagtaagtcattctctcttcaagggtcaaagccttggactagcagaggccactggactcggtgattaaccgtaacctgtgtcctgaatttacactcctataatctagagcaaattgataccaaactttcaaagcgacttacctgtcctatttctaactttctcgttgtctttaatagccacagagaagatccgcgaggttgtctgctgtaagtgtatgcttttgaattttcgtgcttgtccctgaaactaaaaaacatcaaaaaacaattccctttgcttccatgaattatggttagtgcctggttttgaatcattgcctctacttgggactcttgcccctttgggttttgctggttctgaaattctgatgcctgtagccaaagtgggacatttgagtgggcttctggaaatccaacattctagaagaaagccaaccacaaaaacttttgaggaggaggagaaacttctctacccttggtacttttggttggttgtgggtggttttcttcagtccattgtactgatgttcactttttcctctcttcctgccaaaaaaagaaacctgctcctccaaagccagagcccaagcctaaaaaggcccctgcaaaggtaagtgctaacattggaactgatcattttcacagaatgaggactgtccttagtgccttaacttaattagcataatggtgcctccattaatggaggttataaactgtgtggatagcttacctcgtccgtgtcattcataacgttggtttcctgatcaagaattctgttgttagtttataggaaaatctgcatttaaatattaaataccccagggtttaaactaatttattcttctgt

SEQ ID NO: 336 - DNA, 1049 bp, Homo sapiens
caactctcaaaattctagaagcaactgaagcttgtaaatatggtaaaaatgtggtattcaaatatattggcaccgagtagttcttttctgccagtgagctgtaatacctggggcttgaatggagtcctgattcctgtggcttttatctctgggtttttccttgtttagattggtcattatcattactgacgcacacttacgttgttattactgatgcatacttgagttgtgtgttgcgttagtggtaaagagcacaggactcacaacaggaggaggaaggaggaggcttaggttccacatacagctccagattaagctgtgtgaccctgggcaggtcatttgctttctctatttttcattttctccctcatcaataaaatgaagttggtctgcatggccttctcactctaagatgctacatatctgtgcttccatagctggcttgttatgaaggcagctttctgtacataaatcaggggtcttgagaccatctttcttcccctggactgaaggaactcaaagctattttctcctgggattcacaggaacaagctctgaacagttgggtgccattgtggtctgtagacttttacagaaaaagctctaccagactgttgccttgaaactgttaatctgtttgtcattagtcattccacctggctggtggttttaaaacactaaatagtcgttggaaagttaggtagatttcattaaagcaagacttgaaaaatagttgcttcaggatccccaggaggcttttgcacttggggttggggtgaggaatggatattcataagttcagtgttgatattctgctgcttttggggaggggtagggagagagagggagcattaagctctccagactcctggtgtttgggcaggtctaggtctggtttgggcagttggttgtaatctgagtgcctggacttgccctgtaagttttgctgagagagaagcaaatgttcctgagactggaagaggaaaagctgcgtttcagggtcaatttcataggtgcatttgttgtttctcatcgctatggtttaaaaa

SEQ ID NO: 337 - DNA, 1056 bp, Homo sapiens
aaaacttggattggcactgacataggttgcttaatattgcatggtcctttcccagtatgttggtagtgagggtattaggaacttcagacttattgctgagagcatagtttctaagtcagagagatcaggaaattccaatggggatgggaaatagccctatgtgattacaccagctaggtactaggaagagatttaaaaggtagaaacaatatctccttcagaggcatttagttttcttaggaaagcatgcttatgtgcacacatctggaaaacttgaaaagcaaggtttcataaatggatgtagaccacactaattatgtgagctgaaggaattagaggaaaaggttcaatcagtttggcagggttaacctgggacagcttttcagaggctttttttgtgaagctaaatgttcaagaaacttagaatactaatttgccttttcataatgctattcttaagttccatgggcttgatagaatccacattgcacatccatctccagaccagtagctgtctcagtgttccaatgactttgagaatttggactctaaccataaaactccctgaaagagtggttccagggtcttagtggttcttgtggtcaggtagagcctttggtacagactgttaagttcttggctagttcaggggcacttttctagtaaatttggatttggaaggtcatgtcaccttcagagttgtgtgccctggacagctctgtagtaatggtggttcaactttgttggtgagtctgtcttggcagagttagttgacctttcttaaaacaagagccacgaagtaagtatctgttgggactcttaggctgctatttctgaggagctgggagctgtgttcaagtcaagttgcttgtgttagaccttatattgaggttgatgggttaggtaagcctgcacatatgcagtctgcccatttattcatagaaatggcctttaatactgtttttggccgggcgcggtagctcacacctataatcccagcactttgggaggccaaggtgggaggattgcccaagcccaggaccagccttgggacca

SEQ ID NO: 338 - DNA, 1688 bp, Homo sapiens
caaagtgctggaattacaggtgtgagccaccacgcccagccttttttttttttccccccccctcaagtaatggtccatgacctgctgaaagtactggagtcttggataaacattctggtttagaaataccttttccactttttttgccttgccattttggcattttgcaaaagtgggttttcagttactcagaattgggcaccatagttaacctcctatggattacaggtgtttaggggcttgaactctgatcattcccaggttttagaggaatccaagttcgggtgaatattgacttagtagccttgagtattcttcctgaaattacccctcctctccatttaaatggatgaaattagttttttactgaatgtgaagggacatctgaatgaacttctgtttgtttttgttagtcacttgtgcatagctggaatattatcttgggacaggttgagtctatttcccagtggcttctgcattttctaagggtggactggaatgggaagaagtctaatgccaagaatgcattccaacatgctgcagagtaggaaatttgatccctaaaatgttgacttagtgttggtcatggtacatattagaaatcacccagtaatccaggacagatttttgtcaccctccaggaagttatgttgatataaatactaaggggctttgggtactgagctaagtgctctgcaggcccaaagcgctgcttgaattgctacccatatgaagaggaaatgtgccatgtgcctttttttctctcttttgcatttgggcttccttatggctttgttgcttttatgttcccaagtctgcaaagttagatattagacttcctcctcccttggcactggcagattcatgattttccatggctcatcactagcagccaagatttttgtatgcttttctctcttaaacttgttcgttttcagcttgcttgtttataggcatctctgttaaaaggaacccttcttttccccttaagatctagcaccaggggtgcttgggggttgttgtgatatcagtcaattaaaagcccatttggtgtgtgcttggtgtttttattttgctcatgttttctttgaggtcacaacgtgcttgccgggcatgagtgcctttgggcccagctgtttactctcaactgccgtgtactttgactttaagaaaagtgcaaattcagccacgtggtagagggattaaaggccacatagtgttggatgcttccttttggaagaaacagatatatctttgggctcttcttgcccagtgatttctcctgtctggggtagacattgttgctttctgttgtccttagagaacagggcagaaatgctgggaattggtttattactgtgtctctttggcaaatatgtatgtctttttctcttgccctttggacaacattctgttctggtcctaaggtgttggagttcacaggttgatctagcgttatgtgaaactcttggtaatttaggtttggataaccggcttttagtctccagatttctaacattgtgcttgtttaggaatttaggcttctaaagagaaccatattacaaagcttttggggaacaattctgtaggtagtttatctgttcttgggtcacagatcctcaccaggatcctgacttttttttttttttagacggagtcttgctctgtcacccaggctggagtgcagt

SEQ ID NO: 339 - DNA, 1164 bp, Homo sapiens
ctcacagtaagcctttattgacctctctccctcaccccctacttcttagtggccagtctgagttttgctgtgaattcctttccttgtgtctcttcttgtgaagttttagtaaataaaccctgtaagtaggccgagagcagtggctcacacttgtaatccccgtgctttatgaggctgagatgagaagattgcttgagcccaggagttcgagaccagccttggcaacatagcaagaccttgtctctcttaaaaaaaattttttttaaattagctgggcctggtggcatgcacctattgtcccagttacttgagaggctgaggcaggaggatcacttgagcccaggagtttattggaggctgcagtgagacctgattgtgctattggactacatacagcctgggcaacagagcaagaccctgtctcaaataaaaataaaccctctaagtagattcctgaacaagccacctcatctctgcagtgaatgaggactctctgaggggtggacatttgagccaagacctgtctccagttgtataacttaatgaataaggattgtgcttggcacagatgtgggagttacagaagtggtcaggtgataaatattaacagtttgaagaccaagtgaagaaccagtgttctaattcatttggactttctgaacaccttatgtggtttctctgtccttcccattaaaaacaagtattctgctaccaggcctctttttcctcctgcctgagaagcgtagctgtgatcactgggacctagctgcaatgaaggcagtggtttccaggaggagactacagtttgatctgtgatttcatatttgtatgtacagatgaatactttagtaaggaatcttatgtttgtgtgtgcatgtgtgttttaaactctatcacttttaagctttattttctctgttcttggctttttcttttttcctttttcattttctcctttgatgtctaactctgcattagtagaatgcagagcacatggaaactccagtaactttaccacaccagagctggtaaaatggagatacaacatacaccagtttcagactaacatcattttggtgaagattgatttttttttttttttttggcagagtcttgctttgttgcgcaggctggagtgcaatggcgtgatcttggctttctgca

SEQ ID NO: 340 - DNA, 2462 bp, Homo sapiens
gtttttggggttctgttgacccagtacagatttgtaacattgtttttctttacagtttgtgatttcaatcctctgctttcccaatgccactttgaattggcttctttaaaactccaacataaaacctcaagtgaccaatatgtggtctcattatggtattttgggttaaaatgaaattaagatagctgggctcacccagccaaacacatttaccaaagggaaattttgaggcatcatagactgtgaagtggttagggaaaaagagagttaaatgttggctagtttagaatgccaagtgtccatcccaacttggttatactggccagagatggcaaagaatagagacaataaggttctgaaaagacagctggtgactggtatggccctgtatactcctgggataaatcatgaagtgagggtctcctgtacatacttgtatagtttgtatagacagtggtgtagatgaggttggtatgtaccagcatacttttggaactttgagaagaactgtagaatttgtagtactctggttttccatccagggaattgctgaccttaaaacctgaggatttggatgcatctataatcttttttgtttgtttgtttgtttgtttgtttgtttttgagacggaatctcgttcggttgcccaggctggagtgtagtggcgcaatctcggctcactgcagtctccgcctcctgggttcaagtgatttttctgcctcagcccagcctcctgagtagctgagactacaggtgtgtcaccatgccgggctaatttttgtatttttagtagagatggggtttcactatgtcagccaggctggtctcgaactcctgacctcatgatccacctgcctctgcctcccaaagtgctgggatgacaggcatgagccaccgcgccgcatatataatcttaataaggttgactattccctgggccgttctttaacttatttaattgtgcctgctatagttcagagtggacttagggggacctagtgaaagactggtattttggggaagtagtccaaggcagccctaggaattaatgaaataaacagtggcattgctgctgcttcttggtgtttttatcaacatacagtacttgattggattgatgtacaagcatgatgacaaacagaatcccagactgcatgtaacttcagttcctacagctcagtgatctgtcacagataccttctttggcgggatatagaactatgtattagagaaatttagcgtcttttttgtataactgaaagaccagcccaagtttgcagttgtagataaaataaaaagaatgggagaagttagagaaagaaaacgaggctttgaagttttgtggctaggggcagtttttatctttatttactttgtttatttgtttgtttgtttttagcacttatctgcaaattagtttaacatggaagagggaggagtattttagaaactagatcagaagatgcatttagaacaaaagttggaatgtgcacacctgggtaaagctctgtaaggttactcttgcccctccatgtattccttaagtgtaccatatcacttaatggtaggtaatgataagtagggcagaaaacatcaaaaggacagcaatattcagttgggcatgtggtccatccataccaaggaccttttcctagtagaagcaccagaggatggtctgtgggaggaagtacctttttctgatttcaatctatatcacctcacatggggacaaattttctaatttttgagcatatattgggatgcagtataccagtgtgtctttgcgtaccatcaggatttcctagactttgatgatattttccatttctcaggaatttttaggataagaactttttaaagttcacttaattgcccagtcctgttgttgaaatgttgtttaatttaaagcataaaatatgctggggagagtggcacacgcctataatctcagctactgcagaggctgaggcaggaagatcacatgagccctggagttccaggccagcctgggcaatgtagggagacccgtcttaaaaaaaaaaacataaaatagttgggccttgccaatgtaagaagtcatatggcagaatcttttttgaaaaacctgtgagtatcaggctgggcgcggtggctcacgcctgtaatcccagtacttggggagactgaggtgggcggatcatgaggtcaggagtttgagaccagccttatcaacatggtgaaaccccatctctactaaaaataacaaaaattagccaggagtggtggtgcatgcccgtaatcccagctactcaggaggctgaggcaggagaatcacttgaacccgggaggcagaggttgcagtgagccaagatcgcgccactgcactccaacctgggtaacagcgagattccgtctcaaaaaaaaaaaaaaaaagaaaaagaaaaaaacctgtgagtatctgccacatgctagttgcttacat

SEQ ID NO: 341 - DNA, 1029 bp, Homo sapiens
ggtctctctctttcaaaatatcttattgtatgtaatgttttcagattgtggttgaccgtgggtaactgaaaccttggaaagcaaaatcaaggataatggggggtactcctgtagatccaaagcatttcagttcagcattaatagggacaggaattgccaggccactagagtttcactttctcttctacattcccctttcctttcctgcttttgggcataggggagcatttgtttgttttgtatacatatctcttatctctgcctacctgaaatttatattctagtcaaggatacagatagcaaacaagataaataagtaaagcattagtatgttacgatacttgcccaggtgaaccagaaaaatctgagactgagtataggaatttggggaagcttgattttggctgaaagtgctgctcatttgggaatctgaggtgcatttctagcttttctttactggccaggcactgccctcttcagaccattgtttggctaaggaaaacgaatgtacatctgaattctagagacactctgtgctggagatggatttgcactataacaggcatttcacatacttatcgtttgaactgtctcatatttttgttaaacagtttttaatccctgtttaaagatgattctggtgccaagggatgaagtgacttgcttaaagtggtgtgaaactctatactttttttttttttctttttaaaaaggtacaactgaggccgggcacagtggctcacgcctgtaatcccagcactttgggaggctgaggcgggcagatcacctgaggtcaggagttggagaccagcctgaccaatgtgatgaaaacccgtctctactaaaaatacaaaaattagccgggcatggtgacatgcgcctgtaatcccagctactcgggaggctgagacaggagaattgcttgaacccgggaggcagaagttgcaatgagccgagatcgcgccattacactctagcctgggcaacaaaagtgaaagtccgtctcaaaaaaaaaaaaaaaaaaaggta

SEQ ID NO: 342 - DNA, 1083 bp, Homo sapiens
gaagtttagctaattttgacctaaatgaataagttatttcttgaattcaaggaacttaaaggctgacttgtagatgtctgttctgtctccctgcccagggaataggtttgtgatctgtttagtttgtttttgtctttttaagtcttgtgcttttagacatggacccacatgaggggcagagaagatggagatatcagaagcactgtctgctctccatcaaagttgagaaaaatatcagtttcttgactttactcttacaggcttaatttttaggtttttggcttaatgtttagctacaaggtaggatcctggagcaattcagcatgcattgtcacattgagcgtggctggagcaaaagcagtttttctggtggtgattttgtgtgaatactttttttttttatttttggtagagtacttgatgcccaggtgcttaagttatggaatcaggtacttatttatgggatggactgaccatatcctgagacaggcagtatagtctagtgattaagaacttgggctctagagccagagttcctggctctagcttctgccaccaactctgtttcataggggtggtggtgaacattaaataggttactagagagtgcacacgagcactgcacattgtaggcactccataaatgtcagcctttgtaatcatcgcctcagagggcattgggactgtgctttatacctgaaaggcagttaacaccatactaggtggttgtaggaacctttactgttagtcttagctctgtgggcaagttactcagcctctgaaagttaatctgctgggcacagaaataaaataggctactctgaaatctagtcatctagtaagatggtgggtagcaaacccaccatgacaaatcctgcttcagttaggaaatggaaattcagccacatacccagataagaatcttttggaattttgactctacttggatgtaaagcctgtgtcttcatttattctgacctgagagaaatggtttcaggatctctaagaaataggcagaaggcgggaactctcttcatcatgaagcctcccatggattcccctgaaggtctctgagacacctca

SEQ ID NO: 343 - DNA, 1047 bp, Homo sapiens
tctctgagtgtgggagaccaccaccagttgtttcgtgcgtgttttggggaccctggctcccagtgccttacccagttcagaacccatagtggagccatccacagctcccagcatacctctgcaacttcatctccagccactcatttgtaccttaagctcctcacaattcctggtcctcttgattaggatgtatacctgtttctctctctttctgtcatgctcagcaaacttctactttggcttcaaaacctagctggaatactctctctgagacttcttccccattttcatattggcatagccttatgctggtacctctgcttgaactgtatctgacatctgtcatgttgtgcccagaacaggcagatatttgtaaacctttgttgaatacctcctagattcttgctacctagttgagctttgggagctgacgttttgttgtttaggtttattgagaggagtgacaaatcctctcaataaatgctttaaaaattagaacatttggctgggcacggtggctcacacctatagtcccagcactttgggaggctgaggcgggtcatcatgaggtcaagagttcaagaccagcctggacaacatggcgaaaccctgtctctactaaaaatacaaaaataggcaggtgtggtggcaggggcctgtagtcccagctactcgggaggctgaggcaagagaatcgcttgaacccgggaggcagaggatgcagtactccatctcaaaaaaaaaaaaaaaaaattaaaacatttgaaggattttaattttacacagtttctgttcccttttgttcatttcatgatagaaggagagagggcccacagtccttatctaggtttttgatggttgattttcaaaaagataacagaaatgtcactagcgattttggtaaccagagaagcagggtctttctgaggttggtgacctgttttctttatagctgaccatgtatctgtgcctgctccccttgaattatagcccaggtgctctctcagagtctcgaaaaggaaatccccaccccctctgtcatatctg

SEQ ID NO: 344 - DNA, 1054 bp, Homo sapiens
caccctgggcaacatggcagaatcccttctctacacacacacaaacacagccagacatggtggcgcctgcctgtacacacacatacagagccagatgtggtggtgcgtgcctgtagtcccagctactcaggaggctgaggtaagaggatcacttgagttgggcaggttgaggctgtagggagctggcatcatgccaatgtactgcagcctggggtaacagagtgagaccctgtctcaaaaaaaaaaaaaaaagaagaagaagaaccaaggatgtaatccctctatcttgggattaacatggggctcttcatagctccaggtactttagtccttcgagaaaggaggatgtcctttgctgttaccttgtggttggcctcttgaaatcattctatgctggaacgaattctcattgcatttttaaagtatgctatggcatacctggcctacttcttaccaacaagaaagctagcattttctgacttctcagctaacatggaaagctggacacaggcacaaatgcacacctacctacctgccttcagagcaaactttgtctccaagagctcagcagaaatgctcccagcctaatgaggtacccaagtggtttgtggaaggtccacccagcttggatacttgaaggagagcctaaaagctgccctctgacctccagtgttaactgtcagatcttagggtcaaagtcactttcagccgatctttcccgggtgagcttgtttgtgtgagcaggaatagactcaaatcaaaccaacttggatctcctcctccttgagatgtgtggtgttttcggttttgtttttgtgtgtttgtttgtttgtttttgagatggtgttttgctccgttacctatgctggagtgcagtggtacaatctcggctcactacagcctcctcctcctgggcttaagtgattctcccacctcagcctcccaagtagctgggactacagctgcacaccaccacacctggcttatttttgggggtatttttagtagagacagggtttttgccacgttgcccaggctggtctcgaactcctgg

SEQ ID NO: 345 - DNA, 1065 bp, Homo sapiens
ttcacagtacttgtctgtgttttgatggttgcccccttacattttgcctcatttggtcggcagttgctgaagactcaatgttcggtcttcactcatcaagtcattcattttggtttttgtcattgttctttgtcttttcaaacctccatttagtagaaacagctggcatgccctggttaatggttcatgtcactctgaaggtgcctaaaatgacacaccactatatagaaaatcagatagagactccatgcaagtggctgctaaagaaaatgtagatggtaaagtcccaggataaggatggagagcatttgttcgcattgtataaagctaataactatatggatgctacccacaaataggttatatgcagaggaacccccagatgccccagtacagttccccccagcccggctcagccttatctccgcgtcagccttccggaggacagatacacacaggcatgggctcctaccagcagaactccatggggagctatggtccccaggggggtcagtatggcccacaaggtcagtatactacccagttaggagtagatacgggtgagaggagaaaacagttccttgtctgatatgttgccatctagcttgtaaccttgtgagagaagggctgtcctttgcctttaatccacccagcccaggccctgaagtagggcaaggcaagattccatttgtctccacttattctgtcaccatgagaaagtctttcaatttcactgagcctctgtttcatttataaaaatggagattaggtgtttactccaccattgagcacagacaatttatacatggtagctcttggttattatttttttattaattatttttagtgaataagtcataatggaatagatctttgctcaaaattgcagccctaggctgatcaaaagttgagaatcttacacagagcatggaaatagaaaggaagttatcttcttctggaagttgaaatgcctgtgtggcagcaaagccagccttgctctgacctgcctttacatgcttctggaatccccccctttttctcatggcgataaaggctaccatgaag

SEQ ID NO: 346 - DNA, 1080 bp, Homo sapiens
ttcaagatactgtcatatcttggattcttgaaatacctccaaattggcctccctgcttctgctttgcctggttgaacctattctcaacagagcaaccaaaaggacccctataaaaggtaagtcagatcaaacgccttcagtgcttctgactcagtaagtaaaaatccagactcttaaaaagtggcctacaaggccctgagttatctagcttacctctacctttcctgcaccatctgtcttgcccgttgctcaccccactgtatagagatgtttccaccttggagtctttgtactttatactctctcaccaaataactgcatggctcaagtcctcgactgcttcaagtctttgtccaaatatataagtaaggcttttcatggtcaccttacttagaatagcaatctctgccccccactatgtttcccttgtctgccttatttttcctgtggcacttgttactgtctggcctgttgtgtgttgtacttacctgtcaccttccactgaaatgtaaactgagggtggtgggaggggtgttttgttcactgctgcatcctggtgctaacacatagactggcacatagcatctacttaagtagtagttgaatgatactgtcgatgttggctagatgcagttgcttttatgaggctaatgtcacaatatatagtttctctgttcacccccttccttagggaaacaatagagaagcctcaagttcctcaggagaaatcagaagcagaaagagaaaaaatgctatcattgtggacacttagaagtgaaatttgaaacaagaaacaacagttttctattgtgtacctacttatattctggacatagcacatcacaatcctacaacaatcctgtgcctgtgaagtcagtatgtggctcccattttacagttgaagaaagaggctaagaaaagtgaaaggctttttaagttcatacaccaagcaagttccacctgactccaaggatcatgcttttcttaatataccacactacctcctttctggatgagaacccaacccaggagtaagggatctagctgtggagctcagcaagcaagatttgtttttattgt

SEQ ID NO: 347 - DNA, 1023 bp, Homo sapiens
ctactcaggaggctgaggcaggagaatcgcttgaacctgggaggtggaggttgcagtgagccaagatcgcgccactgcactccagcctgggtgacagtgcggcgagactccatctcaaaaaaaggaagaaagaaagagagagagagcgagagagagagagggaaggaaggaaggaaagaaaggaaggaagaaagagaaagagggagggagggagagagagagagaaaggaaagaaaggaaggaagagggggaggagagggaagtggagggaaggggagggaagggaagcagagggaagggaagaccagaagccatttgcttttacattttagagcccaaagtacacttgcacagtcttgcctgaagtttgtgtcaacttcttggttctctgtcatgatgtagtccacagagaccttgattatcttgacctagcacgtaacaaagaagtagaaagtacttttagatgccttaataaaacatgaaataaaggatgggagggaaatatcacaaaaactcatgggcctggtacttcagagaactatctggtggtccaaattctgtaaatcggctgggcacggtggctcaaacctgtaatcccagcactttgggagcccaaggcaggcggatcacttgaggtcaggagttagagaccagcccggccaacatggtgaaactccgtctctactaaaaatacaaaaattagctgggcgtggtggtacacgcctgtagtcctagctacttggaaggctgaggctcttgcttgaacctgggaggcagaggttgcagtgagccgagatcgcgccactgctctccagcctggcaacagagcaagactctgcctccaaaaaaaaaaaaagtaataattataggccaggcatggtggttcatacctgtaatcccagcactttgggaggccaaggtgggtgagttgcttgagcccaggagttcaagaccagcctggacaacatggtgaaaccccatctctaccaaaaaaaaatttttttaattataaaataaatataa

SEQ ID NO: 348 - DNA, 1059 bp, Homo sapiens
actccgatccccaatgagtgcccagctaagaaaatgtttgagacagtagattccagtttgagagccggagcttccctggctaccacctccaacctgggcaccagggcccagccagacaactcataacactggcccacctctctggtatctccctcaggaggacacctgtcaggattttgccatctcctgcacagcctgaggggagctaacaggcctctttgcagagggttagctggtaagaccgtttcttccctgtcggccagcactgcccgctcccctcacacaccatctcatcctcatcgcatgcctcgccaaccccatggagcccgtccatctgtctggtgtgtggtgcggtgtgtgtgctggtggtggtagggtctccagggactccccgctaagcagaaggatcgggatatagggcaaggctaaaagcccagccccattgtggactgaggaagtagcttctcgcagagcagctctccagctggaagaggaggtggagggtgaggctggggagaggatggcgaacctgccctgaggtgcttgggtctgtgctggtggggtcctggtatgcaggggccaccggtcactaacactcttatgtcctggctttctgtccccgctgagctttctctcacccgcccgttttctctcctgcttcattgcctgctgcctaagccttggcccttctctcgggcagaggcaggtgctgtggcagcacctctccccaccaccggggcccctgcaggccgcctccctcctcccaggcctgctaaccctctctcttctccttctttgctgtcctgccggggatctccagtgtgtgcgggggcttaaggacctcctgaggaccgctgctctctgcctctccaggaatggcctggggggagccaggcacccggcacctccacctgcctaacctgtggcccatctgccaccatctgtgcctacagggtctgccccccagcctgcccggcctgtgtgctctctaggacccccatagggggcaggggctggcctctttgccccattcccgctccatgccggccagagtgtaga

SEQ ID NO: 349 - DNA, 1015 bp, Homo sapiens
gcgactgcaatttgtactcccatgaagctggccctagtcaagtacgcagtgaggtcgatgaggaggaggctgtcctgtggtaagtcccttctaggattggaagagatgagtaaggctactttcagcttcactgctctacaagctgggggggtcgctagcaagggagaggggcaaaacttgtccctttttaacttccaaccctgccagatttgagtccagggctttctagaagtctccacggcatcgggtgaccatagcaactcatgccaaactctcgggcccacggctccgcctaccgcttcgtggacgcgcttgttgattggctccgaatgtcgaccaatggtcggcgaagcgggttgcttgccgcacggtcaatggccgcaaaccgggaggaaggcgggaagagaggaggtggaggcgggcctgggcagccgcgcgcgtgcgtgtttccggctccgctgcggaaggcggacgactagagtcgttgggcccggcgcgacccgcaggagcgtagagagcgcgggactagagtgcagagctccgggacgtggatcggagccggcgcgatgggcggagagcaggaggaggagcggttcgacggcatgttgctggccatggctcagcagcacgagggcggcgtgcaggaggtaacggcccgcgcggcgtcggcccacccggcggccttggccacgctccttccgcccttctctgccttcgagggctgagacccaccccagcggctcgcgggcttctgggatgcccctacattctcactgcgcccagcttccggcctggccacccgccagcaggtctcacccggttcgcatcagtcccgggcccccggcgcccctcagtagtagcaaattatcgcatccctgagcttaggatccccctttagtttcacatatgcccccacccccgtttccactttgatggcggcttccaaggagcatcccttagtaagaaccgtcgcaaatatcgtgatttggatccaccaaggcttggggcgagccgt

SEQ ID NO: 350 - DNA, 1470 bp, Homo sapiens
tcagtaacattggccaggctggtctcaaactcttgaccttgtgatccgcccatcttggcctcctaaaatgttgggattataggtgtgagccaccacgcttggcccctttttttttttttaatttttatttaatttatttatttatatttctgagacagagtctcactctgtcacccactggagtgcagtggcatgatcactacttaccttgacctccccaaggctcaggtgatcctcccactttaaccccttaagtagcttggactccagtgccatcatgcccagctaatttttctttttcttttttttttttgagacagagtatcgctctgttgcccaggctagagtatagtggtgtgaccttggctcactgcaacctctgccttccgggttcaagcgattctcctgcctcagcctcctgagtagctgggattacaggtgcgcacaaccatgccgggctaattattgtatttttacaatgtagagatgaagtttcaccatgtcagtcaaacctgtcttgaactcctgaccgcatgatcctcctgcctcgacttcccaaagtgctgggattacaggtgtgagccactgcgcccggcccccagctaatttttctgttttttttgtagagatgaggttttaccatgtttcccaggctggtctctaactccagggctcaagtgatctgcctgactcggcctcccaaagttctaggataacagatgtgagccactgtgctggcccatgttaaccatttttaagtgtacagttcagtagtgttaagtgaacttacactaagaaacatatttgtaagacctctttgcatcttagggaactgaaaccctgtacccattaagcaacttcgctttgttccctcccctacctcctggtaactgctgttctgttttctgtgtaggttgactactgtagatacttcatataaatggaatcatacaatatgtatgtctttgtgactggcttatttcgtttaatgtaatgtccacagatttatccacattgtagcatgtgacaggatttccatcccctttaaggctgaataatattccattatatgtatatatcacaatttttttttttctttttgagacaagtcttgctctgtttcttgcccacgctggagtgcagtggcacgatcttggctcactgcaacctcagcctcccgagtacctgggactacaggcacacgccaccacgcccggctaatttttgtatttttattagagtcggggttttaccatattggtcaggctggtcttgaactcctgacttcgtgatctgcctggctcggcctcccaaagagctgggattacaggcttgaccaccgcgcccggccacaatttttttttttaaatctattcttctgctgatggacttttgggttgctttcaccccttggttattgtgcatagtacttttgtgaacataggtgcacaaatcttttgagattctatt

SEQ ID NO: 351 - DNA, 1153 bp, Homo sapiens
ttgggggtggggtgggtgagtagagaattagagacgacactggctagtgtgtgtgtgtgtgtgaagtagagggtagtaaatggagattggtcctggtgtcacaggcagctctgccccctccctccacttccagatgtcccactgctcctcatcaagcttcctggccagggcacacacatgtagacttgaaccccagctcctagttagtgctatgtccattaccacatagccaactaacaaaaggcacctcccacacctgcctgaccctccagggccccctctagaagctcacccgtctggctttattcaggctgggtgcggtggctcatgcctgtaatcccagcactttgggaggcccacgagggccaatcacttgatgtcaggagttcaagaccaggctggccaacatagtgaaaccccttctctactaaaaataacaaaaattagctgggcgtggtggcaggtgcctgtaatcccagctactcgggaggctgagaaagaattgcttgaactcgggaggtggaggttgcaccgcactccagcctgggcaacagagcaagactgtgtctcaagaaaaaaaaaaaaaaaaaaaaaagctcacccgtctgcctccattttcttcttaattagcaaatattgataggggctcagaaagcagagccaaatcagaggagggtctctacttttaagggcttatgtctcctggctcttttccaggcaggcttttctggctgtcaccatcccaggggatcccttgggggctgagcagtttgttggaggccagctctagcctcggacagaaggctgacccaccccttttccccacatgactttcagaacactttcttggtggcccccagctctggggacaggactgagtacagggatcttgggggacctgtgcattgaggacactgacggccaccaatgaatttatatctcagcaaagggaaatgaggggggaacaggagcctttcttcaggctggtgcttggggctgggagaccagttcaaggttctaatctgggacctgcccctcaactggataaccatgtgagcgttgccaccagagggcagtgtggggctgctttctcgagacgaaggggtgtggcctggaggaggttcagtcctttattgttcctgcccccaatcat

SEQ ID NO: 352 - DNA, 1803 bp, Homo sapiens
tagatgatctgggtaaagtggcagtgaagtcttccctttctaacaaagcctgaaaccgttttgagaagaaactattttgagggcagcttctgactcaaagacgttacgaaatccccacctaggacaccggtatgcccagtggtccctactaagcttttctgtgtcttttagagtcgttgagtggccagcttctgctcactgtactgaaggaactacttaatgctatttctgtcttgagttctggcttattcttccttgtgattcttatatctttagcgggattgaattgaatttttgctgttgagtgtaatagccagatcctctgtaacagaccagggagtaactagttgggctcctttgggccaagtctgagacttactgaggtttcttcattgtaggttgttgtatttcgttggcaggtgggaaatgaccttttccgtcatagtttgtgatcatgctgctttaaggctggagtcctgctctcctttccttttttgacctatatgggagcacttctgttcgagtcttatctcaatttgaaggaacagtgcttttggatcaactctgccgaataattgagcagtagcccatatttctgcctgggacaccttcattgagggtcacgagggaaagagagaacacgtgtaaatattatgatgatgatgttaacaactatttaccagtttcatacaattgacagttttttttagccgggaggagttcagtattgactcattgggcatcttatgtagggtgtttttgcacacctagactttaggatctggaaagacaactgaaaatcttgaagcccactgccaaacatttgtggatcttgggccaactgctaaggaagatctagactatgacttggtctttaattatttttatttttttctcctttatgtatgtatgtatttatttatttattttttgagatggagtcttgctctgttgcccaggctgaagtgcagtggcgcgatctcagctcactgcaacctcagcctcctgggttcaagcaattctctgcttcagcctcccaagtagctgggattgcaggtgcctgccaccatgcccagctaatttttgtatttttagtagagatggggtttcaccatcttggccaggctggtcttgaactcctgacctcgtgatccaccgacctcggcctcccagagtgctgggattacaggtgtgagccaccgcacctggcctctccttttatttttatttttttgagatggggtctcactctgttgcctgggctggtctcaaactcctgagctcaagggattctcgtacctctgccttcctagtagctgggactacagacacggcctccgtgaccactctcttctctctttttaaaaattaaggaatgttgctgacatgtgcagttctgagtctcagagaggaagtcaaacagaacatgtaatctggtgatacttgtgttttctttgggtcactggtttagttatctattctgtttcctttcttctttccacctcacctttccagatgctccactgtatctttaggctgccattgcagattgctgggcccacaaaacccttaggttgtactttcttagctgtcatctcttgaaaagccaaagttctggcagttgctattagaaaccagttcctggctgagcgcggtggctcacgcctgtaatcccagcactttgggaggctgaggtgggcagatcacgaggtcaggagattgagaccatcctggctaacacggtgaaaccccatctctactaaaaatacaaaaaaaattagccgggcatggtggcacgcgcct

SEQ ID NO: 353 - DNA, 1093 bp, Homo sapiens
ccctgggtttgagttcctgttccatctccagttttagctgtgtaatattgtgaaaattgttgcatgtctatgaatatgtttcctcatatgtaaaattatgacagtaagagcatctaccctacaagctttttttgtttaagacaagtgcagtagtgacaagaggggaaacagtagaacaaggagttcaatatgtaactgtgaataatcaattgagataacttggtacctttggaccagcccgtaaaacttttttttgctgagatggagtctcgctctgtcgcccaagccagagtgcagtggcacgatctcagctcactgcaacctctgcctcccaggttcacgcgattctcctgcctcagcctccttagtagctgggattacaggcatgctccaccacacgcagctaatttttgtatttttagtagagatggggtttcaccatgttggctgggctggtcttgaactcctgacctcagttgatccacccatctcagcctcccaaagtgctcggattacaggcgtgaaccaccacacccggccaaaactttttgaaccactcttcttctggggtcttagcactctctccctggaagtggttttcccccagttctttgctgctgcttgtcattcatgtttcagcctaaatgtcatcttctcagagaacccctctctatcaggcaggatttgtagttgtatgcaacagaaaccaactctggctgattattgaaaagatattaaggaaattcacaaaacatcagggaaggtcatagagtcatgcttgaagaatgctaaaacaagagaaactgggcaataggcaggacccacgactaaaatcattcatagactcagcctggtgaacacactgttgccaccactacttacacagctaacaccacctgctgcactggacttaatggccactgtggccaccccttgctacactccaggtgaactctctgtggtcctctgactctgagacactagatcccagttcagggtttaggggtgatgtgtctggttggcatagcctgggccatatattcacattgtagctgcaagggagcctcagaaagagaatctcagtcacctcctt

SEQ ID NO: 354 - DNA, 1045 bp, Homo sapiens
ttcttaaacaactgcaattactaatgggatctatgctgcccattgggcactgaacaacttgttaaattttctaatcaaagcaaacactgctgccttcatttcctgtcccacattgattttcatttgctttttatcacagcaaccactaaagacccagcttcttttttttttttttttttttttttgaggcggagtcttgctctgttgcccaggctggagtgcagtggtgcgatttcggctcaccgcaagctccaccttctgagttcatgccattctcctgcctcagcctcctgagtagctgggactacaggcagctgccaccagacctggcttattttttatgtttttagtagagatggggtttcaccacgttagccaagatggtctcgctctcctgaccttgtggtccacccgcctcggcctcccaaagtgctgggattacaggcatgagccactgcgcccggccaagacccagcttcttaaagatgacatcatcaaaaggattgtggcataatgtaataatggaactgtgaactaccttgagctaatagttctctcattagccaaagatgttgaatatctttcaaaatatcctactttgccccctgtgaatttgctgtgggtgccctcaggcaccttgatgcacagttggggaactatggtttagtctgtgggaatagcagttccactactgaaactactgagaggtcctgccggaaacacaataggtggtattataaaacagatactgtgggctggtatcattcctctgtgtacccaaattaacgtctgcagaagcttcttgaaggcatttccagaccagacaaaggaaggacaatgttccagaccagggagtagtgcagagtctcaggttccttcatgaaccctgagtgactccatctggctggattgtagagggtagactggaggagcagtcaaactgaaggacttcctatggctggtgagagaccacagactcaatcctgtaggcaagggaggcattggaagacttcacgagggtctccatttcatttggagttggtac

SEQ ID NO: 355 - DNA, 1050 bp, Homo sapiens
ccatctcagttgcaaactgggtttagatcccaggttgtctgcctcccagaccaaagttctttctgtaacatcagcctttgtcaggggagaagcaggtgctctggtactacttggcgccttttgggaggagctctcatatggggagaggtggtttgccctcctgcttcaaccttgacagctgataaacgtaacccctcctcaccgtgctggatagtttgccaagctcttaaacacccattttatcagaattaaacatccattttctaaggtaggttatcttctcagatggtgaagctgagctgcttgtagcattaagtgtcttgatcaggttcgcaccccaataagcaaaggcatgaagagctcagtcttctgatctaacttgctctttgcactacatcttatccactctcacctgatgggatagcttgttccgctatcaataacagccagtggtgatgtggagaagggatcatttggggccttaggtgttgctgattctaaaaagatcgtagtttttgaattatgttaaaatacttgaattattttgtgttttcaagtacttatgcatataagagcatccaaatctgttctttaaaaataaaatattgggacaggcgcggtggctcatgcctgtaatcccagcactctgggaggcagtggagggtggatcggtaggtagttcgagaccaacctggccatcgtggcgaaacccgtctctactaaaaatacaaaaattagctgggcatagtggcacgtgcctgtaatcccagctactctggaagctgaggcaggagaatcgcctcaacccgggaagtggagtttgcagtgagccgagattgcaccactgcacttcagcatgggcaacacagtgaaactccgtctcaaaataaatagtgaaataaaatcttaggaaaatgtgcacattaattcattcagtgttcttctaacacatgtgctaagtgacccctgtgttcccagatagttctaggtgatgcgaatatacagtgatgaataaaggagatatggtctttagacttttgagagtttaag

SEQ ID NO: 356 - DNA, 1034 bp, Homo sapiens
ccctctctctctctctttttttttgttttgtttttttttttttttttgagatggagtcttgctcttgtcacccaggctggaatgcaatggcatgatctcagctcactgcaacctccgcctcccggattcaagcgattctcctgcctcagcctcccgagtagctgggattacaggcgcctgccaccatgcccggctaatttttgtattttcagtagagacaaggtttcgtcatgttggccaggctggtctcaaactcctgacctcatgatccgcctgcctcggcctcccaaagtgctgggattgcaggtgtgagtcaccatgcccggcctaaggccccgtctcttaaaaaaaaaaaaaaaaagtcaccaacagttagcgagtgcttactctgtgctaggccttgtaataaaataccatcttagcctcacaacagccctgcaacaaggtaagtgccatcatcccattttacagatgaagaagtaagcagagaagtagtgatttgctccgggtcacagaggtaggaagagtggaactatggttcaaacccagcagctgggctccagagcccccactcagagccaccctgtgcgatggcctcactggagcacaggagtggaaatgagaggtgctgtgatgcgaaaggagaatggccgcggaggtgaaaaacaagctctcctgacagcagcaggcctgtgagatggctattgtccccacttcataaaggaagagagtgaggcttacagggattgtcattgatcccaggccacagggaaccatgcggcagagccagattttaacccagatctgctggcctctaggaccctgcctcttaatgtccctcttaacagagggatgttgcctagagactggctgcagcgcaggggcactgaactctggaggaggctgagctagtcctggagctggggaaaagtattcccacagggagcacagaaggcccaggggtgttgaaggacaggaaatagcccacagctaaggctctacgggtataggtgacgaaggggagaaagccagag

SEQ ID NO: 357 - DNA, 1059 bp, Homo sapiens
gcagtgagctgagattgtgcccctgtgctccagcctgggcgacacaacaagattgtatctcaaaaaacaaaaaacaaaacaaaaaaaaccccagaattcccatgaatcaatatgaaaaagaaagatacaactcaatagaacaaaagttgtcaaactttttaatctcaggaacccattacactcttaaaaatcattaaattctgtggccgggcgcagtggctcatgcctgtaatcccagcactttgggaggccgaggcgggtggatcacctgaggtcaggagttcaagaccagcctggccaacatggagaaaccctgtctctattaaaaaatacaaaattagccgcgcatggtggcgcatgcctgtaatcccagctacttgggaggctgaggcaggagaatcacttgaacctgggaggtggaggttgcagtgagccgagattgcaccattgcactccagcctgggcaaaaagagtgaaattccgtctcaaaaaaaaatatcattaagttatcttcttgaatcttaaaaaaaaaaaaaattactaaggacctgtattagtctgttctcactctgctataaagaactgcccgaagctgggcgtggtggctcacgcctgtaatcccagcactttgggaggctgaggcgggcagatcacagggtcaggagttcaagaccagcctggccaacatggtgaaaccccatcgctactaaaaatataaaaaattagccgggcatggtggcaggtgcctataatcccagctactcaggacgctgaggcaggagactcgcttcaacccgggaggcggagattgccatgagctgagaccgcaccgctgcactccagcctgggcaacagagtgagactccatctcaaaaaaaaaaaaaggaagaaagaactgccagagactgggtaatttactttaatttatattgaagtatttaatttatataggaaaggggttttgttgactcacatttccacatgtctgggaggcctcaggaaacttacagtcatggtagaagacacctcttcacaggaccgcaggagagagaatgagtg

SEQ ID NO: 358 - DNA, 1029 bp, Homo sapiens
tcctattcattcttcctattttttgtgcccattaaccatccccacttccccgccaccagtcccccaccattgcttttgctccgtcctgttgatatttacactcatggagcaaataaacacgttagtattattttgagtaatggtcaaacaaatgaaaaggtactcagcttctttagtaatggtgaaattacagattaaaataacaatgaaatactatttcatgcccaccaggagggcagaagtttaaaattctgtgaacactgggagttgtcattatggatatgatgcaacaggaacttttttatctggccggtggtataagttagaacaactactttggaaaacattttggctgtatcttcagaacacatgcagaccttgtgatccagcaattctaccctagagaaacctgtatgtgttataccaggatgtatgtacaagaatgtgcatagcagcattgtttgtagtagtcaaaaattggaaacatccagatgtctgtcaactgtagaatggataaattgtgttatgttcatatactataatatcatacagcaaagaaaatgattgaaccacagttacattcagtatcagagatggatctggcataatctggaatgattcaaaaaaagcactaaagaatataaacagtataattccatttatgtaaagttcaaaaacaggcaaaatgatattgaataagaatatagctcactattcttaaaatgcaagaaaatgattttcacaaagtcaagataatagatactttaaaagggagggatggagttgtgattggagaagggcacatgagtaggcttttaggactctggcaatgttatttcttgatctggggaaaaagataaagtaaaaagaaaaaaacaaaccaaaaacccacagtgttcctctgagtggatagaaatttgaaattcttttcattttgcttgtcctgtattgctattataaaaagggtaagctttttaaaaatgaaaatacattgatttttaccatttttgctttgttttttatttattt

SEQ ID NO: 359 - DNA, 1050 bp, Homo sapiens
cttctgctgggttggagccattcttatttgacccagaatggagccaagcctgtatggcagcagagaacggtcagtggtatttgttatctgggggaacaacaggtctgaggatataagaaacccaccgaggagattcaaggctcagtgagggagtttccttctcactgtaacacatgatggatgtggtggacccagtgccattttcattttttaaaaagctggagtttctgaccatgatcctgactatggcatttttaaaataaattaaaaacagacaaaaaagcaaaactgatgtgctggggggaagctgacctgataagagagttggcgatcatactcttccttctaaaactcaggttgtttttgttttcccccttacgtttctgatttggttattcccagcacacggcactttcttgggtcacattcggttggaacctcacaagcctcagcaaattcccatcgattccacggtctcatttggcgcatccacaagggcatacactctgcgcgagaagcctcagacattgccatcggctgtgaaaggagatgagaagatgggtggagaggatgatgaactcaagggcttactggggcttccagaggaggaaactgagcttgatgtaattccctgtttatgtcattgttttgtctttggggaccctggtttttggagtatacagctgttctatgtagctggaaatgccagtgacttagcagcagggggttctcttgagtccagtaatgggcctttggcaatctggtgtggccagctgtgacagctctcggagagccacattgtatggatttggttgtgtatcaccaggcctaacaaggaggctgagtcccagccactagtctccttgagctgttttgtgcaccttcactggctgttagaagctaagactggaagctacatttctctgtcccttgactgcttagagctaatgctgtccaatatggtagccactaacaatatttcaagtattatgtagtcacatatggctagtggctgctatgttggctagtgcaaagagagaatgttttcat

SEQ ID NO: 360 - DNA, 1050 bp, Homo sapiens
tccttaattttgaaggagaaagctactaggaaggaagcagccagttgtcctttttcatctcaattttgttacttaaaaacaattcttggcgttccttccagccacatttccttttaattctcagcttattgtgggcatgaagacatgatagcctttcttcagcaacaacaaaaaacacaactcaaggatatttgcacagatgacctgttctcagctcaaggccctttacctcttgaatatcactgccccactagtcaatgaggatgttccacattctttctaatgagacttgagacttgttagtattcgtagtctcgggacagtatgaatcttctctaaatgcagaagtgtctcaactccctttggaggtcaagattagcccctcatgccttcctcacctttatttagtatgattttctccatcagattccctttgtactgactgctgtctttcctgtatgaaccctggcttagaacctgacagagttcaacactgcccacaacaagcggatttctacccttaccattgaggagggaaatctggacattcaaagaccaaagaggaagaggaagaactcacgggtgacattcagtgaggatgatgagatcatcaacccaggtgaggtatcttgctagtttattctgatgaaaaagctgtggttggcccgggcgcggtggctcacgcctgtagtcctagcactttgggaggccgaggagggtggatcacttaaggtcaagagttcaagactagcctggccaacaaggtgaaaccccatctctattaaaaaaaatacaaaaattagctgggcatggtggtgttcgcctgtagtcccagctacttgggaggttaaggcaggagaattgcttgaacccaggaggcagaagctgcagtgagccgggattgtgccattgcactcctgcctaggtgacaaaaaaaaaagaaagaaaaagctgtggttggtcaggcatagtggctcatgcctataatcccagcactttggaaggttgaagttggtggattgcttgaggccaggatttcaagaccagggt

SEQ ID NO: 361 - DNA, 1072 bp, Homo sapiens
cctccccatcatacagttactgtttatttcactcactttatagaatctgtgctttgaaatcctgtttatcagattctgaattatatgaaggccaagggctttgtcttttcactgctgtattcttgctgcttgcaatatagccatcaaaaatatttgttgagtgaacaaattaattctgtttccacctagaaagcacttagcatagtgccttatacttgagaaagtgatcaataaatggtgtaaacaatggtcctcaccctggctgttatgctggggccccaccccagataactaaattagaattgcgggaggtgggaccttggcattgttatttttgtaaagcttctcaaaggattctaatgtaccgcttgggttgagaagcccttgtttgatacagcaaggaggttaatgatacctgactttttattaagtgcttattgttatggaggtattgaggtaagctacacagtgttatctcatgaaatcctcatcactggccagtggaagtagttactgctatccccattatttggtaaagaaactgaggctcataaagctaagggatagcaggtggtggagctgtcatttgagctcatgcaatttgtgtcaagagccccatctttttttttttttttttttttgagacagggtcttgccctgttgctcaggctggaatgccgtggtgcgatcatagcttgctgtaacctcaaactcctgggctcaggcagtcctcctgcctcagcctcctgagtagctgggactacaggttgtgtgctaccatgcccagctaatttactgtttgtggagacaggggtctcactgtgttgcccaggctggtctcgaattcctggcctcaagcgatcctcttgcctcagtgtcccaacgtgctgggatgagctgctgcgccagccaagggcccctatcttttaactgcattgtatattgttgttgttgttgttattgctgaaagtgttgatggatccagaccgatgacttagagctccttcttttgacaattcctgggtcagattttggagtgagttgggattcccaaggctattcctatccttcc

SEQ ID NO: 362 - DNA, 1048 bp, Homo sapiens
agaggcctggctggtgcctggtgggtaacccagggcaggcactgagcagctctgacctccccccttgtcccttccaggccttgctgaagaccggcgagcacacttggtccctggccgagctcattcaggctctggtcctgctcacccactgccactcgctctcctccttcgtgtttggctgtggcatcctccctgagggggatgcagatggcagccctgccccccaggcacctacaccccctagtgaacagagcagccccccaagcagggacccgttgaacaactctggggtaagtcacgggcctgggtcttgatcggggaggaagcgggcatgacctctggtccttaggtagaagctactgcttcccaatctcgtatctgcactacctgctgctatgagagaccatagaaaagttatttgactttgaagcttagtttcctcatctgtgaaatggggagataaagaccctctactcacactgggctgtgagggttaaatgaaataccatgtgactgacactgtgtatatgccataggctcaaagcctgttggttttagcactttaaaactacaaagtttaccttttactctgtaatgtggccttgtatgtttcaatacaaaaatacagatactttaaaaattcctgctcagggaagatgtgtctattctgtagctttgtaaacgtcactttaggaagcacagaccccatgtgctgtccagcacagtggctggcacagaggatgccctgggcctttgtgagcattaggaaggcctggcctctgggaaggatgagtggagcttcccagaggctgaaggaggaggagtagctggtcaccacggggcctctcctgcagggctttgagtctgcccgcgacgtggaggcgctgatggagcgcatgcagcagctgcaggagagcctgctgcgggatgaggggacgtcccaggaggagatggagagccgctttgagctggagaagtcagagagcctgctggtgaccccctcaggtacagggtcacaggcatccaggctcccgtggctgctccttct

SEQ ID NO: 363 - DNA, 1049 bp, Homo sapiens
tttggttccccctaatctttgctataaggtttattaaatatgttggagaacataaatacaatagctttggctgctgaaactaacattgaagacagaaccaaaattaagatactgtacttttttagtcagaccatcgggactcaagagaatgctctctctagtttctgcttttaataaaaacttttaatcagtttcaaacctgcagttaagtcttggatttatgttagtacatgccatgaatgtgacatcagaaacagaaacctatttcacctcccttacttattaggtaaaatgcataacatgccaatggaattgagtcaatacaattatgtagtctagcctttctaactggtagtagcctgtttgaaatcttttattattgcattataatgggaaagaactttttttccttgtgcttttgctgttggtttacttcatttccaaaaccatctgttcattcagtcaacaaatacggaaagtctgttatattctaggcactgttgtagacattgaggacaaaacagtgaaaacaagtattttccctcttggggtttacctactgattagggttggctgggaagaggaaggagtctgacagtaaataagcactaaataaataaaattccctcatataactgcaaccttgagcaactcaacctctttgagctttagttttcttgtctttaacatggatgtaattgattcctgctcttcctatcttgtggattgtttctaagagggagtagaataagtatttggatacattattcgcttcaaattcctgtagcaagttatttttactactattagaagaagaggcccagcacggtggctcacgcctgtaatcccagcactctgggaggccaaggcaagcagatcacttgaggccaggagttcgagacgagcctggccaacatggcgaaaccccatctctactaaaaataaaacaattagctgggggtggtggcccatgcctgtagtctcagttacttgggaggctgaggcatgagacttgcttgatcccaggaggcagaggttgcagtgagcag

SEQ ID NO: 364 - DNA, 1049 bp, Homo sapiens
ctgtattcccagcactttgggaggctgaggcgggtggatcacctgaggtcaggagttcgagaccagcctggctaacatggtgaaaccccgtctctactaaaaaaaaaaaaaaattggctgcgtgtggtggcaagtgcctgtaatcccagctactcaggaggctgaggcaggagaatccctgaacccgggaggcggaggttgcaatgagccaagatcatgccattgcactccagcctgggtgacagagtgagacttcatctcaaaaaaaaagaaaaaagttttttttttaaccatttttttgtttttctttctttctttctccccccagccccccccccctttttttttaacaacccaagggcacaagggggaaaaaatagaggaagtatttagaatgttttgttttgttttgattttaaggatgggagaggtttgacatgtttgaagggaaagggaaagcagccagcagagaggcagatattggagatgtgcacagagaaaatgtagataatgaagaagtcttaggaggaaatagaatgaaaagctcatgaaacagtaaactttgaagaggaatatgaagaaataaagggtgagagaagatatatttggaagtggtggacatggaaggtgaaataagagtagttgttaccagttgattactgttattacccaggcactgatctaggtttatttatttttatttttatttatgtatgtatttatttttttaagacagagtcttgctctgttgcccaagctggagtacagtggcacagtcatggctcactgcagcctcaactcccctgctgggctcaagcaatcttcctgtctcagcctgctgagtagctgggactacaggcataccgccatgcctggctaatttttgggttttttgtagcgatgggatttcgccacattgcctaggctggtcttgaactcctaggcttaagcgatcttcctgcctgggcctcccaaagtgcttgaattacacgcatgagccaccatggccagcctataatttctttctttcttttttttttttttgaaac

SEQ ID NO: 365 - DNA, 1035 bp, Homo sapiens
gatctcacctgagcccagggaggttgaggctgtagtgagccgtgattgtgccactgcattccagcctgggcgacaagagtgagaccctgtctaaaaacagtaaataaaaataggacaggctcagtggttcatgcctgtaatcccagcactttgggaggccgaggcaggcggatcatgaggtcaggagatggagaccatcctggctaacatggtgaaaccccgtctctactaaaaatacaaaaaattagccgggcgtggtggtgggcacctgtagtcccagctactcgggaggctgaggcaggataatggtgtgaacccggaaggcagaggttgcagtgagctgagatcaagccattgcactccagcctgggctacagagggagattctgtctcaaaaaataaataaataaaataataataataataataaagtaaaactcatagaagcagagaataaaatggtggttaccaggagctgggtgggagtggagattgggaaggtgttggtcaaaggatataaaatttctgttagacagaaggaataagcacaagaaatctgttgtacaacatagtgaccttagtaaaaatatattctttttttttttttttttttttttgagacagagtttcactctttttggccagggtggagtgcaatggcatgatcttggctcactgcaacctctgcctcccaggttcaagcgattctcctgcctcagcctcccaagtagctggaattacaggcatgcaccaccatgcccagctaattttttgtatttttagtagagacggagtttctccatgttggtcaggctgatctcaaactcccaacctcaggtgatctgcctgcctaagcctcccaaagtgctgggattagaggtgtgagccaccacgcccggccactaaaaatatattctgtacctgcaaattgctgagagtagattttaagtgttctcaccacaaagaaacgtaattattttaggtaatggatatgttcattagtttgatttagccattccacagtcttcacataca

SEQ ID NO: 366 - DNA, 1036 bp, Homo sapiens
attgttcttagtaaatgacatttctgttttatcctcacctccattaaagctttgagagtaaattggttttttttcatattcagtatgctactctctagaataatgggtctcaaactttttgcttctataagaattcagttatatatttaatgatagagtgccaattaccttttgtttatgtgacatatctattgatgtttgctgtattacaaattaaacctgagaaactttaaaaatattaatttgtttaaaaacaacattgataaacccattatatattacacaaataacatttttaattaaaaaaatcaagaaccatttgacaagataaaatgagaaatttaaatttctctatcttagccaggagtggtggctcacgcctataatcctagcactttgggaagctgaggcaggcagatcacttgaggctaggagttcgagaccagcctggccaacatgacaaaaccccgtctctactaaaaatacaaaaatttagctgggcatggtggcacacacctgtaatcccagctactctggaggctgaagcatgagaaacgcttgaacccaggaagcagaggttgcagtgagctgagatcgcgccactgcgctccatcctgggcaacagagcaagactctgtctcaaaaaaagaaaaataagtaaataaactctgtcttaatcactcagtaacttatgtatacttctctttggttggaaatgtagttctgctcatatttcagaaacaatgtgtgctttgtagtgcttcattagtacttggccaatggaagataacatgaaagtgactgggcgcagtggctcatgcctgtaatcccagcactttgggaggctgagatgggcagatcacttgaggtcaggagtttgagaccagcctggctgacatggtgaaaccccatctactaaaaatacaaaaattagctgggcatggtagtgggtgcctgtaatctcagctactcaggaggttgaggcaggagaaacacttgaggcctggaaggcggaggttgcagtaagccgggatca

SEQ ID NO: 367 - DNA, 1482 bp, Homo sapiens
gcatactaccaatagtagttggtactatgaaaaacagataacacatgctgatgaaacgtggaattgggaggccaggcatggtggctcacgcctgtaatcccagtactttgggaggctgaggcgggtggatcacgaggtcaggagatcaagaccatctggctaacacagtgaaaccccatctctactaaaaatacaaaaaaaacccaattagccaggcgtggtggtgggcgcctgtagtcccagctactctggaggctgaggcaggagaatggcgtgaacccgggaggcggagcttgcagtgagccgagattgcaccactgcactccaacctgggcgacagagcgagactccgtctcaaaaaaaaaaagaaacgtggaattggttctttgagatactctgttattactggaagactttttttttttttttaatagagacaagatctgcccccactggtctcaaactcctgggctcaagcaatcctcccaccttggcctcccaaagtgctgggattacagtaatgaacctggactgcacctggccgtggaagaattctgagtgggctttaaaaatccttttaagttcagcatgtccagtagaactttctgcaaagatggaaatgttctgtatctgccactctcccatgtgtagtcatatgtagctagctactgagcacctaaaatgtggctagtaaaagtgagagactgaattgtaaattgtatctcattttaataatacaaatgtaaataatcatgtgtggctagtggccacagtattggacagtacacatagacatttgagaactgagcagcaagtttgataaccaatacttctctaccaatgattaaaataatgtaattcttatttacttttagtatgcttggaaatgttgctttttgttttgctgccattagaaccaataacagtataatatttggccggacgcagtggctcacacctgtaatcccagcacttcgggaggcagcgggatgtggatcacttgaggtcaggagtttgagatcagcctggccaacatggtgaaaccccgtctctactaaaaatacaaaaattagccaggcatggtggtgcgcacctgtaatcccagctacttgggggcctgaggcaggagaatcacttgaactcgggaggcggacgttgcagtaagctgaaattgcaccactgcattccagcctgggcaacagagcgagaccctgtctcaaaataaaaaataaaaaataaaaaggctatagtattaggaagaagacagaggaagttaatttaggaatgtgttgtttactgcgggtcttcacttatacatcatcttcccactgaggcccttccgctcacccagtttataatttagcacccttcctttcagcccaccttattttcctttcctcccttttttactctgtggtacttgtcaccatctaatgtaatgggaagagggcagggattattttcccctgttgtattcactgc

SEQ ID NO: 368 - DNA, 1034 bp, Homo sapiens
cccaccactaagcctggctaatttttgtatttttgtagagacggggtttcgccatgttggccaggttgctttcaaactcctgacctcaagtgatccgcctgccttggcttcccaaagtgctgggattacaagtgtgagccactgtgcctggcaaattttttttttaattgaaaataattgtacctgttcatgggctacataatggatatttccatatgtatgatgtgattagattagggtaattagcatattcatcatctccaacatgtatttatttatattgggaaggttgaaatcctcctcagctatttgaaactacatattattaactatagtcattctgcagtggcatagaacactagaactttttcctcttatctagctgtaattttgtattctttaacaaatctttccctacccatcccttcccattatctctcccagcctctagtagcctctgttgtactttttactcctatgagatcaacttttttttagcttctatgtatgagtgagaacatgtggtgttaaacttcctgttcctagcttatttaacttaaaataatgtccttagttccatccatgttgctgagaatgacaggatttcattgtctttctttctctctctctcttctttctttctttcgttctttcgtctcaactctgtcaccgaggctggagtgcagtggcgcgatctcggctcactgcaacctccacctcccaggttcaagcaattctcctgcctcagcctcccgagtagctgggactacgggtgcacactgtcatacccagctaattctttttttttttcttgagacagaatcccactctgtcacccaggctggagtacagtgacacaatcatagctcactgcagcttcagcctcctagattcaagcgatcctcccccctcagcctcctaagtagctgggactacaggcacatgccaccacacctggctagttttttttattttttgacgaaacgaggtctcactctctttccctggctggtctcaaactcctggacctggac

SEQ ID NO: 369 - DNA, 1026 bp, Homo sapiens
ttttttttttgagacagagttttgctttcacccaggctggagtgcagtgatgtgatcttggctcactgcaacctccgcctcccaagttcaagattctcctgcctcagcctcccgagtagctgggattataggcgtgtaccaccacacccagctaatttttgtatttttagtagagacgaggtttcaccatgttggctaggctggtctcaaactcctgatctcaggtggtctgcctgcctcggcttcccaaagtgctgggattacaggcatgagtcaccatgcctggcccctaattcatttttcttcaacaaagaagcagcctatagccagaaaatgtctgcctctgtctcttttaacctccatgaggtttccagataataatctggtattgggtttaacacacctgactgaccttaggaccctaggctgacctggagagattttttaaaacagattctgaaagtcctacctcctggagattctgtattttgaaaaggcaattgggctgattccaagtatttggacagatttcggagtcttggaaataatgtactgtttgtcctggagagtaggaaaaagaggggaaggaaggagggagaatatgaggatatgaatatgtatgtgtgaatttgagataactgagtcagggccaggtgtggctctaccccaacacaggaggtaagaggaaagaaggacatctgcctctaaaagttttgtaaaagtgaaaatcaagcacatttgcatgagaagcaaagaaaatgttgctctgttttttgtattcagtggctttattttttttatacatattttgcttatgtatcaactattttttttttgagacaaggtccctgtattaagccattcttgcattgctataaagagatccctgggactggataatttataaagaaaagagctttatttgactcgtggttctgtaggctgtacaggaaacataatgcttgcaactgccctgcttctggggaggtctcaggaaacttacaatcatgaatcatgacagaaaac

SEQ ID NO: 370 - DNA, 1031 bp, Homo sapiens
aatatggagaaaagtcttaggttaagaaaaaataggccaggtgcggtggctcacgcctgtaatcccagcactttgggaggccgaggtgggtggatcacaaggtcaggagattgagaccatcctggcaacatggtgaaaccccatctctactaaaaatacaaaaaattagccaggcgtggtggcacgtgcctgtagtcccagctacttgggaggctgaggcaagagaattgcttgaacccaggaggcggaggttgcagtgagccaagattgtgccaatgcaccccagcctaggcgacagagagagactccgtctcaaaaaaacaaaaacaaacaaacaaaaaaagtcatgaaactgaggcagatggccataaatgtaaacatcactaagattagatttaagttttgggggttttaacctattttttaatctaatatttaatctgtttttctaaaacaatgattccaaaacactatacatatttgtgtgtgtgtgtgtgtgtgtgtgtgtgtgtgtgtgtgtaattggactggatatgtgaaaaccataacagattccacctgcatggaattatctgtggcacttgctgaaaaattagaataatgcctcagctcacaaggggcaaggcaaacttttcaaatgaaaatttttaaatctacttaaaactacctatgccttccataagcattaatgagtctagtagataaaaggatgattctgtagatgccagtggaatttgggattcagtgtctggcatagttatcttcacagggaactgcagaagctattacttaaattgttctgataaaatcatgttttatcttgggagaattaagaatgctattcttatgttaaaataagtgatggtagagaaagcagggaatataatcagtaaaatttgtatgggtttagtaaattttttgcatttacccaaagttctatttaagtctactttctttatataaatgcacaatttcttagaagaattttcaagaaagggagaggaaagctaatgagtgcttcaaagctaata

SEQ ID NO: 371 - DNA, 2936 bp, Homo sapiens
ggcacgtgccaccacgcccggccaatttttgtattcttagtggagacggggtttcgctatgttggtcaggctggttttgaactcctgatttccggtgatccaccaccctcggccttccaaagtgctgggattacaggcgtgagccaccgcgcctggccggaaatcatgtaatttaaaactatatatgggtgtcttaggcggcatcggtcccaactctaaagtacgcgttagacgggcctgggccagaagtgggccatggagacctcgggacccgcagggctgccgcccgacccagcgagcctctgaaggtgcaccgccacccccactgtttatcttactgcctcatagtaggcacattgtcgttctcaatataattgcacacagttttattctggatcctcatttgcctttaagaattttctcaatttttctttttatttgatcgcaccactgcaacctccgcctgctgggctcaagcaattctcctgccgcagcctcccgagtagctgggactacaggcgtgtaccaccgcgcctggcttatttttgtatttttagtagagacgggatttcaccatgttggccaggctggtctccaacgcctgaccttgtggtccgccacgccaggccgaagattttcataatttggaagcattgcgtttcgtaattatgctttctcgtatttttgtgatttgggtcatttttatttttatatttttaggattacaggcgtgagccatcgtgcctggccgatttgggggtaattaacaagtccacgtgtttcatttgaatttaggatagctgggcctaattgttgtctttgcttctgcggtaccttccacatagtactaaccgcctattgtaaagtaattagaatagctgaatatgcatgttaccagtctagaaaccgatttttttttaacaccccactgtggacagggtggaaactcgtttgctttcttgtttaagatctgtagtaacatgaatggatgaaattgtttcctattggattctgtaaatttatgcgttacactgattgtccaacgtggatacacccgggaggtcactctccccgggctctgtccaagtggcgtaggggagcatagggctctgccccatgatgtacaagtccctttccacaacgttggaaataaagctgggcctcgtgtctgcgcctgcatattcctacagcttcccagagtcctgtcgacaattactggggagacaaaccatgcaggaaacagccttctagagcactgaatctggattgaagtctttttttttttttttttttttggagatggagtcgctctgttgcccaggctggagtgcagtggcgcactccattgcctctgcctcccgggttcaagtgattatgctaagtgattctcctgccttggcctcctgagtagctgggattacaggcccccgccaccacgccaggctaatttttgtatttttagtaaagacagggtttcaccatgttggtcaggctggtctcaaactcctgaccttgtgatccgccagcctctggcctcccaaaatgttgggattacaggcgtgagccaccacacctggctggattgaagtcttaatacatgtttaagaaaaattggctaaaaagtagccaggcatgatgataggtagctggaggaaggagaatcgctggagcccaggagtgacctatactcaaacctatactccagtgccactgtactccaaccccaggcgatagcatgaggcccctcgttgaaaaagtttagggttttgctgtactaatagattaatatcttgttttgcaggatttgttaaggattccaagtaactcttatttggtgagtaaatctgctaattgttttttgcttatcagctctttgtcaatgatttctgtaatggaaataggattgaagagacttttattctagttggtcaggatttacctctgaggcatttaatcattctcagagcaatagccaaatatcgactttgctgcatttttgtaggcatgttgacataacttcaacatatgctctgttctgtaaaaattgctttttttagtcagctcattaaaagtgcaaagtagtaaaagctgccctagtgaactgtaggaagcctaattggctttatctacatgtgtagcctgagctgagaaagatactagcccttgaaaatactgtgggtgattagcaatattggatttgtcggttactccaattcctcactaatgagcattccaacgtggataccctgggaggtcactctccccaggctctgtccaagtggcataggggagcttagggctctgccccatgatgtacagtccctttccacaacgttgaagatgaagctgggcctcgtgtctgcgcctgcatattcctacagcttcccagagtcctgtggacaatgactggggagacaaaccatgcaggaaacatatctagtatactagattttaagttgaagtaggatcttcaggagtctaatcattatttcttttcttttaggagagaagacgatctgcacttcgcattttggcattgacatttaattttagggtcctttatatagaagggagagtaggtaaactgatttttttttttaacagggagggtttgacaatctttggcagacttggagcaaaagattgaggtgcatttcatgcctccttttgagagtcttgctctgtcgcccaggctgtagtgcagtggcgcaatcttggctgcaacctcagcctcccaagtagctgggattacaaacataagccaccacgcccagccctcatacctcttttaaaagtcgacctgttttgcagaaagtctgctgtttttgtactaaaggctttggaatttggcatttagctaggaatgcacattctttcacctcattcatactttaagaaccacagaagtgactctgcttggccagaaggcacactgt

SEQ ID NO: 372 - DNA, 1022 bp, Homo sapiens
gtctccatctcctgacctcgtgatccgcccacctcggcctcccaaagtgctgggtttacaggcgtcagccaccatgcccagcttttttttttttgagatctaatctcactctgtctccaggagggagtgcaatggagccatcttggcttgctgcaacctccacctcccgggttccagcaattctcccacctcagcctcccaagtagctgggattacaggcgcacgccaccatgcccggctaattttttttgcattttttagtagagacgggtttcaccatgttagccaggctggtctcgaactcctgacctcaagtgatccacctgcctcagcatcccaaagtgttgggattacaggcgtaagccactgcgcctagcctcaagcctgatccttttttttttttttttttttgagatggagtctttgcctcccaggctggagtgcagtggcgtgatctcagctcactgctacctctgcttcctgggttcaagcgattctcctgcctcaacctcccaagtagctgggattacaagcgcctgcaccgcacccggctaatttttgtgttttttttttcagtagagacagggtttcgccatgttggccaggctggtctcaaaactcctgacctcaggtgatccaccacgcccggcagagccttgatctcttaaccactatcctcacctcccctttccctaaggatccacaatggcctcactggctcttgaaggcaggctggcaccttgatcattcttcctggtcattagtattctgatctggttattttccattttatgtccatctaacctacttggaggatcctcaagagactgcatatgtaaactcagtacttattcttgtactgtgcctgccatatagcaagcactggctgatttaatttttctgtgttcttttttattgatttgtttttatctttattattttctttgcttattttggggttagtttgctcatctattcctagtttcttaagctagtagctgagctcattgattggagacctt

SEQ ID NO: 373 - DNA, 1050 bp, Homo sapiens
aaaccccgtctctactaaaaatacaaaaattagctgggcatggtggcaggcgcctgtaatcccagctactcaggaggctgaagcaggagaattgcttgaacccaggaggaagaggttgcagtgagctgaaatcgtgccattgcactctagcctgggcgggtcaggagttcgagatcagcctggccaacatggagaaaccccatctctactaaaagtacaaaaattaaggctgggcgcggaggctcacgcctgtaagcccagcactttgggaggatgaggtgggtggctcatgagatcaggaattcaagaccagcctggccaagatggtgaaaccctgtctctactaaaaatacaaaaattagctgggtgtggtggcaggcacctgtaatcccagctacctgggaggctgaggcaggagaattgcttgaacctggctgcagtgagccgagatcgcaccactgcactccagcctgggcaacagagtgagaccccatctcaaaaaaaaaaaaaaaaagagttgaggtctccttccaccacttgtgtgaagaccccagaaaacttgctttacctctttaaacttcagttttcttatcttccaactgccatgaggtttttgtgaggaacaaatgagctgacatggatgtttctgtagttaacaaaataaagggtcttacaaaataggcaataataataataatcacttattattattacatgaagctacatgaatgtgtaagatcttggaggaagacagcagagagagagagagagatcagagatcccagggttaaaagttggagaaatttcacagtacatcatccaaaagaggagtccatgatggaggcagaggtaaacttggagaggtaagaaaccctgaagacaggggagtgctttgtggcaggctctgcatataagaattcagcctggccaacatggcgaaacccagtctctactaaaaatacgaaaattagccaggctttgtggcaggcacctgtaatcccagctatttgggaggctgaggcaggagaatcgcttgaacctgggaggcag

SEQ ID NO: 374 - DNA, 1070 bp, Homo sapiens
atagaacggggatcccaggtgagaaactcctagtgtgaaatataccacctgtgtgcctggcataacagcagctcaccaaatgtatattgttgacacatgagccctctcctcccttccctcctggggaccttacacacagagatttttcagccttagtctggcaggcaagttcttcctcctggtgtgggggacggagggcacagctgcagtggcctgggagggctctgtctccttttacagaaatcgaggctgtggtgaggtcactggaggtcagggcaggagcaccaggctccgggcagactgtctagactggcgtgcctacccactttcttcaataaataaggaaggtgaggtgggggtagggcagctccagctctggtggagcatggtcatgagactgggatttcattccacctctctgtgacctgggtcacctttccctgagcctcatcttccccttagctgtaaaactgggatgagtctgctcacctcaaagggcagctgtgggcattcaggagtgcctgatggtggaagctgactctgtagccgacttatctgtgactgtctcactcttctcccagagactgtatgctccttgaagatggaagctgtgttgtgtggggcggggtggggaagcatgatgccaaaagccaactccttattcccagcccagacactcactgcctggttaagaaaacagccagagaggccgggctcggtggctcacgactgtaaccccagcaatttgggaggccaaggtgggcagatcacctgaggtcaggagttcaagaccagcctggccgacatggtgaaaccccgtctttactaaaaataccaagcagttagccaggcgtggtggcttgcgcctgtagtcccagcactagggaggctgaggcgggagaatcgcttgaacctgggaggcggaggttgcagtgagctgagatcgtgagtctgaactccagcttgggcaacagagtgaggctccatctcaaaaagaagaaaagaaaagcaaataaaggaaaacacacccagagcagtgagagaagtctgtatacaagacccatttgtgc

SEQ ID NO: 375 - DNA, 1029 bp, Homo sapiens
cctcagcctcccgagtagctaggactacaagcgcccgccaccacgcctgtctaattttttgtatttttagtagagacggggtttcaccgtggtctcgatctcctgacctcatgatccgcccgcctcggcctcccaaagtgctgggattacaggcgtgagccaccgcgcccggccagaagaaatttctaataacactcaaggacgccagctctggagtctgactaacttggttcagatcttggccttctcttccaatcttgagtgagatacttcacctttctgagcctcagttttcttctctgtagagtgggatcattgtggccagcttgtagtgaaacgctccagaatattagccaaacacaactaaggagatgttgactgggtttgttccatccatgataacagattttttggttaatgccccatgacaccaacacttcatatagcccttatgtgtctgactccattccgggctgtgctcatggcagcccagccatcagcaccaactgtgctgacataattgtttcctgctttttctcctgacttcttattgtgagtacttttcatgctaatacagtctccctcccaggcacagcagactgctacagattattctgatgaactgatgagatgtttgccttggcatacagctgtctatctaaaacaagggtgcctctttttttggtggagggacagagtttcactcttgttgcccaggctggagtgcaatggtgcaaactcggcttaccacaacctccacttcctgggttcaagcgattctcctgcctcagcctcccgagtagctgggattacagcacgcgtcaccacgcctggctaattttgtatttttagtagagatggggttcctccacgttggtcaggctggtctcgaactcctgacctcaggtgatccacccgccttggcctcccaatctgctgggattacaggcgtgagccaccgtgcccggccacaaagatgcctcttatatcccacatccctaccccatctaactttgcctgcctgacatc

SEQ ID NO: 376 - DNA, 1048 bp, Homo sapiens
gaatatcaggcagatggtaagttccacgtaaatgatacccgtaatgactgtgggaatctgagcaaggcacttgtattctcttgatctcagtttccttttctataaaatagggataagagtccctacttagcctctcaagggcttttataatggaggagaattaaactcggggcagagagaagccatgtgtgtctgtctgtcactgaccgtggctttccctttgcctgcagaacgactcctggtccccaagtgtgtgatgctgaaatccaggggaagccggggccacgtgagattccaggatgccttttgtggtgcctatttcacctttgccatctcccatgagggccacgtgtacggcttcggcctctccaactaccatcagcttggtgagccccgagcccagcttcaggcatgacccagtggcctgcgttcctgtcctggctctgccactcattcattgtgcatcctttgcggggtcgtctaacccctccaagccagttttgtcatctgtaaagtgagaatgtccatatcctgatgggaggtggcctcactgtgggaggagattgagaagggcagctctcagaacaccttcacccctgatggctccggcctttcccccaggaactccgggcacagaatcttgcttcataccccagaacctaacatccttcaagaattccaccaagtcctgggtgggcttctctggtggccagcaccatacagtctgcatggattcggaaggtagggcctttacgtccttctctagtttgggggtggagtgttccctggcctaggcctagccagattcctgagaccatggtccttggagcctgggtctgttccatgggttgtaccatacatgggtccatgagagtcactctcatcctcctagagtcctggtgttcttccaagtgtgagttcaatgggggcccatgtagattctcctaggcctcctccaaaactgggaagagacactgcagatctccttctgatcgctctgggagcagggacacactcccatggacaggtggactcacctagcctgcca

SEQ ID NO: 377 - DNA, 1016 bp, Homo sapiens
gccctgagcactgtgtcagttcctgccttttctcatcagcagaacagaatccttttcctcttttccttcctcctctttggaattttcctgggacctacagaataaagggggggatggacagggggttttcaaaaggaacatggctcactcagagctatatggttagacgtttctccccttttccctaccttccatggtcctggttggccctggctttgcctactagaaaaccaaaacttcccccctggggttttgtgcccactctctgagaagttggggctccatcaagccccattctagtcatgtgcccctttcctgtccctaacagtccacaggcaaacaaatggtacagtcataagagccatctgtcacggacccacgcccagaggaacgtgcagaaaaaagcagagctacatggctgtgggcaactataagccaaatatttggctcagaacaggtgtccatgggacaaaaaagaacgatcctccacttgaccaagaaaaaagtgattctcccagaagcacaaagcatactcttgcccctcaggtgttgcttgtgtacatcgtacccatccattcggcttcacctgcagccaacggcctggaatcgcaaagagacaccactctgggcagagcagagcagggtatggggtggggagagagggtggagggttttataaacaaacttaacagcaatattgaaaggaggtgggggattgagggagggacagagtgttggagggccagagactagtcctgagatggaaacagcaacttgtacagtggctgagaaaataggatatagttttgatttttttaattgtaaaatattttggagggagaacaaaatcttttaacattttgaataaatttagagttttataaaataggccacttgttttctacacattccctgctttttaagggagcacatattatgtgccaggcactgctgggaaagacagaataaactataaacctggtgttgaggctacaacttaagtgatgtcaagatgt

SEQ ID NO: 378 - DNA, 1035 bp, Homo sapiens
gcgaaaagtacttgtatgtccgctactccagccccaaaaaaatcctttggaattatatttattggagttttcccactcagcaatataatatagcagggtgaaagtacctcttttttttttttttttttttgagacagtgtcttactctgttacccaggctggagtgcagtggcatgatcaccactcactgcagccttgacttcctcaggttcaggtgatcctcccacctcagcctcccaagtagctgggaccataggcatgtgtcactacacttggctaatttttgtatttgtttgtagctacagggttttgccacgatgtacaggctggtgtcgaactcctggactcaagtgatctgcctgcctcagcctcccaaaatgttgggattacaggcgtgagccactacacctacaaaagtacttcgttattggtcaggtgcggtggtcacacctgtgtagggaccagccctacagggcctgtgggttttactccacgtgtgtggagaccagagattgtagaaataaagacacaagacaaagagatagaagaaaagatagctgggctgggcgcggtggctcacgcctgtaatcccagcactttggcaagccaaggtgggcggatcacaaggtcaggagatcatagccatcctggctaacacggtgaaaccccgactctactaaaagtacaaaaagaaattagtcggccgggcgcggtggctcacgcctgtaatcccagcactttgggaggccgaggcgggtggatcacgaggtcaggagatcgagaccatcctggctaacaaggtgaaaccccgtctctactaaaaatacaaaaaattagccgggcgcggtggcgggcgcctgtagtcccagctactcgggaggctgaggcaggagaatggcgtgaacccgggaagcggagtttgcagtgagccgagattgcgccactgcagtccgcagtccggcctgggcgacagagcgagactccgtctcaaaaaaaaaaaaaaaaagaaattagtcgggcgtggtggcgggtgcc

SEQ ID NO: 379 - DNA, 1075 bp, Homo sapiens
ttcagtgatccacctgccttggcctcccaaactgttgggattatatgcgtgagccatcacgcctggcctcatcttgagccattttatctttaaccattttctttctctatttgctttttttccaggatcccagctggctactgctttgtagaatttgcagatttggccacagctgagaagtgtttgcataaaattaatgggaaaccccttccaggagccacacctgtaaggacatttagataatgatgatgttgccattattattgtcattgcttactaccatctattgaatccctactgtatacttattttatttaatcctaaaacaaccctttacagtaggcattgttatctttgtaggcccaggaaactgaagctcagggaattgaaataacttgtccaaggcaacacaggtagtaaatggcagagccaggattcagactgaagattggttgcctcccaaatccatgcctttccattctgcattgctgcctcccataaccgaagacttgaaactctagacctcttgcctgattgggaaactagaataggctggcagcagcaaggacacatttcaagagagttgcattctgctcttcccacagttacttagcttacagctgcaccagctggcacacctgggctcatagaaccatggagctggcagtgcccttagcggtcatccgtgcaaccccctcattttatacaggagaaaaagctgaggcttagagagggggagatgttttggccaaggtaatttatttcagttttcttcaaatattgttcaactcttgaaacacctttctctgttttagtttgtttgtttttcaacttccaggcgaaacgttttaaactgaactatgccacttacgggaaacaaccagataacaggtaggtacaaagtcatgtctagacagacataagatgtgtcactgtgcctgtcactgccatataggaggaggggagccggtttggctgcacttggttccctcctgaaggacgacgctcttctcccttccttgctggtggaccttcctggtgtgcttcatgcaagaccctggcttttctgtatttg

SEQ ID NO: 380 - DNA, 1050 bp, Homo sapiens
agtgatactccatttcaacaaaaagaaaaaaaaaataacaaaggtttgtgtgttcgtttatttttttaatagaattgacctcctataataggagttggtaaactttggcctgatttgtatcacccacaagctcgcagtggtttaagaggttgggtatggtagctcacacctgtaatcccagcactttgggaggctgaggcaggtggatcatttgaggtcaggaatttgagaccagcgtggccaacttggcgaaaccccgtctctgctaaaaatacaaaagattagctgggcgtggtggtgcgcacctgttatcccagctggtcggcaggctaaggtgtgagaatcacttgaacctgggagacagaagttgaagtgaccccagatcacaccactgcactccagcctgggcaacgagcaaaactccatctcagaaaaaaagattggggatttaattttcgctaggctttacgtccttagaagataagatctagttcttttttttctgtcttttaacatttatgtttaaaatatacaaggaatgcagaatgcattattatgctgtttttatgcagttttatcttttgagtgccttagatgcacttctgaccccatccacacatctgcactcatgtaatacttgaagtcagacaagttctgtggagtgggtgagggatttggggcagggactatttccctaactcttctgccaggactgctctgatgaaacaaagtaggggctggttaagtagacccatcaaatgttttccttaaggggcctgggagaggtttacctggaatatgcaaaagagcttttcagagcagaggttttggtctttgcctctgaatcttcttgttctctctcctcagccctgagtattccctctttgtgggggacctgaccccggacgtggatgatggcatgctgtatgaattcttcgtcaaagtctacccctcctgtcggggaggcaaggtggttttggaccagacaggcgtgtctaagtaaggccttacttgttactgatgcttaactgtgttagtttcagcctttct

SEQ ID NO: 381 - DNA, 1050 bp, Homo sapiens
tgctctcagctagagggaagacaagataaattctgctctggaagaacttacattctggttagagagccagacaaatatgtaattatggtaagatgtgtcgggtgttacccagaggtgtaagtgtagatcccagagagcctgggacaggcagctccaggagagcccatcacccccttgacatgtggcattctatcctggtatgtgggcctctaacgataatactgttaccctttttttgtgtgtgtgtgtggtggagtttcactcttgttggccaggctggagtgcaatggcatgatctcagttcaccgcaacctccacctgccaggttcaagcaattctcctgcctcagcctcccgagtagctgggattacgggcatgcaccaccatgcccagctaattattttgtatttttagtagagacagggtttctccatgttggcttggccggtctcaaactctcagccttaggtgatccgcccgcctcagcctcccaaagtgctgggattacaggcatgagccactgtgcctggccgataatactgttaccttttatttgtttgactgtttgtaaaattcattttttatttattttattttttttctgtttttcaatatattttaaaagacatattttcctgatttttaagtcatcgttaggatggaaaatttggaaaatatagtaaagtatgggccaggcatggtggctcacgcctctaatcccagcactttgggaggccgaggcaggtggattgtgaggtcaggaaatcgagaccatcctggctaacacggtgaaaccccgtctctactaaaaaatagaaaaaattagccgggtgtggtgatgggcgcctgtagtcccagctactcgggaggctgaggcaggagaatggcgtgaacccgggaggcagagcttgcagtgagccgagatcgcaccaatgggctccagcctgggagacagagcgagactccgtctcaaaaaaaaagaaaaagaaaatatagtaaagtataatgaaactgaaaatcaccccatatcctattacaacatagtaatag

SEQ ID NO: 382 - DNA, 1131 bp, Homo sapiens
cctgcctgggctgctccaaggtggtggctaggggtggcacaagttacacattttcaatttggataggttgtgattcttgtcttccccagtcagatacctacagccgctgagagccggtattccaacgccatgagacgccttctgtcgtgagcagttgacaagaaagacccagcacttactgcaaccggaaggagcggttcctccctcgctcgcgcagccgctcttccccgccactccctcggtgcccgccagcacattcccagcaagccctgagtatatttgcatatcaactcactacatttttttcttctaactaaaaaatcgaaaggacaaattccagattctccttgtgaagtcttcctttcagttcagaagaaatggaattcgctcttcaacttcaggaagttgaaataaagagttgcttggattttgtgttcacctttaccaaaaaatggatttggtaacactgccaccctgctttggtgacagagaaagcaaaaagggcttctgtcgtgagtggcacacgtagggcaactcgattgctctgcgtgcggaatcgacatcaagagatttcggaagcataattttttggtatttgggcagctggtgatcgttggtcccggcgccctttctttactgttatatgttaggcgaaatattacgcgtttggagtaagtggtgctttttgtaactgaaaagagattctgtgtgtgtttttttttttttttagaggctgcatagttatttgtatgaaccgcaggtgacctaattagcaaggtaattcagacctgtatcctagcacttaagaagtggaagtgggataaccctgcgtgttctcgtgtgggaggctagcttaagcaacaaagcaggaaggccccaccaacaaaagaatttaaaaattatacgtgcgtggtggcgcgcgtatgaggaaattatttggcaactgtgttacagtatagcagcaaatggaatagacctagtccctgactttaggagacctgcctcagccccccgaatggctgggactacaggcgtgcgcctccgcgcccagctaatttttgcatttttggtagagacgggttcaccatgttggccaggatggtctccatctcttcatctggtgatccgccc

SEQ ID NO: 383 - DNA, 1081 bp, Homo sapiens
ttggagaccagcctagccaacatggtgaaaccccgtcgctcctaaaaatacaaaaattagccaggcctggtgtcaggcgcttgtaatcccagctacttgggaggctgaggcaggagaattgcttgcaccgggaggcggtgttgctgtgagccgagatcgtgctactgcactccagcctgggcaacagagtgagactctgtctcaaaaaaaaaaaaaaaaaaatagccgggcatggtggctcccagcactttgggaggctgaggtgggcagatcatgaggtcagaaggtcaggaccaacctggacaatatggtgaaaccctgtctctactaaaaatacaaaaaatttagccgggcatggtggtgcatgcctgtaatcccagctactcgggaggctgaggcaggagaatcgcttgcatccaggaggcagaggttgcagtgagccgagatagcgtcattgcactccagcctggacaagagcgaaactccgtctcagaaaaaaaaaaaaaagaaagaaagaaaacccttgtacatcaaaggacactatcaacagagtggaaagacaatccacagaatcagagaacatatttgtaaataatatatctgataagggattaatatccataatacataaggaactcataactcaacaacaacaacacaaacccagcccagttcaataatgggcaaaaggacctgtatagacatttctccaaagatggccaataagcacatgaaaagatgctcagcatcactaatcattaggaaaatgcaagtcaaaaccataatgagatggcacttcacacccattaggatagctattattaaaaaatatatatcgggagtctctctgagtctactctggcccaagaggctgccagacaataattcaaaataacaataataataataataataaagaccattgctatggctcacacctgtaatcccagcactatgggaagccaaggtgagaggatcccttgatgccaggagttcaagacctaaagatatctctacaaataatttataaaattagctaggtgtgggccagtcatggtggctcatgcctataatcccagca

SEQ ID NO: 384 - DNA, 1057 bp, Homo sapiens
gccaaggtggatggatcacctgaggtcgggagttcgaggccagcctgaccaacatggagaaaccccgtctctactaaaaatacaaaattagcctggtgtgctagtgcatgcctgtaatcccagctactcggaggctgagacaggagaagcacttgaacctgggaggtggaggttgcagtgagctgatatcacgccattgcactccagcctgggcaacaagaacgaaactctgttctcagaaaaaaaataaaaataaaaaaataaaaaaagaaaagacatagccaccaccctcagagagcttatagccccatctatccaactgttttgttttgttttcttaagtataggactagagagagtatatcttaattaatatttcatttctttactatttaacttttatgatattaaatatctcgtttttaaattaaattaaaattaaataatatgtaatgttaaatatgtttaatgtttaatatttttattggaggaaaatgactattctttgtagtgagaactatgacaaattgagagaatgacaaattgaggcaatcatcccaagcacctatgctgctgaaggggcgacataattgggtgcccactcagggaagcatctagtattccaaagcttattcccttttttcaggaatggcccaataagaaatcattttgagttaaaataattttgaatttaacgttgtagagatttgcctaagtatctaggtagtgtctcttttttaccctctgtcttatccttcttgtgccagaggacactttgatgttctggaaaggaatagctgatgtagggctgatggaagaggttgtctgcaatatacagaaggaaatagaggagctactcaggggagttcagcagcggctcatccaggctcccttccaagtcacaggtaagtgcactaatcctaacagtagcagtgatttattgaatactcacctccgtaggcaggtcctgtaagccttgcaaaaaccctgatgtataggtattattatcttaattttacagataaggaaactaaggctcatataagttaagtcactt

SEQ ID NO: 385 - DNA, 1028 bp, Homo sapiens
tgctggaattacaggcgtgagccactgtgcccggcctgtttttattttatttttttgagacagtctggctctgttgcctgggctagagtgcagtggtgccatctgggctcactgcaacctcggcctcttggattcaagtaattctaccgcctcagcctcctgagtagctgggcctacaagtgtgtgccaccatgcctagctaattttttgtctttttagtagagactgggttttatcatgttggccaggctggtctcgaactgacctcaagtcatccacccctctgtctcccaaagttctgggattacaggcgggagccactgcgcctggccatatttctcattttacatcctccagaaaccactgtgcatttccttttcaggttataactgagtagtgggatctattgatattcccagatagtttgccaagaggctagcactataaactggtagtgaaccttgctttttggtttatgattgaggaacggctgtacagacatttgggctagaacttgaaatttccatttctttttgttattcttgttttattatcacctggtttgtataggaagttgataaaaggattatctcaacactcaggacttaaacagtttgtgaaatgctaagttttctctttacttagttgtagtgctaaagctaaggcccatattcactgtatcagcttaactttaaatgtttaaacatttcagttattacaccaaaatttcttatgatataaaaaatgcccttgtgtttataggaaatcatctgatgtgctgcacactttttttttttttcctggagatggagtttcactcttgttgcccacaggctggagtgcagtggtgcgatctaagctcactgcaacctccgcctcctgggttcaagtgattctcctgcctcaggcctcccaagtagacagggtttcatcgtgttggccaggttggtctcgagctcctgacctcaggtgatccacccgcctccacctcccaaagtgtagggattacaggtgtgagccaccgcgtc

SEQ ID NO: 386 - DNA, 1035 bp, Homo sapiens
tggaggttgcagtgagcagagattttaccactgcactccagcctgggtgacagagcgagactgtctcaaaaaaaattcaagtttctgtgatataaaagaggaaaacatcctcacttgagctaaatatattaaatccttaggaagtaaataaccatgtgatactgttggctcccatttagtatcttaccaccccaccactgttttattgactcttcagatctagtgagtgggcatcctgttttaaaccaggatgacaaacatgagcattttttgtaaaatcctaaggccatctatgtctatttttgtcttgcagataaatatacttgtttatctgccaaaagggttaaggaaattttatttgtattactcatcaccttccttgctttgtgaatagataaaacgcctctttctgcagcctccttaaaggaggactagaagagaatagataacattgaatttgtatctctgaaccatgccccttgtatctatctttcaacaaacgtttgtgttaattgctgggatggaacagagaaacaaggcaccatctttgccttagaagcagagggttttaggaggacagcaaaatggataaaatatgggataagagctgtaatagaggaatgaatacatttttggcattctggagaagtgattaattacttgggggaaattaagaattcatggaggcaataacattggaaccctgccaaataagtaataatagaatgataagcactcaaatggcagcacagtgcttggcacatagtacacacagaagcttagctatcttatctaacactgtaattctcatatttcagataaaggaagaggctcagaggttatttatccaaagtctcatagctagtaagtgttggagttggtctttaacagaagtctctccagcgatgtgttggagctggctagttggagccagctgtttagctttcaagaatacctttctgtacattaaattacattataattaccatcgtattaggtaatattcaaattccttactcttgaggttatttacag

SEQ ID NO: 387 - DNA, 1258 bp, Homo sapiens
agacaaaaatctcgctttgtcccccaggctggagtgcaatggcgcgatcttggctcgctgcagcctccccctcccaggttcaagcgattctcctgcctcagcctcccgagtagctgggattacaggtgcctgtcaccacgcccagctaatttttgtatttttagtggtgacagggtttcatcatgttggctaggctggtctcaaactcctgacctcaggtgatctgcctgccttggcctcccaaagtgctgggatcacaggtgtgagccactgcgctcggcctaggattttattctttacctgtgttttagtttggttgtaagggagggtagttaattagggaataacagtttggaggatgggaaggatgaaacacttactgagcattgaccttgttaagcaccatgctaggtactttcatagccttactttaatccccataccaacctgggaggcagtatcctgtatttatagatcaacaaatggaagcttaggaaagcaacttatcaaaacatctatgaggctgggtgagttggctcacgcctctaattccagcactttgggaggccaaggttggcaggtcatttgaggccatgagtttgataccagcctggccaacatggcgaaacactgtctctactaaaaatacaaaaaaattagccgggcgtggtgacgggcgcctgtagtcccagctactcaggaggctgaggcaggagaatggtgtgaacactggaggcggagtttgcagtgagctgagatagcgctactgcactccagcctgggcgaaagagcgagactgtgtctcaaaaaaaaaattggccgggcgcggtggctcatgcctgtaatcccagcactttgggaggctgaggtgggtagttcgcaaggtcaggagttcaagaccagcctggcaacatggtgaaaccccatctctactaaaaaattagctgggcgtggtggtgggtgcctgtattcagggggctggggcaggagaatcacttgaaaccagaaggcggcagttgcagtgagccgagattgctccactgcactccagcctgggcaatgagagcaaaacttcgtctcaaacaaacaaaaaaattagccaagagtggtggtgtgtgcctatagtcctatagtcccagctactcagggagctgagggatgagaatcacttgaacctgggaggcagaggttacagtgagccgagatcgcaacactgcattccagcctgggtgacagctcaaaaaaaaaaaaaaaaaaa

SEQ ID NO: 388 - DNA, 1029 bp, Homo sapiens
gaaggactgttcttatagttccttaggagtttatgcagaggagaaaaaaaagctctgttctttgaattagggcaaacgttctcttcctgcttttttacattcatcattgaaatcctgtaagtctgcacaatgagcaaggaaaaagtggcagctcagatcgttgcttctttctcctacacaaagcaggtaacagtttaaatatgcatgctgctgccacctcctggaccaaattctagttccagtgggcccaattagtagtaccctaatgcttttcattccttgcggaataaacaaatagtccctcgttgaactgatttaactccagttagccattgggaaaagatatcaaggaattacgatgtatcaaatgaaacattctagggcagcatatattaaagtactaattgacagtgtgagaccaagtatagaaaaatagcaaaatcagttagagctagagttaccaagaaacttttatggaagacttaatttgaattgggtctaaaaggatgggtaggaaaagacagaaagatgaagaaaatggccaatcccctgtgtgaactgttggatatagagtgggaagggacaggggctggcagttgttctactttccaactcatttgcacttggtattgcaatttctgttggttctcaagagatgttcagtgtgcctactgcttatgtcagaattccgattttgcctatatcacttggtgtactacatgaagccattttaagaagatagacttaaaagctcttcatgtgagttttttttgagtaatgtggatagcatatagaacttaagcgtttgcatgtaaaaatcttgcaatgtgcaaactataaatatttgcaagttttgcatttgtttttattataaaatgtaaccaaattataaaaagcgtagaaaacaaaagaaatcacctgtaattcctgtactacaacaaaactactcatcttggcattttttcttttctttacctatgtaatttatacagttataatcatcttgtatatagtgttcatttcatcctc

SEQ ID NO: 389 - DNA, 1013 bp, Homo sapiens
gctgggattacaggcgtgagccatcgtgcccggccccaattttttatttttagtagagatggggttttgccatgttggccatgctggtcttgaactcctgacctcgtgatccacccacctcggcctcccaaagtgctgggattacaggcgtgggccatcgtgcctggcctcaattttttatttttagtagagatggggttttgccatgttggccatgctggtctcgaactcctgacctcaggtgatcccaccttcctcggcctcctagagtgctaggattactcgggtgatccaccgtgccaggccttaatgtttttttgttttttgttttttgttttttttttaagatgaggtctcgctatgttctctaggctgaagtgcagtgactattcacagctgtgatcatagttcattacagactcaaattcctgggctcagatgatcctcttgcttcagcctcccaagtagctaggactgaacaaggtgtaaggccctctgttcctggtttaaatttatcttcacctgttacccaggctggagtgcagtggtgcaatctcggctcactgcatcctcctgccttcagcctccccagcagctgggactataggtgtgtgccagcatgctggctaatatttgtattttttttgtagagacggggttttgccaccttgcccaggctggtctcgaactctggccttaagtgatccacctgcctcggcctcaaagtactgagattacagacatgagccaccacacccagcctgtaattatataaacattaaagtgttattaagtgttaaatataacttagtgcacctaacttttttgcagaagaaataaattcatttcttcccttccccccagttttatgttttgaaatacatttttaaaaaaagttttgagagacagggcctctgtcacccaggctgccaggctagaatgtagcggtggcatcatagctcactgtaacctctaactcctgggttcaagctgtcctcccacctcagccttcc

SEQ ID NO: 390 - DNA, 1029 bp, Homo sapiens
ttaagtattggaatttcacaaaagacataggacttaactggaaaatgaaaaaaaaaagaaaaagaaaaaactaaacaaaaaatccctctaggtagtttaggtgaaaaatgtcccttttattttggctttggttgtgatttcagagcataatgctatgtttttttgtctttttactatgtttttcggatttttaagtccgtaagtgcatacagttttctctaatttttaaaccctttcctcctcccattttgacatttgcacttggagaacacttgagttgtgaaggttttgggcatccaccccagaaagtgggaatttgattttatccttccgaactggaagaacatttttatgaagaatttttgtctaggagaatataacagtgttacccaaggttgtgtctttaagggtggttcattttctctgaccttttgttactcaaagtaaagtactaggagtcctaagaaatgttctgttcttgtacattatactgattaagtcaggattaatttgatttcaaagctgagaacagtggtaaaaactcgtttacagaaatgcattttggaagagaaaaatactgtaaaacgtgtcgtgaatgtttcttcagtttcttgttcagccaatgaggaaagggcattgcctttctttttaccattaatcacttctcaataaacgtgagatcctgttgagcatcacttctagtaccatttagtattatttgagtctgctgtgttttaaatatttggagtataagggggtataacaggtgagacggcaactaattttacagagtttgtgctaagagtaaacacttcaggcttgctttgtacccagggctggttaaccatgacctctgcaaaagcaaggtgggctgatattcataatgctttatatctggatactttgcagagaatgtagagtcattgctaaatcatttgttcaacagatattaagactattgggtgcctggcactatgcttaactccatggaatctggccagctatcttagatgcagaggaagtagagcc

SEQ ID NO: 391 - DNA, 1023 bp, Homo sapiens
agccttgtaaatagagaccccaaaacgttagaagtcctacctagaatgtttgaagtcctggttcccacaccttggagctttctctaccagtgagaaagtaaatgctcttgtaataaaagttttcggccgggggcaatggctcacgcctgtaatcccaacactttgggaggccaaggcaggtggatcacctgaggccaagagttcgagaccagcctggccgatatggtgaaaccccgtctctactaatgtctactaataatacaaaaattagccgggtgtggtggtgcacgcctgtaatcccagctactcgggaggctgaagcaggagaattgcttgaacccaggaggaggtggaggttgcagtgagccgagatcatgccattgcagtccagcctgggcgacaagagtgaaactccgtctcaaaacatactaaaaaaattaagttttcgtttttcattatggagctaacattgcacttgatgttaccacttatttgacttttatttgaaagttgacttgtggcctgcgtgtcatgaatgttttgaaaatgagagtggaagtaaaggtgtccctaggattcagatctgtaagtccacttgcaatcaattttttctgctttaggaagcaatgccactttgtcatgagcatcgctcatcgctagtggtttctgggcagctggtgcacctccttactactgagaagcctttggaactgtgatgtttaattacagctgccgggtttgcacgtgggaagctgacatggtgtggtgaaagccagcggtcttcagctagtggagggaattacagaaggtcccacgccctttagggcccttggctccgggtttccgggacaggctctggagctccgcctgcgggggccgggcttggcggctggacggcgcgtgcgccgtgcctgcggatggaggagggccaccttctgcccggctgtagccaggttccctccatgcttccccaccccgtcgcagcctggtttttgtacgccttctctctgacggcggttgtgc

SEQ ID NO: 392 - DNA, 1069 bp, Homo sapiens
gagaggcccgggggtaggggtggaaatgctgagagagggcactctgtgattttaggatcctaccataagcagggcctaccaattaaacacactgggtgctgattttttggtcacatgatacaatgcaaaggtctttggggcagactgggctggaatagaatcctttttctgttgcatacaggtgggtgattctttgcatctcagtttcacgtctgcaaaataagaatatgaatacttatgggacacaagtatatttgttcttttattcatgtaagccccacaagggcagggatttttgttcatctgttcaccaggtgctgtatcttcagcgcctagggtatagtagcacgtagtaggtgctcactgaatgtttccaaaggaatgaagatatttattgactgtttatggtatacctatcaatgtgctttgtattggattaaatggctaatggatataaagggcccagcatgataggggctcagtgaatgtgaattccctatttgctcaatagactgtgactttcttggggatcagggctctggtaaagtgagctctgggtcttctgaacttagtaaggggccaagtaccaagcatgtatcaatcagcacagagaggggcctggcaactggacttcctggagagggagtgacagagcctctagttttcatcagaagagagaggcagctgggaagatctggggcagaaatgggagggatggggagggactctgccttctagtactgccacttttccttgtccaggtgtgaccctggacaaggcatgctcttccctgagtcttggagacctcatctgtgatgtacatatcacaacactttccccgcataggtgtgggaaggagttgatgagaagagcccacacagggccccatttggtaacttcccagccctgggctcattctgggattctgggaggggactatgtgttcctctttctggcttttttctcctacttttaactgctcacccagctgggactggaatccaaggagcccctgaacttcccagcagactggccagggccctgggataagggctgggctctgcctggt

SEQ ID NO: 393 - DNA, 1041 bp, Homo sapiens
ggagaggaggggagaggaggggagaggaggggagaggaggggaggggacaggagggaagggaagaaaggaagggaaggaaaggaaggaaagaaagaaggcactcccatcactccctctctcttgccctccttttccttgccttgaaagtgagaataagaaaacctgttttgcttgcctcgaagattcagtgataaaatacaactacagacagtaaacatttattgagagctgatgggctaggttctgggggcacaaaggtgactcactcagtgttcctgctccttaaggacgaactgccatgtgcagagtgagcccaggggagcaggtggttaactcaggggcatcaaggggaaaagagctaggttgggctttgaaggatgagtaagagctctctaggtaggcaatggcaggaacaactttctaggtacagggaatggcatgtacaaaggctcaagactgcatactgtgctcaggatagatgagcactgtcgttggtgtggctggagcacaaagggaaaggctggcagtgacaggagatgaggctggtcagggaagtagggcccacgtcaggcagacctttggggatgtcactggctcccctctccttcctgcaccctcacaactgcctgttctgctcagagagacaaccaggaccttcccatgctgctcctccccttgagttcccaccttctcccctcatcttcaccaccccagccagatcaagtggctgcctctctcaggagtcaataacctggctgccctgccagccctgccactgaaaagccatgtggcctccagtcactcacataccctgtctatctcagtttccacctcagtgaagtgggaacagcaggctttcctcccagagaagggcggaggcttcaatgagataatctccacaaatggcctggcccagtgtctgtatatattgggcacccataaacaggagctaattaagccatcattatttagactcctcaatctccttggccccacccactgcttcccctttacctctcctggcagcccgttctagccaa

SEQ ID NO: 394 - DNA, 1033 bp, Homo sapiens
ttattgtcttaaagtaaataaaatagcaagtgattttgcagtttaatgaattcgtgaatttacatatatttttgcttttatacattttggagaagcgcatattgtgttcctctttttgattgaaacagagaactgatgaattcaccccaattctgggttctttttacctgtgaaaaaaaattttcagtaaggaagcatggagttttttgttgttcgtgttgggtatctgttctaatatcattatatttggacttcctcaaaagccaaaacataagaccgcatttttctacttggctctatggtctttgttcctaaggaagggaattaacacatactgaatgctagctatgtatcagatactactctctgtgtatgctaattaatttaaatatttctgtgttttacatccaatctacaaggagtttttattgctttgatgaaatccctccctcccccttctttcctctcatctctccctttctccttctcctcttaaatgattctctggctgaacaattttctattaatagtatatttgggaggcagtatgatgtaacagccagtaaggatatgggatttggagtcagacctggatttacagtaaggttttgtttttgatagggaaaaactgctttctatctcaataaataaaagccagggtcccacagaactggctttagaaggagattctgcacatggggtggagtaattggagctcacagcaaggacttttgttcctgaagattcactttcccctggggaatcccttgctgacctcagaggtgctgctttcttttaattttctgccccagaggagagtcttctcttaatactcctgcagaacacagctgagaccaggctgtaacatctggtatgttactaaaggctcagagatgaaaaagggaaataagtacagagttactattatgcttctgtaatatctggctcacgagataaaacacacacctctgtaatttgtggtattctattgggatacctcccttacttgacccacaacacatatgttttctag

SEQ ID NO: 395 - DNA, 1050 bp, Homo sapiens
aagaaatatgagtagttagtgaccgaagaactaaagcttttttccaggattttcttgttttacaaagacacgtatagacattttgttagatttttaaatacctcagttgacaatttaaatgttgagagcccaatactgttagtattgtgaatatatttgagttgaatatatttggtatatttagtttgtatatttaattttttgaaaaagttttgtctttatgtatttttttctttaacatttgagcttgaatcaataaagggcagcaacagaaaagcattttggatcaaacatatttgccgtgttcactatattttgatgataaatagatggcaacatttgtctttgagtctgtcttgttctgctcaaaaagcagaaaagataggaagagagaaataagtaagatttactgcactttgcttaatattcttacagcaataacacaccttagctggtggtattttccttttatgaatcataaagtcagactgggagaggtaacttatctaaggtcatgaagctagtaactgagggtgctaagactcaatgtttagctgacttcaaaactgatgtgcagcactgtgattggatttggaactctcttctattgtggttagggtagtggtaaactttcatcctattcagattttcacaagtcataatttattgtcacctaggatgaccaggattcaatctaggctatcacattgcatttagtggttatgtcttccttagtctcctccaatctgtgatagtatctccttgcatttcatagcattgatgcgttcatagagtatcggccaggtgttttacaaaatgccagtcggggtttgtctgatttttttccacgattagatagtagatttttgggaagaatacagaggtgatgtgtcctcagtatgtcatgttgggcaaagcaagacctagtctaaaaaaaccacacacacggttttagatttacagatttattgtgaagatagtacagagtccctatataccccacactgcagtttcctctattattaatatattagtatagtatatttttaa

SEQ ID NO: 396 - DNA, 1858 bp, Homo sapiens
aaatttggaggtaatactttaccatctaaaattgttcttactaataatgatataaactgaattatgctataattgcccttattccagtgaagtctctgttgttacttgtttaattatctggtggtgaaaattacatacagataatatgtgttcctgaagagaaatgcacctctgacataattctcctccttttatttggaggggtgggtgttatatcgataaagacggtgtatattctctttattgatgtccttgtcacataaaggagttcagttaatgtttgttaataataactacttggtatctgtagttgagaggttttaaatagataatttttaaaatgagctatatcaccaaccccaaatagtgttaaatgtaacttttatactgcaaccatagcatcaccctaagggaaaaaaaggagtttcataactctaaaggaaggaaggtattgtggagcagtgaatatattaagtataagtgtttaatattctgttttaaaattttctttaaattaggaaatgggccaaagttaatggattgatgtggattgtgaggctaacgtcagaatactgtatattagccactgaatatttatttctcttgtgtattttggtgggattccttacataggtttggcaacaaaactagaaaataaatttcctttcagtgatacaaaattctgttgggctagctgaattagattgacattagtcaagatttgccagaaacattgtagtagtgctggttaatatagcctggttttgcaaggtggcctcagactgctgttatacttgtgaactagccagagtatcccaactgtgataggaaagtagacattgtatgatgtatgggaaattcatctttgaaaaaagtgagtttatgcctttcagatccatactgtgaatgaatgaatataagagtgaaaacgctgctgacaaagatttggatatttgataacgtatacaattttattcttttactaaatgtttattcctttttactaaaaaaaaaatacttttgtgattgagaagaaccttaacattgtctacttcaacttcttttttttttttgagatgaattctcgctctttcgcccagcctggagtgcaatggcgcaatttcggctcactgcaaccttcaccttgcagtgctaaaggggtttcaccgtgttggccaggatggtcttgatctcctgacctcgtgatccacctgccttggcctcccaaagtgctgggattacaggcgtgagccactgcacctggccaactctttttcaaaaaaagaatctcctgctataacacctatcatcagttggattggaactgtgcaaaatgtggatgtaaacaatttaggattaactagacataatgtgacaattttggatattttatattttagattccactttttattttggtctactgatttccagtagaaaaaattttaggatttctgtaacacgtaaataattgcaacttcaataacatatgattacttgaaatagcgactctatttttcatttcattgaagtagtaactgcattttgtttcatacctatactcctccctgcttcaatatttagcatgtcactttgaccaataaagataaaattatgaagaagatagctgactggtttaaatatcaaagggctgccctagggttcactggtctggttcatgctgtttgatgtattaaagacattcataagggcaaacaaggtattagcaaatatgtcagatgttttatgtttttaatgtgggatgaaataaactcatacacaaggagagagggagagaaacctacattatgactgaaagaaaatatcctgtgcatagagctaaatatgcagagcatgg

SEQ ID NO: 397 - DNA, 1421 bp, Homo sapiens
ctgtctctatcaaaaatacaaaaattagctgggtgtggcggcacatcctgtaatctcaactactcgggaggctgaggcatgagaatcacttgaacccaggagtcggaggttgcagtgagctaagattgcactccagtctgggcaacagagtgagactgtctcaacaaacaaacagcagttattctagatataccgcagaatagtttagccactttaatgtttattataggaattttatattagttcttgctaaccagcgaaattctttcagttatgttagtctactgactagaatgcattttggtttgctacaaattgaaatgggtgttttttttttcatgttctttttaaacattcccctcattctgtataaaacatacttgtggacattgtctacttaagcctttatactatttatactgtagaagttatatctaatatatctcaaatcatttggggattttgttttttcaagaaaagtttgaaacatactcaaacaacagttcttagaaagctgcttaggatggtactgaatttacttgtgctaagtggcgagaatggattattgaaagtgaagcaggctgggcgtggtgactcacgcctgtaatcgcagcactttgggaggccgaggcgggcggatcacgaggtaaggagatcgagaccacggtgaaaccccgtctctactaaaaatacaaaaaacaaaaaaattagccaggcgcggtggcgggcccttgtagtcccagctactcgggaggctgaggcaggagaatggcatgaacccgagaggcagagcttgcagtgagccgagatcgcgccagtgcactccagcctgggcgacaggagactccgtatcaaaaaaaaaaaaaaaaaaagaaagaaagaaagtgaagcagcaactattggaggatagcaagaatggagtgtcctttttaagtgatgtaaatctgtgcttagtatccttttacgctatttttatatgcttgtgtgatatttgattcattaaaaagaatttatgagccggacgctgtgacttaacgcctgtaatcctagcactttgggaggccaaggcgggcagatcacaaggtcaggagttcaagaccagcctggccaatatggtgaaaccctgtctctactaaaaatacaaaaattagctgggcatggtggtgcgtgcctgtagtcccagctactcgggaggctaaggcagaagaatcgcttgaacccagaaggctgaggttgcagtgagccaagatcacgccaactgcactccagcctgggtgacggagcgagactccatctcaaaaaaagaatctatgaaacataaaatgtagtttaggaagtgtaatattaaagtagcacctataaacctaccatccaacttaagaactagaactatactagtactgttgaatctaccagtgctc

SEQ ID NO: 398 - DNA, 1061 bp, Homo sapiens
aggttatcaattatgtgtataatatatattatggaagataagtatttccagacaagggctattatctaggagtttttctccatttttgcccattgcttctttttgtaaatttcttgcgtaaatttagatgaagctagagatttaacttgtcttttcctggaaacaacgtgagagattaagcgctcaccaccacgcccagctaatttttgtattttagtagagatggggtttcaccatgttggccaagctggtctcgaactcctgacctcaagtgatgcgcctgcctcggcctcccaaagtgccgggattacaggcatgagccactgcgcccggcccaaatatctatttagtgttcaaatttctagttgtctcaaatggaattttttttttttggtaatttcatttgaattagaattgaaacaaggtctacatattgcaagtgattgatatgtctcttaagtttctttcagtccataggtatactcttatctctctctctctttttcttataatgtgtttgttgaagaaactggatcatttatcctgtagaatttctactcagtctggattttgttgatttcagttccatggtagagtttaataggtttcttggttttttttttgtatttcctgtaaattatttgaatttacacataattgaatcttaaaattgagaaggaaaaccatgcgggccttttgctgtctcaagggttgcagttaatcagctgacttgagaaatccctgctgcccagggaccagatgaaacatagacaagatggcatgttaactttggatttcttgcctaatctggacacatttgtgtttaaaaaggaagcctggattatgccactgcactccagtctggctgacagggcaagacccggtctctgaatgaatgtatgaatgcatacatgcatgcatgcctgatccaagaacctgatgaattgaaccgttttccaatgaaggtgacattagactaatttaatgataagacaaaactaaactttttttagtgagaaaaacatgctttcaatttatttgtattagttagatctcatttt

SEQ ID NO: 399 - DNA, 1075 bp, Homo sapiens
attggtcccaagcatttctcttagaattaaaattaatttaaaatttagaatatgtaacaagtcacatcttattttgcagtttgtaaggctacattgctaaaattgaggagcatgggcagagacaataacgtttttgttaaactttaataataccgtgtaatggcttggtcaggaagaatatataatgctgagagcaatggattggtatcctccggtttacctgagaccttcatttattgatttgatgggattctacctgagaagttttaataacaaagtctttagggcatttgggggatcatactattttttatagaaaaatatttaatattaatgtcacctatatttgttttagttcatgcttttattggtaagattattataggtaaaagcatatacagcatgttttgtgaaatgtgtttattactgacttggcgatgtcatggatatgtagcctgctcaggaagaactcagagaagatccagattttgaaattaaggaaggagaaggacttgaagagtgctccaaaatagaagtaaaagaagaaagccctcaatcaaaagcagaaacagaattaaaagcttcccaaaaaccaatcagaaaacacaggaacatgcactgcaaggtttctttgttggatgacacagtttatgaatgtgttgtggaggtgagtatgttttcatttccaacaatcagaactcttacaggtggtttcatctagagttgcgtaagtggtgattttgcccacgataagactcactgtagtgattatttcttttttctttttttttttttttttgagacagagttttgctctgtcacccaggctggagtgcagtggcatgatcttggctcactgtagcccccaactcccatgttcaagtgattctcctgtctcagcctcccgagtagctgggattacagccatgtgccaccatgccaggctaattttttgtatttttagtagagacagatttcaccatattggtcaggctggtcttgaagtccgggcctcaagtgatctgcccacctcggcctcccaaattgctgggattacaggcatgagccactgcgc

SEQ ID NO: 400 - DNA, 1044 bp, Homo sapiens
cttctgtgtccttattttttctctctctccctttctgtttctccccttttctcctttttctctctttatattttgttgttgttgttgctgacataacatttttctcttttggctgtagatattatttatgtcttcagcttcggcaggacatagttgcaggacgtctgccctgttcctttgcaaccttagcattattaggttcttacaccatccagtctgaactgggagactacgacccagaactccatggcgtggattatgttagtgattttaaactggccccgaatcagaccaaggaacttgaagagaaggtcatggaactgcataagtcatacaggtgaatatgtctccagggtttgttcggtgtttgttttggcgattagtttaaacacaacatggtattggttcattgtttgcctaagagggatcatggtgccatagaaagagtcagtttcctccactgtttgactttgggcaggttacttaacctctcttaatctaagctttctcatcagagtaataggcattgcattgtagggtgaaaactaaatgaggtaatatatgtaaagcacttagcacagtggctggctcagtgctcagcaaatggcagctattattatttttgtttccttaccttttattttttatcagatttaaagctaattatgctgcattaggtaccttgagatccttagagcaggggtttttaatttgagatctttatacatggatagatttcagagggcccgtgaaactcttggaagtatttttaaaagtctttattaaatttactgactatactgcttttatacatgaaaatgattggtaatgctgggagttatcaagtgatcaagaacaagagtttacagtcagtctgagctgggttgaaatcttgacgttggttccaaccttgtgaccttaggtctttcaattataatgtctctgagcctcaggtttcttatatttctgatggagattatcacctcagagaaactagggggactgctaggtttagaaaaggtattgtgggctgaccacaatggc

SEQ ID NO: 401 - DNA, 1050 bp, Homo sapiens
ctcctgaccttgtgatccgcccgcctcggcctcccaaagtgctgggattacaggcatgagccaccgcgcccggccccaactattatttttttaaatgatcttataaaacacaccagtatgattgatcctctgctttttaaaataattttactcatctagaaggaatctccacattgctttttaagactaagctctgctattgtgattaaaataaaattttattttctaagatggatgtatgcacatttccaaagaactggtattacataaagcgcatctgtgtggttgctcaaatcttaagtacctttacaaaaaggagaagattcattatgtaggagaggttgtactgctgagttgcctatggttctgagttaattgcacccacagtcactgcactgtgttgaaaaatcaccaatttaattagcagatttcctagacagtgactagactgaccttttatatgttaagctttgtaaacacatttaagccgtgatggaatcgaagtgctagctcagatttattgaaataaatatagctcttgctgttggcaacaggaattatgagaagcagtcttcataagaagaattacatttttatatgtctgttaagaaattaaaaaaaatttttttaaccataagatcttagtaagtgttctcgctttggcagatggattaaccttgttcttttggagccagatcaatatctagtttatctctagagcagtggacagtctaactatgttttgattatattaaaaaaaaaaaaaaaaaaaaaaaaactgttaggccaggtgtggaggctctcacctgtaatcctagcactttgggagagcaaggcgggcggatcccttgagcccaggagttcaagaccagctttggcaaaatggtgaaaccccatgtctacaaaaaataaaaaaactagctgggtatggtgacgcacatctgtagtcccagctccttgggggactgagacagaaggatagcttgaacctgagaggttgaagaggcttcagtgcaccgagatcgcccactgcacttcagcctgggtgac

SEQ ID NO: 402 - DNA, 1080 bp, Homo sapiens
aaaaaaaaagggccgggcgcggtggctcacgcctgtaatcccagcactttgggaggccgaggcaggcggatcacaaggtcaggagattgagaccatcctggccaacatggtgaaaccccgtctactaaaaatacaaaaaattagccaggcgtggtggcaggcgcgtgtagtctcagctactcgggaggccgaggcaggagaatggcgtgaacccgggaggcggagcttgcagtgagccgagatcgcgccgctgcactccagcctgggtgacagaacgagactccgtctcaaaaaaaaaaaaaacaaaaaacaacaaaacaaaacaaaacaaaacaaaaaaaaaactatggcatttacttgaagccatatttattatataaagcaatagtagtgataaagtagccttgtaactgtaaatttcattatctgacattagtttggtgccagatagagatagctttttgttggcattttaatgagatatattctgccagtatacctgtaggtgctgtctcccccatgtatattatctcatttaatgttctgtgtaggggcatacacagaactactgttgctacttggcctcaattcttttttttgagacggagtcttgctctgtcacccaggctggagtgcaatggtgcgatctcagctcactgcaacctccgcctctcaggttcaagcgattctccttcctcagcctcctgagtagctgggattacaggtgcccgccaccatgcccagctaatttttgtatttttggtagagacaaggtttcaccatgttggccgggattgtctcgaactcctgatctcaggtgatccgcccacctcggcctcccaaagtgctgagattacaggcgtgagccaccgtacccggctggcctcaattcttaaactgaagtagaggctctcagttttctgctattggattgataaagatccaaagcaaaaagaagtcattattcacttgaacaaggaatttaagctttgtaaaataatttaacactattgtttgctaaatgtacaattctgggaagacatcatctccattttgtccataagaagtttaagctctgag

SEQ ID NO: 403 - DNA, 1629 bp, Homo sapiens
cttggcctcccaaagtgctggggttacaggcgtgagccactgcgcctggcctttgttttttttttttttttttttttttttgaggcgggtctcacagtgttacccaggctggagtgcagtggctcaatcactgcttactgcactctcagcctcctgggctcaagcaatcctcccatctcaatctcctgaatagctggggctatgggtgcatgccacaatgcccagctaatttttaaatttttggtagagacaggatctcagtatgttgcccaggctggtcttaaactcctggactcaagtgatccttctgccttagcctcccaaagtaccggggttacaggcatgagccactggacccaacctaaactttaaaaactagatagacctctggcttaatatatagcctctaataattatttaaacctcatcttattccttgtcaatacctgtattttgagtacttgttatgtataaagtctctgagaaaaaaatatgcccagccttcattaaacatgtattgcgtggtgggtgaaataccaagtgctttacatatctttgtctcatttaacatgaagtttttcgaggctggaccctcagatatttcaaacttggcaactggatctctttgttttagcccatatctgaaaccagacctgagtagttccatcttcagagactaggaagaatagtgaaggtcagttgatttcctttatttggcagtgtaacatcttgaaattctaaacatgcatatttcctgactagttcgtcttcagtgcttcctcttaactggaacctgcagtaccaatcatatatttgtcatttgttccatgaggtgtgttatggcttctgagactcacaaagtccctgtgtgtgatgtgtttttccctcagcatttcattgacagccctgagaggggatttctaaataagtgtgtttggaaattaaaaccactaactgccttttgagaacattttatatttaatgaagtgtttggtttgattgctgctaaaattatgaagtgataggcatcaaaaagtgtctaacctgaacacagccaaagtaatttggccatcattctttagaagttttttcccctgtaaggaagttctctcaagttatctgtcactccagcaggtttttttttttttaagcatccctcctcccccttctcctaccccgcccccactaatgctttgttctggcacaaataaggtcgagttcatttttagatctaccgcctcctcctccatctcccagagagaacctgtagcaagttgtctatgacaaattctatttggaacaggtccctttgagatcttaattttactctgtgcccccacaggttttcaacaaagccagctaagaaggatggagaaagctccctcagaagctactggttttaccaaaacatttattttcccaggttccaagccaatccgaagctaggcaagaagagtagcaaattacaagtctcttacattaagaggttaactaagagagttatcattttacatagcatctcttgcttatttttgttttgctctattcacacctttaaccctcccaaatgtattaggttgttcttggcccaaacagattttaatttccagtgaggagctgggtcacagg

SEQ ID NO: 404 - DNA, 1038 bp, Homo sapiens
gtgcccagtctctgacgggttgcccttgattatgttctttgtcctgattgtgtattgttttgcatctttgtcctttcaactgtaggatttagacaagagtcaagaggagatcaaaaaacatcatgccagcatcagtgagctgaaaaagaacttcatggagtctgtaccagaaccacggcctagtgaatgggataaacgcttatccactcactcacccttccgaactcttaacatcaatgggcaaatccccacaggagaaggagtgagtactttgtccacatgaccaattgtgaaaatggagggaataaatgtttttatgtattaatattctgtatctgagagaaagcttagagctgaaatttggatttggtgcctcactatattcattgctgctttaaggcatttgtaatcaaatatttatttttttttaagtcaggtaggctacccagtgcaattataggagctatttggagccaccagtagatgattagcctctgagaactgtctctgcagctacatgcttctggctaatgtatgtttataaactgaccataagccagtagaggtttatttgtattcaaactgtgccttcagggactagaaagtttactaaatttaggaaggtcaaaataggaaagacattagtctttttaaaaagctttatttgaacatttgcacaacttagaaatatctggactggttccccacaattatatagtaaaccaaggaggcccctaagccagagaattcagaattccaaatattaatgattgtatttcaattttagaaaaactatgggctgggcaccatggctcatgcctgtaatcccagcactttgggaggccaagacaggcagatcacttgagtccagtagtttaagaccagcctgggcaacatggcaaaaccccatctctacaaaaattagtcaggtatagtggtgtacacctgtgtagtccagctactcagggggctgaaacaggaggattgcttgagccaggagaccaaggctgcagtgagccatgattgcaccactgcact

SEQ ID NO: 405 - DNA, 1031 bp, Homo sapiens
gttaataactcttcagtattgccactctaatcttactgaaaagtgaagaatggtgtgggtgtgggtatgtgggtgtgaggagagcttgttcctgtaatgtgaaatcgacagaaggtatatcactttatctcttacttcaccttgggtaaaccttctcttaactctcacagctctagattttattatattattcaggtgattatttcaaactaatgcttcggctgggcactgtggctcacgcctgtaatcccagtactttgggaggccgaactgggtggatcgcctgaggtcgggagtttgagaccagtctgaccaacatcgagaaaccctgtctctactaaaaatacaaaattagccaggtgtggtggcacatgccggtaatcccagctactcgggaggctcaggcaggagaattgcttgaacctggaaggcggaggttgcagtaagctgagatcacaccattgcactccagcctgggcaacaagagcgaaactctgtctcaaaaaaaaaaaaaaaaacctaacacttcacattttagagtggtctatttactagctcaaagtatgtaccttgtgatctaagtaaaataactttgtagtatttctccaaagccatgtttcttttatgagtttgttgaaaatgctaacacagaaagccattttcactattatacgatttctcaagaagataaaacatagctagttaatattcaataataattttctataataatagctgtctgttgcattggttctgtagaatcaaggtaactatttcttgggttttttgtttgttttgtttcgtttttgagacggagtctcactctgtcaccccggctggagtgcagtggtgtgatctcggctcactgcaacctccgcctcccgagttcaagctgttcttgtgcctcagcctcctgagtagctgggattacagacacccgccaccacgcctggctaattttgtatttttagtagagatggggtttcaccaggttggtcaggctggtctcgaactcctgacctgaagtgatc

SEQ ID NO: 406 - DNA, 1048 bp, Homo sapiens
ttcttctctgataacttaacaaaactccagctgtcagtatgaagctggttaagtgtgttcatcttttccttgctcaagtgtgggctatggaaagaggtgaattgcggtgacttctgtggtgaggaggcttcagtgttctgagaccatgcttaaaaaattcaaatactcttaattaaaggggcaactcatcttcttatgagatttcaggccccaaataatttatgtactgcagccacattgtgcagcccaccactcccactgaccccacccacaagagcattcaggatcataggcactgatttcctatgctaaggtggttggccacttaaccttattacaatcaaatggtagtttcagtgtgatttatactcctggggaaggtgagcagatggacaagaaggcctttggtattccactaatgttcattcttctgaaattctgggattaatcaccaggtggtggtagaactgattgtttttttctttccagttttccaaatactgtctcttctcaataactccaaagtgaatctctgacattgatttgaaagaagttaatgaattcgagggtaatgcattccattgccactgctgtttcatgtaccattcgtacttagtggaggaaatgtggctgattttcttaattataatggtacagacacaaggacaaatcaaagtgattgctatttggcaaatcgttttatattcaaattctgaaggtcagtctgaagtgttttatatcaccaatcataactgtctgctcttacagctttccattaagcttatgaaagtgattacagtaatgctgctttttaatatccctcatgatttgacaccttgtcagggttactttggaatactgtcgaagtcttaggcagggtaaacacctttgtagattgagctagctctgtacttaattaaagctaacactttgatcagatcagtgtcagaagattacttctccattgccttcagaaatactctagtaactctttccttactgcttcacagcctcccctggtgaagacacaaactgtcaccatctcaga

SEQ ID NO: 407 - DNA, 1584 bp, Homo sapiens
atccccattgtcactgatggccacaggaacttggcaatgggactaggaagctttttcctttgcaggattttaaattttgcttctttgttttctctaggaactaacctaccccaactctgcccttctcccatccaagagaaaccagcaaaatgataaagaagctaacctgccatagtcagacttcagactttcaagattattctaaatcaccagaaaattaatttcagtttctattgggagtttataccaagagattcttctagatctcattgatccttttgaagagctttttctatattaggatatcagaattgttcaacttttcactctatagactgttttaagagttttggggtttttttaattgggtggtttgtaaccccttcagcctagcctctctgcccatttatttccaaccccaacagacactgacagggtccatggaattcttcgggaaatcctccaaggactcttgtcagctgtgttggaagccaaagccagcttagtgggacttccgcgtctctccctagtcttatcccctttggatgatggcagaaacttcatgaaccagccctttctcagagccagtgatgtgagtgtatcagaatgccagggagggcaccagccctgatccacagacctcggaaagatgcccctgttcctttgttgcgggtggttttggtaaggcagagccctctgctgagaatgtagtattgtttttcccctctccctcctgctttctttttggagcttctttgggtcaaagacatggaagttgcttcagatatctgatactgtgaatgtttgaacatatccgtggccttcacctctccagctacccttttacctcatcagaagcagtggctcagctaagtgctccccctagctcccatctcaggagaccaaatctcacagaaaaataggcactttgggccaaaagctctaatggaacatttttagtggtgatttggggaaggaaagttaatgaggtttttaaaataaggttttctagttttgagagtgtgcacttcacacaggggaatggggttacttctgtctgatcctgggcctttctttcatcccaaatgacaaggaatgtggctcagagaagggtttttcttttttgacctttcttctctcaacaggaacctgcctgaggacacccttctagagcaaggaattgacttttaggagccgttctccccacaagacaccacatgacaaggggtataagccccagccctgctcattcccactcaccagctgaggtctgtcaggttttgaaggcttgattttgtggtgggtttggggcttagttttcctttttttcattttgatttttgaaagtgaagatgatgccctaattcctggtaaggatttggggcatagttttttgtttttttgagacggagtttcgctcttgttgcccaagctggagtgcagtggcgcgatctcggctcactgcaacctccgcctcctgggttcaagcagttctcttgcctcagcctcccaagtagctgggatgacaggcgcacaccaccacgcccagcaaattttttgtatttttagtagaaacgggatttc

SEQ ID NO: 408 - DNA, 1031 bp, Homo sapiens
gccgagacacgtgctggagcggagccgcttcctcacggtcgccagccgcagacaactgacctccccggcatcgcgttcgcggccctgctgctggctccggtgtctcgggccggaactcctgtggctccagcgttcgcgccggccactggccagcgcttgggcctcgccctgcagctccggggccatagggcacagctttagctttgacctccccgttcccgaaaggacgcccaaggcgacctcccaccccatcctccccaacttctcccccatgtcctgcggcaactttgcctccctctcccaccgtgaaatcaaacccgcggggttctgtatgcgccccatccccgctcctaccaccatcgctttgatttcaagaacactcacaagccccaagccctgccagcaggaggactgtcaggaactgaagtttgggagtgaggcctagagcaggttactcccattcttgatgcctcagtttcctcttctgcctcatagccatcatgataatggtgtatggcacttttggtagataccaagtaccttgtaaagtaaggctctgtctgtgagtgccagggaacaaaaaatggatttgagagttgttgcaaagccccagacagaggctgtgatttaaagctggggtattaggtgtcaaattctgcctctgctacttgctattcatgtgatgtctggcaaatcacctcacttgtaaagttcctggccccctttgttattcttagagatgaactcagaagcccaagtagaatagatgtgataccccttgtccccagtctggacagagtcagcccagctccctgaatggctccggagcttccgggtaggggcggtgtgtgatgccttctcagccttgcaaacctggtagttatttattctgctgtgttcttgctattttgtccttttggtcgcaggagttgtggacggcaggaatgagggagtggctgcccagtggtttcaggttgggcaataaaggcttgtctgggcatccctcccttttccctggggctaggggaggg

SEQ ID NO: 409 - DNA, 1029 bp, Homo sapiens
tagagcgcggctccaggaacctatgtccgcgcggtgtagtagggacggctaaatggggcccgggtcagagcgagatcgggacccctcgctccgaggcgcccctgaccccctcactctcttccctgcagcggcagagcggggcgctggtgccggcggcgggcgtgcggcacatcagccaccggcgcttcctggccactttcccgctggctgccgtgagccgcgccgagcaggacctgtaccgctgtgtgtcccaggccccgcgcggcgcgggcgtctctaacttcgcggagctcatcgtcaagggtcagctggtggacgccggggagcgccgggacctcaccctcgaggggcggggccggcgacgggggcgggctctgcccgggggcgtggccgtggggggtggggccggcagggtgtcgctggggcgctatctgaagatgggcctgtggaaatggcagtggcccagccgggatgagatctgatctaggggtcggggctggcttcgagggggacggacagggtcaaggtgagagcctaaagaggggtggggttctggctgtgtgacttctgtgttgatcctagctggcctgcggtccgctccaggaggcgaggatgtgggggattaggaggggcctgagagaggggttgtgggctgatgggcgagggcggggtcagcctttggagccaggtgccccttagggcccgggatttagtgggggtaggagagcgggtctggttgagggcttggtagcagcgtgagaggccctaggaggacggagagggatttgggtgtggtggaactcagagttgggtgctggggtctcacagcagcatcggtccgcctcgcctctcccccatctcctcgcagagcccccaactcccatcgcgcccccacagctgctgcgtgctggccccacctacctcatcatccagctcaacaccaactccatcattggcgacgggccgatcgtgcgcaaggagattgagtaccgcatggcgcgcgggccctgggctgaggtgcacgccgtc

SEQ ID NO: 410 - DNA, 1064 bp, Homo sapiens
tgaatatgtgtgaattcggttatatgtaggggtcctagaaccaatccctggcatataccgagggaggactttatggcctgtcagatggtgataagtgccgtgaagaagaaaagcagggagtggggcctggagggttgttatttttaaaagtctcaagggaaggtgacatttgagcagagatctgaaggaggtgagggactgagccgtgcagagagctgggggcttgctgggggaagcaagcaccagcccgactgagcagccagcacaaaggcctggaggctggagaatgcttggcacgtgcaaggggcatccaggagaccagtgtcactgtgttagtgactgagtgggagatggcaggagaagaggctgaagttgagctgcagatgtgggacttagagccgttgtacacagagagagctggggagccactgaagagtttagagagcaggagtgagcatcatctacttttgtttaaaaggatcactctggcccttttgtggagaatgttctccaggagggcaaaggtgccgcagagaccagggaggaggctactgcaatgatctgcttaagaggtggtgatggctgggagccgagtggaagtggtggtggtggggagaagtggtcagattctgggtttattttaaaggcagagctaactgcatttgctgatggattgaatatgggatgagagaaagggaaatagaagtcaaggatggctccaaggtgttttgctagagcagcaggaatgatggagctgtcatttcctggagcggactgtggtggcagctgatttgacgtgggtgtcatagatcaggagttctgtgttggaaatgttgacttcgagatccctattagacattcaagtggagatattcatcagcagatggatacatgagtgtggagttcagggaaggggttcgggctgcagatagaaatttgaaagtcatcagtgtggagatggtatagatggcatttaaagccctgaggttggatgagatcttttacgctaatggttctcaactaggggcaattttgtctcctaggagacatttgacagtgactga

SEQ ID NO: 411 - DNA, 1028 bp, Homo sapiens
cccaggctggtctcgaactcctgggctcaagtgatccacccaccttggcctccaaaagtgctgggattacaggcatgagccacttcatttgccaatattcttttattatatttatttaatgtccataggctctatagtgatatcatctttttcatttctgatattggtaatttctgttttcttttttcttgtttacccttgtgaagactgtataaattaatctttccaaagaaccaactgttggcttacttgattttctttattttctattttttatttcctttgttatactttctttggagttgatttgctgttctgtttgccttttgagatagaagtttcttagatcattaatactgagcccttcttcatttctaatatacgtgtttaaagctacacattttcctctaagtcctgctttagctgtgtcccacaagttttgatatttcctatcttcattatcattcagttcaatttgttgtctatacaattgaactgttatttctgttataatttctgctttgacctaagagttacttagaattatgttgcttaatttctaagcaattgggacttttcttttttgtttgtttttgagacacagtttcactctgtcacccaggctggagtgcagtggcacaatctcggctcactgcaaactccgccttctgggttcaagtgattctcatgcctcagcctcctgagtagctgggatttcaggtgcccgccaccacgcctggctaatttttgtatttttagtagagacagggtttcatcatgttggccaggctggtctcgaactcctgacctcaggtgatctgcccaccttggccctgcaaagtgcggagattataggcatgagccactgcacctggccagcaattgggacttttctaattgtctttttattattgatttctaggttaattccactgtagtcagagtatatactctaaattttattttgtgaaatttcatctttactttatggcccaacatattgttaaattttggtaaatgttccagtg

SEQ ID NO: 412 - DNA, 1029 bp, Homo sapiens
gcagggctgcccaaggctacccggagagccagaggcagagccagctccacccttccccacctgggctctggcttctatagcccctactgctgccaggctgggcatacatggatgagttggttgtatctctgggctgccaggagcggataataggatccaggaagatgagagagagagctggctggggccaccttgcctgaggccagacaccagcaagagagagagagtctaggggtggagtgtgcagcggagtggaggagatgggggggatggcccagccagggcgatacactctgatttttcccctcgttgttcctgcacagctttaagagagactattttaaagtatcatttaatgagggattactatgtgccaggagcttcacacacatcatccatgagtacattagttattggacatctactgtgtaccaggcactgttctgcactcagcatgcgtcagagaacatttccttcttggatcttgactgactcccttttttttggatgaagaaactgtaatgaaagcaccttgcccaggccacttggctgatgagcagtagggcctgacttcaactcaggctcgcctacaaatgtgaaggcctcactgagtctggtgcataggcagtgcccccagaatggcaagcccctgactttcccccagcagggggcctgagaagtgactttaagtagggctggggctggagagggctatagtggagggggcagatttcagtttcaggtggtatttgaggtcctagaaatctaccctcaaggagaagaggattggcagagtgaggggtgtcaaagagagccctgcaaagagagcactgggcccaggacaggctggatcagaaatgttgtcagggcctcactgggaaaccttccattatgtatttgctaccccataaacccaagttatcccagatgcctccaggaacccctcatcccccatcactctggacctccttacttcctctaaaagccattcagtctcactgtgtagtacccactgcatgcccctggatc

SEQ ID NO: 413 - DNA, 1594 bp, Homo sapiens
ttctttcctctgctctgtccttcccctctgcatcttcctcctcaagtcgtggtcatgagtgctggttctgcccctaagaggcatgggttcagagctggccctgctgagtcacccccagcaagtccctgagcctcaatgtccccttcaccaccagagcagccccttacgtctactgttcctcgtggttagaagtatgtcctgacctccaaccaaatccacgttcaggacacgctctggagcccacgtccatgtgcatgtgtgtgcttgtgtgcatgtgggtggggcctacctgttctgagactggcagcttctcccacagcacaggcaactctcaggcccctacaagtcccttctccagccaggcagccccagctctgcagacccaccatttcctgggagcctcctctgggccaagccctgtgctcagttcttgacagagtcctcacaacagctctgagaaataggagcttttatcactcccactttactgatgaggaaactgaggctcagagagaccaagggagttgtgggaggttgcaaaatgcactggaactgggatacaacccaggcccctgctgactccacagcctgccgatgctactctgtcttctctctctgtcttctactctgcaagccttctggaacattcctcctgcccctgtgctggttttccctccctcgaagtgcaggcccagagggcgccaggccagccctgaggacagtgggtctctcacctcctcctccctggacagctccttaccttagtgtttcctgacacgagcttttccaacaactcaacacccagcgactcgcgctgagcccccagctcggctcctgcaggggctgtggacaggcagctctccctgctgcttgcgcagttagttttcaaaaccagatgcagaacttctcaaagaatctgtattaaattccatctgcttaatctcacattgagctcagctggatgccaacagcattaggtgtccctcccgggttccatcttctggggatcgggttggtttgtttctgtagctcttcttccaggtaggccaggaatcctgggctgggaacagagcctgtggcacacccctggagaccaccctctaggccagcatctgctcagtgacgggtcctctctgggctccatgttcagccaggctggctggctgtcctctgtccatggccctatctccccacctccttttctccctcccactttcctccaagttccttcgaagtcacaaactgccatcctcatccgtgaagctgggcctggagggagaggaggtctctctttctcttccctgctgctctgagcagcaggacggactggtgggcagtggtgggaatctggaccttctgtgggtctctttacaagtctgtggtggtctatgctgggaccatcctaggtgctactgggagtagggagaagccaagggtggagttcattctgtgcgtgggggaagcccccgagctctggctgagcacaagctagactctctgcggggaaggaggggtgtagtccctccttcctgcaggagaaggaggagtctggagagtggtccctgtttaacacggggaggagagaggtggggac

SEQ ID NO: 414 - DNA, 1050 bp, Homo sapiens
tgccatgtttcccagaatcccttgctgcctcccccactcatcctgtcccttggttggagtcagggccaggcccagcctggaagacttgggcagctttggtgacagcgggcctctccttggtcttgccaaggtcccagttggctcctcttgggccctggcagggacatgccactccccactctgtggctcagcccagcccggcctgcccgtctccgctctgcctgccctgctcacatcgcccattctggccactcctgtgctccgtccacctccatctgcccctggcctaatatctgtctcttttgctttgtactgtttcctcactggaatcattaagattcggataaaccgagaagtaagtatctctctccccttctcctcctcctcctcttcctcctgtctgtctgactggctgtatctcagactctctcacggtctctggctgtctgtctctctgtctctgtccttcctttctacttatgtgcccagcaccaaccgtccatttcagcagcctggccaggggctgcccagggctgaagattcgagagtgttcctattgtaagcagttccctcccatcctccactgccttgagcaggggcagcagtgttgggggtgcttcccctgcccattctgcactggtcacaacagtctgtcaccttccttccctggctccgccattcccaaggagtcctccctagcctccctagctgcaccttctacaggaccctttggagggtgcaggggaagctgccctggagggccctgtttctgctgcttaagggtcaagatcttggacagccccaggtcagcctcctaaaactactttccctagtgttcaaataccttcatgatcagtttgcctgaaactcaaccccgaccattttaccctcaatttagccttaatttgaatgttttttggtggaagcagtttggatagtctgtttttaaatattatgcttttttttttttttttttttttttttttgaggtggagtttcgctcttgttgcccaggctggagcgcagtggcacgatctcggctcactgcaa

SEQ ID NO: 415 - DNA, 1014 bp, Homo sapiens
gagtggatgctgggctatcttgctcccccttccactgtgggcagggcctttcgcttgtcccatgggcgggtggtgggccaaggaggagcttagcaagtctgcagcccagccccacctccatagggtcctgcaggcctgtgctgagaggcctggtgctgcctggcagagtgacaaaggctcaggacggctggctctgggggactcaggccaagccccttggcaccatcctggcttttggcagggatgagtgaggccctgcagagagcatcccaggccaaggttcccactcagcctgccccctctgcatgtgggtagaggatgtactgggacttggcatttaggattccatctggcccagcccctgaaggtcctggggaagcaggtctcaattctgaatagccagtggggcacactgactgtcctccccaggggaactgcagcgccctcctccccactgccccctgcagcccctgagatattttgctcactatccctccccacttgcttccctgatatgtgctctgagcttccctgaaccaggatctgcctattactgctgtgccccatggggggctccttccctgcctgacccactgttgcagaatgaagtcacctcgcccccctcttcctttaatcttcaggcctcactggcctgtcctgctcagcttgggccagtgacaatctgcaaggctgaacaacagcccctggggttgaggcccctgtggctcctggtcaggctgcccgttgtggggaggggcagtgttagagcagggctggtcataccctctggagttcagaggaagaggtaggaccagtgcttttttgtttcttttgttatttttggttgggtgggtgggaaggtctctttaaaatggggcaggccacacccccattccgtgcctcaatttccccatctgtaaactgtagatatgactactgacctacctcgcagggggctgtggggaggcataagctgatgtttgtaaagcgctttgtaaataaacgtgctctctg

SEQ ID NO: 416 - DNA, 1020 bp, Homo sapiens
gcagagtacggcagatgagagaactagacaggatgacaacactggagatttgcagagagcctgatcaagtcttcagctgagtacctattaccacatgtgtgtgagaaaacttcaaccttaaggctgaaacacagccaaaaggatttgagggaacaatcctgcaactcaaacagttcttactcccaccagtcagaatgggaaaacaaatcagtcatgaggcatcagatagattattcaggaggatctgcgttagctgtgggggaatgttggccctagactaaatggagctttgcttatttttaacaagcttaagagcaatacttgaaaggcatatatctatgttacttaactatacccccaaagcaaaatttaatagtatttatgagaatacaaagctatcaagtgccccaaaaggcaaaattcacaatgtcttgcattcaatcagaaatttccaagccagaaagcaggaaaataagacctatagtaagtataagaagcaataaaaaccaacttagaactgacacaaattacatatttagcagacatggacaataagaacagttataacattatttcacatgttcagaaatataggagaaagactgaaaataataaggagggccaaggaagatatacaaaagaccaaaactgaacttctagagatgaaaattacaatgtgtgagatgaaaactacacttctacactagatagctgaaatagcagattagacactgcggaaaaaagattgctaacttgaggaagtagaaatacagattatccaaaatgaaacacacagagaaaaataataatataaaaaatgaacacagcgtcagtgaactataggaaaacttcaaggtgcatgtaattggagtatttgaaaatgagtggggatcagaaaaatatttgaagaaataaaaggccaaatttcttccaaatgtgattactactataaatccatagatccaagaagctcaacaaacttcaagcacaagagacatgaagaaaagtatactgagggac

SEQ ID NO: 417 - DNA, 1049 bp, Homo sapiens
cacctgggagagacagagagatgagggctgagtatggtcaagaatgacctgcaattccaacctggggtcatgggacccaaacccccacctctggcaaaatgatgatgataatgactggcaggtcttggatatttgctatgtgctagacattgcctgcatgagataggtgcagttcccagccctgtagtggacatatttgcctttgcctattcagcatcaagtcccccttattttgaaaacagtgcaccattttccttgggaaaacattctcagtccatataccttcagaagaactggtcccatccctcagatccagcgaggtggctggacttggccactcaaagtagaattccatccccctggctatagtccttggtttggggataggcacgtggcccaagttggtccaatcagacatactcctgggaccttctttttctgttgggatttctgagagggtgggatatctgcctaggggttttggcagcctttttgccaccacaagggatgggcttccggaaaatgaagccaacatcaaggaaagtagagtcaagagttggagaggacgagatcatatcctgatgtcaggactcagccaggcccaagccagacctacatttggctgctaagttctgtgagctagtaaattcctgaagtcagattgagttgggtttctgccacttgcaaccaaaagtgtcttagctaatacaatctccaccttacaggtgaggaaagtaagttaccaggaatttaaaccgtcactttccaataagctgcttctaagcacacctcatcctctcttcccggaaagcctccttctgctttcccagctatctcatatccattgaccctccaagaccagttaactgtcacctcctccaggaaggcttccctgatacctgagaagaggccaggtccttcctctgtgcttattgtccctgtgcttcacaccaagttgtaattgtatctatgtgtctgaactgtacactcctctaaggcagaggtggcatcttagttttctctgcgcctcctggaatcgatatgagact

SEQ ID NO: 418 - DNA, 1080 bp, Homo sapiens
ttgttgtttctaaattttcctgtcttaaaaatacattgaatattttgatgtaaatcacttttcctgaagcatatagtttttcctatgtataaagttattttcttaggacaggttcccagaagcaattaggggtcaaataaagtattagaactcttggttgcaaggggcagaaacttaattgggaaacattttggccaatcttgtcaggggcttccaggataactctcagttatgtttctcagttatgtttctgccccttgtctctttcctctattgctgggacttcagcctttgctgtattgggtgctcagtttatactcccagggctttgcttcttgtttaccagtgctcttctttgcttttctctggcagactcttgccatctggtggtaaagattggctttggcaattttttgtagtttacaatcctgatttgtatatgtaaaatgtaataagcaaggtggttctcccaaggaaaggattttggacagacaggaaaaggatgtttgctataagtgttttattaaatgttattaaaatattatttgatttatttttgagacaaagtctcgctctgtcacctaggctggagtgcagtggtgccatcacagcttactgtagccttgacttcctgggctcaagccatcctcccacctcagcctcctgagtatctaggactacaagcatgcaccaccacatcctattaatttttctgtaatttttctagagatggggtctcactgtattgcccaggctagtcttgaatacctgggctcaagcagtcctcccaaagtgctgggattacaggcctgagcttccatgcccagcaattatttcattttaaattatttttattaaatgtgtaatagtttattagtattttatcattcttgatagccattgatagtgacttccaaaagtttattctagccttagtaatagttcttattttactatcctttcaccacattgaatattattttctaaatactttgctaatttaatggattaaaaatagtagcttgtttatatttccttttttaacttaacgtctatcataaatattttttgtaattaatt

SEQ ID NO: 419 - DNA, 1019 bp, Homo sapiens
acaggcatgtaccactatgctcggctaatttttgtttttttagtagagacggggtttctccatgttggtcaggttggtcttgaactcctaacttcgggtgatcttcctgtctcggcctcccaaagtgctaggattacagatgtgagccaccatgcctggcctaatttttaaattttttgtagagatgacgtcttgctgtgttgcccaggctgatcttgaactcctggtctcaagtgatactcccaccttggccttccaaagtgctgagagattataggtgtgagccacaactgctggtccatagggtagtctttagaaaaagcacatatgacttaactctgttaaaatttttcatttgtatgtctccctccattgccagactattagttctttccagaaaagaatcatgttttgttcgttttggtatacataattattactatcactagtattagcactggcgttatccacttactagctgtactgaaaaaatgagattaatctcagaatctgtgctgggatggattggaggaagaaaactggaggcagggagaccagtgagggagttattactctagatgaaacatgatgggagcctaaactagaatgatggcaatgaggacaaaaagagagacgtgggtgactgacacatttgttgaattgagtgttaagtgggaagtatgatttggtttgtagtctggtagaagccacagagtattggaattgattgtcatgggggttgcttaagctgcaactcacagccacttgaaactcatctctacaaatagataggtgaaagcaaaaaccatgtttgtgagttccttgagttatgtcctcaagtttctgcctttgttatgggtttttttttgttgtttgtttgttttggagacagggtcttgctctgtcacccaggctggagtacagtggtgcagtccgctcactgcaacctcaatcttgcaggcttaagtgatcctcctgcctcagcctctcgagttgctgggactacaaacacaagccac

SEQ ID NO: 420 - DNA, 1075 bp, Homo sapiens
tttgtgaaggaacatgcctttagcagtccatgctcctgagttggacagtggagagtaggaatgcctggcgtgtggaagggcatatatgatagtaactcatgtaagttcagttaatgcatttctaacagttaaaaaagtaactcatgaaataaagatcatatggtacctacactcaagcggctaatcatataaggagaaagataagcagccaagctatgtatggtggtaaaggatagaaacacattccaaggaggttatttgattttatggacatccaaggacaggaaatgcagtgtagtcaggccacctaggactagaactggaaagtctcattaggttctcatctccgtttcttcacaagtctgtttcattacctcactttttatagtctagtggaagacaatgcaaagcctctaagaagacagaaaatggtagacctgttgaggaaccaccagaaatagcccaggataaggaaaggatgtcaccttttacaaataatgcctggtacttaataggaatacatgcactaactacctgtgaatagatagacttcataatctgtgctctctgtcattccttgggtgtcttcactcagtgaaacctgccctcagattgcagagtaataggtattgactcctgctgctggcagtgggcgataatgaaaggagcaggggcaggagtaagaataacagatcttcctaaccttgagccttcccacgtcttttcattaaaacatacatgtattgaatgccttttcccacaagtccaggatgcattgatttagttgtgtgcatctggcaccatgaacaatttttgtcccagtgactgaatgttataaataatttttgttgggcataattagaataaaaggaaactgtgtgttgcaattggaaatgggctatgaagtggttggtaaaataggaatggaggttttgtagtgaatccctggataatcttctgatgaacttgtggtctgtgctttactggcctctttcattaatcatatgccatcgtaggtctttctgaatcggtgttatgttatgaagaagtaagtgccttggggaccaagctgccc

SEQ ID NO: 421 - DNA, 1003 bp, Homo sapiens
ttgattcagtagtgaaatagattagaaatgagagtctttgttctgtaggttagcgctcttttcctcatcagcactggccaatcacctagtcgctctgatttttccctaaagctgtctgactttcgcttctagttaaaatattattttaatattttttatgatacctaaattttactaagcaagtaaaaattcacatccttcaacactgaatgagtagttggactctttggcaaggttaatataatggacagttcattatgaaaatattatctccctccctttgttctctgtctcccaacactgtaaggtaagggatctttaccagtgtggtgttcatcttttatgctttcttaagataactgtcaaaaactgttgatccttaaaagttacttttaattttcagtctcccctcactgcttaactaagagagtgctctttatttttaacttgggctttctggatgtattttttttaaacccaactgaaattggagaaatgtgattgaggttactgttggtttgggatgtatgaattctttctagcatggataagtgttaatatatgttgagcctggcttttaaggtatttctgaattatcttgcaaggggattgcagtgaagtcacaacccattgtgcggaagtgagactttgagaagatagaatagtagtatttaagctctggtaagatcacatggaaggggcaggcgcggtggctcacgcctgtaatcccagcactttgggaggccgagacgggctgatcgcgaggtcaggagttggagaccagcctgatcaacatggtgaaaccccgtctctactaaaaatacaaaattagcttcgcgtggtggcgcacgcctgtgatcccagctactttggaagctgaggcaggaaaatcacttgaacctgggaagcgaaggttgcagggagcccagattgcgccattacactccagcctgggcaacaagagctaaactccatctcaaaaaaggaaaaaaaaaaaaaaaag

SEQ ID NO: 422 - DNA, 1053 bp, Homo sapiens
cactccagcttgggcaacagtgagatcctgtctcaaaaaaaaaacgtgcttaccgtatcgttcaacagttgcattcttgggtatttatttcagggaaattaaaactcaacacaaaacctgtacatgaatgttcacagcagctttattcatagtagccaaaaactggaaacaaaccaaatgcctccaataaactggcacacccatacagtggaacagtactgtgcaataaaaaaaaaaaaaaaaaggaactgttaataaatgcagcaacttgcttgatcacaagagaattaagctgagtgaagaaagccaatctcaaaaggttacatactatatgatttcattaatataacattcttgaagaaacagaatagtggagatgaagactatattagtggttgccagtggtgagagatgagggaaaacggtgactggctatcaaagggtaaggatcctcatgatggaactgttctgtatcttgactgaggtggtggtcacatgagtctgattaaattgcatagaactaagcaaacaagtacatgtaaaggtggtgaaatcctaataaagtcaattgttaattttttttccatgaaacctgtacaacaaattttcttattttaatgttaattttctgattgtgatacagatatgcaaaatgttatggggaaaactaaagtatacaggatctctgttatttcttagaactgcatataaatctaaaattgccttaaaattaaaaaaaaaaattttcaaagttgcaaagctctaaattgtgcactaaggaaaagatttgggagaccatagtcaatatgacagagttttctactgtcctggaatgtaaaaattgagcccatatgaaagggcttgtaacaggcctttgggggatttttttttaaccaatacccagcctttctatacccatagccaatattgtatataatatattatgagtttatatttttttctgggttgctaatcagtagcttccatcaaattctcagagggacccatgattccaaaaaaaataaagaacctattggctttgtgctcttgctt

SEQ ID NO: 423 - DNA, 1032 bp, Homo sapiens
gcacaaagcgacatagataaaatgaagtatctaatttgttccacattcttttttgttgttgtgatggagtcttgccctatcgcccaagctggagtgcagtggcgcaatctgagctcactgcagcctctgcctcccgggttccagcgattctcctccctcagcctcctcggtagctgggattacaggtgcacaccaccacgcctggctaatttttatatttttagtagagacggggtttccccatgttgaccaagctggtctcgaatttttgacctcaggtgatccgcccacctcagcctcccaaactgctgggattacaggcgtgagccaacgcgcccggtctatgtatatatttttttagtagagatggagtttcaccacgttggccaggctggtctcgaactcctgacctcaggtgatttgcccaccttggcctcccaacgtgctgggattacaggcatgagccacctctcctggcctgttccacattattaaaagctccttggtgatgttctcagatcagaattatggcatctttgttcttctaggactttgaggattgaataactaagttttccagtctgagaacttagaaagtggtgtagtcaggtacagtaggctcaaaaagattgatcagaaaaagtatattagcagtaggggaaaagaagtagaggtcaggatctgccaccaaacagtaagggttagggttaggattaccctcacaagtagactgttgaatgaagcattactctgttaactgtaaggtcaaatttgttttctattccaagcactgaaacaggattgtgaagagcactgtcatttacagttcttctcataggagtaaaggtttttaattaaggatatttacaattcatcagcaattttaattgtcagaaaaccaggaagtatgtgtctattagttcatggtatagtatagcatctgaaattaggctttttaacaaacaagcattcagtctgaaattctaaattctctaaggcatgtcagagtcaaagttatttttcttcgtctat

SEQ ID NO: 424 - DNA, 1071 bp, Homo sapiens
gtgagtagcagagtaagaataaggtctttcagactcttaaggactagtatctagagtactaatgtcaccgtggaactttaatggaactatccattgtatatttagattatttacttttgtttttttcaaggtaagattatactttgtcttgatgcagattttgatttttttgtttgtttctttattctcctttcccccatctcacccaattaattttgttaaattgatttaagaaacatttaaatgtctctgttgtcatggcttcaggtgagggtggaagagtacacttcttttattagaagcaggctttgggctttctagtcaacttcatatagctttagtgctttcagctagtttctttctgaaattggcacatttgtgtgaactatttggtttcactatatggtattccatgttattgctttaagcagacttcaaaatttgcatttatttaccagggcaaaaataaattgtttttcctattcagaaattgagaagattcagaaaggagactcaaaaaaggatgatgaggagaattacttggatttattttctcataagaacatgaaactgaaagagcgagtgctgatacctgtcaagcagtatcccaaggtaaggcaaaaagtgctttggatctttgagttatctttatagttatgagagagtcatgggctataataaagactcctggggattgtgatgctttagaaacttaagcctgtgaagcttctctttcatgcttgtagtacctgttactgagagttgaaatatctaagttcttaactaataacatagctatagccaggaaggaaatataatcatctttttattatcaaaaagtttctttctcaaatgattgctcaggctacaagttcaaagaaaaaaaaattaaaacctgaagagttgctctttgtcaaaagactaacctgaaatctaaataaaaggaaatataatatgaatcctcaattggttgaagttaattttattttcttactaaaagtttacttttaagtaaatgctttttttcttcctttttttttttttaggaaagcatttagttacatttagttt

SEQ ID NO: 425 - DNA, 1072 bp, Homo sapiens
tctgcactcaagaagttcatgctgtagagagtagagactagcagcaagaagcttatagcatctagtgttattgggttaaattctgacctgagcacactcagggatttctttcctggaggagtttgctgaggacgagtttagtttggaagaggttgactattgatgtttaacagataggtgagcagcttttttcagactattactgaggactagatagagatgggacaggccagtttatctatcttgcttgttaccacctttgaatacttggttggaatattactttgaataaataggaaatggtactatttttgccttttagcaaggcctggtggttgtcagagttaacatactactgttgaatatttaataacaaggatgaatctggagacttatgaaggatttggaatattattaagtagaattgagtaagcgtcatgtgttcatcagaaaactaggaggaggtaagatacagtccttggttttcttgaatgttaaatgagggaattagaactaaatgtggtgtcagatgatgtgaaaattgatagggcaaaaatttataggcagtgtgggccaggcacggtggctcacgcctgtaatcccagcaatttgggaggccgaggagggcagatcacctgaggtcgggagttcgagaccagcctgaccaacatggagaaaccctgtctattaaaaatacaaaattagccgggcgtggtggcacatgcctgtaatcccagctactagggaggctgaggcgggagaatcacttgaacccaggaggcagaggttgcggtaagctgagattgcaccattggactccagcctgggcaacaagagtgaaactccatctccaaaaaaaataaataaataagtttttaggcattgtgtacccataatgctgaactccaaggattccaacagtctcaaatgtcttagcagctgctttgctttcaagtacctcatcttcattagaatgttcaacatgaggcagggcgcggtggctcacacctgtaatcccagcattttggaaggccgaggcgggtggatcacgaggtcaggagatcaaggccat

SEQ ID NO: 426 - DNA, 1034 bp, Homo sapiens
agaatggaagtgatccggagagctaggcagagaccacattatgaataatgaggggtctaccatcaagacttttctcaaagaggtgacagatagggtgccatttgacttcagagaaggaatgacctgagacctcatctgggctctcaagagctcttcttagaattcaagtctcccgtggaccagatgatttctcagtagaaagtgtagataccacacaatactccttgtatctttcgttcccaggatatgatggatgatatctgtcaggagcaatttctagagctgtcctacttgaatggagtacctgaaccctctcgtggacgtggggtgccagtgagaggccggggagctgcacctcctccaccacctgttcccaggtaaaaataatggagacacccagaaataggatgtgaatttgactactagtgtcatctcttttagtggtgctcttatgtctagcttaggaagggtctcaggatttgtatgttgcataaagaacagaattctacaaccatactctcacacctgtaatcccagcactttaggaggctaaggcaggcggatcaactgacatttggagtttgagaccagcctggccaacatggtgaaaccctgtctctactaaaaatacaaaaattatccaggtgtggtggcatacaccacactactcaggaggctggggcaagagaattgcttgaacccaggagacggaagttgcagtgagccgagatcatgccactgcacttcagcctgggagatagagcaagactccatttcaaaaaaaaaaaaaaatagagttctagatcttgggcactttgaccatagccaagtgctgcagtctagctgaaacttttggtcttctaattttggacagtcttagcatttgttaatggtctgactttaaaattctaccttttgtgactgacctttatagagtattcagactctccagacctacccaaggcagtgcagtgatgaattggtcctctataggacctgggggatcttgcagtgtgggtcctttaccctgtaca

SEQ ID NO: 427 - DNA, 1036 bp, Homo sapiens
tgtgtccatatatatagcttacctgtgaattgattgaaaaagagttccagaattctacagcagtgataaaacagttcttttttccttctggtgagccctatgaatacatgtatatatatgctatattaaaagggtcaatttaggattgtgctttttcactttatattctgtggtatccatttttctttgcaatagttgtcaattattttataagtacatagtctatacatattttggaaatactttacggtttagggatggggcagaatgagtattttcctgtattaatacacttagtaaaatgactgacttatggaagtatttgagagaaagttgaaacatagttactctgtagcttcctaacactctgcctttggctttcagggactcagaatattatgactatggacatggggaggttcaagattcttatgaagcttatggtatgtctttatctctgtggtggggcagaatgtacaagtaagtgcctgggagaatgctggtgactaaagtattgagagtcagacaaacacacctacggataaacctttagaaggccaagattttgctagatgtgacagtaagagttctgctcttgcttaaattttgcggtacatggtagaaagagggactgctaaagtgaggtggggtatcgttactcttggaagggtagtgtttgtcttaaacaagggctcaagaccagcttggccctggttggagcagcagacttataagctaatgttattttttttctactttaggcagggaaatagctagacctgggttgtatttctgggcctttgctgccgatatctaggccactttggtagataacaagaacttaatcgtacacaactgtactcatctaccccatttcattaaaaaaaaaatttagatctcattgaaaagaatgtcattgtaaaggaaatgtcagctgaaagggacctagatggcaagcagctagccagaccaggttgcggggcaagaatagtgcctattagggccgggcgtggtggctcatgcctgtaatcccaac

SEQ ID NO: 428 - DNA, 1524 bp, Homo sapiens
tcagttatgagcaaagttgttactgatttcttgtatctcccaggattcctgttgctttacccacaacagacaagtaattgtctaagtgtttttcttcgtggtccccttcttctccccaccttattccattcttaactctgcattctggcttctgtatgtagtattttaaaatgagttaaaatagatttaggaatattgaattaattttttaagtgtgtagatgcttttttctttgttgtttaaatataaacagaagtgtaccttttataataaaaaaaagaagttgagtaaaaaaaaaaaacacacaaacctgttagtttcaaaaatgacattgcttgcttaaaggttctgaagtaaaggcttgttaagtttctcttagttttgatttgaggcatcccgtaaagttgtagttgcagaatcccaaactaggctacatttcaaaattcagggctgtttaagatttaaaatcacaaacattaacggcagtaggcaccaccatgtaaaagtgagctcagacgtctctaaaaaatgtttcctttataaaagcacatggcggttgaatcttaaggttaaattttaatatgaaagatcctcatgaattaaatagttgatgcaatttttaacgttaattgatataaaaaaaaaaacaacaaaattaggcttgtaaaactgactttttcattacgtgggttttgaaatctagccccagacatactgtgttgagagatacttagagggagggagtaggttttgaagaggttgatggtggtggggagggaaggcctcctgaattgagtttgatgcagagctttttagccatgaagaatctttcagtcatagtactaataattaaattttcagtatttaaaaagacaaagtattttgtccatttgagattctgcactccatgaaaagttcacttggacgctggggccaaaagctgttgattttcttaagttgacggttgtcaatatatcgaactgttcccaagttagtcaagtatgtctcaacactagcatgatataaaaagggacactgcagctgaatgaaaaaggaatcaaaatccactttgtacataagttaaagtcctaattggatttgtaccgtcctcccattttgttctcggaagattaaatgctacatgtgtaagtctgcctaaataggtagcttaaacttatgtcaaaatgtctgcagcagtttgtcaataaagtttagtccttttttaatcaaagtaaatgtgatgaattgtcatttttttgggtggaccataaaatagttttctctttcaaataaacttaaattaactctaaagttaatgggcttgttaaaagttggaaacattcttaaaagtggtgggggggattttattttaagtttaccaaaaaaaagttgatggagttgttaagttttagtttaaaaataaccaaagctttttcaccccctggaagttgttggaagctgttgtatccaatcctatcaaaaattctaatttatggagagttttcaactcaactgagctgaaac

SEQ ID NO: 429 - DNA, 1059 bp, Homo sapiens
tactgttctctcacttaaagtgtataattcagtggtttttagtatatacagagttgttcagtcatcactagggcccatttaaaatgtctttatcattccaaaaagaaaccccatgccttttatctgtcttccaccaatctatttattccctccagccgtaggctactactctgctttctgtctctaaagatgacaagggtttagcctccagaaggctaagtccaagggtttagccagtcacagaagaccactttctgtatgatttcatacaaatgaaattatacaataagtggtcttctgtgactggcttcctttttgttttttttttgtttttttggtttttttttgagacggggtgttgctctgtcgctcaggttggagtgcagtggtgcgatctcagctcactgcaactgcaacctccgcctcccaggttcaagcgattctcctgccttcctgagtagctgggattataggcacgcgcctccatgcctggctaatttttgtatttttggtagaggtggggtttcaccgtgttggccaggctggtctcgaactcgtgacttcaggtgatccgcctaccttggccttccaaagtttgggattacagacgtgagccatcacgctcagctgactggcctcctttcacttcggatgttttcaaggttcatccatgttgtagcatgtatccctactttgttcttttttttttttttactgttaaatgcgatttcactgtatgcatatactacgtttcatttattcattgatccattgacaggcatttggattatttctactttttggctattatgaataatactgctttgaatatttgtatataagtttttgtgtggacatgttttcagtttcttgggtatatacctagaagaatttctgggttctgggtcatacggtgactctgtttatttttttattttttatttttttttttttgagacagagtctcactctgtcgcccaggctggagtgcagtggcacgatctcagctcactgcaacctccgcctcctgggttcaagtgattctcctgcctcagcctc

SEQ ID NO: 430 - DNA, 1050 bp, Homo sapiens
taaagctagcaagcatctgatgaatatttaatagcattgagcagacaggctggaaacagctgtctgagacagcagctgcttagtgggagaggaggaagtgcacaacactgccttaactacccgttcttttgtttcctggcctagaaaataggtctggctcttcaaggccccttaggagcacaagcctatgggggcactgcaccctagtcctattgtagcctgattgctgctctcggctcctaaggaggctgcattcaagcaggagactcaaccctttttgggaagtaatggggaagaatgttcacggacctctagaatccattttccagtcccaggactggaggtcttccactctattgtctattctggctctgaagctgaggatgcagtctcatctagtgttctgcaaactgtagcactctctgtttttttgtttgtttcgaatgtactttctgctttcgtatacagctctcttctaaaaggagagagacatgtatctggaagggatgtgaatttcatagccgtgctgctaaggtttagcttcttagcattccttgatcacagattcactagcctctcaccagtgactgtacctctcattcctagccggtactgtggtgattgtctttgcatctcaggcagggaatgggccgataggagttctcatgtacacaagctaaccccatccttagaccttggggagcttcttgcttcaaggaggccttgtcactttcagggcaaattgggggtgggggcgggggttgtccagggactccttaaaaaagacagcttagttgagatgtttctagatagagtgtgaggcacagccagtctatcagcccagattaatcagctaaatagggcaccttgccagaaatttgggtactatttctgatcttaatattgcattaagatgcctgaattggctgttcccctgtcaacctctggtgcccacctcagggtatccagtctctttcttctaggcactgtgatgtgtgtgaaaacttgagatagaagagtttgggttcagatacagagctaattattccc

SEQ ID NO: 431 - DNA, 1095 bp, Homo sapiens
gaatcgcctgaacccggaaggcagaggttgcagtgagccgagatcgtgccattgcactccagcctgggcaacaagagcaaaagtccatctcaaaaaaaaaaaaaaatgctgatttataggacagatttgggccaggtgtggtggctccattttgtaaacccagtgatttgggaagcccaggcaggaggatcatttgggcccaggagttgaagaccagcctgggtaacatagtgagaccctgtctctacaaaaaaaaaaaaaaaaaaaaaaaaaattttttttcttttgagatggagtcttgcactgtcgcccaggctggatggagtgcaatggtgcaatcttagctcgctgaaacctccacctcccagcttcaggcaattctcctgcctcagcctcccaagcagctgggatacaggtgcacaccgccatgccaggctaatttttttttttttttgtacttttagtagagacggggtttcactatgttggccaggctggtgtcgaacttgtgatctgcccacctcggcctcccaaagtgctaggattacaggcctgagccaccgcgcctggccagttttttttttttttaattagccaggcacagtggtgtgcacctgtagtcctaactactcgggaggcttacgtaggaggataacttgagcccaagagttggaggctgaagtgagctatgattgcaccactacattctagcctgggtgacaaagtgaggctgtgtctctaaaaaacaggacagattgccagcttttggccacagtcccaaaataacatgaccaaagaagagatctcagcttccagtacccagtgacaggactggcttagagccagtggcatttcctcaaaaacttaagactcctcgaagggccaatagatagcaagtttatcaggaaatgaaggctcagggaggggaagtgagggtttcaaagttacgaaacagctgagacttgtggccacaggtctggaagacaaggtcctagccaaaatcctgccgtcttactattttctccagagattggtaatgatcgtatgtgggatataaaaatattttttacaaaagaaaagataaatattttttcc

SEQ ID NO: 432 - DNA, 1050 bp, Homo sapiens
ggggaaatgtggttctagtgttgttgatttcgcatcctttccacaattcctctccctcttgaagctggaaatctggaatttttttttttttttttttgagatggggtcttgcactgtcgcccaggctagagtgcagtggcacgatctcagctcactataacctccgcctcccgggttcaagcaattctcctgcctcagcctcccaagtagctggcattacaggcgctcaccactgcacctggctaatttttgtaattttagtagacttcaccatattggccaggctggtctcaaacttctgacctcgtgattcacctgcctcagcctcccaaagtgctgggattacaggtgtgagccaccacgcccggcctggatttttaaataatacttactgctttgtaaaggttacaagctaactttcaaaatctgaaaacattaacaaaagatatttgaggccaaatatagcctgagaattgtctgtcttatttgtaaatgttacttcaattaatattctgtgtatcttatgaaatattacgtagtctctgtattttacaaaattatatgtatttttttaaatgttaatttttttttttttttgagatggagtctcgctctgccgcacaggctggagtgcagtggtgtgattttggctcactgcaagccctgcctccttggttcaagcgattctcctgcctcagcctcccaagtagctgggattacaggcatggaccaccatgcctccctaactttttttgtatttttagtagaggcggggtttcaccatgttggccaggctggtctcgaactcctgacctcaggccatctgcccgcctcagcctcccaaagtgctgagattatgggcttaagccactgcacccagccaattaatttttttaattaattaattaattatttttttgagatggagtatagctctgtcacccaggctggagtgcagtggcgtgatctcagctcactgcaacctccgccgcctgggttcaagagattctcctgcctcagcctcccaagtagctgggattacaggcgcct

SEQ ID NO: 433 - DNA, 1059 bp, Homo sapiens
tatgtttttcaaaaattaaacaaacattaaacagttggctgtatataaaatccacatttctagcttctctcttttttttttttgagatggagtttcactcttgttgcccaggctggagtgcaagggcgtgatcttggctcactgaaacctcctgggttcaagtgattctcctgcctcagcctcccaagtagctgggattataagtgcctgccaccacacatggctaattttttttgtatttttagtagagacagggttttaccatgttgaccaggctggtctcaaactcctgaactgaggtgatctgtccgccttggactcccaaagtgctgggattacagatgtgagccctgcctttagcttctcttgaaaatctgatctagcaaatctaacaaatgggactcatgtaagttagtcatatgtaggtctcattcacaatgatggaaaccttagtaattagagctgtgtgaaatgaaatgggttgcttttgtaataatatattatcactggtagtactcagacataggttataggtcagggaaatagaacaatgattcagagtatcagaggagagatcagactaataatctaaatctattctgattcagcctatggattctgtttgataaagtgggaagttatatggaataagcagaatgagattctctacgcatttattcctccccaattcattacatttggagtgaagatatggttagaagagacatcatacactattactgccagcgtttctggttttcaaatcaaagcctaaagggcagaccctaaagccttaggtattattcgttcttgaagccaagtttcagaaatacgttgctttccttcttgaatgagtagtagaggagaaaacaaaaataaaacaattaaaaaagaattactttgctttccaaatatacttgagtgttctcttcaaggacaatgaaaattatgtaagtgctcattttactttattttggatgacgggtagctgacatgccaaaatgccactctgttttaataattaagtggttctttgggttctgtttactgcattcatct

SEQ ID NO: 434 - DNA, 1060 bp, Homo sapiens
aacacataacaatatgccagcatcatcacttttgcactttggggccattattaggtaaaataaggatgacttgaccacaaacactgcaatatctgctactaactggcagtgtatacagtgtggatatactggacaaagggatgattcatgtcccaggtggaatagatggttagcgcgatatttcatcatgttacttggaatagtatgaaatttaaaacttatgaattgtttttatctggaaatttccatttaatattttcagaccactgttgtccatgggtaactgacactctgcaaagcaaaactgaataagggagaaatcgtataaaagtagaattgctggattatatagtaattctttttaatttttttaggaactactattctgttttccacagtggctgcaccattttccattcttatcagcaatccaccaggttccagatcttagccagcgtgtgcttttattattcttactccatcctagtaggtgtggagtagtatgtcactgtggtttttaaaacttttttttttttgagatggagtctcgctctgtcgcccagggtggaatgcagtggcacaatctcgcctcactgtaacctccaccttccaggtacaagcagttctcctgcgtcagcctcccgagtagctgggattgcaaggatgtgccaccatgcccagctaattttgtatttttagtagagatgggatttctccatgttggccaggctggagggtcccacccttagataatctccccacctcagcctcccaaagtgttggaattacaggcgtaagccaccgcgcctggcctaaaacttttttttttttttttcttgagatggaatctcacactgtcgcccaggctgaagtgcagtggcgcgatctcggctcactgcaaactccgcctcccaggttcatgccattcttctgcctcagcctcccatgtagctgggactacaggggcccgccaccacacccagctaatttttttgttgttgtatttttagtagaggcggggtttcactgggttagccaggatagtctcaatctcctgacc

SEQ ID NO: 435 - DNA, 1099 bp, Homo sapiens
ctggtaaaggttctcaggaacaaaagagggcacaaataagacaatattaaggatgaagaaagtacacagtcacagataactgatttaaaagaacgtgaacaggccaggcgcagtggctcatgcctgtaatcccagcactttgggaggccgaggcaggcagttcacctgaggtcaggagttcgagatcagcctggccaacatggtgaaaccccgtctctactaaaaatacaaaaattagccgtattaggcgtggtggcaggcacctgtagtcccagctactcaggagggtgaggcaggagaatcatttgaatctgggtggcataggttgcagtgagtcaagatggtgccattgcactccagcctgggcaacaaaagtgaaactctgtctcaaaaaaaaaaaaaaaaaaagaagaaaaatatttaaaaatacagaaacaaacatttttcacagaaggggaaacatatagctaataacaacatgaaatctaacctcattagtaatctgggatatgcaaataatcatctctgtgaaatactttatgacacccagtagattgtcaaaagtattggtcaagatatttgtcagtggcagtactatggaagacaactttggcactagctggtcaagttaacatttatttacctacaactgagtaattcactgcttagaacagcagttcttggctggacgtggttgctcatgcctatagtcccagcactttgggaggccaaggcaggtggatcacctgaggtcaggagtttgagaccagcctggccaacatggtgagaccccgtctctactaaaaatataaaaattaaccagttgtggtggtgtgcgcctgtaatcccagctactcggaaggctgaggcaggagaatcacgtgagcccaggaggcagaggttgcagtgagtcgataccgtgccactgcactccagcctgggtgacagagtgagaccctgtctcaaaaaaaaaaaacagcatttctcaaagtatggtctgcagacccctgggattacgggtgggagccactgtgcctgatgtgttcctgttttattaaagattaaattctgaagcaataaaagttacaggagcttgtcc

SEQ ID NO: 436 - DNA, 1048 bp, Homo sapiens
taaaaggtataaggaagataagcacccttttggagtgatccagccaggggaaaattgctgatgcaagagaggaaatgagttgctagagtggtgttgtgagtagaggaggggagctgaggcctgcccaagaagggggcttggctgtggtaaccacatggctaggtctgtgtgactggaggagaggacggggcaggtggactggtagatgtgcagcttgtgcccctgattctctagtttcttctgtgttttgagatttgatgagaacgatgaaatagttgtctggaaggagaggagtgtgaatagcatatgcattgtattgggattgctggtcttcctgaaattggtggccatgaatttaaagtgagactcttcaagtagggttgttatagtactggtgtaaagcaggaaggtgctttactagggttgcagtactactggggaagggccaagagagttgagggtgtaagaaatccaagccaggtaatgtagttattttaaaggagagtggaaggatggttgagtcaatggattggaggtcctatagggtaagagactttctgaggatcacagatactgattggaatgagctaaaaagataggtgatggtagtcctggactgggatgctggaaattgagatagtgggtgtgctctctggtagtgacaaagtctagatctgcgctgtccaagataaattcgtctctagctaattgacatgtggccagtttgaatttgaacatgctataaatgtaagatacacatcagcttttgaagacttaagcaaaaacaaagaatataaaacatctttttgtgagagagtgtctcagtcacccaggctggagtgcagtggcgtgatgtcctgcttccaggttcaaacgattctcctgcctcacagcctcctgagtaactgagattacaggcgcatgccaccaaactggctacttttttgtattttttttttagtagaaacggtttcaccatgttggccaggctggtcttgaactcctgacctcaagtgatctgcctgcctcagcctcccaaagtgctggg

SEQ ID NO: 437 - DNA, 1632 bp, Homo sapiens
gtggccccagctgggtttcccaggtcaggaatgtgggccccaggcaaggtgcagcctttgctcacagctccatccatgtctagaccttcaggccagtctgcagatgaggttccctacctttttcttctcttcattgaccaaatcaaccaatcactacagctgctctgcttctgctttccaaagtagcccaggtcctgggccagatgcaggggaggtgcctatccatgagtgaaggccagtgtcttcctcacctgggtgggtcccacacttgtgacctcagttttaggaccaagatctgtgttggtttcttagattgctagcttttcctccaggggaccacagcaggtgaagctcaagagcgcatggctctgctaatagtaaattgttttcagggccttgtccagctgagagcttcatgtccaccagattctgagaggtgtcagcagcactttttttttttatttgttgtttgttttccatgaggttatcggaccatgggctgagctcaggcactttctgtaggagactgttatttctgtaaagatggttatttaaccctcctccaccccatcacggtggccctgagggctgacccggaggccagtggagctgcctggtgtccacgggggagggccaaggcctgctgagctgattctccagctgctgccccagcctttccgccttgcacagcacagaggtggtcaccccagggacagccaggcacctgctcctcttgcccttcctgggggaagggagctgccttctgtccctgtaactgctttccttatggcccagcccggccactcagacttgtttgaagctgcactggcagcttttttgtctcctttgggtattcacaacagccagggacttgattttgatgtattttaaaccacattaaataaagagtctgttgccttacttgtttctctcctgacctgtgtattcctttgtttctggatctgatccattcagccccttccatcatcactgacttgttcaggtctgctgcagagcgcccatggtggttccctggtatcttacatattccacagtgtctttgagcagtcgccacagcctcaggatgctggcatattcacttgagctgcctgagtggagcccttggcaaagttggcaagacccttgcctcagagaggatcacacacacacaaaaaagttttccctgacctgggggctcacaggctagtgaagggaaaaggtacttttagctatagacaggtcaatggtgctgagagcagagaggaggcccctgcccccttcagcaaggtgagggggtgatacctggaatggccttctgaaccacagggcaggtagaagatgaacgtcatttagtgattaaatggtacagctgggaagcaggtccatgggactgggagagggggtgaggctgggcccagagtctgggtaccaggttaaggaatgtgggctagatccagagggcagggggggcaactgaaggtgtttcaataggaaattgataggctccagcagtaaggcaaaaggcatggagccaggcataggccatttgaggcccaggttaagaggggtggacactcatcactgctatttgggtctgagctgtgggtaggctcctatagccctggcctgccc

SEQ ID NO: 438 - DNA, 1023 bp, Homo sapiens
ccccacttccctccttcgctctcttcgcctcggctgcgactggcggctaaggcaggcccagggaagctagggagatgaatccaggagtccggcctctggggttgtagcaggggtcggggttagagggtggatgtggagcaggaaatgaattcgaggcgagggtcgggaaatccatggaagggcggggccggctacctacccagagacgccgccatggcaacgccgctgtcttctacttccgggaacgaaggggcggagacccataatccggaagtgacctcgaaaccttttccggtcttactcacgttgcggccttcctcgcgtcacagccgggatggtgagtttcagagttaggggtattgcagtgggggtcctgggctgaggctggggcccaattccgagcactgacgttactgtcttgtccccacagaagccgatcctactgcagggccatgagcggtccattacgcagattaagtataaccgcgaaggagacctcctctttactgtggccaaggaccctgtgagtgttggctggagggggtccgggaggggcgggatccttctgccaggacgatgggtggacacgccagttttgccgttagcggggaaccaaagagcagcccattgtgagaagtagggagaggccatgccgggggtaggttggcgaaagtattctaccgggaaaggtggggaagaactctattggccgagtgcggtggctcacgcctgtaatcccagcactttgagaggccgaggtgggagggtcgcttgagcccaggagttggagaccagcctgagcaacgtagtaagacccatctctacacacaaaaaaattagcctgacatggtggcctcgcgcctgtggtctcagctacttcggagtctgaaacgagaggatcgcttgagcgcggtgagctgagatcgtgccactgcactccaagaaaagcaagagaccactgtggaaaggggataaagatgagggtcagcttgcccagagaacgggatgcgacctttagggata

SEQ ID NO: 439 - DNA, 1026 bp, Homo sapiens
ctcggcctcccaaagtgctaggattacaggcatgagtcaccacacccggcctggccattttcaagatgagaaaactgaagttcagaggagagaagcactgtatttgagatcatatagtgagacagtggcagagcaggcaccagaacccagacttccttactaccagctgctcccacttggataagacatcagagatactgtttttctggactggagctcaacttggccttttattctttggagccgttgggagtcccaggagagctggagctaacaaatgaggatgcctttacaagccgcctgactcctctgttgcttcccttcaggaagggaggagaatccaggagttggtctttttaccagctccctgctgtttcccaagaaataaacagaagagggcagaatcagccttgctacaggctgctgagggttcctggggcaaaataggaagccattgctcttactgggatgtgtactatcctgtggtttgacttttccagatcgtcaatgtatggtactctgtgaatggtgagaggctgggcacctacatgggccataccggagctgtgtggtgtgtggacgctgactgtatccttattttgggtctgagtccgtgttgctagggtctgtcagcgatggagaggctgagttgggagttgggagttgggggtgctgttgagggcctagagaacgatacctcctactccctggtctcttcactgactgaggaaacattcaggacaaattccagttctggataaggaggtaagaggggtagaaaggctctttggggctgaacagggagatgattcacttggcatcccaagaggacaagggctcgggtgaacttcgtcatatttcttaacaactcttcaggggacaccaagcatgtcctcactggctcagctgacaacagctgtcgtctctgggactgtgaaacaggtaagctgggttcattcacctttttagcaaatattgaggacctacagtgtacctgtttgagtaaacaggtcctaggaaaataga

SEQ ID NO: 440 - DNA, 1050 bp, Homo sapiens
tgttatctggtagcacagtcctcccactttgttcttctgaaaaagtgatttggctatttgccctttcacttttttttctttttctttttctttttttttttttttgagacagagttttgctcttgttgcccaggctggagtgcaatggcgcgatcttggctcactgcaatctccgcctccctagtagctgggattacaggcatgcgccaccacggccagctaattttgtatttttggtagagatggggtttctccacgttggtcaggctggtctcgaactcccaacctcaggtgatccgcccgccttggcctcgcaaagtcctgggattacatgtgtgagccatggcgcccggcctctttttctctcttttagagacagggttttactctgttgcctgggctagagtgcagtggcacagtcatagctcattgcagcctcaagctcctggactcaagtaatcctccctcctcagcctcctgagtagcacttctttttaatttaattacgattttgatatacatttcactaattcaccaaggtctatgtagatctgattctgttgtttgttgttgtttctgtaggatcctggactgtgtttcctgtgtattttgtgatttttgactgtgggataatgcagtaggccactcttatctgaggggggatactttctagtatgcccagtagattcctgaaaccatggatagtactgtatcctatatatgttatattttttctaatacatacatacctctgataaagcttaatttataaattaggtacagtaagaaattaacaataataaactaggacaattatagcaataagccgtttacagtttcatgcatagaagattcattcctggccgggcgtggtggctcatgtctgtaatcccagcactttgggaggccaaagccggtggatcatctgaggtcaggagttcgagaccaccttgattaacatggtgaaaccccatctctactaaaaatacaaaattagccagacgtggtggtgcatacctgtagtcccagctactcaggaggctgagacag

SEQ ID NO: 441 - DNA, 1028 bp, Homo sapiens
ggttaagaaggaggctagtataccagttaggagattgttgccagaatccaagtcaaaaaaagtggtagcccaggatggaagtggacagatttgacagataatacattggtggtagtttcaagagaagttgaatgtagcggatgaaaaaagaagaatcaaagatgattcttgcctggtgtggtgtggtggctcatgcctgtaaccctggcgctttgggaagccaaggccagcagatcacctgaggtcaggagtttgagactagcctggccaacatggtgaaaccctatctctactaaaaatacaaaaattagccgggcgtggtcgcgggtgcctgtaatcccagctactcaggagtctgagacgggagaatcgctgaacttgggcagcagaagttgcaatgagccgagatcgtgccattacactccagcctgggtgacagagtgagactctgtctcgaaaaaaaaacaaagatgataccctggcttcgatcttgaacaactaggtggttggtgctgagaataggaaacccgggaaagaaggacataggaaaaatagggtagtagatgcaatcaatattatggaggcataatgagagagattggcaatggattgaaacaggaaggcaaaaaaggacagagtttaaaatgacacttaggttttcagcctgagtggatgttggtatcattaacaaaaataatgaaagagaacttttggaagttaagtggaatttgagtgcttctaggctctcaacaacaaattgttgagtccagttgaatttgaagtgcctttagggtttgtgggtggagcagactgagaagctatttgaactgtgaatctggagctcagaactaagatcaaaatggagtttgtgcagtcatctgtgtagaagggatagccagaccaaagttttgatgacattaggaagagagtaaagggcttagtatagtaaaaaaacaacttggtatttggagctaagtcttttttctttcactgtgggtgttttggtttgcctttttagaaacagggtc

SEQ ID NO: 442 - DNA, 1053 bp, Homo sapiens
tgggtttacaggcgcccgccaccacactcagctaattttttatatttttagtagagatggggttttaccatgttagccagactggtctcgaactcctgacttcaagtgatctgccccgctcagcctctcaaagtgctgggattacaggcgtgagccactgtgcctggctatgaacttttttttgtttgtttgcttgttttttgagacagagtctcgctctgtcgcccaggctggagtgcagtggcacaatctgggctcactgcaacctctgcctcctaagttcaagtgattctcatgctgcagcctcctgagtagctgggattacaggagcctgccaccacgcccagctaatttttgtattttttgcagagatgggatttcgccatgttggccagactggtttgaaactcctggcctcaagcaatcctcccacctcggcctcccaaaatgctgggattataggcgtgagccaccgcacctggccatgaactttaaaaggtgtttttttgttttgttttgtttttcagagatggggtcttaggaatctgaacacattctggcctggagagattgcccaataacttattttattttatttatttatttatttatttatttatttgagatggagtctcgctttgttgcccaggctggaacgcagtggcatgatctcagctcaatgcagcctctgcctccgagttcaagcaattctcctgcctcagcctcctgagtagctgggattccaggcacctgccatgacgcccggctaatttttgtatttttattggagatggggtttcgctgtgttggccagggtggtcttgaactcctggcctcaggtgagccacccacctcggcctcccaaagtgctgggattacaggtgtgagccactgcgcctggccccgataattattttaaaaaagagaaaaagacagggtctcactatgttgtccaggctagccttgaagtcctaggctcaagcgatcctccagggcttagatctttaaaaggttgttgtaagaatcatatgagatagcgtttaaagtgcctga

SEQ ID NO: 443 - DNA, 1815 bp, Homo sapiens
ttccccaaaactgaaaagcccttgatctgtttaaccctctctttttgcagaagaggaaactgaggttcacaatcgggcagtgaaaagccaaaagtaaaacctaggctttctacaactctgcctgctcctacaaaaggtgagacaacccttctgtgtgtccttgtccagctcagcatggggttcagggctcagagcccaggctgggccctgctcctccctgacccctggggatcctaaggaacatgctggcccagctccccttcccacactgccagtttgggctatttcccccccagtgactcacactggctgccggagagagtgggcagctgttctgagcccccagagcccagtacaggccctgacttgccccccaagttctgcagccatatttgggaatttaatgtttttcctccttggggactctccttcccttaatcccttccttttttccctgtcttcaaccatttttccttatcttcagcctcaccctccctgatggcttcttccataggcagacaaacaggctctagtctttcatatctttgaaaaaaagaaagccctccctcaactccacatccttcgccagctcccctctgcagccagcattcttgaaggagttgtatacacacgttgtttctacttcctcactcagcccctgcaatctggcttcctcccccaccattccacaggaacagcctgccaaggtcactgctgacctccttgttgctaaatccaagggatgcttaaaagtctttatctgccttgaccccttagcagtggccagctttgacacaaatactccttcctctttcagatacttttaggcccttgtatttctggacactgtgcacttttgattttcttgctatcttatgggttgctgccacatggcaaatttcttatcctttgctcactgcctaatcatggttgttcccaggcctgctacagtctgtccccagggagtctcatcagctcccatgccttcagcatccagcccatgtcagaaactcatgtctctttctcagtccagccctctccccaaccccacacctgcctcctggacccctcctgctggatgtcccacctctcaggaaacaggctgcatacctgccctccctccatgttccccagcttagccatctcccagttgtctgaacctgaaatctggacttggttctagattctgccctctctcgcctttttttttttttttttttgagacagagtcttgctgtgtcgcccaggctggagtgcagtggtgcaatctcggctctctgcaacctctgcctcccgggttcaagcaattctcctgcctcagcttcctgagtaactgggactataggcgtgcaccaccatgcccggctaatttttatatttttagtagagatggggtttcaccatgttggccatgctggtcttgaactcctgacctcatgatccaccctcctcggcctcccagtgctgggattacaggtgtgagccactgtgcccagcttctctcacccttttcatcctcaagcagctatgaaaacctgtcctttcaggacgtacctaaaatcccatagcttctctccacttccgccaccaacacttgagccaagggcccatcacctttcacctcctgcagcagcctcctgacctgtctccctgctgccactctcaatcccctgtgtggtctgttcctatagggcagctgggtgtgtctttccaacataggaatatgtctccctgcaccatgtctttagcatcaagttcacccaacccatgcccctgccaaccccagtattggggcattcctcagtctttgcctgg

SEQ ID NO: 444 - DNA, 1111 bp, Homo sapiens
gggactacaggcgtaagccaccacatttggctaattttttgtattttttgtagagacagggtttcactatgttgcccaggctggtctcgaactcctgggctcaagtgatctgcccatctcagcctcccaaagtgctgggattacaggcaaaagccaccacacccagctaaaactttttttttttttttttttttttaatataagaatttaaaactatacattttcctggccgggcgcagtggctcatgcctgtaatcccagcactttgggaggccgagacaggcggatcacctgaggtcgggagttcgagactaacctgaccaacatggtgaaaccccatctctactaaaaatccaaaaaattagccgggtgtggcagcgcgtgcctgtaatcccagctattcgggaggctgaggcaggagaatcgcttgaacccgggaggcggaggttgcagtgagctgagatcgcaccattgcattccagcctgggcaacaagagcgaaaactctgtctcaaaaaataaaaaataataaataaaataataaatgaactatacgttttcctctaaactgcttgaactgcaaacaacacattttgatttgtgtagagtattctataaatgtctatttatttagaagtttaatgtttaatttccaagtatttcaggattttcatgtgctattgacttctagtttgattgtatatggtcaaagaacatactctgtgtgattttaatcctttaaatatactaaaaacttaggccaggtgcggtggcttacgcctgtaatccctgaggctgaggcaggaggataacttgaggccaggagtttgagaccagcctgggcaatgtaggcagacccctgactctacaaaaaacttaaaaattagccaggtgtggtggcatgcacctgtggtcctagttacttgggaagatgaggctggaggattgcatgagcccagaagtttgaggttatagtgagctatgattgcagccctgcactccagactgaaagacagagcaagaccctgtctctaaaattaaaaaataaaaattttttaaaaaattataacatgttttatggctcagggtatggtctatcttgattaatgttt

SEQ ID NO: 445 - DNA, 1057 bp, Homo sapiens
ttgttgcccaggctggagtgcaatggcaagaccttggctcactgcaacctccatcccccaggttcaagcgattcttctgcctcagcctcccaagtagctgggattacaggcgcacgccaacatgtctggctaatttttgtatttttagtagagatggggtttcgccacgttggccaggctggtctcaaactcctgacctcaggtgatccacccgcctcggcctcccaaagtgctaggattacaggcgtgagccaccgtccccagcctgcaaaagtatttgttgcagcattgtattagtttgttctcacactgatacgaagaaatacctgagactgggtaattcataaaagaaagaggtttgattgactcagttctgcattgctggggagacctcaggaaacttacaatcatggcagaaggtgaaggagaagcaggcatctttacagggcggcaggatggagtgagtgccagcagaggaaatgccagatgcttacaacaccatcagatctcgtgagactcactcactgtaatgagaatagcatgggcggagctgctcctatcattcagttacctccacctggtcctacccatgaggattacaattcaagatgagattttgggtggggacacagccaaaccatattaagcattatttatcatatcaaaaaaatgtagtcatgacccaactaccttgtttcaaagagaacagaggaattattatattttaactgagaggatatgctagtacaggttgagtatccctaacccaaaaattcaaaatctgaaatgctccaaaatctaaaactttttgagtactaacttgatgctcaaaggaaatgctcactggagcattttggattttggattttccaattagggatgctgaacctaagtataatggaaatatcccaaaatccaaaaaaatataaaattcaaaatgcttctggtcccaagcattttggataaaggatactcaacctggctgggtgcagtggcttacccatgtaatcccagcactttgggaggccaaggtgggcggatcacctgaggtcaggag

SEQ ID NO: 446 - DNA, 1052 bp, Homo sapiens
aatatggttgtccatctctctaaagaaaagcaggctgggcgctgtggctcatgcctataatcccaatactttgggaggccgaggcaggcggatcacaaggtcaggagtttgaaaccagcctggccaacatggtgaaacctcgtctctactaaaaaatacaaaattagccgggcatggtggcgggtgcctataatcccagctactcgggaggctgaggcaggagaatcgattgaacctggaaggcagaagttgcagtgagccgagatcacaccattgcactccagcctgggcaacaagagcgaaactccgtctcaaaaaaaaaaggaaaacaaactaggaggttcttaccatatgtgagtgatttctaacgtttatgtagtgctatattatttataaagtactctctcatgtattttctcagtgaggtggatactatctccgatttacaaatgaggaaattaaggtcagaaagtctgagagagaaaactgatgattggacaggatctgattttaaacaatcctctttcagccttctctccctgtatgtctcctgaaatggcaaagaatagaagtcaaacctcaccagttggcagtcattataaaaataagccaatcagaattagaaagtatgaaaggaggaattgaatcattttcaacaacatacaatatcttgatctagagattttcaaataatgctaagtaatgtccctacagtacctattggtatgtttttatgtcacgttatttatatgtaaatttaaagtataaaactatttgaacaaattattcacttaaatatgttgaacatttttgcttctcttgtttatataatattttcaaaacaaacttttctcctagtatacaaagtttaaacttctcccctttgggctgggcccagtggctcacgcctgtaatcccagcactttgggaggctgaggcaggtggatcaccgaggtcgggagtttgagaccagcctgaccaacatggagaaaccccgtctctactaaaaatacaaaattagccgggcgtggtggtgcatgcctgtaatccca

SEQ ID NO: 447 - DNA, 1030 bp, Homo sapiens
ctagaaaacacctgaaggtggaatggctttcttataaggggtttgggcatagtgagggctaaaagattaatcctatgtttcttacgtgtaggtagcttatctctagtagaggggataaaatagcttgcatttattggggctgtatttggtgctacatatcggggatccaaattagttataattagcataaaagtggtacagataaaattatcagaggaaggaaaatttgcctcaatttgcctcatttcttaggaagaaatgacaatgcaaaaaacaaagaggagggtaaatttagatgatattaacatagttttaacaagaccattgtgccatttggaataatggattttctggtacaaaagtaagttttctgaattacattcaaaagcgattgtatgctaagtaaattccttcaaaacttggatctttaaaagttaagataattgcaaaatgttattagactatgatgtagctcaacaaatgatagaaatttggcagaaattatactagtaacttaagaatgaggctgctacctttacagtggcataaggaaaaatagggaaatgtgtcctagggatgttacacaaaaccatagtaaaaacctagaaattgggagttagaagctgctttgtgtgttttttgttttctggttttttttttttttttttttttgtttttgtttttttttttgagacggagtctcctctcttgcccaggctggagtgcagtcacgtgatctccgctgactgcaagctccgcctcccgggttcacgccattttcctgcctcagcttcccaagtagctgggactacaggtgccggccactacccctggctaattttttgtatttttagtagagccggggtttcaccgtgttagccaggatggtctcaatctcctgacctcatgatccacccgcctcggccttccaaagtgctgggattacaggcgtgagccaccgcgcccggcctagaagcttctttatcatgaccaggagttcccacatgcaattgatcatcagaattgcttg

SEQ ID NO: 448 - DNA, 1237 bp, Homo sapiens
cttactgcaagctctgcctcccaggttcacgccattctcctgcctcaggctcccgagtagctgggactacaggcgcctgccaccatgcccagctaattttctgtatttttagtagtgacggggtttcacggtgttagccaggatggtctcaatctcctgacctcgtgatccgcctgcctcggcctctcaaagtgctgcgattacaggcttgagccaccacgcctggccttgaaatgttttttaaatgcaattttccatttctttttttaacctgtcaattttttttttttcttttttgagatggagtctcgctctgttgcccaggctggtatgcagtggcgcgatctcggcccactgcaagctccgcctcctgggttcatgccattctcctgcctcagcctcccaagtagctgggactacaggcgcccgccaccacgcccggctaattttttttgtatttttattagagacggggttttaccgtgttagccagcatagtcttgatctcctgaaccctgtcaaatttaacagtgagggatgtgtgcaactttgataacactgatgttaataagttctgataacccagtaacattgggccggcccaattttcaattttgaatacgctaagttcttactactgtggttttctttatggtttaggaggcctacgtttaatatctactcaatactgaaataaccaatgttatgtagtggttaccccttgctctgtgggctctgtgccaactgtggcttctcctcctttgttattggtgcctcttttctggcagctatgcttctttttttgtttgtttgtttgttttttgagacagagtctcactctgtcgcccagactggagtgtagtcgtgcaatcttggttcagtgcaacctctgcctcccgggttcaagcaattctcttgcctcagtctcctgagcagctgggactacaggcacgtgccaccatgcccagctaatttttgtatttttagtagagatgaggtttcaccatattggccatgctgatctcaaactcctgaccttgtgatccacccgtctcggcctcccaaagtgctgggattacaggtgtgagccaccgtgcccagccacttttttgggggtggtggtcattggcctttgcagttgtatatgtgcatatctcagagatatgatgggggttcagttcccaatcactgcagtaaagcaaatatataaagcaaaccacacaaattttttgtatgt

SEQ ID NO: 449 - DNA, 1289 bp, Homo sapiens
ttactcccaggtgtgattttaagacttgtctatacattatcattttcagctgcctgctcttgactgtatttggtcataccactggtattttaaactctgctaaacaaaactgaccctctctcccacttctccttttccctctcctccttctttctttctttttgtatgactccaacattttcctagctaaccagacttgaaaactcaagaattttccatgtctgtttacttctagttctagttcacttccagatttcataccatctatctgcggtgtttctcccatcttatcatcttacaagtacaaatttacatacccaaaggaggtatatcatatcacagcatcaaatactactatttctccatgaaagctgtctagatttcaaaaatgttccctatctctatctcaaagaatgtgaacaccctccttaaattttctctttttttttttttgagatggtctctcactttttcacccaggctggagtgcaatggtgcaatctcggctcactgcaacttccacctcccaggttcgatcgattctcctgcctcagccttctgagtagctgggactataggtgcgtaccaccatgcctggctaatttttttgtattttcagtagagacggtttcactatgttggccaggctggtctcaaactcctgaccttgtgatccgcccacctcgacctcccggagtgctgggattgcaggcatgagccaccgcgcctggcctcttaaattttcaaagcacttcaatttaataaaaataactgtggtgtctcatacattaatatttttaaaatagttatattcggccgagcacgttggctcacgcctgtaatcccagtactctgggaggccgaggcgggtggatcacgaggtcaggagatcgagaccatcctggctaacacagtgaaaccccatctgtactaaaaatacaaaaaaaaattagccgggcgtggtggcgggcgcctgtagtcccagctcctcaggaggctgaggcaggaaaatggcgtgaacacgggaggcggagcttgcattgagccaagattgcgtcactgcactctggcctgggcgacagagcgagactccgtctcaattaaaatatatatatgtatatattccggagataggtggtggttatggttaatgcagtgtgagtgtacttaatgccactgaactgtacacttaaaatggctaagctgataaattttatgttgtatggagtttgcgacaatttggaggtggaagacagtttcttgctctgttgttcaggctacagtgcagt

SEQ ID NO: 450 - DNA, 1029 bp, Homo sapiens
ccagttcttggcacagagctctccaaaaacactcggagtttgcagagtgctaggagtgtctttgtcgttcctagtgatccactttggaccacacctgagtttgttctactgtgaggtgattttggtggggcccctagatagcctcatagttggtttagtcagaaaggccaatcacttgatttgagggttaaaacttgtcggcccacttgccaaccttggggttgcagggccagagattgaactctataaaaactcctaatttgatgtgcttctggattggtgaacaactcgacatactgggtgggtagcatgcccagagacttgatggaaactctgcagcccctccccaccttgccgtatgcatctcttccatgtggttcctcagttgtatcctttatttaaaaaaaaaaacaaaacaaaaaacaaacaaaaaacagtaatagtaaaaagctttcttgggttctgtgagtcattccatcaaattatcagacctgaggaggcagtagtgggaaccctgaaatttgtagtcaagtgggatagaagtgtgcaggtagcctgggaccagggaattgcaactggcttctgaagtaaggacagtcttctccaaagctaacttcagatagtgtcagaataggattgagttgtacacccagttggtgtcctaagaaagggtaccccacatttggtgttagaagtaacgtcagaaagcatcacacaattgtatgtattcttttctctggggtcagatcacaagctctttgaaggtaagactatcctgtcctctgcagtacctatcatagtgatatgtgcatggtaggtgctaagagcagtaaattttgctcctgtgaaagtggttcctgtattttaagattatgccgttggatacaggtattctgtcaagcagtagaagtagagtttattctatacaagaacagtttttctcttcaatatatagagattcggaacatattgttttggaagttttaagtgtgcagttcagcagtcttcagtgtatttacagttgtgcaa

SEQ ID NO: 451 - DNA, 3058 bp, Homo sapiens
tctcaaactcatgacctcaagtgatctgtctgcctcagcctcccaagtgctgggattacaggtatgagccaccacacctggcctgactggcttttttatgccaaataatattccatcatatggattggatataccgtgtatccattttagtagttgatggatatttgggttgtttttactttttggctattattaataatgtctggttaggctgggcacaatggcttactcctataatcctagcactttgagaggccgaggtgggcagatcacctgagatcaggagttcgagaccagcctggccaacatggtgaaaccccatctctattaaaaatacaaaaattagccaggcgtagtggcatgtgcctgtaatcctagctactctggaggctgaggcaggagaattgcttgaacctgggaggcataggttgcagtgagccgagatggtgccactgcactccagcctgggagacagagcaaggctccatctcaaaaggaaagaaaaataataatgcctggttaaagaactcaagaatgttggctatcaagacaaatagtatccacactgcagttttgtgggaatgtcctaatcaggcgtctggggatcagctgcttatttttattggaacatgatcatgctaattaatatttcattacccattataggttgtctccggatactttcatccaagagttgaatagttgtaacacagattgtgtggcccaaaagctataaagtatttactctctggcttcctggcctaatctgttgttgaaaccttgagttttagaagaagtcttcatgtttaaattctttttcttgtttttgggcaggcagagaacatttataatgatgaagaccctgaaggaagcgtggatccagaaggacaagggtcctagatatgtctttacttgttgtgattttagactccccttttttcttctcaaccctgagagtgatttaacactggttttgagacagactttattcagctatccctctatataataggtaccaccgataatgctattagcccaaaccgtgggtgttttctaaatattaataggggggcttgattcaacaaagccacagacttaacgttgaaattttcttcaggaattttctagtaacccaggtctaaagtagctacagaaaggggaatattatgtgtgattatttttcttcttatgctatatccccaagtttttcagactcatttaagtaaaggctagagtgagtaaggaatagagccaaatgaggtaggtgtctgagccatgaagtataaatactgaaagatgtcacttttattcaggaaatagggggagattcaagtcatatagattcctactcgaaaatcttgacacctgactttccaggatgcacattttcatacgtagaccagtttcctcttggtttcttcagttaagtcaaaacaacacgttcctctttccccatatattcatatatttttgctcgttagtgtatttcttgagctgttttcatgttgtttatttcctgtctgtgaaatggtgtttttttttttgttgttggtttttttttttttttttttaacttgggaccaccaagttgtaaagatgtatgtttttacctgacagttataccacaggtagactgtcaagttgagaagagtgaatcaataacttgtatttgttttaaaaattaaattaatccttgataagagttgctttttttttttaggagttagtccttgaccactagtttgatgccatctccattttgggtgacctgtttcaccagcaggcctgttactctccatgactaactgtgtaagtgcttaaaatggaataaattgcttttctacataaccccatgctgatgggttttatttagtataaaacatccatcaaacaccagtctctggcttctagaagagtccttcagatgacagttgttgtccatggtctttgactatcaagagcagaattaaatgtaatagtcccagagctgtagaaaagaactttactccttcccagggaaagtgaaagacataaaacactgaatcagaggtggcacagattagtctttgataaggtaacgtttctttgaagtctatctgtagagaactacatggacttccaagagtgtcaaaggcagtgtggtagagagaatttaaggcaagatttaaatttggaaaaggtgcttgaaccttttctcagaggttttatttccccagtatgtttttcactggggcctttacttaggttagaaataataggctttgaaggcctctatcaccagatgcaataaccagataaaattcctgttttttcccaatcgcttagttttttgttgttgttgttttttaactgagtagatcattctgacccagaactactttcatgaggtaagatctttgggaaaatctgaatagcgttaaccattagattcaaatctcaaatggtttcttttcaagtctagttgttttagagtatagtgagaaataccttgacacaattttaagagtaaactatatgggtcagcatatccttgaacaaaaagtagactttgtaaaagtattcatttaaattctaacactcgtggcacaaaagaatggaaattgtaaacccatgtaatggaaattggctatctttttgaccccacatgtgcccctcaaaaatgtttttggtttgggtcaacacaaggcaagatacattctttaaaatactcccagatgtgtccatacattcatccttcactcagtgcatatgtgagggttgttgctggaagacaggaggctcatctttcctttccttggtgcattgagatcagtatcaacagcagatgaaatagaatccagcaaagagttgacatgttctgcctccggccaactctagaatctttttaagcaggtcagccagtatttgcaacttccacaggatgaattgcttgccaagtttctggcactcttgtctggttggaagagtacatccaaagggtacttagtgatcctttgctaagaagttttttgctgtttccgggttacagatttggccatatatttctaaacagcccctg

SEQ ID NO: 452 - DNA, 1217 bp, Homo sapiens
tcgaaggaatttgcaaaactgttacagataatttcagttctttttgattttttgtaaatgttgtgcctattttttatggagtgataaagcctgctgagtgcgtttcgtgctgtgtgcttcacatgtattgcatttgggaaaggttggaaatcaaaggccagggggaagtcttgtccactggaaataatctctgctcttggctgtacctgtcagaccctgcttggtaatggtcttgactttagagcttgaaagaggatgtgggcttgcatctggtgttgcagttttagtggcctcaataaagtaaggctttgtgctcgaaggcagtaggttttctgaggtgagataaaaatagaaagggaaccagtttctgaggttgcaaccaggaggttcgagaacagagagggggtggtaaactgaagtgtgaagaagggggtggacaggtgagagagatgtggaaggacagaatggggtcacagaaaggatggggtgtagaggaactaagaaatagaattagaagatcggaaaaatattcttcccttaaaaatgaagggatatggccagacatggtggctcacgcctgtaatcccagcacttggggaggccgaggccggaggattgcttgaggccaggagttcaagactagactggccaacatagcaaaaccccatctctactgtaaatacaaaaattagcctagcatggtggacgcctgtaatcccagctactgggaggctgtggcatgagaatcgcttgaaactgggaggcagaggttgcagtgagcccagatcacgccactgcatttcagcctgggtgattgagtgagaccctgtctcaaaaataaaaataaaataaaaaaataaaggggtccccatattttaagtggaggttaccagacaagtgctaagaaaggtggtagatggtagacagagaagtaagcaagccttcttttgacagagaagtaataagtaaggctgtctttggaatttcactgaagaacttcagttttatatgaggatttccccccttgcacattcattaaataccatgtttttttagtatagaacttttaggtttagagtactttcataaacatcctattttttctcatgataatctgtgtttgaagttaacagtatttaccccctttttagatgcatgttctcatctgtattgaagttcagagacttgaagtgaattgctgaggtccagtacctcta

SEQ ID NO: 453 - DNA, 1770 bp, Homo sapiens
gtggtgcgatctctgcccactgcaacctccgcctcctgggtttcagcgagtctcctgcctcagacttctgaatagctggggctacaggcccgcgtcaccatgcccagctaaattttctttgtagttttagtagaaatggggttccgccatgttggtcaggctggtctcgaactcctggcctcaagtgatccgcccaacttagcctccgaaagtgctgggattacaggcgtaagccatctcgcgtattgtttttttaataaagtaattgcagggggaaaagatctgaaatttttagattaaaatacacataagacattatcagccagtcacattgtatggaccttacttggatactgattattttttagccttaaaaaaaaatatgacataagataattggaaatctgaactgtatattttatgataaggaattcttgttatttacagatgaaatgatacaatgcctgggatttgcttcaaaacaatctggtaaaggtgggaagtggatggggcaagattagctatgagttgatagtcattggggttgagtgatgggtatgtggtggttcattatactattatgttacttatgtatatgttttactttctttataataagtacttttgaaaatgaggaaatggccgggcgcggtggctcacgcctgtaatcccagcactttgggaggccgaggcgggcggatcacctgaggtcaggagatcaagaccatcctggctaacactgtgaaaccccgtctctactaaaaatacaaaaattagccaggcgtggtggcgggcgcctgcagtcccagctactcgggaggctgagtgaagcaggagaatggtgtgaacccgggaggcagacagagcttgcagtgagccgagatcgcgccactgcactccagtctgggctacagagctagactccgtttcaaaaaaaaaaaaaaaaaaagaggaagtaacatcagacatcagaaagagaatggtttgtacaaattaaaattatctcctcctctctatatataccatatatatggtattgttttgtatacttttgttcccagatctattggaacataagaagctcagaaaagcccatttttttgcatctgaatgtcatgttgtgtaggaattgattattgcaatggttacgaaggatattggtcctattaaggtggcttaaaatattttttccaagagaccaaaagccctctttggtctttactcttgcacagtttgttatagattgtactgaatttagaaggcctgagtttggattctagctctgccatttgctgaccaatcctgtgcaagtctgtcacagatgtagtgggaaaaacattgcatttggaattagacctgggtttcgatccttgttctaacattattagctatgtatactcagttaagttacttcatgcttctgaactttagtttcccaagagggaaaaatctattgaactctccatttggccaaccaagggcttgaactagaccttttgtaaggagttagaatggggggcaatggcccagaaagggcatctaagaaatgtagctgcttaaccccagtgcctgtgataacctgtctgacaaccataaattttcttaagtcaaagaatgttttccatactaaacttttttttctaactgcttcctaaagaaatgaataactcagtcactaatgcagagaaattacttttcatagaggcagctgcttcaacacctagaactctcaacaattgctggaatatagtattggtaaaataaaataag

SEQ ID NO: 454 - DNA, 1043 bp, Homo sapiens
tccataccattttatattatctcatgttggtgtttaattttcagtgttgtttctctagcaagattatacattaagattatacattacgtattatacattatgagggcaggagctataccttgatttgttggaaatcataaagagacatatgcagcttgtggtgtgtgatgattgtagctcaaaaaatatcttctaaaagaatgcatgaactaggctgggtgcagtggctcacgcctataatcccagcactttgggaggccgaggcaggcggatcacaaggtcaggagatggagaccatcctggctaacacagtgaaaccccatctctactaaaaatacaacaaattagccgggcgtggtggcggtcacctgtagtcccagctactcgggaggctgaggcaggagaatggcgtgaacctgggaggcggagcttgcagtgagccaagatcgcaagatcgtgccactgcactctagcctgggcaacagagtgagactccgtctcaaaaaaaaaaaaaaaaggaatgcatgaactaaagttaaagctcagggtgtggtatggagggtcatggagtaggggaaattttatagttaacaaggctacaagtacttttccaaatttttgagttcagtatttaagcatttcttatacttctcagatatgtgaaatactagcattttatcacctttcccatctggaaaataattatagattaggtctgtcattagctgtttaaaaactaggttttaattatacaactaactaaatattcaagtagaaaagtaaaatgatacaaagtccaaccttgacctacctttatggtccctgcgagttataatagtcatcaatttttgtttgtatcttttttttttttcttttgagacagggtcttgctctgtcaccctggctggagtgcagcgatatgatgactgctctctgcagccttgacctcccatcctcaagtgatcctctcacctcagccccatgagtagctggaactataggcgtgtgccaccatgcgccgctgatttttctgtttttttgta

SEQ ID NO: 455 - DNA, 1052 bp, Homo sapiens
tttcttgggtctcactgtgttgccctgactggtctcaaattcctagcctcaagcagtcctcctgcctgatactcccagagtgctgggattacaggtgtgagccaccacacccagcttctcttctttttctcttgattccatactccattttagttttttttgtgtatgactaatactgtcctctgcctctcgatcataaagataattttgcctctgaaacttagttctaatcaatcagcagtatatcacttctctctacaaaacgctatattcctgtttctaatgggctgtttttcttttttctggtttgctttattcaaggactaatgttccgacgttttcacagtcaaatctagaacagcagaagcagctttatctcaggagtgtcattgctcatatagaagacccagaggacactaaccaaggtaacatggtacccagagaaaggcatataaaacatgtgatgtgactttctctttccggtgtaacagcttaaactgggagattgtttagaattttcttaaattcttgagaaagataacttccttacttaaaagattttcacttaaaaggattgcctaaccagataattctcgaagtggtttggttaaccagttttagagagggatctaagcacgtttacaacagtacatgaaaggtgcctccctcatggttgagggctttaacccagaccggtacatttttgctagggatttttttgtctgaaaaataacggaagtggatgaccaggtgctgcttactaatcagtggtttttaaaatttgaaatgttttatttctcctgttaccttcagcatttaaaagcaggcatttcaaacaccattctgcattttggcttctgaataaaagctcttgaaaggtttggctaccttccagatccttcaagttgtgttctccccacttcattagaagatattgcaaaccaaagtgactagattctttctccagctctcaagagagtacagtccatgttatcattcagcctgaactattggctgatgggaaagctcctaaaggggagacttacgggaag

SEQ ID NO: 456 - DNA, 1031 bp, Homo sapiens
tttcttagccctctgcttgtgagatccctttgctagaactattttaggtctgatagaagtagagaaacctctcctctccacctctccccccatcattggaggggcaaatttaaaagaaacctgtctatattcaagctctgtggaacaggcctagtcatgtcattgcttttccctctgtgagctgactcctttttttatatcctaggcagttgacactgatgatatccagttatgttttctctcatttggagcatttaaataaaatttcccaagaaaagcaaagagcagctgttcacactataacatcattttcaatcttttccccattcagcagttcctttcccagtattaccacaacaatctatatcccatgaagaatagctagaataactatagtgaataggcagcatactttagtggttgagagagtaaagtctagtctagagttaacatctgggttcacatcttggcaccactgcttactggctgggtgagccattaaatattgatttgtaaaattgggataatgacaaggcttaacttacatgaaaattatacgggtataaagcatagaacagtacctagctctagtaactaacatttattgaatagttgctgttaccagcaagaaaggatattttttcatactgaagtttttttttttaggtaaaatagcgttatatctagtgtttgtttttaaatcacagccaaaaaatactggaaacagctttgataaaatgttgataaatgaaggtgagtggtgagtacactttctacttttgtgtatatttgacaatttccataattaaaaagttgttttttaagcacgtcttttagggcattcatttttttcagcattacaaattactctaaaaatttcacagacctctggcacttccttctgccttccaggaacccagtataatatgaagtttttctatcacttcccattgcccagtattcctacatccaaaatcataagatttgtatataccttattgcaagggcgggggtggtatgttcttcacctt

SEQ ID NO: 457 - DNA, 1736 bp, Homo sapiens
gcctggtgtggtggcgggtgcctgtagtccagcctgggcaacaaaacaagactccatctcaaaaaaaaaaaaaaaaaaaaagaaatttgaagacattcagtattgctcttaagaagtctgaagtctgttataagtttaacttttatttctttgtatgtcatctgtctttttctctctggaagttctttttgtttgtttgtttgtttttgagacagtctcgccctgttgcccaggctggagtgcagtggcgtaatctgagctcactgcagcctccacctcccaggttcaagcagttctcctgcctcagcctcctagctgggattataggcaccggccacctgcctgtaatcccagctactcgggaggctgaggcaggagaatcacttgaacccgggaggtggaggttgcggtgagccgagatcgcgccattgcactccggcctgggcaacaaaagcaaaactccgtctcaaaaaaaaaaaaaaaaaagataataagcatattggactaaaaactttctttgtgcacctttgtaattcctcccttctgcctatctctgccccctctaatccccaggcaagattgaccactgatctagtgtctactgcagttagtttgcattttctaaagttttatgtgatggaatcatacactatgtactcttttgagtctggcttctttgtctcaagataattattttgaaattcatccatgttgcatgtttatttctttttattgctgagtagtattccattatatagatttatccctaagtgaatgtttacccattcacttagatgggcatttggcttatgttcaatttttggctatgacagataaaactgttaggaacattcatgcacaaatctttgtatatatatgcttttatttttcttaagtaaatatctagagtaaaatgactgggtcatacggtaggtgtgtgtttaactttttgagaaactgccagctgggtgcggtggctcacgcctgtaatcccagcacttttggaggccgaggcgggcggatcacgaggtcaggagatcgagaccatcctggctaacacggtgaaactccgtctctactaaaaatacaaaaaattagctgcgcgtggctcctgtagtctcagctactcgagaggctgaggcaggagaatggcatgaacccgggaggcggagctttcagtgagccgagatagcgccactgcagtccggcctgggcgaaagagcgagactctgtctcaaaaaaaaaaaaaaaaaaaagaaaagaaaagaaactgccaaactgttcccaagtagttgtaccgtttttcatttctattagcagttgtatgaattccggttgcccccagccttaccaacaattgggtatggtcactattttaaaatgtttcccccaactttttaattataaaatacacataatatacacataaccatctttttaaaacctctttataaaaacgttttggctgggtgcagtggctcacgcctgtaatcccagcactttgggaggctggggtgggcagatcacctgaggtcaggagttcaagaccagcctggccaacgtggtgaaaccccgtctctactaaaaatacaaaaattaaccaggcgtggtggcaggtgcctgcaatcccagctactctggaggctgaggcaggagaatcgctggaacccaggaggcagaggttgcagtgagctgagatcatgccattgcacttcagcctgggtgacaagagtgaa

SEQ ID NO: 458 - DNA, 1725 bp, Homo sapiens
accattgcactccagcctgggcaacaagagcaaaactctgtctcaaaaaaaaaaaaaaaaaaaaaaaattacggattatgctttcatgtggtatctaagaaatctttgcttaaaagaaaaggccacaaaaattttctcctatgtttttttctagaggttttatagctttagggattacatttagatctatgatccttttaaaatttattctgtatgtagtgcaagatatggattaaagcctgtaatcccagcactttgggaggctcaggtgggaagattgcttgagcccaagagtttgagaccagcctgggcaatgtggtgaaaccttgcctctaccaaaaaaaaattaaaaggttagccgggcatggtgacatacacctgtagtccttgctactcagaaggctaaggcaggaggattgcttaagcccagaagagggaggttgcattgatgcaccactgcactccagcctgggtgacagagtgtaagactgtctcaaaaaaaaaaaaaaaaaaaaaaacatatatatatatatatgtatatatatatatatacacacacacacacacacacacacacacacacacgtgggaatgtaaggcttattttcttggcacatggatattcaattgcttctttaccatttattgaaaagactgtccattctgcattgaattgcctttgtacctttgtcaaaaatcatttgtctctagaaaaatcaggtttccaggaaaaaaaagactaatgtgttccactagtgttcttatttttcagttgtgttggcttttgtagattctttgcatttccatataaattttagaattagcgtatcaatttcttaaggcttggtgggatttccattgggattgtattgagtctatataaataaataaaactgagagagaattaacattttattttatttttttgagatggagtctcactctgttgcctaggctgtcgtgcggtggtgcgatctcagctcactgcaacctctgcctccgagattcaagcaattctcctgcctcagtctcccaagtagctgggattacaaatgcctgccactacactcagcttaatttttttatttttaatacagacagggtttcaccaagttggccaggctgttctcgagctcttgacttcaagtgatcagccctcctcagcctcccaaagtgctgagattacgggtgtgagcccccgcgcctgactgagaattaacattttaatattgagtgttttgattaaagtcttctctaatttccttcataaatgttttgtagcttttgtacagtcttgcacatcttttatccaatttatcccggagtgtttcatattgtgatgcttttgtaaaatgatttagtttttaaaatttcagtatctgttcattgctattatatagaaatgtaattgatttttgtgtcttggtcttacattctataaccttcctaaattcttttattagttttagtaactttttaatagatttcatcaggttttccctgtaggttatcttattgtcagcaaataaagaaatttttacttgtttctttctgacttggatgccttttattttcttttctggtgctgcctagaacctccagttaagtacaaatgagatcttttctttttgtttgttgttgttgttgttgttgttgttgagacaagaatctcgctctgttgcccagactggagtgcagtggcgtgatctcagctcactgcaacct

SEQ ID NO: 459 - DNA, 1059 bp, Homo sapiens
tatgtttaaagtaaatgtcttatagagagcatataattggtagctgggtcttgctttttttttttttttccagtctcacaatctcagtctttaattggagcattaatccatttacatttaatgtacaatcccatatggctggatttaaatctgccatcgtgttacttgttttctatttgttttttgtttccacttccatctttccctgactcatttaatttttgtagtattttttagtattccattttatctccatacttactgcctatacctctttgttgtatttttattatcttattaaatttattattattattatggagatgggatctcactctgttgcctaggctagagtgcagtaacatgattatagctcactgtagtcttgacctcctggcctcaagcaagcctcccacctcatccttcaaagtgttgggattacaggcatgttatttttactttaaacagtaaattatctttcttttttttttttttgagacggagtttcactcttgtcgcccaggctgtagtgcagtggtgcgatctcagctcaccgcaacctccgcctccaggttcaagcgattctcctgcctcagcctccctagtagctaggattacaggcatgtgctaccacacctggctaattttgtatttttagtagagacggggtttctccatgttggtcaggctggtctcgaactcccaacctcaggtgatccgcccaccttggcctcccaaagtgctgggattacaggcatgagccaccgtgcctggccgtaacagtaaattatcttttaaagacatcatctaaataggaaaaatagccttttatatgcactcacatacttacatttccagtgcttttgattattttgtatagatccaagtttcgatgtgatattattttcctttttcctaatgaacaacttgtaatgtttgttgtagtgcacatctactgatgaagtctctctgcttttatttagaacctgtttattttgccttcatttaaaaaactttttattttgaaaaattatagacttataagaagtttcaagactc

SEQ ID NO: 460 - DNA, 1048 bp, Homo sapiens
caaatatatttttcattttgtcaattatgtttcatttggtcgtgcttttttaacagtagagaaacttttaatgaaatctataaatttttcctaaaaagtgttatggttagaaaaatatttgagtgccataaaatgtcatagtttatgtgtggatggatccatttaataaacgtttttccttaaaatttcacaggatttgcagagtctttgcaagctaacatagacctgaggtgctaacatcataatagctaccactcactgcacacacgctgtgtgccatagcaatgtgctaggtcttttacgttcaatattcctaaaactcagcttcaagctaaattgtattatctgcttttcatagatgagtagtgagccctgaagaagtgaaataatttgcccagggtcacagagctaattgatggattggaattttaactcaactctgcctaactccaaagtatacagtatactttctctacaaagctctactttttgaggcttcaaataaattacatttatcctaaaagtgacattacttttactagaacttgaaaatatgagtctgtagcctactgagactgcttttgattcccgaaagcacagtagataaggtaatgaaaaacatgtaaacgagctgaaaagtctccactgtctagggctttgattttcaaagtgtgcttctcagctgggcatagtaactcacgcctgtaatcccagcactttgagagagcaaggtgggtggatcacttgaggtcaggagttcaagaacagcctggccaacatggtgaaaccctgtctctactaaaaatacaaaaattagccaggcatggtggcaggcgcctgtaatcccagctacttaggaggctgaggcaggagaatcacttgaacccgggaggaggaggttgcggtgagccgagatcacaccactgcactccagcctgggtgacagagtgagactccatctcccaccccactacccacaaaaaaaagaaaaaaaaagtgtttcttagaccaccagcattagcatcacttgggaatttgcttgaaatgc

SEQ ID NO: 461 - DNA, 1050 bp, Homo sapiens
gattacaaggcagggtctcctgtctctcagaccagcatttctcccacaggcctgtggtagtctccaagtgaggtctcttggtctcaaagacctgcctgtgcctttccacagttgtgagaaaatgtccatggatctatgtgatggtggtgaaaggatcacatcccaagtctagctgtgtagggttcgactttgcaactacagtggattcagggaaggctcaattgttatacaattgggagtttagggaggtaattaaagggaatggagttttatctaagccaagagtgttacctccttttctctcataccctttatgatgtaccacaggcacagattaagttgaagactggaaacccccattagcagagctccctgagccccactgactatactatacctagtgctgatttgggggcttttccatcatttggcactagatgggtacagagggcctaggaagtacctctctgaggtttggcttagagtcggtgtgcaactcaagtttcctactttgctgtgcagcctctaaaccttctttccctctgctttcaaaacctacagcagtcaactctaagccctgctcaccggacattttctctccaagcttcttcctggctctggacaggaatgttcgaggtaccccatttactggtttttgctccttggctaatgtcatcattactctttcagcctactgttgggatcataatggtgttcctttaacagcctagaacagcacgctgtgaatactgagctgcagaaagcagcttttgctgttccccttcacttccttccttaccctggggagaaacaagaattgtattcctttggccaggaaaagcacccagccccatccagaggggaaaaccctttgttttaaaaactaagtaccagcctgcatacctatctagtgaggcagcccaagcttggtttgggggagcctcagtaataggatgatggagcagctattttcttctcctacacgtgcacccccatctgtttgagatttcccttccaactccagcttggctggcaggcatgtccctaaga

SEQ ID NO: 462 - DNA, 1068 bp, Homo sapiens
atctgttgaatgaattgtgaatggatgaatcaatcattcaataaactgtgagacccttgagggtctcacatctgttcatatctgtttccctagtacggaacttggcatacagtaggttcagtatatgttggaattaaatagatctttttttttttttttgagatggagtctcactctgtcacccaggctggagtgcagtgctacagtcttggctcactgcaacctctgcctcccgggttcaagtgattctgctgcctcagcttcccgagtagctgggattacaggcgcccgtcactatgcctggctaatttctgtatttttagtagagacggcatttcaccatgttggtcaggttggtcttgaactcctgacctcaagtgatctgcccgcctcggcctcccaaagtgctttgattacaggcatgagccactgtacccggccattgtttctttcatttctatgtctttgacaaggataaaccattttgtttttgtttattgttttatttattttgatgtcaatgtctttttatatcctctgttcacttaatttgggaggtcttgaagttttttcttgcacatagaaatgagcttgcatatgcatgtgtgcatgtatttaatatgatgtttgatacaaatattttttcactctattggtttattgttttagttttgtaattctttgttattctttcatagaagttttgacacactattttgttttaactaagtttgctgtaattaataggaaggaaatctgttactttcttttgtgctctgctgttatagattatctttattacatatatatatatatagtcttatagaaatagaatgtttattagaaaaaatttaacacaaatagtaaaataaaatgattcactaatcccaccattcagagatgactattgttaaatgtactttgatttctactttttttgggtttaatggctattttattttgttttattttatttaacacaaggtcacattctgtcaccctggccagagtgcagtggcacagtcatgctcactgtagcctccacctccgaggctcaagccatccttc

SEQ ID NO: 463 - DNA, 1105 bp, Homo sapiens
actgactctgggaggcagctggggggatagggtagggcctccttaagtgcactgcactttacagcttaccaataaattatgtgaaattggtatcctcatcttccatgtgggaaaactgagtcccagagagggtggtcatttttctaaagtcacacagtgatggagcctggatttgagctgaggtctgtgtggttcccgagaccaggctcttgccactgccccatgagctgcctgctgcctgctcccaagactaccaccacctctcctccaggtaaagactgacagccttccctggctggtaagtttttggacaggtttgtggtgtggcacttgccagcatgggatatgggaccccaggtaagtcttggcttctctctgaacctcaattttcctcctctgtaaaatgagcataataccatttacccagccgggctgctttgtggattagctatgctcatgtgtgtgcactgcctgggacagagctgggtgggcctgtgtgtttgtcaaaatgaatggaactggctactgacatctgtaactttaatttaatacaaattgatcataactcataaaatgggcaacattttaaataaaaatactgctggggtggcccagattctggtagttgaagggttggggtagggctgacaattccttttgcccaagggaggcccgggtggcgggggcagccattttaagaaccccctgtgtttagctcttccggctactttgggatggtgtgttgtgtcagagaccccaagtgcagaatctaggccccaggactagaaagaaaagtcaaggccggggagacatttaggctcagtcttgcagcccactcctccagttcccacctctgggcagggatagagccaaggggcaggacaaccctagatgtggactccaccctctcccgagttcttcacgattggatgctgtggcagaaaaacgcaggtggggcttgctccacccaccctaacttccttctagggaaatgacatttcccagactcccttgcagccaaggttctggatctgacttaagttcccccaaacagaatctcttgtaaaaatttagatttgggaactgagtgaagtgggagaggggc

SEQ ID NO: 464 - DNA, 1047 bp, Homo sapiens
tggagagccccctccccaacctggtggtcctcctgcccccagaggtggcagctggtggtaatgtcttccccgaccccaccctatgatgaacttttggttgggtgcaggcctgcggcccagtgggtcccgtctgagggaaggggcaggaaaggtagtctggtttgctagacctcctcggtgtgagcctcacccctgtagtatgctcttattcctttctgccactcctgccctacgcccgggaggtagaagcactttggacttcggttaagttcctgaagtatcttgctggacaggtcagggcctgctggctccgcaggctgccgagggggatctgaaggccaggcccacaaggtctggggtgactggtgctgtccaaggcactggggcagtgttgggcctagcctctcatgtgtcccctaccccagcatttcttggaggggagacccttctagtctcactcctggtttgtgtcctggctccactagacagagtgagctcccagaagccagagtcgggggttgaaagctggggttaggggttcagggctgtggaacatggcatgtcttggccagagggtaccaagccaggtggtttttagatggaggaactgaggtccagagagaggaagtgacttgcctgaagtcacgctaccaggtagaaggagactgagaccgggacctgggtgttcaggcttccactgctgggctccctccactgttctccatgacgggcctggacccctggaagatccgttttgaacagaactggactagaatgggacagcacgatcccttcaccccctcctacccccgccatcataatctttcctgagagaattgaacttcacagttttcacagtatggtgtggtgattatcacatcaggttctcccagaaactcagttagggttaaattgtcctaatggggattatgaacctcattataaggaaaccaagactcagagaggttgaacagtggcagaggaggcttaaattcaggcctgcaggctcctcgcctggccttttcccaggtggactttggtgctgtg

SEQ ID NO: 465 - DNA, 1053 bp, Homo sapiens
tatccaggctttgtgctagatgctgaggatagatgggaggaaaactgatgtatataggtccctgccctagcggaggtagacaggcactatataaaagatcacacaaatgatgatttttttttttttttgagatggagtctcgctctatcacccaggctggagtgcagtggcacaatcttggctcgctgcaacctccaccttccaggcttaagcaattctcctgcctcagcctccagagtagctgggattacaggcgtgtgccaccacacccggctaatctttgtatttttagtagagatggggttttgccatgttggtcaggctggtctcaaactcctgacctcaggtgatccacccactttggcctcccaaagtgctgggattacaggtgtgagccaccgtgcccagccacatgatgattaagattagagattttggtcactatgttgactgatgatgggggaggagcagagggaacagcctgggcagagacccggaggtgagaaattcagggacaaagagaaggtggtggcactgggacctagggaagttgcaggagatgaggcagcaggtgaggctgagtctggtggggcctgtagccggtcttccctggcctgttccccgcgagccatttgtccaccccacaccctccccactcctttctctgcccagcccagctcagccttccctttgctgctgtggcctgcttggggcctgctctgtctgctggcctgcaccccaggctggaggcctgtttggcctgccccacaggctgcctgccttggaggtcctgggatatagcagggaagcaggcttcactgcctgccaggggttccctgtccaggacccctgagacctgtctagaaagctcctgggggccgggccagagccagggtccagcagttggctttcctgtttttagttaatctcagacctggatctttgccagtcagaagaatggtccctgtgggtcctgaaggccacccagagctactgccaccccccaccccctagatggcattactggctggtcagatttccatgtgggtcttt

SEQ ID NO: 466 - DNA, 1047 bp, Homo sapiens
tactcctgatctactatccatatcacattttggcacgttctttcctacttatttttttgtgtgcatacatacgtagtttgcttaaacaaacataacctccttttcaatgggcagttcagtagaggcaattaattgctgtttaccgaatccttccctaatgttgcatatttcagttgcctctaaaattttgctgttataaataagacggcagtgaacttctttgtgcctcagtatttttctatagtttgaatttttccaaagtgcccctgttatctaactcaatttaatcttaaggtgtctaaggcatcttacacatgcacaaggtctcatttagttacccctgggtaataacttatgaacgttaaggggatgctcgcctgccaaaatcacatagctgggtgggcagctgagctggcctctgcagctccgctcacccctgcccccacccacctgtcttcgcaggtctggggctgtccacccggaccccgtctgtgagcacttctgagtcaagcgcgggcgcgggcacgggcacgggtaccagcaccccgtccacacccaccaccaccagccagagccgcctcatcgcctcgtcccccaccctcatctcagggatcaccagcccccctctcctggactccatcaagacaatccagggccacggcctgcttggcccccccaagtccgaacgcggccgcaaaaagatcaaggcggagaacccggggggtccgcctgtccttgtagtcccctatcccatcctggcctcgggcgagactgccaaggagggcaagacgtacaggtgggggtcttggcgggatggggtccgagtgggcttggggctggggcttgagccagggctgctccaggagcccagcagcggggctgaaacaggacccttagggctgaggggcagggctagggtccagaggggcggggccttctggagagccccacccacatcccaagtcccagttcggggagggctgctggggaggggaatagaggcttggacccttaggtgtggtctgtggctggcagccacccccacag

SEQ ID NO: 467 - DNA, 1103 bp, Homo sapiens
cggagtcttgctctgtcacccaggtggagtgcagtggcacagtctcagctcactgcaacatccgcctcccaggttcaagcgattctcctgcctcagcctcccgagtagctgggaatacaggcatgtgccactatggccacctaatgtttttgtatctttagtagagacggggtttcaccatgttggccaggctggtctcgaattcctgaccgcaggtgatccgcccgcctcagtctcccaaagtgctgggattataggcatgagccaccgtgcccagcctacattattctttttagatcaagatccaaataagattcctgcatcgtagtagctcagtagatcttttaatctctaggtccccttacccccactttttttctttgttatttattcactgaagaatagtttcctagctaggaatttgcaggttgcttccctctggtattggatagcatgttgccgccacatttgagggcttcctctgctgggttctgagcatattgaggtctgaagtcaaggagtggcaggtgggagtaccgcctctgcttctggcaaaggcgattggaaggatgtggcttagtgtgagggcttctgggcctgcagtgagccctgggtcacaacctcacctacccagtcctggtgcctcaggtcagatccagcagagccagtggaggacatgatagtacccacctgtagtcccagctacttggagggctgaggtgggagaactgcttgagcccaggaggttgaggctgtggtgagctgtgattgtgccacagcattccagcctgggcgacacagtgagaccttaagaaaaggaaggaaaggaaatgtagagactggggcaggagtggacccttcaacccttactccatgctaagggcttgatctttgtcaccacagcaacctgttgaggttgttcctcccctatgcctgcttacagaggaggaaactgaggctcagagagacaagatgacttgtccaagttctcaccactaagaaagagcagagctaggctcagacccagtcctgctgcctcactgtcactgggatcaccagccagatgcaggcacagtgcttcacctggcagacagggctgaggt

SEQ ID NO: 468 - DNA, 1037 bp, Homo sapiens
cacgccctgctaatttttgtatttttagtagagatggggtttcatcatgttggccaggctggtctcaaactcctaacctcaagtgatctgtatgtctcagcctcccgaagtgctgggattacaggcatgagccactatgcccggcctgaatgtagtattttagtttagagtttagatataggtggtgaagcttcagtatgcgtaaaattatatctaagtttgtatgtaagagtgtatctggttatagtttatagaagcatgatcattaaccccaactgacattatcttatatggagatatatctagagtcacttatttttttagggaatatagtgactctggcaagggacgtggggagctgtgttgttttgacagctatatgctgtcacagttagggttttgtgaaattatgctggcaagggaaaggagcaaacatggcttcttatgtttgctactttgtctcgcagcacaggaataatttatcataatattactgaaatatgtacaaaccatgcttatgagcaggggaggtaaaagggcagagcgaatgacggggtgccccctgtgtttcttcctgtggctcctgcccagagacatcccgaggggccagccacgcctctccagccgctgacatcacagtgactcggaccctctgtgtccttgggcagttatgtttcctcttttgtatctcagtctcctcatttaaaaaaggggttgcaggtgggactaaaacatctccagagacaccagctgcattctgcaggctcaggggtgaaaggtctataggctgatagctcggggctctactgcagttgagcctcgctcactgctaagctaagggaaggggatttttctcttgaagtgaggagctccccaaaggcgaggagctctccctcctactcccactcccacggactggcgcacacgaagcgggtagggcttttgtatccagtatctctctgctctccagagcgccatcagcgtccagaagggccccgcccggtttcaggatctcttcctctagtgactcccactcc

SEQ ID NO: 469 - DNA, 1029 bp, Homo sapiens
catgtaagagctgtgtcagtatttgagccaaactggcaacttacgagattagagttaaatcagtggtcctgagcagtgattccaaactctcactgtgccttcacaccatccatgtgtaatccaccccatcagcagtggttctcctactttctcagtgggggcatatcctcaagggagaatgttgtgactctggtgagagaggagttggcctagagcaggccactgtgagctcagcacagagtaggaagaacagtgacatcattacaaaatcatcaatagcagcaatagctggtgtttattgagctgttgctctttggcaagctctgtgctaagaactttgtatacatcatctcatttaatcttcacaacggccccaggagataagtactaactttctccccatttcctagaggcttgggaaattaagtaactcgcactggtcacacatctgtaagtgggagaggcaggattcaacagatctgtctgtcttgagtctatcgtgctcttattgctatactgaattcccattcatgttaggtaacttaggggccagaatctccatgcactttgtagaccacatttcctgttatgaaatttccacattttgaattttttaaacaaatatggaaactgagaatccctaaggattaaaggacttgggatatccagaattggtgaagtgatttgagcaaggatgagctattatcaaaatacttgatgtgagtttccatcttcgcaataatatgggtgagagatataggtgggttgagattgggaaaaatatgcggcctaagtaatttttcttccaataagatactgctttggctaaggaaatgggatgtaagagttctctttttctcaggggacagtcctacttcttgccatgcttggctgatcataggttaaccctaacagaagcctggggtccctacatttttgtctgtctggcttttccttttggcaagcagaagctttgttcttggtccccatgccaagactgaggtgggaggtgctggtgtatatggtcat

SEQ ID NO: 470 - DNA, 1034 bp, Homo sapiens
ttgtctacctgacttcctttggaagaagcactctttcagggggcttcagtgttccaggcttgctgtctacccaagagcttgctgggcacccaggcgccctccagtaggtctgtgctgctcagataaactgacatctggttttacacaccctgagctttgctagcgtgattctgctcttgggaagtagattcactctgcagaatgggtggacagtttctcagccttcctggccacaggtcagaccctggttatggaaaaccaaaccagcaaatgctgccctgggagggtgttacatcatgtgagctgctaaaggcaggatcgtctccccagatggctgcctccccttgatttcttcaccctccacctcaagaagggcattggctcctctgaagggacaaaaaggtacctaaaggaccttaggcctcccattcctcagacccccagaggcagcagacccaaaggtaggggcagggaaaggaggggccaagactttttcagatactcggttttttctaaggccttgacctcagcagctgaactcatggtcatggctgccttggccttattgtccactgtagcctcctcccagaagccgagtaaagcagctagggtccctccatgctaaataatgtagtcaggcgctctgggtagtccgtcctgcctcatcttgttctggggcccccagtggggatagctctctgctttcgggctgcagaaaagaattgagtcactttctgtaggggagtaacaccctttggggacaggggtgcagttttgaagtaatgaaggcagtgatgtctggagtgggtgtgggtgttgcaggtgaacttgcctcacccaggctgttctgggtctttgtactccagagttctgtcctaggcttgcttcttcattcactctgtttccctttctcttctttttttcttttcctttctttctctcttttcttctgtgtagatgctaatgacttccagatctgtgtcctgctgtggcctctcctcttaggatcccagctgcctgccaaccagctgtgc

SEQ ID NO: 471 - DNA, 1047 bp, Homo sapiens
acctttgtggccgggtacagtggctcatgcctataatagcagcactttgggaggctgaggcgggcggaactcttgaggccaggggtttgagaccagcctggccaacatgaggaaaccctgtctctactaaaaatacaaaaattagctgggcatggtgggcacctgtaatcctagctactagggaggctgaggcaggggaatcacttgaaccccagaggcaggggttgcagtgagccaagatcgcaccactgcactgcagcctgggtggcagagcaagactctgcctcaggaaaaaaaaaaaaaattagccgggtatggtggtgtgcacttatagtcccagctgctcgggaggctgaagcaggagaatcacgtgaaccaggaagcgaaggttgcaatgagctgaggtcatgccactgcactccagcctgggtgacagagcaagactccatccaaaaaacaaacaaacaacaacaacaaaaaaaccctttgtgcttagtgcttattgtattctcttaagaaatattttcctaccaaatgaagaaaatttctagaagtgttattagtctttcacatttagttttataatccatctgtggttgggttatgtgtatagtgtaaggtaagtcagatttcaacctttccatgtgaattttgcatggattaagcactattttttaaaaagactgtccttttccccactgttctgcattgacacctttgtcatgtatcagttgtctatatatgtgtgggtttatttcaggactatgaaggctgttccttttgtttctccttgtggaaataccatactgtcttaatttctgtaatagctttataataaatcttagtatatgatagaaaaagtcctccctcctattatgtccttcaagattatcttggctttccttggtcctttgcatcttcatgtaaatttttgaatcagcttgtcagttgtgacaaaactttccttacaaattttagaatccattgggattttgtttagtattatactgaagtggtatgcctgttttggagaattggtatttgtta

SEQ ID NO: 472 - DNA, 1030 bp, Homo sapiens
aaccccgtctctactaaaagtacaaaaattagctgggcttggtggcaggcgcctgtaatctcagctactcaggaggctgaggcaggagaatcgcttgaaccgggaggcagaggttgcatttagtcgagatcgtgccactgcactccagagcgagaccccgtctcaaaaaaaaaaatgaaatgtttgctgaaccccaaaagcacagtttgaacgctgctgatttacaagattaattttaaggtatttggtatcagggaccttcctgacatgacccatgtctacttttcaaactttccagttccttctactagcactcttgcacttgtactttatctgcaacaacagtcccactccttctagttcccatatatttgtgcttctttttttttttttttttttggagactgggtctcgctctttggcccaggctgagtgcagtgacacgatcacggctcacaagcagcctcagccttccgagcttaagcgatcctcccacctcaggttccagagtagctggaacaacaggtgctccccactacgcccagctaatttttgtattttttgtagagacaggttatcttcatgttgcctaggctggtctcgaactcctgaatcgaagcaatccacctgcttgggcctctcaaagtgctgggattacaggcttgagccactgtgcccggctatttgtggttttgtacatgctgtctctataccaggaatatccgccatcattggttggtagacactttaaaacccagctcaaatttcacctcccagaagactgaccgtcttcttttttcatttcttctcagtaccttgtatatacttactggttgggacatcctactcatcagtgtaacccggtaccaaggcacttcggaaatgatggctcttcattgcctgcagaattaaccatggacattttagtttggtttgaaaaacatatagccttctgcctccagccttcccatcaggctagtaaaagaccttgcagaactcagttgaataaaataattttttttttttgaga

SEQ ID NO: 473 - DNA, 1047 bp, Homo sapiens
ttcaccatcttggccaggctgattttgaactcctgaccctgtgatccacccacctcagcctcccaaagtgctgggattacaggcatgagccaccgcacccagccttttttttttttttttttttttttttgagatggagtcttgctctgtcgtacccaggctggagtgcagtggcacgatctccactcacagcagcctccatctcccaggtcaagagattctcctgtctcagcctcccaagagctggaactacaggtgtgtgccaccacacctgactaattttttgaattttgagtagagatggggttttaccatgttggccaggctagtctcgaactcctgacttcaggtaatctgcctgcctcaggctcccaaagtgctgggattacagaggtgagccactgtgcccgcccaaaaattcattttttaacagtagtttgaaccatcagggttatataaatactattgtactaattttccaggaggaatctggatgatatcccctggaggtctatatgtgtatctggaaataactcttgaaacttgcattttcttttttttttttgagatggagtttcgctcttcttgcccaggctggagtgcaatggcgcagtctcagttcactgcaacctctgcctcctgggtgcaagtgattctcttgcctcagcctcccaaataactgggattacaggcatgccccaccacgctcggctaattttttgtatttttagtagagacagggtttctccatgttggtcaggctggtctcgaactcccaacctcaggtgatcagcccgcgttggcctcccaaagttctgggattacaggcgtgagccaccacgcctggcctcgaaacttgcagtttctttgtgatctcgtgttttactttaagaatgaatatgggccgagggcagtggctcatgcctgtaatcccagcactttgggaggctgaggccggtggatcatgaggtcagtagttcaagaccagcctggccaagatggtgaaacccgatctctactaaaaatacaaaacttagccaggcatgc

SEQ ID NO: 474 - DNA, 1069 bp, Homo sapiens
ttcctcactctcctcttacaaccgcccaccccccaaattaattcttctgtggtctgtgattttacagtgtcgtgttcataactcccaaaacattgatcacaaaatactaatgtttttaaatatttttagtagagacggggttggccaggctagtctcgaactcctgacctcaagtgatctgcccaccttggcctcccaagattaaaggtgtgagccaccgcgcctgctattaggtgtattgatattttctatagtggctgttctcaaactttctggtctcaggacttcttgtacccttaaaaattattgaacacccaaagagctttagttatgtagattatgaatattaactgtatcaaaaattaaatgacattttaaatgaaaaatacccatatttttaaaaattgataagtattgttttatcagttttgcaaatcactttacatctagctggatttttgtatctgtttctgccttcactttattgcaaagtgttgttttggttgaagtctgaagaaaacctggcctcataaataggtgattggaaaaggggggagtgttttagtagccttttagatcgttgtgggtgttctttgatactacaaccaaaaatcaagtggtagtttcttaaaggctagttgcaatgtgggatcaaactttttgtaccatgtggatcagtgaactttttgcactctgttatgttagaattcgttaatctatcttgtactttgaatggatcttttacccgtgaatgatttttgtaatatgctattgtagtttggaaaatactggttcactgagttctgcagatcttctagatgttctcattttattatgcagtattttaaaaatcaccactaatctcagaaaagtttttaagttttgggtatcgatcaagttgaagttggaagatacaagttttccaaaattctaattatcacttgaaagacaaaattttattgttggcgataaatactgtcgttttacttgaagtgacagtctcatttttttcattttcaagaaaatatctgcagatacccacttctggataatagtttgtctttattta

SEQ ID NO: 475 - DNA, 1527 bp, Homo sapiens
ctttgttcaacactatttgtatgtctggggaaatgttggcaaattttcgaaacatttataggctaagtcaaaacaaaacatgcaagaaacatatatcacaatcatgttggacagtccatgatcgtacattactatctgtgattgacagtcttccagagattattgaaacattggaagttatagcaagccattcttcaaatacaagtttcgccgatgaattgagtcatttgctgacattggtttccaaatttgaatttgtcttttgtttgaaattcctgtatcgagtgctgagtgttacaggaattctttccaaagagcttcaaaataaaaccatagacattttttctttgtcttcaaaaatagaagcaattttggaatgtttatcatctgaaagaaatgacgtatactttaaaacaatctgggatggaacagaggaaatatgtcaaaaaataacctgtaaaggttttaaagttgaaaaaccttctcttcagaaaagaagaaaaattcagaaatcagtagatcttggcaattcagataatatgttttttcctacttcaacagaagaacaatataaaattaatatctattaccaaggattagatactatattacaaaatttaaagttatgtttttcggagtttgattattgcaaaataaagcaaatttcagaactgttatttaaatggaatgaaccattaaatgaaacaacagcaaaacatgttcaggaattttataaacttgatgaggacattatcccagaacttagattttatcgacattatgcaaagcttaactttgtcatagatgatagttgcataaacttcgtcagtctcggctgtttgtttattcagcatggtcttcacagtaatattccttgtctctcaaagctattatatattgctttgtcttggccaattacttcagcaagtactgagaactcattttctaccctgcctcgtcttaagacatatttatgtaataccatgggacaagagaagcttactggcccagccctaatggctgttgagcaggagttggtaaataaactaatggagcctgaaagactcaatgaaattgtggaaaagtttatcagtcagatgaaagaaatataatacatgctcatttgaacttacctaaaagacttgtatttccattgggatgttttcatttcaaaattgttcaaaattcaaaagacacagaacgataaacagtgaagtctccttccctcctttagaactcattttctcttcccaaaaagtgttatcttttccttaaatatccctctagaggtatttttcctaagtggtattgtacggtgtatactgttcttcagcttgtcttctctgtgtaacatatttttgagattgtcccatgtcgttacatgaagagtttcttgattcttggtctataattgcagatgttattgtatgaatgtaccataatatatttgagcagtccctgctgacatttttttcctaaccttttgctattataaataatgattcattttataaccttttatatagg

SEQ ID NO: 476 - DNA, 1033 bp, Homo sapiens
ttctatgtgacttcccccacccatctgagttccagcttcctctgggctccaatctccagtccctggcggagtgactagggggctctggcccaggatccccaaccctggaaggcagctctaacgcaggaagagaattgggcgtcgggtgcgcacctggcagctcaggagtcggggctccactcaccccacacaagaagatgaaaatgcccaaagagctcaatgtattgattggtttggctggggacagccagagaaagaagcccaagcagtcaccgcctgcttcgccctgagcctcctgacttagactctgagtccagctccaaggaggaagaggaattcggtgtggttggaaatcgctctcgctttgccaagggaggctattgacgatgctgcaagatctgctatccgctctgtggttttgtcaccctctctgcctgtgttgtggcctgtgttggcttggtgtggatgcaggttgctctcaaggaggatctggatgccctcaaggaaaaatttcgaacaatggaatctaatcagaaaagctcattccaggaaatccccaaacttaatgaagaactattcagcaagcaaaaaaaacttgagaagattgaatctggagagatgagtttgaacaaagtctggataaacatcacggaaatgaataagcagtgcagggtcgggtcatgagtggccagagcctatcctggcagcgtagagtgcaaagcgggaaccaatcctggacaggaagccatcccatcgcagggcttactcatacacacgctcacactcagactgggaccatttacgcatgccaactaaccaaacatgcacagttttgtgatgtgggagtacctggagaaaacccacgccaacatggggagaacatgcaaacagacagtggcccggccaggagtcagatttttttctcctcaatgttataaccaaatgacgttgaacaaaacattattcaaggacctgctgtaaataggaaagtttacttctgtcctagggcttcatctatgaagctggaagagat

SEQ ID NO: 477 - DNA, 1012 bp, Homo sapiens
cagcactggggtgggatatctaggcccagggaggggaggtgtcagattcttaagtgcatctttagtgcatctttagtacatcagagtctggaagttaactggggagaggtcaggtgggggtggtggtggcgggaataagtcgtggaggggtctcaggagaaataaccggagggttcttcagtaacaccatcgcgaattcattttcctgcctcctttcccctccccccatagccgttatctagaccaaagtcggggtggtggtcttacctgtgaagaagtgggatcgttggcatgtcctgatttaggagaaagattttggctactatgaatgtcatgttctagcctagcctcttactcgcaattagggacttggaagaatacgacaagttttctcataacagggatgtacccaatcaacctgcagaggtgaagccaattctacataggagttgtttgaataccttttaaagtttgtctggaaactttccttatttaattctgagtggtttttttcagatggcgaacaatactgtactatcgattgagcaatatccctcacttttcttttacttcctccccgcttagcatgataagaagtaagtttccttttaggagtcttccttttgggaatggtttcagaaacgatcaattagcaaaagggcaaaaaattactactttatgaagaatgccctttcagcttagcgtaaaattagtaatctcgtaatgatgctacagctgatgttttgagtgcttactgtgtgcctggcactgagctaagacctttatgtgaagaatttaacttcatagtaactcctcctagaacctatttgcagatgaggaaatttaggtgttgagggcttaagtaatttacttagatcacacagctagttgcaaggttgaggtaggatttgaatccaggtttgtcccaactatagtgcctgtgtgggatgccacagaggagtttctttaatctgtgtttctctccttaaaagcttaaattgtaaatgaccaa

SEQ ID NO: 478 - DNA, 1029 bp, Homo sapiens
ttatttttggtgttcaatttgttgtatctttgatgattggcggtctcttaaattagtttcctaaggctgccaaaaaactgctacatacttggtagcttaaaacatcagaaattatctcacagttttggaggctagaagtccaaaatcaaggctctagggaagaatctttgcttgtctcttctatcttcttgtggcttggttggtattccttgacttgtggcggcaaaactcctgtctttgccttcatcttcccttggtcttctttctgcatcttcttttctgtctcttagggtctaccttattcctggatgttctcagctcaagatccttaccataattacctctccaaagatctagtctgctcacatactgtggttctgggtggacataacttttgggagccacagtttaatacactacagttctttttttgacccctaaaacttcatttacatcccatatgcaaaataaattcacctcatcccaacatcctcaaaagtctcgacctattacagcatgaactctgttttttttttttttttttagatggaatttcactctctcgcccaggctggagtgtagtggcagaatcttggctcactgcaacctctgcctcctgggttcaagccattttcctgcctcagtctcccaagtagctgggactacaggagcgtgccgccatgcctggctaattttttgtatttttagtggagacggggtttcactatgttaggatgggctccatctcctgacctcgtgatctgcccgcctcggcctcccaaagtgctgggattacaggcatgagccaccatgcccagctacagcatgaactcttaagtccaaaatctccaaatattataacctcaaaaagtttgaaatctcattgtcttaaatcatctaaattaggtaagagtatggactcggcatgattcatttgggataaaattctccatctgtggacctgtgaaactggaaaacaacttatctgcttccaaaatacaatgatgagaggatgagacagctgttaag

SEQ ID NO: 479 - DNA, 1251 bp, Homo sapiens
ttgtcagtctccttacatatcaagggggtccatatcattagacgagaggattcttcacagttccttactgataaccccatctccattcctcgtttctgttgagatgattgatgggatccatgagtcacactgctagtatcttcagcatatggttgtccagccacgtggcctgctctctagaacacacttttctaacagtgaatttcctaatttccgcatcctttgtattctgaataatctgagaacctcccagttaatcgttgtttccttttgcttaaagttccttcttcaatttatctctttcttcttgtattttactataaatatcaaggaggaaccaagctgtaccttcagcactttgcttggaaatctcctaggctaaatattcaagttcatggcttccagattctcctttctatcccacagtagaacatagttcagccactttataacatagctcacctttcttccagttcccagtcacatattctttatttacttctgagacagcaacagaagcatccttaaccaaaatattgatatgaaccaaaatgttcacaattctgtgtatgtattctctaagactacagaagctttctcttagttgctcatcacatccttctaaaccctaaccagaattgcctttgacatcagtatttctaccaccatgtctttaaggcagtctgtacttttctaaaatcatgcatctcaaaactctttcagcccattacccaatttcaaagccacctttacatttttttttctctctttctctttctttttgttactttcttttctttctttgtctctctctctctctttctttcttccttcctcccttcctcccttccccccttcccttcccttcccttcctttcttcccttcctttctcttcctttccctttctctttctttctctctttctttctctctttctctctctctctctctctccctctctctctcttctttctttgtttaaaagttttttaatagagatggtgttttaccatgttgcacaggctgatctcgaactcatgagctcaagcagtcctcacaccttggcctcccaaagtgttgggactacaggcataagccatcatgcctggcccaccttcacatttttagatattaaagcagcactccacttccatgtactaaaatctgaattagtttcctgggtttgccataagaaattaccacaaacttggtggtttaaaattaaagaaatttatcatctcacagttctg

SEQ ID NO: 480 - DNA, 1004 bp, Homo sapiens
tcagaccataacaacgacaaatgcgagagtttatttctagactttcagttctgttctatttgtctatatgcctgttcttgtgtcagtactacactgttttgattactgtagctttgtagtaggtttgaaattaggaagtaggagtcctcaagttttttttttcaagattgttttggctatttggggtgtgttgaaatttcacgtgaaatttaggatggttttttcctatttctgaaaaaagagttattaggattttgacagggatcaaaattgaatttgtaaatcaagggtagttactgtcatcttaacaatgttaagtcttccagtctgtgaacatggaatgtctttccatttattttggtcttcttttatttctttcagcaatgttttgtacaggtcttttagtgtacaagtcttgtgcttccttggttaaatttttctcaagtatcaatcagtataatctaccacattagtagaatgaagaaaaaaaagaactcactacagtctgtcctttgtatctatgagttccacatctgcagatcaaaaatatttggaaaaaaaaataaaaggtaatacaaatttattccttaatcaaggaccagaggaaaaaaaatacaacatttaaaaatagagtataacaactgtttgcatagtatttgcattgtattaggtgttataagtaatctagagatgatttaaattgtataggaggatgtgtgtaggttatatgcaaatactatatataagggacttgagcattcaaggattttggtatctttggggggtccagggtccagtcccccacagatactgaggaatgactaaatcatctcagttgatgcagagaaagtattaaagaaaagctaacatcctttcctttgtaaaagcactttaataaactaggaaaagaggggaatttcctcaacatgataaaggctacccatgaaaaatcattgcttacatcatattcagtggtgaaagactgagagattttatcctcagat

SEQ ID NO: 481 - DNA, 1088 bp, Homo sapiens
ttcacctttagccactggctgccactgtagtgttatctgtcgctatagttttgtgtttttgagaatgtcgtaagtgagaaggccaggcattgtggctcacgtctgtaatcccagcactttgggagactgaggcaggtggatcacctgaggtcaggagtttgaaaccagcctggacaacatggtgaaaccccgtctctactaaaaacacaaaaaaattagctaggcatggtggcatgcacctgtaatcccagctactcaagaggctgaggcatgagaatcgcttgaactcaggaggcggaggtttcagtgagccgatatcatgccattgcactccagcctcggcaacaagagcaaaactctgtctcaaaaaaaaaaaaaaaaaagtcataaatgaactactgtagtatataatgttttgggactggcttcatagaatcagtattttatcacttcagacctggcgtggtggctcattctgtaatcccagcactgagccatgagcgtaccactgtaccctagtctgggtgacagagggagactgtgtctcaaaaaaaaaagtcacttcaagtgagatctagacaatgaatttggagggctgttttactctcccttttatgttgtagtttccatatatgtatatattgaaaaccgtgtaatattttttacactccactgttaaacataggttaaagaagtgaaaaataaagcaatagtctatatatagaaatagttatatttattcagatatttattatttctgttgctcttcattctcaattttctacattttcttctgatattatttcacttttgtatgaagagcctttctttttctttttccttttttttcgagacgaggtctcactctgtcacccaggctggagtgcagtggtgatcctagctcactgcagcctcaaactttgggctcaagcgatcctcccatcttggcctcccaaagtgctggcattacagtcatgagccaccataccctgcctgtttttctttcttttggcatccatggtttctgatggaaagtctgtagttataagtaatgtgttgtttgtttctgactgttcaaagatttttgt

SEQ ID NO: 482 - DNA, 1158 bp, Homo sapiens
tttttgagatggagccttgctttgtcacccaggcttgagtgaagtggcgtgatctaggctcactgcaacctctgcctcacaggttcaagtgattctcctgtgtcagcctcctgagtcactgggactacaggcacacgtcaccactcctagctaattttttatatttttggtagagatggggttttaccatgttggccaggctgttctcgaactcctgacctcaagtgatccacctgccttggcctcccaaagtcctgggattacaggcgtgagccacagcgcccgggctttgtttctctcttcagtgctacagcaaaataacattgaatgaaatgttattagaggacctgctgtactataatttaactagcttcttttatacatgtgtaatttattttcaattttgcattattattaagaacattgaatatgtattcccatacacatctttgtatacttgttgaagcattctgtagaataaattccaagaatagaattgattaattatcaaaggatatttttgtgcttttttatgaaagacaaattttgtcaactagagttcttgaattaagggaatgtacttttttaaaaaaaatttacttctaccagtaggatctgtactttctttctctttgtaattagtttaatattttagaatgataatatttttagactaccgtctgactatgttatttgatattgagaggtaactatatctcctgatcttcagtggatttagttattgtgtgtcttttttgttttaggcaatcaaaaatagaatttagctagcttatccagaagaatcattttagatatatactaggatatttcataaaatataagataaaatgaatttcctgcagggtactcagcaaaaggagatcatgtctgttctctacaagtgctgccagaaagcagttatattcccacgatttttaatctttctgtatatccattctaaatttcaagttgtttggagaaagattatgattgggccagcttgaatctcatgttcatctttgaaccaattatctgtggtcagggaaaccaggccagatagtaaaacatacctcttggaaggcatgcctctgtcactactcactttcgccaaataatgtttgaatacctattttggatgatatgcctttgctcaagtgt

SEQ ID NO: 483 - DNA, 2999 bp, Homo sapiens
attttcaaatgaataaactgaactaaactgatttttgttttatctctgtattggtaaaaggtttatgtttttgccagtaacttacagcaatttcagcattgttatcaataaaattgtggtgtcagtcaggcgcagtggctcacgcctgtaatcccagcactttgggaggccgaggtgggtggattgcttgaggtcaggagttcgagaccatcctagccaacatggtgaaaccctgttgctactaaaaatacaaaaaattcactgggtgtggtggcgggcacctgtaatcccagctatctgggaggctgaggcaggagaatcacttgaaccctggaagtggaggttgcagtgagccaagatcgtgccaccatactctggcatcctgagaaacagaaaaagactccatctcaaaaatacataaataaataaataaataaataaataaataaataaataaaattgtggtatcaaggaaactctgacactaaaaaggagatataagttctatgtgaattttagtttaggttgatcagtaggataagagggtggtaaaagtatgttgtaaatgtttgaatataagatgattccaaatacagggttctgacccatttcccagtgaaaagataagagaaaaaaatagaattttgttatctagaatacatttactaatagccatgtgggtgaaatagatgtctattaatcatttattaaattatatacatatttaaaatctccttatgttaaatagtattgatttagaaaatactggttttcttatagttgttttgtgaattttatgcagactctagaaatttgacattgttaatcactagtgtcactttttaagtcagttaatgtagttttccagagccttctaaattatgtaagttatattctgaatttgcattctgattactggtatgtgctacttaacaaatcaccccataactaatggtgtaaaacacttttattaagctcaaggattcaatggctccggtgttcagaaagggtatactggggatgttttttttttttttttttctctccacaatgtctttggtcttgactgagaagatttggaggctgaagttgactgaatggcttgatgttggaataatctgaaagtttgttcactcatgtttggtgccttgcctaacaggactcaaagactgtgactgctgacttgagcacctgtacgtagtctgttaccttgccttcctcatagtgtggcagccttaaggtcttctcacttcttttatggtggctcagggatccaagcaaaatactaattcagtgaataaggcataagttatattattattattatttttctccagacaggctctcatcctgtcacccaggctgtagtgtagtgactatcataattcactctgacctcgaactcctgggctcaagtgatcctcctgcctcaacctcccaggtagctagaactataggcctgcacctctgcacttgcctgatttgtatattttttttgtagaaatgggtcttggctatgttgcccatgctggtgcatcatcttttctgacctagcttcaaaagttatttggcatcccttccaccaggcagttcacaagcttgcccagattcagaagctatagaccccacatcttaataggaggagggagggtgaaggtcacgttatagaaaagcacatggatggaagatactgttgcagccatttttgtaaaataaaatctgctgtcacagcatataaaataccctgttaaaaaatattctaagccataaaatagctttaaaaattttatcctagaggtttgtgtttggatcttcatggcattaactatttccagtaatacatatatgtaaattgcatgaatctgatcatacatgatttttttttttttttttttgagacagagtcttgctctgttgcccaggttggagtgcagtggtgcaatctaagctcactgtagcttccgcctcctgggctcaagcaattcctgttcctcagcctcccaggtagctgggactacaggtgcgccaccacacccggctaattttttgtatttttaatagagacggggtttcaccatgttggccaaggtggtctcaagctcccggtctcaagttgatctgcctatctcggcctcccaaaggtctgggattacaagtgtcagctactgcgcctggcccatatatgattttttaagagtaacattttggcttttctgttggcttggcctcaccttcccatatcattgttcctatcccctctcataacttgtgtcaacagctttgtaggtagccttccatgtttttcagtgctcataacatcattatatacataaacatacacaaatatatgtatgtcaggattttgagtttttcttatttaacaaaaatgggatcatatacatacttttctcctcctcacttctctctgtcttgagtacttcataaaaccccttcacctcaactggaatagctctctattctgtgattttaatgcacaataagtcatcttctgctttgtttttaggcatttatgtcgtttaaggttttttctgccacaatgaacaatgatacattaaaagtcctttaatgtatgtttttgtaagttggtcattttatatatgtggttagattccaaagagtaaggattctgtgacttaaaaaaaaaaaaaagcatgctgtaatcccaccacttcgggagactgaggtgggcggatcgcttgagcccaggagttcgagaccagcctgggcaacatggcgaaactccatctctacagaaaatacagaaaaaattagttgggcttgggggcacatgcctgtagtcccagctacttgagaggctgaggtgggaaaattgcttgagcccgggagttcgaggctatagtgaactatgattatgccactgcacgccagcctgggtgacagaaagagaccttctttctaaaaaataaaaaagcactttaatacctcacatttccaccagcagtgtagtaagaacacct

SEQ ID NO: 484 - DNA, 1044 bp, Homo sapiens
ggggtgtcttggaactagtgccccatggatatggagggatgactgtatattatttcctaaaatctttattgattttgcctttcacgtgtagcttttgaattaccctacactaattttttatatggtgtggagtagggaactaattttatttactattataaggctaataaattaccttactcaccagcatctatcaaatactacctcctttctccagtaagctgcaaagtttctctataactacatctgtaggcatttccccacattctcagttaatgttttcttggactgtttgtttgtttattcctgtgacagtaccaaggtgttctaatgaatgagctgtgtaataattcttaataatctgatgggacacatccctgaaaatttttcttcaggaatgttttgcctattcttgcccctgtttacattagaaatatcttgggaagtttctgacagaacaaaatcaaataacaaaaattttttgggaattttatttaattatcatgaatgtgtagatcaactgagagagaagtggcattgtgtctttctatccatgaacttggtatgtctttgtatttatttaaatcttcaatgtctttgaatacaattttataatttactctgtaaagtagcagtccccaacctgttttggcaccagggaccagttttgtggaagatagcttttccatggacccaggcgtcagagggagaggcaggatggttttgggatgattcaagcacattacatttattgtgcactttatttctgttattattagattgtgatatataatgaaaataattatacagcacattataatgtagaatcagtgggaaccctggtcttgttttcctgcaactagatggtcctatctgggagtgatgggagataagtgacagatcatcagacattagattctcataatgggcaggcaacctagatccctcacatgcatagttcacaatagggtttgcgctcctatgagaatttaatgctgctctcctatgagaatttaatgctgctgctgatctgacaggaggcac

SEQ ID NO: 485 - DNA, 1107 bp, Homo sapiens
gcctattgtgccaccataatctttttatcactgaactgaattagcaccactgagatatatttaaagttctatgtatattgggatctattttggaatttctattacattctattaatatatttatttttatattgatgccatattgatttttattatttgtatatttatttgaaggagtatttttaaattactgtgtatttattggctttgtggtatagacatttatctgctgggtcaagccactgtctcagttttattttttgtaatttttgctttccattaagccactaaattttaacatgattttatatactttccaaaaatattttgttggacttctaattgaaaatgatacatgtacatatattacttttgggcagaatcaatatttttattatgtatttgttcttacatacaataagaacaataagcccaaatcttagcatacagatcttattttatgccattcactaacattttattttcaagtaatatttattgtgctttttcttgtatcagttgttctttagtactttgacaaatgtaaaaatttttattttttatattgaaaaacttttttcatttctagattcttattgcaagaatagtcagggtgttacttaattcccttattaaatctagtaggcttttaaaataaatttgaatctgtagttatgcattataaagccatatcatctaaaactattttatttcttttttccagcttcttcacattatataattttagtgttttgctaaaatttgtaggacttcattaaatattaaagtagtagtgacttttgactaattcttgattctaagtaaagtagttaatttgtagtattttgtcattgggggctgattgtagttggtttctgtcaaataggcttaggctttattacattaaaaaatatatgttcccattctaccttgaggaatggctgaataatattcatatttatatattgctagattcagtttgctaatattttcctgacagagtttgtgttaagattggagttatagcttcattaaatttttatacaattaatcactgaaatcatctggacctagatatttcttggtgtgatggtttaaaattctgaa

SEQ ID NO: 486 - DNA, 1804 bp, Homo sapiens
tgggaggctgaggtgggaggatcgcttgagtccaggagttcaagaccagactgggcaacagagcaagaccttgtctctactaataatttaaaaattagcgcgcacgcgcgcgcgcacacacacacacacacacacacacacacacacacacacagccaaagtccaaaaaacaaaaaccagactgggcaacagagcaagaccttgtctctactaataatttaaaaattagcgcacacacacacacacacacacacacacacacacacacagccaaagtcctaaaaacaaaaacctctattaagggcctctgaatagttatctctgttccttcagttcctctgaagaattattttatactaggattctcaggttatctcctctcaatctctattgggatcactccactctgacttgtacactcattttcccactgatgtagctgttctcaagttagaagttaagttctcagtcttcattttatcagtcatctcagcagcattcattatggttcaggcactccctcctattttcttcgttagcttctatgacaccagtctcctcatttttctcctactctattagctgttccttcttagtgtctttttctgactccttcattttgaccagatttctaaatactgaagtatgtcaggactctcagctgtcttccatctgtagtaaataaactcactgggtgatcttacctagtttcatgaattttaagtaccatctcttcattgatgagtcccaaatttatgtctcatttcttggccagtcttctcttaactacaggctaatatatccaactgtcttcttgatatttccatttgaagatttaagaaggatttcaaaatctaccatcccaaaaccaaattattcattctccctctttcagtgtggtcctcccttagtgttcctatctcaggaaatgacaccctgttgtgttattcttgactcctttcataccccgcatctcatatacgtatcaggcaatgcctctaccttcaaaatatatccacatctgactactgttcttcacatccaccattattattaccttgggtttaactaccagtttttccttgggttattgtagcttcctaagtggtcctaagtgatcttcctgcttccattcttcttctgctccgtataacattgaacacttcatagtacacagaagctatatgtagaatgtatgatccttgtaaaacataaattatgttaatttgtctgtagagtcttctaacgacttccttttacacttacatacattgcagttttttcctgttgcttgcaatttcctaatagatccattctgtttatttctcttttctcattttttaatcactcttcctctcatacatgcaattccagccataccatccttgcttttcctcacatacgccaagcatactcacagtgtctaaaagccagaaatcttccatgagaaatttgtgctttcaggtgtttcagctgctgagatcgtagtgttctgttttgttctcttgatataagctctgagaaacagaaactgtttcttttatttggttatatggatcacaaggatgagaagaattctgattcagttaagtaatgtaactagtacttacattttaattgcataagattttatgcagcctacagatttattgtgtaagtaccaaaattgctaattcacatcagttgctttgttagaaattgacatctctgaggccaggtgcagtggctcatgcagtcccagaactttgggaggccaagacaggaagagtgcttgagcccaggagtttgagaccagcctgggcaa

SEQ ID NO: 487 - DNA, 1086 bp, Homo sapiens
agctcaggagttcaagaccaaactgggtctctacaaaaaatacaaagattagccagatgtggcggcatgcgcctgttatctcagccacttgagaggctgaggtaggaggattgcttgagtcctggaggcggaggttgtaataagctgagatcatgccactgcacgccagcctgggtgacagagccagatcctgtctcaaaaaatgaaccaactaactaaataaataagtaaatgtagtgatatggaaagttgcttacaatattacttcttagtattgacttctcatgcactatagaactcattgttctgactacataaaacacctaatttttcatttatgaaaaattacagagcacatgctatgtggtcagctactaatgatgaaacgttgagatggctcacctgtaagttcttcagcatacatctcctaagattttagcatctgttttactatctgttgtctcaattgattattttagaaagtatagacaatttttccaattatattattgcctctacgtttattagcaaacgttcttatgatagaaacaagcttttatctccttccctttgacattatggactcaaatcattatttaccctcatactgtttctaattttctgtttattttttctagctctgtgaggaggaagagtcatagctatctctttcatcattttatccctagaacctagtgcaatacctaccacagagtggtttcctaataaatatgtactgaatgaatgaatacttcaagcagtggggagctattgaagaatctcaagggaggatgtaatgtgaaatgatttatattttggaaaggtaattctgatgtcattatggaagagagcaacttgagcaaagctcagaaaaaaaaaagaaagaaacagggggttgccctgtcacatcacccaggctggagtgcagtggcacaattatagcttgctgcagcctcaaactcttgggttcaagtgatcctccttcctcagcctcctgagtagctaggactgcatgtgtgtaccactacacctggctgattaaaacaaaatttttttttgtagagatgggcttttgctatgttgccc

SEQ ID NO: 488 - DNA, 1862 bp, Homo sapiens
aatcaatacggaaagattttagtctagtaagagaaaacagcaaagagacattttctggaaaggagaaaaatagagacctaacttatgaacgtgaaaaacggttggataaaccccataaagatttggattcaaggttgaaaagcagtttttttgataaagcaggtaataattgttggacttagaaccataaaacacaattaaaaattaccgatcataatatatagcttttattacttttgatgttaagtgaagtatgaacggttaaattcattgtaagcttgtcatttttcttttgtccttgttctttgcagagtgactgaatttctcccagtaacttttggtaatggtataaatggttgaaaatagctctaaacctcatttctccctcccctggttgcaatgttttgatgagaaaggcaagatacttgaatcacctgttcattttctttggttgaacattggaacctgaagttggatttaacttctttgtgctgtaagcactaattcaaactgctgtctcaccacttagtccaaattagggagttattttatttttttaattttaatttaattttttgtttattaactctcacctctatctgaaagggagtttttttttaataaaaaaaacccaaacatttctaatttatgttttagaagtttcttgaggttcctcctgagcctctttgcccagtgtaccctatactttagctttagttaacattcttgaatatatcacatatttccttctatgccttcctttcctcctgctattccatttgcctgcatgtcattttctctctgtatatttgcttgtgaaagtacttcttatccaacaatgcctaactcataaacctcttctactctgtcatcattctaactgctctacatcaagaatggtttccttatctatatttccacagcattttcatgcctcattatttatagtacttatcacacagtattatagttctatatttgttttaccttacctactagtgtaggagttgagggccagattgtatcttactcatctttgtattcttggggcctaacctggtgtagtaaaatagtaattcttcaataaatgttcaatagctgtgaaggaaagcaagtattctataccagtccttgtatttcttctaacaatgctaggaaatgtatggtagaaagaacaaaccagtattgttaaaaagacagcttttgagtatgtacaagtctgtgcaaggatatactatatttttctctataattcagtatatatttccaatatcccttcttggggtatgagagtcatgtttctcaaggaacataatgtctagtagtagaatggacaagacaagtcaggccgtagaagtgccaatgtccagctgaatagcgtaagatttaatttacagttaaagacagtggtagaagagtttgtcataaggcagttcaaaaagatgtctttcaaataactgaaactgtgttttagggattcttagaagagagatgatttttaacttagtgaacagggaaggttttatagaggagaggtgaatttttaactgagctgagtctggaaaactgtataaagattaggatagacagaggggacttggaatagaataagtagaaatgggggagaacaaatgcaagcaattttcagagcaaaaataatttttttttttttttttttaggtttgagcaaggaaaaaatgtagggtaaggctaaaagctaggtggggccagattgtgcagaactttgagtgaaaataccttttgggtgtttttgggacccagttcactctaacgagcatctttgttggaaaagagaggtgattatcaaatgatagctttttaggtcactctttgtaagattt

SEQ ID NO: 489 - DNA, 1370 bp, Homo sapiens
cagaacaatcagaggttccagtggctggagaatataaataggatggaacagatagaaacacttaaatttttatatacttattcagaattataaaatgtgttatcaaatactgaatatgaatatgaagtttcatcatgattatgggaagaacttccccaaaggcttactccctgattgattggacttgagaattaagcagtaatgtgagtaggtcctgggcataagatccaaaagcattctttaccctgaccccacaataagggacttgtagtatgtgagtggatagagctaggttttccctgaggagtcctttttgttgtcagcaataccagtcctataggatcagacctttgataattcttctagaaatcccccagagcagctctcatgttataaactagatatgtgattctttccttcttttctttttcttgtcttttccacacccgtctccaccttccctccttcttttagaagagtattgcctttcaaaattgcataatttattacttttattcatttcccatggactggaaaagagaactctagtgtattatattattagtctcaaaaaagtactattagcctctcataaaatactgatagattttacagttgtggtcagtgtttacttttgaccatcagttaccagtaacttctttcatggttcaataaaatcatagctttagtttatggcaccttttcaaaacttcctttggcttttctttgtgcttaatttaggtagttttgcttttagctcacttcctaattctcttttttacacaattcattttggtcctaatttctttactttactatataaacaaggtgctgaaatgtgtgtgtatgtatttaacttcctctacccatttgctcttggttatttcttcagttatgatattctggatttgccagtcattgtccgtcctcctgcctctattactggcataatgtcattgggtctcacagtttcatttcttcattctaattctattgcatgtttctataatgttttctgtagtatttttacagttacagatgcttttacacgtactgtgttgcttaattcgcctaacaaccctgtataagatggccagagtagaggatgttaacatttataggtgagagagctgagagatatagagatttagttactcaagccctcatggccaggaaggagccaatctggggtcataatcaaagtcttttttttttttttttttttttttagtctaccaatctttctgtaaataaaagttgtttaattttaaaaataccaagggaaggtttcaaaatagatactttaaagagagccagagacctcattttcctcttttgccttttccatagggtctaaaaactgtacattc

SEQ ID NO: 490 - DNA, 1088 bp, Homo sapiens
gaatgcctagtatgtaactgaggcattgtagatggtcatttctgctaccttcctttcttccttatatataattcattcaacaaacattagatataatttctgttttgaggggctgcctgtctcctgagaaagataagacgtataaatgagtaaatagagatgctatgatggaagtattatgggtacagtgggccacagaggtagcatagtgagctctacttgatagggaaagatgagactatcagcagaagcttcacagaggtaactcttgatctgggtcttacaaatgaggtttgcttttacagtcctcattagggaggagagggaaatggggttagagatttagaagacattccagaattcaggcatatattcactttactgtgtatttattttaatatcaagttttacaaattgattctttaagaaggaagattgctcttaaaatctcctaattggtgctggacgtactttaaaaattatcctgaatgtgtgacatgttaataatacttagcattatttgctgctgaatccctaattgggtgaagacttaagataacggactctggttgtttgtatttggacacctgtgatgatatcccaggtttgctcttactttacgcttatggagtattttttttattattagtggtagaatatttgccaataagttgcctaataaggttactaatttccttaaattcatatttacaagcacctttggagggggttatttcaatttataggatgatatagtataaaagcatgaacttgctgttatttaatgtttttaaaactgtggttatgacctattaatagaccctgaaattaattactaggttataaccagcattattatttttttctttttcttttttttttttttttttgaggtggaatcttctcattctgtcgccaggctggagtgcagtggcacgatctcagctcgctgcaagctctgcctcctggttcacgccattctcctgcctcagcctcctgaatagctgggactacaggcgcctgccactatgcctggctaattttttttgtatttttgtagaggcagggtttcaccatgttgaccttgc

SEQ ID NO: 491 - DNA, 1094 bp, Homo sapiens
agactattcattccccattgaattacattggcaactctgttaaaagtcaatcatatatgtatctatcagtctgtttctgaaactttctattctgttctattgacttatatgtctatttttataccagtaccaactgtcctgattactgtgattttacagtgagcctggaaattaagagtgtaaatcttccagctttgttcttcttaaacttgtcatttgcatgtctatatacattttggaatcaacttgtcaatttctttaaaaaaaaaaaaaaaaaaaaggctgctagaatttcagttggggctgtcctgaatccagagggagagaattgacattttaggaatgttgagtcttctaatttggaaacatggaatagtctgcattacaagtctcattatattctgttaagtttatttcataagtatttaagatattttgatgctgttgtaaattgtattatttttaaatttcatttttcactgagcacaatgactcacacctataatcctagtactttgggaggctaaggcagaaggattgtttgagcccaggagtttgagaccagcctgggcaatgtagtgagaccccatctctactaaaaattttaaaaattagctgggcatggtgacgcatgctggtggtcccagctacttggagggctgagctgggagaattgcttgagcctagggggggtcgaggctgcagtaagccctgatcatgccactgcactctagtctgggcgacagagcgagaccctgtctcaaaaaaaaagaaaaacaatttcatttttcgtgttccttactagtatatagaaatatagataattttttcttctatgatatttatcttagaaataaaaaaaagaaatataggtaattttcatgtatttactttgtgtcctgtgactttgctcaactaaaatccttaggattttctacctagacaatcatattatctgtgaataaagacagttttactttgtaatctgaatgcattttctttccttctttttcttgttttattgaactagctagtatcttcagtacaatgttgaatattagtagtgagagcagacctttttgccttattcctaa

SEQ ID NO: 492 - DNA, 1079 bp, Homo sapiens
gttctgtattcaaataaatatcagctgaagaaagttaaacagctggtcgggtgtagtggcttatacttgtaatcccagcactttgggaggccgaggcgggcggatcaccagaggttgggagtttgagaccagcctgaccaacatggagaaaccccgtctctactaaaaatacaaaattatctgggcatggtggtgcacggctgactcccagctactcaggaggctgagataggagaatcacttgaacccggcggaggttgcagtgagccgagattgtgccattgcaccccagcctgggcaataaaagcgaaattccatctcaaaaaaaaaaaaaaagaaagaaaagaaaaagttgaatagctttcttttttgcaaatatgctcagagcctttaatgtaccattaagcactgtgaattcttcagagacaaatatagtatcttgtgttttctgaatatcaaatcttagaaacccagtgttctccagctctcacataagactagtattttgtggactctactttgggaagcctttttgtgtatcctcagattggaattctttacctatctacctgtttaactcttcctcaccttttaaggtctagctccagtatcacgtttcccagaatctaacctgactcttccctgttggatagccctcatttgctttcacagaatgccatttaaagaaagcctctatcatagcacgtattgcaccatatgcactggtctttatttccctaactgaagtagacttgagatcagaatctgtctttaatccatatacccactagtctgcaccgcagtgcctggagcacagtagtgttcaatgtttattcagttaatcaatgctactatgtttgttaaaagttaatgtttcagatgttttctacctttccacagtccgctctatcaagctgaaggaagacattctgtcctgcacttttgctgagttgagtttgggcttatgccagtttatccaagaggtgcggagaccaaatggtgaaaaatatgatccagacagtatcttatacttgtgccttggaattcaacaggtatcaagttaaacatatggattcttc

SEQ ID NO: 493 - DNA, 1050 bp, Homo sapiens
tttaccattttaaagtttgcaattcagtaggactaataagtacattcttaatgtgcagtcatcaccactgtctattctgtagctttatgactccaaagggaaacctcaaacccagttagtagtcactccccattactccctccacccatccctggcaaccataaatctgctttctgtctctctggacttgcctattctggatattttgtatcagtggattcacacactatgtggccttttgtgtctggtttctttcccttagcattatgttttcaaggtttatccatgttttagcatgaatcaatatagcattcctttttatggctgaataatattctatcatatggatataccacatgttgtttatccattcatccactgatggacatttgaggttctgccttttggtgattgtgaatacgctgctgtgaacattcatgtacaggtttttgtttgaacacctattttcaattcttttgccatatatgcttaggagtggaattgctgagtcttgtaactatgactgagttgttgaggaactactgaactgttttccaaagtggcagcaccattttacatttccaacagcagtgtatgaagattccagtatctccacattcttgctaacatttgttaatttctgtcttttttttttttaaacaaccatcctggtgggtatgaaatgatatctcattgtgtttttaatttgcattttcctaatgacattgggaatctttttgtgtactttttgaccatgtgtataccttctttggagaaatgtctatttaagtcctgtcttagtctgtattgccataggggagtacctgaggctgggtaatttataaagaaattcttggctgggtgcggtggctcacacctgtaatcccagcactttgggaggccgaggcaggcagatcacgaggtcaggagttcgagaccagcctggccaacatggtgaaaccctgtctctactaagaatacaaaaattagctgggcgtggtggcacatgcctgtagtcccagctactcggaaggctaaggcaggagaatc

SEQ ID NO: 494 - DNA, 1015 bp, Homo sapiens
tgactggcagtcccatgtccagcaagagcagacatctccctgatgccctacctcccctcccactttatcacctgcatctttggggattttttttttttttttttttttgagacggagtttcgctctgttgcccaggctggagtgcagtggcgcgatctcgactcactgcaagctccgcctcccgggttcacgccattctcctgcctcagcctcccatgtagctgggactacaggcgcgcgccaccatgcccggctaatttttgtatttttagtagagacggggtttcaccgtgttagccaggatggtctcgatctcctgacctcgtgatccgcccgtctcggcctcccaaagtgctgggattacaggcgtgagccaccgcgcccggccatctttggggattcttacaggatttgtggggagttttcagtttggtttgatttgtggtagtggtgcctcagttgatgatgttgtttttctagggttgatttttggggaagggaacctgtagcatacgctagttcactgtcttaataggatccaaagccccagtgtatcttgtctttttattttcagtctatgtgatgctttagttgtctgtcctgtaaatagagatttacaattaaacccagtctgttaagttctgtttggtggtagtggttttgtcgttaacatccaatctgaaaactaatgcctattaagtggtcacatttttcatgctgattttttttccctcccttcctgctgatgggttggttgaaatcttttaatttttttctttccttgtctggtttagatgttctacattctagttctgaattttcagtggctttctcaatgtttttaagatgaatgcctgactttctcaaatgagtatttctaccatcgtcctatggaaagactaggttacagtcatcaccccatccccatcttatatgttacagttcagtattttcattccatctctttattctctccccaagtagcactccctgggaacttcctaggccaggttcc

SEQ ID NO: 495 - DNA, 1049 bp, Homo sapiens
tgttaacaaaagatatgggaagaagggacatcaaccctcctcccttaaagccagcaggggtactggggtggtgcactcccacccaccagtggcaggcagggcccagcaccactgcttgcatgtgctgatgccaggcccaaaacttccttgccagaggacacgacctcacagggctgcccagggggtgggagctgtgcacgggtccgagacgtagcgtgaagcagcacacccagcagacagagtgcacagttaaataccatgtttaatcatcccacaatggacagtagtgcagtagtagaaattataagtgtctctttaaaaagtcactcccccaaagtttccattccccaatacccagataaccatggtggaacagggccagggtgagggggactcaggaagtcttggttccaaggagatgaaagtctttccaagtcaaatttgccttgtgagcagccaagagcccaatgagttgatgcatacgcgctcactctaacacgcacacatgcaagggacacagaacacatacagatggagggacagagaggggaccacagcggggccatcgcacacatgcgctctcatgccacaacattccagtccatctggggctatctcctctggggacagggagcggtggcctaagccccgaagcagcaggtgccggtcagatggagaggagggaggccgtctgtccagcctggctgctctgacaagggccctggcagcgagagaggccacccgccatccctgacacagtcaatcctccctaatctcgggccggatgggagaagggagtggggctccagtgttaagggggggccagatatcatttctttttttttttttttttttttgacggagtcttgctctgtcactcaggctggagtgcagtggcacgatcttggctcactgcagcctccacctcccaggtttaagcaattctcctgcctcagcctcccgagtagctgggattacaggcatacgccaccaaacccggctaatttttttttttatttttagtagagatggggtttcaccgtgttagc

SEQ ID NO: 496 - DNA, 1052 bp, Homo sapiens
ccctctatgcacaccttctccctagctctgcctcactctggctgtttgcagggggagggacgtcccctccagcccctggcagccctccgtgtctccctctttggctgtgggtgtctgcttgggtccctctgtccctgcctgttccctgtgccccatctgtcaggttggaggagctgagcagatgcctgggaacagggcgtaacatgcccgtaccttccactgcctctgtgttccttttgaggggttcccagcagggtaccccgtcatgggaaggggtgcacatccctgtacaccaggagcccactctgcactctcagtcccaggctgcatctctgcagcccccaatttcatggtcccagttctggctcaccctcaaataccaccaggttaggttgacagcttcctggagagcacctgcagtgtgagggtcaccccttgaacagccagtaagcaaagcagggtcacttgcttatgttcctctctggcgccctcttctggcccaaggatcaaatggtgcaactcccttaacctgtgtctgagctctgtgtccagaaccctgaggggttctctctcccatctgaccctgtgactcacccccacctccagtgccggtagaggtcttggtggttgagtgtaccaagatgatcacatttaattctcacaacaaatttctaagatgagcactattggcccattttacaagtaaagaaacagacccagaaaagttaattacccaaggtcacacagtgagcatctaaggcagggtttcaacgcaggcagtctgattccaggctgtgccctggctcctgcatgtgtctacacagaggactagggaagggtctgacacagcagctggcctgtccgattcatgccccactccttccgttaccttgcagctcttcagggaacaccagcatcccgagggttcttcgcagctgccatcctcttcctatcacagtcccacgtggcgcgggccaccccgggctcagaccaggcagtgctagccctgtcccctgagtatgagggcatctgggccgacctgcaggagctct

SEQ ID NO: 497 - DNA, 1061 bp, Homo sapiens
agcctcccaagtagctgggattacaggtgagtgccaccatgctgggctaatttttgtatttttagtagagacagtttcaccatgttggccaagttgctcttaaactcctgacctcaggtgatctgcccgcttcagcctcccaaagtgctgggattccaggagtcagccaccacacctggcctatcattttcttttatgggccttgcttttggtgttgtatctaggaactctttgctcaacctgaggtcacgaagatttttctcctaagttttctgttgttgttgttgttgttatttgtatttttagtagagatggggttttcccatgttgtccaggctggtctcaaactcctgacctcaaatgatccacccgccttgccttccaaagtggtaggattacaggtgtaagccaggacgcctggccttccatgttttcttctagaaaaaacttgcaactttaacaaggcttcttggagagtctgttgcacacttgcctaggttcagaagtcagaccatatctaccacctgcggacagagtgccttgtctgacaggttgaataaccgggagctcttgtgtctgcaggagtgtgtgtgtgtgtgtgtgtgtgtgtgtgtgtgtgtgtgaatggcttctgcatatgtgaccagcaggacaccattagatcacttcagcttcaggagtcaccacagggaatcctgttctgtgtgtgtgggagacaaactttagtgtctctgctttgccctgtgtgctagtttaattcctacctccaccactgcccttctgtgaccgacctgcttccctaaccatggattccatccctcttgccattttcaagggaagaagctctgagaaaaaaagggacaggtgggggaagcagcaaggtcagtcactcatatacacaaacacatgagcaatgtcatctctgcccttatatctagcagcacctatgtttgcataaatctggcatcaacaggagaaagcacttgcaaatatccatatctaggctaccacattcctccatactccagctcatcctcattgctgtatttatcacaagggca

SEQ ID NO: 498 - DNA, 1048 bp, Homo sapiens
cagtaaggttgcagatgcaagtttaatataaaaaaatcagttgcataatatttctaaacactagcaatgaataatcctaaatgaaattgagaaaacaattccatttacaatagcatcaaaaataagaaaatacttaggaataaatttaaccatagaatttttttttttttttgagagatggagtctcactctgttggccaggctggagtgcagtggcgcgatctcagctcactgcaagctccgcctcccaggttcatgccattctcctgcctcagcctccccagtagctgggactacaggcaagtgccaccacaacctgctaattttttgtatttttagtagagacagggtttcaccgtgttagccaggatggtcccgatctcctgacctcgtgatctgcctgcctcggcctccgaaagtgctgagattataggcgtgagccactgtgcccggcggtttttttttaaacactgaaaattataaaacattgttgaaataagttaaagaatacataaataaatggaaagatatcctgtgttcatgaattgcaatacttaatattgttaagatggcaatactccccaaattgacttacagattcaatgtaattcatatcaaaattccaacaaaaaggctgggctcagtggctcatgcctgtaatcttagcactttgagaggtcgaggcgggtggatcatctgaggtcaggagttcaagaccagcctggccaacatggtgaaacaccgtctctactaaaaatacaaaaaattagctaggcatggtggcacgtgcctgtaatcccagctactcaggaggctgaggcatgagaatcacttgaacccgggagatggaggttgcagtgagctgagatcgtgagatggcgccactgcactccaggctgggccacagagtgagactgtcgcaaaaaaaaaaaaaagaaaagaaaagaaaaaccacacacacacatacacacacacacacacacacacacacacacacatacacacacacaagttccaactgcctttcttgcagaaatggacaagcata

SEQ ID NO: 499 - DNA, 1054 bp, Homo sapiens
cacacctggctaattttttatttttagtagagacgaggtttcaccatgttggtcaggcttgtctcaaactcctgacctcaagtgatctgcctgcctctgcccctcaaagtgctgggattataagcatgagccaccccgcctggcccaagaaagtttgatttttttttttaggatgagagaaattagagcatatttgtatgctgaagggaataatccagtaaaaaggaaaaatttcatgatttaggagagaagacaattcttggaatgatatccatgagcagatcagagtacaaaggcttattgtgggacaagcaccattctaaatactctatgtattttacctaacactgtataaataaataaatactctgtgtgtttgctcaattaagacaaccacttttcaagggaagtattattattattattatcataactttacatatgaagaaacagacaagtgaaagattaagtaacttgtccaaggtcatgcagttctgccacttaatcattgtgtgatcagggacaagccacttgcccattctgaatttttcttttttcttttctttaatatgaggaccataatcattttcctatttgttttacgaggttgctgtgaagattaaatgagaatagaggtgaaagtagctctttactctaaaactttttggtcagaatttaagaatgtaagatgagaaattactcttttctagtatgaaaacgtatagttcttaagttagctctttaaaatggagattgtacgataccacgtctctccatcaatttttttcagtcacatgatttggtttgtaaacatgactttcccacagatttcatttgtagtaatataaatgtgttagctagttgtgatgtattttggcttttaagatattgttcccacacatgaaactcacaaacgttgctaagttaaagcacctaacttttcattgactctagcattcaaaaatctcacaaaccctggtctgtccatatcttaaactctatacaccagtttttttgccactgcatttattccacggcctgcatacagtgtgat

SEQ ID NO: 500 - DNA, 1057 bp, Homo sapiens
agttctaggattacaggcgtgagccaccacacctgtccaaaagtgtctgtttaataaagaaccatattacaaattcatgagagcaaatctcagccaggccttggatgctgccgttttttcatttaccctattccccatagcatctgttccacacctttatactcttctcaagtcccctaccctattcataataactctattgccaacaaagtcctatcgtctatttccctccaaaaacaagatctagaaggcaagaattttctcagctgcctctcctctactttcaaactcagttacatcttgtattttcctatctccttcctcgtatctctccacctatgctttcctgcccccatcctgtgctttcaatcctaatccctcctgacttctctagagccttacttggtcaattacgcattatttttcaaaacgtcactctttcgtgttctgttgcctccttctcgccctataaaggtggtttaaatcttcctgagttcacctcaccctgcttctccctcagtctcactgctaccttatcttttcttcctttcacgactaaactttgagaaaaacaatcacttgactttctatctgtactttctcacatcaaactttaattttctgtagcctaacttcaatttcagtgactccattgaagttgttgtctcaatgacttgctcatttcaaatcaagagatactttgtcagattcccacactgacttctttgtagcacttaagacaatgattgccttatttggccttagcaaagtgactttccagctttactacccacctttgtaatcagacttttttttttttttttttgaaatggagtttctgtaatcagactttttttttttttttttgaaatggagtttctgtaatcagacttttttttttttttttgaaatggagtttctgtaatcaggctttttttttttaagatagagtttcactctgtcatgatctcggcttgctgcaatctctgcctcccgggttcaaataattctcctgcctcagcctaccaagtagttgggattacaggcgcatatcacc

SEQ ID NO: 501 - DNA, 1028 bp, Homo sapiens
tgtttgagattaaagaagaagattctcagagtggttaagagtcctgtttaaggtaacatcacctagaaatggcaaagctggacttcaaacagaagtatttccagacctactggctctctcaattctagaagcctttctgttcacagcatcctgaatatagtatattggggagtggaagtcttgtatgtcactagacagctttttatgatctctgttgttttctgttgggcccagaacagatgaagtaaatggcaggatgtttctcacaccagcagaggacactgtcagccaacagagacagtgatagctgtaggctgggggctcaggagtttagaaccaaccctagtcctggtgggttgcaggatggagcaacctgtcaccattggacagctgccttagaaatctaatttgtgtatattgagttgttcagtattcagaagagctctatatatggtcctttggtaaataataatctgtgctacaatttattgtttactgtgttccagaactatactcagtcctttaagtgctttatttaatcttgaggcaactcttagattgttactattatccttccttaaaatatgaaggtcaggcatggtggctcactcctgtaatcccagcactttgggaggcggaggtgggtggatcacctgaggtcaggagttcaagaccagcctggccaacatggcaaaaccccatctctattaaaaatacaaaattagccgggcatggtagcacatgactgtaatcccagctacttggaacgctgaggcaggagaatcgcttgaacctgggaggtgaaggttgcagtaagccgagatcgtgccattgcacttcagcctgggcaagaagagcaaaactccctctcaaaaataaacaaataaatacataagtacaaaaattagcgaggcatggtggcgggtgcctgtaatcccagctacttgggaggctaaggcaggagaattgcttaaacccgggaggcagatgtctctgagccgagattgtgccactgcactccagcctgg

SEQ ID NO: 502 - DNA, 1073 bp, Homo sapiens
agtctaatgaccacattctttccttacaacatgctccccttgctcttctttttagctgctatggcctttctgtttctcaaacacatcttgctgtcttctagcagggtgcatttttgcatgttgttccctctgcctggaatgctctctctcaaactccccctctcctctaagtcctttgctgtcatcagatttcatttcaatcattacctactcaagaatcctttcctgactaggtttttatttcccattttatgctgttattgttccatgaagttttctgttgtgtcatttatcagcgttgtaattttcacgatttttaaaattagtccctatttagtaagcactttgagagtaaggaccttatgtgtttcctgtcattattgtgttccctagcacctcatacactgcctggcatctagtaggcattcagtaaatatttgttgaatgcactaatcatttctctccctgcccttagctgaggtgaaacgtgtcggagatacactcttgggaatggctacgcagtgtgtgcaggtgaagaacgtggtcaagacctcacctcagactctgtccaacctctgcctcaagatcaatgtcaaacttggtggcattaacaacatcctagtcccacaccagcggtatgaactctgttgtccacttgcccttgtcaaggtaccatgctgggaattgatgaagagataggaccctggccaggcagactgaatcagacataagggggagaagagcagagtgggtactggatggtgccagctagagaagacccagcgcctcaccattttgttttctcttccttgctcagctctgccgtttttcaacagccagtgatattcctgggagcagatgttacacaccccccagcaggggatgggaaaaaaccttctatcacagcagtgagtgatattctgtagctgcctcataaggttctcctcttcgctctgagtcctcaaaactgcccatgatttccttccctcagctctggctcttgagccttcataagatgtccatttagctcgctattcccaattcccattcccttgatatctcataaaggtagc

SEQ ID NO: 503 - DNA, 1036 bp, Homo sapiens
tacttcgcttgaaggcagaacgctgttacctcactggatagaagaaagctttccaagccccaggagctgtgccacccaaatccagaggaagcaaggaggagggaggtggggtagggaggagtgtaggatgccttgtttccttctatagaggtggtgtaagagtggggaacagggccagcaagacagaccaccagccagaaatctctgatatcaacctcatgtcccccacccctcaccccatcttgtcacatctggccctgaccccactggaccaaaaggggcagcactggtgcccaccatacacacaggtgtctcatgtgactcacagtgctaaagactcatgcttgacagcttggtaaggtcaactctgtagccctgcagacaaaagctggttaggtttgggtttgatactttagatgggaaagtgaggggcttgagaaagtgggtgggaggagggaaggattttttaggagccttaatcagaaaaggactagatttgtttaagaagaaaaatgaaaccagacccagatcaatattttaggatactagatgttttaatgggttcagaatccagtttgtaggaagattttttaatggttttggttgctcctcccccagctgccaccccccaccttacccttattcctctctgtccacattttctgccccaccttacttctcctccctgacagacatccagcccctagtaatacttaaggcactatggcacttagctttgaagtgacacgaccctgtcttccttccgcccgctggtgggtaaccagtgccttccctgtaacggtaatgctgcagaactgcaaccttttgtacctttctttggggaatggggtgggggtgggagaggaggtagatggggaagaaataccccagacccaacaaacctccagccagaaagccagctattttgcatttgaaggaattgacttcctcattcattgagctttttaaaagatcacaacctcaagatggttaaaatccattgacatttgcactttcaaacatgacaagtctcgga

SEQ ID NO: 504 - DNA, 1036 bp, Homo sapiens
acaggcccctggcctttccacttatgcctccttttctccttattcctcctacctcccgccccgcccaggtctggagttactttcatagcatttttcactcttggcttcttttctcccttgatggtcaagtctcttatgtttcaatatttcttaactggggtgtcttataacaaaaaactcttaggtctaaaatgagaaaaaagagagaaaacaaaatgttatttttataccataacttgagtgtattgccaaaatttggaaatccttcccatgcctgatgagtttatatcccagaaacattgagccatcagaatgaactgtgtacctgatttgttctctgacctggctaggtagggagggggtggttatcgccccaagatggggtccaggctccatccttcctctgtgcagataatacctttttcttgctatagcctccctcctctgcactgtcctgcactctttcttgcaagtgcatctttttccttcccctggactgtcctctgaccctttggctcatcctagattgcagtgtgtcctgtggacaggctggggaattttgctgctccctattgcttctgtttacaaaaatgaatttttcctggtttcccactagggcatgtgggtgggtggcatggacttttttttttttttttttttgtcttgagacatggggtttggctgtcttgcaggactggagaaggtggtggttctagcttggtctctgttggccttgaagcaagcatcccccctgccctttttccttgactgttcatttttttcctgccccactgcttgggatggggagttgcaacttcagtgtggaatttcctctttgaggagcctgggcttggatctatcctgatctggtgatgaagccatgattactttagacctagcccaggcttggaggccagctggaggaagaagggtctaaatcctggcctgtagagttagaactaccatttcctccccttagctgcccttgtatgacccggatttgctatgcaaaacaatctatcccaggttctgttct

SEQ ID NO: 505 - DNA, 2049 bp, Homo sapiens
gtattttctggttttcgctttcctccgacttaataggacttgccttctccctgggcagggagagaggctgggttggtgctctcccttactctactcatactgacttagagcctctggctgctgtttgggcatccaagaaagggaggggaaggaatgagctaaaaacaaaacagaatgaggtgggaaagggagattttcttctttacagaggaaaataggaaaccctccaagaattgtgcaagtaaagacatttgttgaatgcactgagtcccttggtgtagtagcaataaggaaaaatgaaattactttcctgtgcacacagtccagcctaattggtatgtgatgttgcacttagcagccatgtggtgggcatgtgtgactactctggttttcactttagtttctaaactttttatccctctcaagtccagcatggatggggaaatgtctctggatccccacagctgtgtacttgtttgcatttgtttccctttgagatttgtgtttgtgtcctgctttgagctgtaccttgtccagtccattgtgaaattatcccagcagctgtaatgtacagttccttctgaagcaagcaacatcagcagcagcagcagcagcagcacaattctgtgttttataaagacaacagtggcttctatttctaaagtgcggtctttctctttttttttcctaccagcaaaacaaacttttgggactgattacatctctaatagattttaggtgagaataatactgtagattgttatgcaggaatacttcacagagccttcatttattcttcattcaacaaacatgcaaagcactgtgccagcagtattgtggggaggggaggcacaattcaaaatgaggaaaatagtgtccgtctcattaagggaattaagtttggtgggggatatgattagccaaatagtcccctggcataggaggaagataatgagggagtggaataaggctacaacaacgaatatagggaggaagggacagatttgagagacgaggtagaattaataggactcgatggctggtgggaggagaagacaggagtagaggttagctcccaggtttctccttgaccataggagtgtgttgggacattctgccagtcaagatgggggtgacggggagactgtagaaggaaggtggggagtttttgaagaaacagaatgttgtatagactgagttttgaggtgtttgtggggcagtaagggtaaggtgtccagtaaacacaggttggtgctcaggtaagactgtaaaactgcatttatagatacaggagtcttatagatggtagttaaagccataggcatgaatgagatagcttagaaaaagagaagagaaactagtatacagccccctaagaaactcaatttaaaggttcgggggaggaagcagatcttaaggtgacagatcactggtagacagtttgtgggttttttgtttctttgtttagccagtttggtgaggtaggagaagaaatcagagtagaagaaggttcatgaagggagtgattaacaacatgaactgctgcagagagggagttctttttttttctgtgtgttttacctttctactccccatcttttggggatcttgtaactctatgacttacttacgttattctccagtatttcttgaaaatgagcattggaaaaaccaattctaaaatggctaaaactaggactttcaagttcaccacaactaccaccaattaggagataattgtaaaagaataaacaaaacctaattttgttcctagccaatattataaaccatgttccagcatactagataatagtagcatactatatttatttccataatttgtcttctttagagcctatgaactcctaggagcagaagctatattctcttcatttttgtcatctcagggtcatggcatataccaacagatcagtatgtgcaaatataattgaaataggctagtagtctgtggtttatgagtatgggctgggtgggcagtggatcaagaagtgataggagtacacaggatgaactcagaattcctgaatc

SEQ ID NO: 506 - DNA, 1116 bp, Homo sapiens
tggcacctctgggcattccttttcattactggttgagcatccttccttctgctctgtcaattggcaaaatatgctggagcacattctggactagcagttgccttggggtagtcaggctgggtatttgtttggtatctcttggtgtagcagaccccagaatctcatggcaattaggatttggtggctaaacgaaagagttagtgcaaggaaaagcctagttggaatttctgagtctgggccatccttaagctgctgtctactgcctgaatgggaagtaatgtcgaattggaaaattagctcaccatttttgttctagctttgcagacatttattcctctgatgataggctgagaaatgcctaggccggcttagaaggcacacagcatgacagaagtactccttcaaagcagctgtgtcaagaaggaagagctggaaaagtggatttgctggggaattagatgcatttagttttccacttacgcacaactgccttctccagtatatcataccaaggttttttaggcctttgtggcttaccctgcaggaacatactgtgtcctgttgttctggactgtagcatcttcaccaccatcctcttggcaatggttttttgtttggggtttttttttttttttttttggacaaagtataataatattgagggacctttctagggagcctttggtcctttgtccccattttccaaagggagggaactttcctcttaaaagagacagtgggaacttttagccaggtttttggaaaaggcctgtgggctattaatgagagtgagctgcaaaaggaggaagggtttgtttgggtactttgaagtacttagctaggtgttttctacagtatcttatataattgcatcttacagcatctttacatgcgaaatagtttatcagttatcttcaattgcatattacaaaattctgattaaatttttcttaaataagaaaactatcatttcatatgacaagaaatcctaatttaatgttactccaaggttggttaattcagtggctcagtgataacaccaaagactcagtttcttgaaatttttttgctctgccatcctccatgtttatcctcacgccagttcgcctcatggtc

SEQ ID NO: 507 - DNA, 1817 bp, Homo sapiens
tatttggattttgtttttaaaaacaaagacaacacattttaaaaaaatgtgatattcagtttagcattttggtttctatgatcccagcctcttcttattcattaaatgttattaagagtcttcatttaagacatttaagaaaaagaatgttgtttctctcaagaaatttgtaatttggtagaggaaataagacatgtaagaagtatgaaggtctttttcttggacttgtcatcctaattgttagtatttctgttatacctgaaagtgaatgagcactaaaagactttgtgataacacgttaaaaacaacaacacctctaagaatgttgtaattaacatgtaatgcagagttctttgtgaggtcaggaagactcgtagagtgttacagttgaaaggaacctcttaagaagttaactaatccaataccttttttatttatagctgaaatccagaaaggttaagggatttagtcaagaacacatgtttcaagtaggaaaggtgaaaccagaactccagaatcctgacttggtagtcattaggaagtattttgtaaaggaagaagttaatctaaaacaattggtaaaattttggttagctgtagtaaaaataacatacatataattttatttatttatttatttatttatttttgaaggaaggatagcagtaacaaaagcataacggttgagaagaaccaggtgtattgagtctgaaccaggcttaaggggaaggttctttgcattacatgttaattacaacattcctataggtggttttttttttaacatgttatcagatactgctttaagatactatctgttgaatagatgactcctaatcttgctgtagcctctacctctttcctaaacttcagattgacacccaaatgttcctaaagtgaacaacacaagtcaaaagagtagtgccctactcttctgtgacctcgtagtacttgatgtacacttccattgtggtgtttttagtgcattgtggttatttttctccctttctccagtataaccccttcatgaaaagtagtgttttttatcatctttgtcaccccatgtcagctcagtgattggcacataatactcagtaaagtgaatgaaatgtttataaaatggcatgagtgtgatggtgggggacaggaaagaaaactggatgttctagagggctgttttcctgaacatgggtttttcagtgccgtactcttatctcctaggatcttaggctagtcttggttttggtcttccttcactctcttttatgtctttctgtgagccgtcatccacttatggggacttaactgactcatgctgtactctcatagagattccctttttcttgtttctcaaaactggttcattaatgtatagatttgagtgaaggataatcctgacccttctggtagatatttacactttaaaaaggcatttattagctgagccatgggcctgtagtcccagctactctgaaggctgaggcaggaggattacttaagcccaggagttaaggctgcagtgtgttgtgattgtgcctgtgaacagccactgcactccagccggggcaacatagtgagaccacatatctaaaaaataaataaataaaaataaaaaggcattagttaatctaagtaaagatctggggcttgagggatgtcaattcaagtttttttagtatgccagatgagttacaaggaaatgatatggtggcaaaaatattaagtaaaaggaacagaatttttttttttttttttttgcaacagagtctctccctgttgcccaggctggagtgcaatggcgcgatttccgctcactg

SEQ ID NO: 508 - DNA, 1059 bp, Homo sapiens
catccggccggatatttcttataaatggaatcatataccatgtggccttttgtgactggcttctttttgcataatgatttcaaggttcattcatgttgtagcatgtatcagtatattcaggcactgcataacttttcagtgaattacagaccacatgtatgatggtggtcccataagattataataccgtatttttactgtacctttttatgtttagatacacaaataccactgtattacagttgcctacagtattcagtatagtaatgtgatgtacaggtttgtagcccaggagtaataagccataccatatagcttagatgtgtatatggcttagatgtgtagtaggctctactatctaggtatgtgtaagcacattctatgatgttcacacaacaaaatgataatgcatttcctggaacatatccccatcgttaagtgatgcataactgtactttattcctttttattgctgaataatattccattgtatggatataatacattttgtttatccatcatttgatggacatttgggttgttgccatttttgactactacaaataatgctgctataaacattcatgtacaggattttgtgtggacatacattttcatttatgttggatatatacctaagagtgatatcatatgataactctatatttaaccttttgagaaactgccagactcttttccaaagtggctgcaccagccagacatggtggctcatgcctgtaatcccaacactttgggatgctgaggtgaaaggatcacttgagtccaggaattcaagaccagcctgagcaatgtagcaagacatcatttctactaaaaagaaaaaaaaaaagaaggcagtgtctgcaccattttacattcccactagcagtgtatgaagatgttttcccatattctcaccaatatgttattatttgtctttttaaaaattattttcatcctagtggatgtgaagttgtatctcattgtcgttttgacttgcattttcctgatgacggatgttgaacatttttcatgtatttattggtcatttgtatattt

SEQ ID NO: 509 - DNA, 1023 bp, Homo sapiens
tcctccttgtagttaataagcatcttgtagggagattctttttgtaattgtgataaaacatatgtaacataaaatttaccgtcttaaccatttttaaggtatatttcagtggtattaagcacatttacattgttatataattattaccaccttccatccccagaattgtctttatctttcaaaactgaaactccatatccattaaacagtatccattgctccctcccctcagccctggcaaccaccatagtactttctgtctctgaatttgactattctaggtacctcatgtaagtgaaatcatagattgtttgtctttttatgactggcttatttcacaatttatccacattgtttcatgtgttagaatctccttttcaaggctgaataatattccattgtatgtatgtaacacattttgttaatcccttcatgcatcaatggacaccttttggctattgcaaataatcctgctatgaacatagatgtaaaagtattgaactctgctttcggttctttggatatatacccagaagtaaatttgccaggtcatgtgataattattaattttctgagaatctgctgtattgttttccagaatggctccatcattttacattcccaccaacagtgaacaagagttccaaactctcacttccatgccaacacttgttttctgttttgtttttttttttgttcgttttctaatagtaaccatcctaatgggcgtgagatgatatctcattgtggttttgatttgcatgtcccccaacaattagtgatgttgagtataactttgtaggcttattggccatttgtatatcttctttggagaaatctgtggtcaagttgtttgcccattttttgaactgggttgtttgttttgggttttgggcagtgagttgtaggagttctttatttttagattttttattttttttagctaaactgatcaataccattgtaggagttctttatatatattctggatattaacttctgtattctggatattaactatat

SEQ ID NO: 510 - DNA, 1041 bp, Homo sapiens
tgaaaacaatttttttttttattaacgttaaactcactagaaaactctcaagaattgtgttgaagatcatttgaaaatatatctgccaacttcctcttccttcctgaagtgtgtttacagacagagcaagttacaacagtcttactattctttgaggatagagcagcttcctggggattctggaggctcagttttctggtctgttattaggacacaatactgatgttgaggaaagtaaggccttgctgacaatgggaattattcttaaaagttatttttctatctattttagctagattagtaacatgtactttcattttgttggtggaaatatttaaaacaattatttttctggtgatcactgttttagccgtattacaaagcttctaatatgtagtatttttattatattctagaaactagaaatacataatattattttctagaaactccacaaatttcatttgtatttcctctgtgcttgaaatattgtttgagagacttttcaaattttcagattgaagatctttttgttttctggatttgttgtgaatttctagtttcattgtgttgttaaaaaatgttgtttgtggctgggcgcggtggctcatgcctgtaatcccagcactttgggaggccgaggcgggcggatcacgaggtcaggagattgagaccatcctggctaacacggtgaaaccccatctctactaaaaatacaaaaaattagccgggcgtggtggcgggcatctgtagtcccagctacttgggaggctgaggcaggagaatggcgtgaacccaggaggcggagcttgcagtgagccgagatcgcgccgctgcaccccagccttgggacagaatgagactccttctcagaaaaaaaaaaatgtggtttgtatttttccttttagagtttctagaggtattttttgtagcccaatatacggtcaatttttgtgatagttctatggctatatgaaaataagatatattcatatattagtttagagtgaaatatccatcagagctaccagtttgattatg

SEQ ID NO: 511 - DNA, 1052 bp, Homo sapiens
gttctgtctctcctgttagaacgaaagctccatgaagggattgtcattttattcaccagtgtaccctctatgcccagcacaacttttggtcatattaaacaaagaatgaataaataaatccaagagcataggaggaggagcatccaaatgagcctgaaaaattagagaaatatttgtagtagtatgtgatatcttagctgagcttaacaagtataatgagatcaagagtttggattgaaaatgaggtactcaggaataaacgatttctgaggtctctaagatattataaaactttattgaaagatctaagaaaatttaatgaaacacattgtccttattaatctataaatatagttttaattaaaattccaatagggggccaggtacggtgggtatgccagtatttccagcacattgggaggccaaggtgggaggattgcttgagcctgggagttctgaccaacatggtgaaaccctattgctaaaaaaagacaaaaaaattagccaggcgtagaggtgtgtgactgtagtcccagctactcaagaggctcagttgggagaatcgcttgagcccagaagtcgaggctgcagtgaactgtgatctcaccactgtactccagcctgggcaacagaattagaacctgtctcaaaaaacaaataaaataaaattccaatagggtatagtataacacttgataagtcgatattaagatttatatggaagaataagtgactaagaaaaaccaatagaattttaaagaaaaataaagcagaaattgccctacttcctataaaactgtaacagttataccacatggcttcaggtgcaggaacaggcagattaatgaagcagagtctagaaacgagccacatatgtgtttatggaaactgtaaatatctgatgtagtgtttcagatcagtagggaaagagtagaatatttaataaattgtgtttacacagtttaactttaaaaaaattagatccatcttacattagacacaaaatttatttctaggtgaattatatcccaaatatgaaaagcaaatcttca

SEQ ID NO: 512 - DNA, 1032 bp, Homo sapiens
catgtgagatcatacagtatttgtctttctgtgtcttgcttattttatttaacataatatcctccaggttcatccatgttgtcacaaatgacaagacttccttcttttaaaggctaaataatattccattttatgtatataccacattctttttatccatttgtctgtcgatggtcgcttaggttgtttccatatcttggctgttgtgaataatgctgcagtgaacatgggagtgcaggggtctccttgagatagtgattttatttactttgcatgtagtccctgaagtgggattgctagatcatgtagtagttctatttttaattttttgaggaacctccatactgttttccataaaggctgcaacaagggtttattaattgccaataaaatgctatgaaaaataatgagaaatattgcactgaccatcttacttgcttacatttcctttttgcttttgcgtgattttgattttgcaagccttgtacgtggtatatgcactgaactaaacagcctttattgaacttgaaatcagctggagaagactggtaattgagcactataataagtactgtaaaggaaaataccaagtgcaatggaagcataaaagggagggatccattgtagtctcactggttgagggatgtttccctcaggaaatgacagatgggagctaggcgaaattggtgatggaaataagcatggaagagtactctaagaaagggagcaattctctctaattgtgtgattggtcttgagaatgattgttctattggcatttaatagcctaactttcaactgtgtaattaaacttgctgtattttaccaatctaagactcaaaattttttgtttacatttcaacatctctgaaattgggagatatcttacaattgatggtttgtcacagttcagttggcaggtttctttttaaagaatacataaaatactggtgcagcttaccatcaatggcatcttagatttgatgaaatgaagaatatttctttagcttgttttgaggccagcccatttgc

SEQ ID NO: 513 - DNA, 1062 bp, Homo sapiens
ttattagtgattaccatattagcataaatgtagaacattccatcacctcaagaaaattctctttgacagcactgcttcagaaaattcatctcgaagaacttcagccaacagcttaaagcccatttcttcacattctagagcaggcctgggatccttgaacccctagagtccacagatggacggcagggatccaagaactcctaaaatcatgtgctaaattatgtatatgtgcattttgctgagagtttattgcttacatcagattctcaaagggatcttgactccataagagggtagggatcacctactttaggaattattttggttacatttgatttttaatagtattggaaaagagctgtgtcactatattatacctctataaaagtgtcactttgcttctgttaaaaatgcctggaatttttttctcctgctttataaatctttaaaggacttctttcttgagctttacaaaattctgatcttcaagcagtatgtgatgactgggctaggtaaatatcacataatttgaaattatggaataccttgagaattattggatctcctctttcattcctccttccctctcccagcataaatacctgaatttattataaacaggattttttattaatggaagattttggcccttgatctatgggctttgcaaattttatgattttattttttaatgtgtagagcttgatggggtaaggaaaaattttgccattaggtctgtcatgactgtgaccattattagcaatgttatatgtaaaatctggtgtttatatcatcttgcctgtatcacagaattttttgtctgttcagaattgagtttttatggtaatgaacaggctttataagtataaatattttacatgtgacagttctgtaacctccatttttcttgttgggaacaggtttgaaggttgaagtgactcattgtggaacaatgagacggaaataccgtgtttgtaatgtaacaaggaggcctgccagtcatcaaacgtaagaaaagtttgtcagagcagcgatggtgtgaggcagcttgctctagttagt

SEQ ID NO: 514 - DNA, 1060 bp, Homo sapiens
gccactagaagtaatgccttcacactgctaattaataccctgttgttcatgattcttttggggtcttttatggccgataacttacctcatacagaacatttattttggaatatgaactgtttttaagttttaatttattctaaattttctgtaatgaaataacacgaaacaagttcatccataatcctaccactctaatgtaaccactgttaacattttggtatactatacttctttcagtcttcatctggtgtacattttacttaattatacttaattactgtagagctgtcttgtttactacttttttacttaacatattgaaaataagtggtttaatgaagttgattttaaatttttatttacatgtaattggcactaagtaagagctaaaaaaaaaagatatatacatgtagtacaaaacttttttccatttgtaggtctgtaatattgtggcagggcaacgatgtatcaagaagctaacagacaatcagacttccactatgatcaaggcaacagcaagatctgcaccagatagacaagaggaaattagcagattggttagtacttaaccttagaaatgagaatttaaaacatattagggtgaactgtaatactagagaaccatgtccttatcaacccataccttatgaccatttcatggactgtcagaattaaaagcaatcatggaagtaatctaatgttcttgatacaagccttggtgggctatatgagaagggttaggtccttctcatttaaccctgagctttttaagtagatccagggaacagatcctctcagaagaaatgtttccatttagtaaactggaacctccacctaaaagaggtgggaaataggaggaaaagtcaaagaattatgactagcaatactaaaattcttttttttttttttttttttttttgagacggagtcttgctttgtcacccaggctggagtgcagtggcacgatcttggctcactgcaagctctgcctcccaggttcacaccattctcctgcttcagcctccccagcagctgggactacaggcgcatgccacca

SEQ ID NO: 515 - DNA, 1041 bp, Homo sapiens
cccttgagagattacataggtttaaaatataagtctttttttaaagagtgataaaaatttgtggatcataaggaagtttataattttgtgcccatgttggagaatactagcatctgttaatattaatacagcccttttcaaccaccagcaccactattttagataaaattctgctgtgaataaaactttggattggccgggtgcggtggctcacgcctgtaatcccagcactttgggaggccaaggcaggtggatcacagggtcaggagatcgagaccatcctggctaacatggtgaaaccccatctctactaaaaaatacaaaaaattagccgggtgtggtggcgggcgcctgtagtcccagctacttgggaggctaaggcaggagaatggcatgaacttgggaggtggagcttgcagtgagccgagatcgtgccactgcactccagcctgggtgacagagcgagactccgtctcaaaaaaaaaaaaaaaaaaaaatttggattacataggacttcctctgtgctgtcaataacttgaagttacgttgcaattgtgtgaaacagataaatggatactgaaaaaatgaaatatctaaccctttttcaaaatgtgtttaagaccttctgtgttccagcaaccagtgatctttttgggagccgatgtcactcatccacctgctggtgatggaaagaagccttctattgctgctgtgagtgttagccaggtttatcttacctaaggttgacagaccagtatcaattttgcagtttcaactttttgaattttaatattttctttgtagccaactttcataaatgttctttgggtttttgaaaagaatgattattctctggtttggagtttggaagttccatatgtatctattaaatcaagtttgctagttatattattcaaatcttctgtattatactttaatttgtctacttgacctctccatgattatgcatttttagttactttttgttgttttgaatagtttgtttgtatatttcagtaatgtctttgtcatagaaagata

SEQ ID NO: 516 - DNA, 1015 bp, Homo sapiens
gctctatctcaaaaaaaaaaaaaagaaaagaaaaactactgggtgctaagctcaccatctgggtgtaatatacccatgtaacaaatctcacatgtacctcctatatttaaaatactgaattttttaacaatccaaatatatgctgcctatgagaaattcacttcacctgtaaagacacatataaactgaaagtgaagagatggagaaagtcattcattccatgcaagcggaaaagaaatgcaagcaggagtagctgtatttaagttagacaaaacagactttaagtcaaaaactataaaatgagacaaagaaggtcattatataatgctaaagggatcaatttaccaagaggatataacagttgtaaatatatatgcagccaacactggagcatccagatatataatataaagcaagtattattagctctaaagaaagaaggagactccaataatagtagttgagaacttcaacaccccactgtcagcgcttgacagatcatctagacagaaaatcaacaaagaaacattggatttaaaatacactttagaccaaatggacctaacaaatatatacaaagcatttcatccagcagctgcagaatatacattattttctcagcacatggaacattcaccaggatagaccacatgttaggccacaaaacaaatttcaacaaatttaaaataatggaggcggtcaggtgtggtggctcatgcctataatcccagtactttgggaggccaaggtgagtggatcacttgaggtcaggagttcaagaccaccctggccaacatgatgaaaccccacctctactaaaaatacaaaaattagccaggagtggtggcacatgcctgtaatcccagctactcaggaggctgaggcaagagaatcgcttgaacctagaaggtggaggttgcagtaaaccaagatcacgccactgcactccagcctgggcgacagagtgagactgtctcaaaataaataaattaaattaaataattgccgggtgtgg

SEQ ID NO: 517 - DNA, 1060 bp, Homo sapiens
gtaaatattttaaaagattagagctctgtagggttgagacctctgaaattgagtagagagaagagtttgttgagggatttttttgttttgttttttgatagtttacttgctgcctctcataccttaatgtgattttcatatattttttatatatatatatgtatgtgtgtgtatataaacacatatgtatgtgtttggaagtatagcttccttttcttttatatttattagaatagtgctttaataattatagaattgtattggcagcatcttttatagaaatataatcatgtttattttaagaactgacaacttgtttttgctatcttttagtgcaataagcagttttaaaggaaagttgtgtctgcatctttaccatggatagtaggaggaacaggcacctccatagtttaaaagggcaaagaatacagccttaatttcagaaggaaagttttgtaattttcagttttaaagcatatcttttaaaattcatcatgataaaaggctggacgcggtggctcatgcctgtaatcctagcactttgggaggctgagacaggtatatcaccggagctcaggagtttgagaccagcctggccaacgtggtgaaaccccgtctctactaaaaatacaaaaattagctgggcgtggtagtgggcacctctaatcccagctactcgggaggctgaggcaggattgcttgaacctaggaggcggaagttacagtgagccaagactgcaccattgcactccagcctgggcaacaaaaccaaaactccgtctcaaaagaaaaaaaaatcataatgaaaatgaagtgaaattgcctaaatgagtccaacttgaatattagaaataaagttgaacttttatataattgtgaatagcttaacatatttaaattatttgcaaatagattgtgtttattgaagaatcatattggctagatgcccattttcatttactaaaatgaatcaggaaaatgcaagatgatattttaaaacttttgctaatgtatcaccagtataactttccttttaaaattaaggtgatagtaacaaagg

SEQ ID NO: 518 - DNA, 1030 bp, Homo sapiens
ttacaaagggcacaccactgcagggagtgtaaacaattctttgttgcaacagacaagattttttttaaaaaaagaaaaaaggatgcattttaggtacacagggtatggacgcattcaacatttacttttatctccacagatgccaacctccccttgttgcaggcagttgggcttttccaactcattgctaacaaagctggcatctgcattaatttcaatgagaatttcaagtactgaagatgaaaagttggggagattcatgtttgaaaaatgaaaaatgaacaaaaaatccaccttgtgcagtgagatagctaacgctgatatatcaggaataattttaaactatttttgctgtaatgtgtagctttaatgtctcttttcagttatggacccataaaagtattcctatatcttgtgaataaagatcattcttgtggactagtacgtggatgcattcataggctttgggaagcagtggtgtgcgtatgtgtgtctatatcaatattttatgtttataactctgcgtattaagtttatatagaaaaaaataatgtctttctttagtgtttgggggactcaatggtaatatgaccattgcagtgtaatctgactgctcactctagagaacacttctgttatacacaatgcacatacaaacatacacccctaaagcgtagctaactgctcccactagataattgctgctaaaaacaaaacaaaacaaaacaatacaaaacaaaaaaaaccctaagtaatggaggaagaaatagcattcttttaaaaggggcttttctgaagagtaaaatgtaaatacaggacatgtggggagggtggggccgcctgcaaaatgtcctgaagatggacaaatagccttttaaattctactttttaaccatctttaccgtgtgtgcctatttgtattgcagatgtgaactactatttttggaggttgatatcagtatgttttgaaactgaattattacataaaatcagagtaacctctttctccatcctccttttccacactatt

SEQ ID NO: 519 - DNA, 1055 bp, Homo sapiens
caggactgacttggaataaagaattgctgaaaatcccattgctgagatcctaaggcttcccaggcccacgaaagtgaatgggagtgagaaactgatttgaggtcattttagatgtggtaactctgaaacatgagtagaggctgggtgccgtagccacaactgtaatcccagcgctttgggagagtccacttgagcccaagagtttgagaccagcctggcaacaggatgaaactccatctctacaaaaaaaaaaaaaaaaaaaaaaaaaagccaggcgcagtggtgtgcacctgtagtcccagctactcgggaggctggggcaagaggctccttgagcctgggaggtcgagatggagtgagccatggtcgtaccactgcactgcagcttaggcaacagagtgagaccctgtaccaaaaaaataataatataaactaaaataaaaggtgagcagggccaggcacagtggctcaggcctataatcccagctctttgggaggccaaggcaggaggattgcttgagcccaggaattcaagaccagtctggacaacagagtgagaccctgtctctacaaaaaaataaaagtagctgggtgtgatgatgcatgcctatagtcccagctacttgagaggctgaggcagaaggatagcttgagcccaggagttcaagactgcagtgagccatgattgcaccagtgcactccagtctgggcaacagagcgagactctgtctccaaaaaaagcaaaaaacaacaacaaaaaaaacaaaggtgagcaggaggctctcatcctccctcctctccccacagaagccttgtactacacagatgacacagccatggccagggccctggtgcagtccctgctagccaaggaggcctttgacgaggtggacatggctcacaggtgagggggatggtcctgggctgaggcaaaccaggtgggaaagttattgcaccccttgaccagaggaatgacatttgtgcatgtccacgcccccaaccctccacagaagcctgtgtcaggctggcacagcttcccaagctaaaacagcagc

SEQ ID NO: 520 - DNA, 1020 bp, Homo sapiens
tgaaggagccatggtgggagttatttataagtttctcttgcatttgtttggctgctttgttgcctagcaaccaaatcagctgctgtaccaaccccacctgactgaggcttaaaaatagcccagcagctgaggggacagagcagggtggcctagggcaggcaggcaccctagcagcctctccctggcacaggactgctaaaagctgggtcagaggagcacaaggaccctcactgtcctgaatccatgggacagcctcggctgggtcagccctctgacagcaggaggggcaagaccttacactgggacatggcagagggcaattgggttttcttccaatcctggatggctccttcctatatgcgccgttcagggccccttcacctggggagcgttgtaggcggggaccctcatccgatgcaggatgttgccctgggaagtgtctggttgcctgggtctgtagtggaagtccagatcatagggaggacaagtgtggccccggtgtgattgtggggagaggactcccgggtgagaagccttggccttggcatggggatggtgcctggtctgctcccttgcctcttcctgcctcctacggcccccacggtgaccggcttcgcctggccttctacccccagatcgcagcctgcagctgagcgcatgggagagcagcatcgtggatcgtctgatgacgcccactctctccttccttgctcggagtcgcagcgcggtcacactgccccgcaacggccgggaccagggtaggggctgcgaccctgggagaggccccacgtggggccgggcaggggccagcctggcgcgcgggccgcaacccgaccgcactcatccctctgcagccgtgccggtgtgcccgcgctcggcctccgccagccccctgacgccgtgcagcgtcacccgaagcgtgcaccgctgcgcccccgccggtgagcgcggggagcgccgcaagcccaacgccgggggcagccccgctccggtgcgccgccggccggaggcctcgccggt

SEQ ID NO: 521 - DNA, 1026 bp, Homo sapiens
gcttgttaaatagccaaaaccggctcctgccatgaacaacttgtggagcaaatcgggctcagtttgttctttgccgggagatgtattttgtgagccaatgttcatacgttaatgataagttttactgcagccatttgggcttaattgcattttgtaagagagttgtgttgaggtttctgtaagaagtgatttgattaaaaacctctatatccagtgtaattccatctctttgttttttaaacgttttaacaccagagaaagatctccaattttggagactgatgtttttagttttgtagactaggtacagttcaattttagcagtggtgatggtagtagtagtaccaccttagtgtatttatttaataccaaatatataggtacttttaaatttggtttagcctgcaaaatatggattacaaaaagagtgatctattttgttccgaggaattggagggaggaagcttggaatatttctgagattagcacagagatgggaaatgttgatgactgggagggtacacagacatacgatttattattattattattttttgagacaaagtctcgcgctgtcacccaggctggagtgcaggggcacaatctcggctcactgcaacctccgcctcctgggttcaagcgattctcctgcttctgcctcctgagtagctgggattacaggtgtgtgtcaccacgcctggctcatttttgtatttgtagtagagacggggtttcaccatgttggccaggctagtcttgaactcctgacttcaggggatcacctgcctcggcctcccaaagtgctgggattacaggcgtaagccaccgcgcccggccacgatttattatttttagaatggatagtcctaaccactaagcattttagggcgctaccctgtttctgtagggcatattgacatcctgaatgcaaggaagtctggttaatgctattctctcaaatacagggttttggtggattttttcacacatattctataaacatctaagatctgttcactgtttgac

SEQ ID NO: 522 - DNA, 1043 bp, Homo sapiens
tgacctcaggtgatccgcccgcttcggcctcccaaagtgctaggattacaggcatgagccaccgcgcccagccctggctaattttttttgtattttttagtagagatgaggtttcgccaagttggccaggttggtcttgaactcctgacctcaggtgatccacctgcctcgtcctcccaaagtgctgggattacaggctggagccaccgcgcccggcctagaaaaggagcattttaagtgtgctttccttcagtgatttattttgtcagatgtatactcatatcttttgtagtgtatttttcaggtaatagtgtttctttggaagcgtaggatgtgctttctgccacagagttgagttataccactgaaaatacatgtatttaggcagatgttttcaacctctgcctaaaaagttttatggactaaatccaatctgcagatatattttctttggctcatacagtgttgtacatttgaattagttgtcaacatttaaaaaggagattttgtgtaaaaatgtggattcaggctgcttttgaaaaagcagatctggcagccatggatctgcttttctgttttgcagcaaccatcttttatagttggggcatgtcatttccaatttgccctagaccctgccaacagtctgacatgtagccctgacctggacagagtgttagttggtatttactattttatacctttctattacttgtctattttccatcttttattacctgttctggatatatcatagaggtctctgatactcccattcatagtcactttgctgtcttacattatcattgaccttttttttctgtcttggtaccttatatccttcgtttgtttcttcttaaaaaaaaaaagattttaggcagctttgaaagatggagttgaagcaatgcagggggaacccccaaaacactgaattactttgtttccaaactgaagaaaaacagacttttggagagcatagaggcattggtctcacccctgccggtgccttgtttagctggtatgtgttcagtgtactcacttttgtt

SEQ ID NO: 523 - DNA, 1033 bp, Homo sapiens
aaacaaaaagcagctaggtaggggccgggcatggtggctcatacctgtaattccaacacttcaggaggctgaggcaggtggatcatctgaggtcaggagttcaagaccatcctagccagcatggtgaaatcctgtctctacgtaaaatacaaaaatcagctgggcgtgttggcaagcacctgtaatcgcagctacttggaaggctgaggcaggagaatcgcttgaacccaggaggcagaggttgcagttagccaaaattgctccactgcactccaggctgggtggcaggagtgaaacttcatctcaaaaaaaaaaaaaaaaaaaaggctgggcgcgatggctcatgcctgtaatcccagcactttgggaggccaaggcaggcagatcacttgaggtcaggagttcaagatcagcctggccaacatggtgaaaccccctctctactaaaaatacaaaagttagccaggcattgtggcgggcgcctgtaatcccagctacttgggagtctgaggccggagaattgcttgaacctgggaggtagaggttgcagtgacccaagatcatgccactgcacttcagcctgggtgacaaaatgagactgtctgaaaacaaaacaaacaaacaaaaaaaaacaactaggtaggaaataggttttttttgtgtgtgtgtgtgtttttggagacaaccttgctttgtcacccaggcctcagtacagtggcatgaacatagctgactgtagcctcaaactcctgagcttaagtgatcttcctacatcagactcctgagtaactgggactgcaggtgtgtaccaccatgcctggtgatttagcaaaatttttttttcttttttttaatagagacgggtttcaccgtgttagccaggatggtctggatctcctgacctcgtgatccactcatctcggcctcccaaagtgctgggattacaggtgtgagccaccgcgcccggcgatttagcaaattttttgtagagacagggtctcgttttgttgcccagggtagtcttaaactcctg

SEQ ID NO: 524 - DNA, 1029 bp, Homo sapiens
tattccacaaaaccgccattgtcatcatggcccgttctcaatgagccgctgggcacacctcccagacggggcggtggccgggcagaggggctcctcacttcccagtaggggcggccgggcagaggcgcccctcacctcccggacgggcggctggccaggcggggggctgacccccacacctccctcccggacggggcggctggccgggtggggggctgacccccccacctccctcccagacggggcggctggccgggcggggggctgacccccccacctccctcccggatggggcggctggcgggcggggggctgaaccccccacctccctcccggacggggcggctggccgggcggggggctgacccccccacctccctcccggacggggcggctggccgggcagaggggctccttgtgagcttgtgaggaactttctacttaagaatgaccaagtggccttgtgggaaggaagagggttgccatttgttaatggtgtttataaattgctattggattagtataagctgcaaagcagctactaatttattttctttaactaggagaatcataatatggacattttggataggcatctttttaattttctaaagatttccaaaattggtaatgttatttctaattaggaagtttggttgaaaataagtttctgaactctgtgtcaaatctagtagctacttccaatttgtaattaaaaaaagaaaaagtcttcaaaggttgaatgtgccttcatggattctccagcatgagcaaactgaagtatccaaaactgaattaaaaatttcatctaaattataccttcttcttagctttactatacttagtgtcaaactgatttcttagatttcgtagtcacttagttttgaaaccttgattcctttcctcttcgtcacttctacgtctagtcagttatttgttgaatgccatgtatgtgtaaagcagtttcagatttcactcctgtgagttctatttccattgctattggatgcctagtgaggaaagctcctt

SEQ ID NO: 525 - DNA, 1032 bp, Homo sapiens
acttggcatttgaggctagctatgttttggttcttcccctgggtaaatgtgtctctcattccttgtctcttgatcattgcattttaatagcccttgaacagttatatttgcttttccagctaggactttttatttttcgctacttcctccccacacccaccaaaatcacgtatttttcagtcagtagcaattttgaataaatttaagattatagtacatctgataataagaggtaacctgagtgcatatctgtgcttacagtcgttctaagtacattccatgtattaaccatttaattattccctacaatcctagggggaggtatgattataatctgcattttacagatgtaagtgaggcaaggaaagatgaaacagatccaggattgcacagctagtaaaggggatagagctggattcaatcccagagtctggttgtagagcatgtaaatctttgtccattttttcatggaactccaaggcacctggggctggcagactggtgcatgagaggataaacagtattatatctgtgagaatttcaagcacagtatataggaatatgtatagagtaagaccttgtcattggagaaaagtggagcgatcttggctcactgcaacctctgcctcctgggttcaagcaattctcctgcctcagcctcctaagtagctgggacttcagttgcacaccaccatgccaagctaatttttgtatctttagtagagacggggtttcaccatgttggccagactggtcccgaactcctgatctcaagttatctctccgccttggcgtcccaaggtgctgggattacaggtgtgagcgactgtgcccagcctttttctttttaaaaaataaataacatgggccgagtgcggtggctcacacctgtaatcccagcactttgggaggctgaagcaggcagatcacgaggtcaggaaatcgagaccatcctggctaacatggtgaaaccctgtctctactaaaaatacaaaaaattagccgggagtggtggccggcacttgtagtccc

SEQ ID NO: 526 - DNA, 1043 bp, Homo sapiens
catgtaccaggcattgcgttaggtgttggaggagatacaagataaatataaggcacagtccctattctttttctttctttcttttttttttttggagacagtgtcttgctctgtttcccaggctggagtgcagtggcgtgatcctcagctcactgcagcctctttctcctgggttcaaatgattctcctgagtagctgggactgtaggcatgcaccaccacatctggctagtttttgtatttttagtagagatggggtttcaccatgttagccaggctggtctcaaactccagaccacaggctgtccacctgggcctcccaaagtgctgggatacaggtgcaagccaccgcacccagccagcacagtcccttttttttttttttttttgagatggagtctcgctctcgcccaggctggaatgcagtggcgcaagctccgctcactgcaagctctgcctcccaggttcatgccattctcctgccttggcctcccgagtagctgggaccacaggtgcccgccaccacaccttgctaattttttgtatttttagtagagacagggtttcaccgtgttagccaggatgatctccatctcctgacctcgtgatccacctgcctctgcctcccaaagtgctgagattacaggcgtgagccactgcccccagccccacagtccctattcttaagggaccttcatgtttagtgggagagacagttaattacaatacaggatgataagggcaatagtagaacctggaatgagatgctcactgactccttctggagaattaggggaaggttttacaagaatttacatttgagctgttgctggaaggtttcgaataagcgaagcaggtggtgagtgtgtgtgtgtgtgtgtgtgtgtgtgtgtgtgtggtggaggttgagacaggagtggtggtttggtgagaggaggctattcaaggcagtgggacgagcatgtctaatggtgtggaacaggaaagttcattctaaaaatgtagtttgattaagggtagaagcataggagtcagtggtagaag

SEQ ID NO: 527 - DNA, 1034 bp, Homo sapiens
taaggcccagtatactctttttcttccgtctctgctcagctgtctcatgagagaggccttcccttaatgcgtgatataaaattgtataacttttactcctccaggtgccctcatctgctcactagaatgtcagttccaggcatgaagggacttttaaattattgaacctccagtgtttagaatagtgcctggcatgtagtcagtacttaataaattatttgttgaataagtggacaattagtaatgtgtagaagggaagagggtctattgtggagtctccttgctaatacactgctgtttggccaaaggaggttcaggagatagaggctgacaagtatgcctgtggctggccagatgacatgcaggacaggctaggcaggaggagggcaactgtggtggcagggggtgactcagggtttcaggtgtctcttcgctgtcacagagtaactaaaggccagagcctcagatttgcttattcactcatcgcaacaatggggaattgaagacttgttggaatgataaaattcttgccaatatccaagaagaggttaattaataggaaatatgatggagtaataaaatgggagatttatgtgtgtgtacttttgccatctggttagaattagagggaaagatggatgtattggaatagattgtgtttttttgttgttttgagacagagtctcgctctgtcacccacgctggagtgcaatggcacgatctcggcacactgcaacctctgcttcccgagttcaagggattctcctgcctcagcctcccgaatagctgggattacagccatgtgccaccatgcccggctactttttgtatttttagtagagacatggtttcaccatgttgtccaggctggtcttgaactctggacctcgtgatccgcccgcctcggcctcccaaagtgctgggattacaggcatgagccaccacgcccggcttggaataggttgttttttaaattcaacatgttacagcataagagcagtttgcagtcctgtagcagacatgggatttccctc

SEQ ID NO: 528 - DNA, 1026 bp, Homo sapiens
gtgaggacatctaattacctacatgagcttgctggtcttggaacttgtttttcctgtttgttttggaaaacgctggacatagctttgatgtatgaccatgttcatagatctgggaatagacaactggagcagaagggaatttttgtgcttttatgggtaggtacggagagttactttaccttgaaatgcatttgttaaattcattttaatatacttctgttcattgctttcttattttaaacatctgatttttgtcaggttcaccaggttgagttttgtggagcttgtgaattagtcttgcataatgaaaaccttagcacctgaaatattgccagtgaaagtatcaggttacagtaaggaaggcttttgctttccatactgtaggaggttagatgaatgaaaacctgtcagacagaggcagaccatctcatactttgagagaaaagcttgggtccttttggagtaaagctgagggctaaagtagggtttgtgtttatagattttgagcatcagtaacagaatctgcatttgggtagccattttatcactacttattttctctcatttcagaagtgtatgctgacttgtaaagtgaagaagccagtggtgctgcgggtgttcttttggggtagtgtctgggatccagtacgagttgaatcattgttcaaataaggtaaaagcatggtggtaaaagaaactaataacttcactaatttgtaaaaccaatcttacgttaagaattgattatttcgagaccagcctatgcaacatggtgagatcctgtctctacaaaaaataaaaaaatttaaccaggcctggtgatacacatctgtggtcccagctacttgggaggctgaggcagaaggatagcttgagctcagtagttggagactgcagtgaaccatgttcatgccactgcactccagcctgggtgacagcaagaccctgtctcaaaaaaaaaaaaaagaaaagaaaaagaattgattatccagatgattcgttaatggaagttctgggttcttatga

SEQ ID NO: 529 - DNA, 1052 bp, Homo sapiens
ggagtgcagtggcgcgatctcggctcactacaagtccacctcccggggtcacgccattctcctgcctcagcctgccaagtagctgggactacaggcgcccgccaccagggccggctaattttttttttttttttttttttttgtattttcagtagagatggggtttcactgtgttagccaggatggtctctatctcctgacctcgtgatctgcccaccttggcctcccaaagtgttgggattacaggcgtgagccactgcacccggcctattttatttattttttggaggctctgtcgccaaggctggagtgcagtggcttgatcacggctcactgcaaccttgacctcccaggctcaggtgatcctcctgcttcggcctcctgagtagctgagactataggcacaagccaccatgcccagttaatttttgtatttcttgtagagatgaggtcttactatgttgcccaggctggtctcaaactcttgggctcaagtgatccacccgccttggcctctcaaagtgctaggatttcaggggtgagctactgcacctggacaataattccatttttaaaaatagttaagtgtcatgattggctgcttaatttagcttagaaaagatttatcataatgagagctggaaggaaaccacaggtcgttagttaatatagattatagtgtctttattaagttaggaaagctgagaatttctcttaagaattgagaagaaaatattccccaatggtaacatactcatttaaaatgggggctaaaattactgttactgtccctgagagacataggagaggagcctctggggtgaattgaatattttttttaagccgccagctgtgctattcattttgtttccccaatgattaattgcatagatgatcctgagcttaatagacacgcattgactgaattctcagaggagtatctcaagttgcttacactggggatgttttgatgaaaaagttctaagtgaacttttagcttgctgttgattttccctgctaacatccagcatcgaagagatttgtcttccaaa

SEQ ID NO: 530 - DNA, 1090 bp, Homo sapiens
ttgagtcaccacgcccagcctgtatctttaaatgttttaaacagttaaattaaatgaccattctccccagagggacatcacccccactttttaggagagtacccaatgcacatttggatattcttttctataaattgaagaccttagaattgaaattagtatttactgatttaccttacttaataacttgagagccacttaatagcagagtacatgtcatgaaggggtctctgatttgatttattcagggatggggtggagtatgaggccttggcagagtgttactctagagatatcacagctgccctctattctgtttctgtgtcttttactcaggagatgatgacctccagagaaaagagtaaaatagtaaacatgtttcatatttcacctgagctcagctttcctcccataactgtccagaggcattcagaacgcaagtcaggcccaccccactgctttgtctaaaacgctttatgggtggtggtatttctttcttggtatttttgtctgtcttatctctatcagttgatggcttgttcaccaagaatttcctacttcttccctttagtgactgttgaaagcatggctctcctgactggatgttggtggcagtgaagttttgttcaaacgtggcactagtaaatgaagtgtgtctccctaacgagatcagtttggtcttatgtgcctttgaataaggtgtagaagggatgagaatgatctcaatttctaggttagcagaactgtgatacatacataattttattccttgactgtattgttaatatttgataaactgatttttaaaattattgttccttcttgtgaagagaatggagattgaagaggaagcgtgaaagtgtgtttattcatttaacaagtacaaagtgtccactctgtggctaaacgcaaagcactgaagatgaaatggagaacaaatcagatgtggtctctggttcattttgtagcctcctgggtttggtatcctgaattgttaaacttatttagttaactcttttttgttacctaacagtcatcgaatgtagcattatctaatctggaaaagcatgctgtcttctcagcagagtag

SEQ ID NO: 531 - DNA, 4148 bp, Homo sapiens
ggcctctcaaagtgctgagtggggttacggtcgtgagcccagccccccttttttttttttttttttttaagacggagtcctgccttgttgcccaggctggagtgcactggcgtgatcttcgctcactgcaacttccacctcctgggttcaagtaattctccctgcctcagccttctgagtagctgggattacaggtgcctgccaccacatttgactaatttttgtatttttagtagagacggggttttgccatgttggccaggctggtctcaaactgctgaccccaggtgatgtgcctgcctcggcctcccaaagtactaagattacaggcgtgagtcactgcaccaggcttcaatcgggttttgaccgtaaatgtaaggataaatttttttaaacacaattgtgttttaagtaaaacgcatctgttttcaagatcaaggaccattgatctgcttggtaattagacaagtagtttgagtcaagaaggcttgggcttctgaaaaggatgatgggcttgtgctaccctctcaagtgtctctgcagaacagtttgaaaacaaattctttctcctagtgacagaattatatctgaaatcaattcaaaaggctgtttgaaattctgtccttgtgccaggcgtggtggatcacgcatgtaatcccagcactttgggaggccgaggtgggcggatcacgaagtcaggagatcgagaccatcctggctaacacagtgaaaccccgtctttactaaaagtacaaaaaattagctgggcatggtggtgggcgcctgtaattccagctacttgggaagctgaggcaggagaatcacttgaacccaggtggcagaggttgcagtgagctgagatcatgccattgcactctagcctgagcaacaagagcaaaactctgtctcaaaaaaaaataaataaataaaaataaaataaaataaatacataaataaaataattagtttcaattcatgttaaagaggaggctccgggaatgggagtcggggggcgtcacagtattgcagctcttgagtgcacttgtcaattctggtaagcttaatatgtgcagaattgttaagtttggctctgtttgtatttacatggcagcttttcttcatcttaatgaaaattagcttcttagttttctagtttctgagtgttgaaatgagtgtttccttttccactaacttgttgcccttttttattcttttaaagtctgataatatccacctgttgtgtaagtcatctggatggatttttatttctgacccaagttaaaatagaatgttagacagtctgttactaggcagacatagatagatatccctgaacttgtgacagaaataaaggtctccatttggcaagagtgaacccagagaaccccaaaataatgcttaagaacaaccaaaaaaacaaaatgtatttttatttttaatattctcattgtaaattgtttgtttatacctccacctcccactcctgaataacttactcctttattctgacttcatatagtgacactactgccaaaaatagctccaaattgaaatatctttgaccttgctagagcttgcaacagtgtgatctttttggcaggattaaaaccgtgggttcttggcatcctcatctagcagtcttttactcatcaccttttgtctctgacttcttattagtttctcagttctcctctaaattatgtctctaagattttgcttgtttcccctgtgagatggagctatagcagcttcctaggcgttttttgtcttttggaaagttcttgaaattcaagtattttatttgaatataacaaaaataaatactacctttcagtttatctatatcttgtcacctttatcagattgtaaacttggtaagggtggacacttggcattcattggttccataagttcgttagtaccccttgtatgccagacactgctctagacaggcaatataacatagtggttaaatgtgccaacggtgaggctgggcggggtggctcacgcatgtaatcctagcactttgggaggccagggcaggaggatccattgatcttagaagtttgagaccagcctgggcaacacagggagaccccatctgaatgaattaatgaatgagcaagtcgatcgtggtttggattttggcagtatgaccttgggcaagttaattactttctctatgcctcaaaattcttatctgtaaaacgggattaaaaatgccctcctcaaggataaaatgaattaataaaaacactggttaagcatttgctattctgggcgttgggtatacagcactaaataaagaaagatgaggtttctgttgttatagagcttacattctaattaaagacagaataacaagtaaacaagatagtttcacatactgagttttgctctgaagaaacaaataagatacatactggacctagagaatgactggtggctatttttgactgggtggtcagggtgaacctctgaggagatagcttttgagctgagatcttcaaattctgaggggtaggaggggagaaatatttgattattattttcccttcacagacaagaggcagcattacttggcagaatctcgctaggcagcaaagtgtgatagaataggccctggagtttgggcctggtttggctattaattagctttgtgatctttgatagattccttactcttactgtctttgatagacatgtactttagcacttaaagtttttactgctgggaagatgtccaaggcgctaatagagtataaaggagagaagtataccttgtagaccaggcgttaacctctcagggcaacttagaggcgctcttctttcctggagggggaaaaaaggaaaaagactatttgtttcttggtgggaaaatgaccctgaaagaaagttgactctttatttttatttatttttttttttgagacggagttttgctcttgtcgtccaggctggagtgcaatggcgcgatcttggctcgctgtaacctctgcctcctgggttcgagagattctcctgtctcagcttcctgagtagctgggattacaggcacccgccactacttttagtagagatggggtttcaccatgttggccacgctggtcttgaactcctgatctcaggtgatcagcccacctcagcctcccaaagtgctgggattacaggcgtgagccaccgcccccagctgactcttttgtaataaagagctggaacaaattgatggttctttatgactagatgtgccacatactctgtaactaagttaaattgcatgcggtttcttctcttggaactaggaaacctgtctcacatctcctcattacttttattaacagctgactttagtctcaaagcttctttgcttactgagaaaagactgcatgcaccaaaattaataagcaccctcattcttggtcatctcttacagtattacccagttagggttacatgtcaggttttccatttgctgctgtggcttggtctgtttgggatttgtactactaagaaattccttttgatgaaagagcagagtggtttttaaaaatcagtcatttcatcttttttttttttttaatgttactttctgtttttaaagtttattttatttaaacagttgttttttttgtagaggtgggggaatcttcctatgttgcttaggctggtctcaaaatcctggcctcaggccattcccaccttagcctctggagtagctaggactacaggcccttaccactacatccagctaattttaaaagtttttactttgtaggccaggcacggtggctcacgcctgtaatcccagcactttgggaggccgagccgggcagattacctgaggtcgggagttcgagaccagccttaccaacaaggagaaaccctgtctctactaaaaatacaaaaaaattagccgggcatggtggcccatgcttgtaatcccagctacttgggaggctgaggcaggagaattgcttgaacccgggaggcggaggttgtggtgagctgagattaagccattgcactctagcctgggcaacaaaagcaaaactcctatctcaagaaaaaaaaaattttttttttaactttgtagacacgggatattgctatgttgcccaggctagtcttgaacacctggacttaagcag

SEQ ID NO: 532 - DNA, 1006 bp, Homo sapiens
ccagcctgaaaaagcaggtatgcataaatattgaaaagggaaaccctaaatttatttacctcaggaaattgcttttaaagccatgggaccagcaagactcttagtaactcctaccctgtacccagaatcttgatttagggagtttaaacctcagttttagctcatttggttatgaaagatacctttttaaaatttaatctagtaactagaagaaactaaataattggttcaacaccaagaggctatgcaaccaaaactgagagacaaaattgaattgaaaaatgttaaccaactctgaagtatttatgacagctggaattccgggcagttcttttctccttgttctgcaaatcatttggcacttgctcactgacttggcaaatgaggaaaaaatattttaggaaggcagtatgtgctggggtaggtctagagacactttacatgctatcatatacctagaagagacttttctggaggaatttctccactagaaagtatgcttttataattgattgtaatctgacttctctgtttttagaaacagataaatttgccactggatgttcagtttttatttctggcttatctgtttcatggttttttcttttgttttccctctcctgcaaggaaagtatctatccagagagtttgagaaaccatgcctttaaattaactaactgctgagttctacagaattggagaaaattgattatttccttgtatttcacagactgtatccttttaagtgacatctcttaaataacttcatttgcaatctgcagagactcattttcctgcatctgtgcaatgactgtgagttttggatgcagtatgcccagggccctcactagtaattggtaacagaagcagcagtagcctgtgaggatgggaacatgaattaaaccctccttagtgctggtggtggatcacctccctcaagcatagccctttaatcgggttgtattcactttcataatctgcatctgcctctcccttcttttcttat

SEQ ID NO: 533 - DNA, 1670 bp, Homo sapiens
aaagaaactagtatatttgctaactggagttatttggaaaaaacaaaaatgcatctgttcccagtcagatatgagaaagcctgctgattaactgaagagtttttattctatatgtaaagaaaatattatttgaaagagttttctagtaaattttacttatttgtagccagctgcttaggagtagtggttaatgtcaatgatctatatcatagtagataggaaaagtggatccaagaaccccaatgggtttttacaccaacatacgtaatttttggctttttgatggaaacaaagtttctcatcattgacaagcctgacactcaggaatgtacagttaggttactatcaagtctctgtggttctggaaattcatcttgctctaccagagttatatattgttaaatggagaagaacacaacactagccttctgtgcacaccggggtgggggtgttttttagttactctttgctaacttcatgcgtccttgggtactttatggtccgatagtgccctcttgtggcacctagttaagatcatgtagctcagccacagaaatatgacctaagtagtcagaccatttccattttaaaaaacaatattttatgttttgcttatgtgattttagtaagttcttttaagctttgagcagatgcattctcccaagttttctttggtgtgtacctgttgtaactatacttttaacgatcccaagccttagtggtatcttaagaagttcatcccgcacaagggggagagagctgactaggatagggtgtggagtgttaccacattgtagataggggtcagagtacctgtctaggtaccacagctcacagtttttctctcgtttccaatgacctggagccctgttaaaatccccgtgcctgtgaaactgtaagctattattatggtatattaaaatggtctttgtgtggtttactaccttaagaaaatgttgatagtttttcagtcactgtagaagtacacctccattttaaatgtgctgcaatatgaatgaagtgacctgtgtttcatcacttgttcaaatgattcttatccatgtttttgtacttagtaagggccatacgtagtgggattaaatatttgtgcccttgctttgaaaacaaaactgaaagtgaatgacacataagggcagggatttcagaacagatttttcttgaataaaaatgcttgtgtcaaaaattcaaacatttgtctctttcctttccattccagttctaggtctcgttccagatcatattctccagctcataacagagaaagaaaccacccaagagtatatcagaatcgggatttccgaggtcacaacagaggctatagaaggccctattatttccgtgggcgtaacagaggcttttatccatggggccaatataaccgaggaggctatggaaactaccgctcaaattggcagaattaccggcaagcatacagtcctcgtcgaggccgttcaagatcccggtccccaaagagaaggtccccttcaccaaggtccaggagccattctagaaactctgataagtcgtcttctgaccggtcaaggcgctcctcatcctcccgttcttcctccaaccatagccgagttgaatcttctaagcgcaagtctgcaaaggagaaaaagtcctcttctaaggatagccggccatct

SEQ ID NO: 534 - DNA, 1047 bp, Homo sapiens
actctgccgagtggtgccgggtatcagtctgggacacaccaaggtcagttcgaccatggttctgggtccctgagtccatccaaaaagagccctgtgggtaagagtccaccatccactggctccacatatggctcatctcagaaggaggagagtgctgcttcaggaggagcagcctatacaaagaggcaagtatctcatttcccctgcctggttgtgtttttatctcactagctggcagtttaattgtaatgtgatctaagttagagctctgattaatggtaaaaggtaatccctatttcctagacttttcgttagtaaacattaaaagcatcacccaaggaaacctttaggttaactctagctttcctaccttcctgaatttgtattgcagcataaactttctttagactactctgcaatgatgttttcacatttaaaatttgccttggattctaccaatgtaagccaaagaacagtagagatttgtgggtcagctatcaaaaaaaagtatggtctttgccaaaatgaatggccattggagctcttagaccctctagcacccaccatctactatgttcgatctgcatcagcctatcatggtgaagagctgcaccctcaataccctccagttgaggagactgggcagaatgggaaaggccaaggcatagtccaggaaggccttgttttaaaaccacaaggtgggtgtatgtcccagtagaagccaacacggctgcgtgttaggagaggacatgacagtgcttccgtctttctcccctgggggacacggtgagttggaacatgaatctttgtttgtatggttggatggattgggatggcagagaggttacagggaagttgcactgggaccaggttgtggtcaagagggactaacccagcaagtggctccccctttttttttcttttatcgtatttagcatgttttttgatcccttgattcttcttggctgtattaacacgactttgacttgattaagctttctgcattaatggtacagatgagatgttttgaatctgtacttgccttca

SEQ ID NO: 535 - DNA, 1018 bp, Homo sapiens
gtccaaggttgaacattctatgttaactttgctgaaagcagattttaagtgactgagtgaaggttgggtaagaccttaagttattttttgccctagatcacattacaggtaagtaggtttttgtttttgtttttgagtatcctaaaaataacttttgttgttctctttggttgcttttgtaagacacaactccatggatcatatatttttctcttaattggcaagttcatagaactgtgaatggcagttttcagaaattattacgaagtaaccgcctagaaagtcctttggtaatacaggaatccataagacatgtttttttcagagaatcaaaaaccaaaaacggtaaggcactattttagagcatgctgttaagaagcctcttgtgtctctctcttgtgtttttataaataggtatctagaagagcagaagacagagaatggaaaagataaggaacagaaacaaacaaataccgataaagaaaaaataaaagagaaagggagcttctctgacacaggcttgggtgatggaaaaatgaaatctgattcttttgctcccaaaactgattctgagaagccttttcggggcagtcagtctcccaaaaggtataagctccgagatgactttgagaagaagatggctgacttccacaaggaggagatggatgatcaagataaggacaaagctaagggaagaaaggaatctgagtttgatgatgaacccaaatttatgtctaaagtcataggtgcaaacaaaaaccaggaggaggagaagtcaggcaaatgggagggcctggtatatgcacctccagggaaggaaaagcagagaaaaacagaggagctggaggaggagtctttcccagagagatccaaaaaggaagatcggggcaagagaagcgaaggtgggcacaggggctttgtgcctgagaagaatttccgagtgactgcttataaagcagtccaggagaaaagctcatcacctcccccaagaaagacctctgagagccgagacaagctg

SEQ ID NO: 536 - DNA, 1024 bp, Homo sapiens
gcagtttcagaaaacctgaaagacaaagggcctgtggggccttgcgcaggctgctggagtcccagacagacacagtccttcctgggaggagcattgtgtaccttggacaccccaggagaaacagattttttccactggtgtcataggcaaggactttggcttccttcatcatggtggtggggcagggatcaagggatgtggttagtaggctcagccttctacctgaaagagcctatcccacatggactggccatagggtgggccctaaccttcagactcctgccggctggggactcaactgtgagcagaaatcttggaagctggtaaaattcattctcccggcctaactcccagggaaaacctggaggtgttttctgaaaccaaactagacctctggccccaaagcaggggtctttgctgtgtccttcctatatgggggtagagagtgggtacggggccagagaggagtacgccttgaaggaaagcagactggaagtgtccactcaaagctattgctggtacaagggcagccacttcattcactcaaggccggtttagagcggttgctacttgctggggggccccaccctggtatgtgcctctccccaccttttcccctcaagccaaaagcttgtgagctggggaagggtgggcctggaaaggctctgtgcaaattgtagctgggagcctccgggcaaaagctgagggaaagggagaggcggctggcctaaaatttaggtgggcggaagaacctgtgacggagctgtgaccgctgcacaggccagagaccctggagtcctcctcaccccggggttgggggccggacctgctgagccgggccgccccctctccacacccactcccagcacctggcccgacctatcggctggcggctacgcctcctttaccctactgtcttgcctcaggtcgcaccctgcgcgggcccagtactcggccgtcagagggagctgccaggctctggagggcgccccggaaaccatgggtaagtgcggaggctttgagg

SEQ ID NO: 537 - DNA, 1075 bp, Homo sapiens
cagagctcagatagaagaataacccgaagcagctccttctgcagcttatggaaattgctaacctaaaaatgggcgcatcaggctgggcgtggtggctcacgcctgtaatcccagcactttgggaggctgaggcgggcagatgacctgaggtcaggagttcgagaccagcctgaccaacatggagaaaccctgtctctactaaaaatacaaaaaagttagccgggcgtggtggcgcatacctctaatcccagctactctggaggctgaggcaggacaatcgcttgaacctgggaggcagaggttgcggtgagctgagagcacgccattgcactccagcctgggcaacaagagtgaaactccgtctcaaaaaaaaagacacatcagttttcctggccagagaaaaatcccagcctgtttctgcactcccttattaaatgtccggagaaatgcaggaggctgtacttttctgctgggttgcccttttctgttttccttattattaactatccagcatgtagtctccttcctggatagaaatgcatggtctgctcacatattagacattgaatgatccttttgacttgcccttttatttattaagccattcatttgcttatttctccaaatactgagcatgtgtcagtcacagtgctaggtgctaaagatgcactagggaataaaacagacattgtctctgccttcaggaacatacagattagtagaaaagagctattagaaaaatccacatacaattatgtaattaaaagtataggtactacaaaggagatagaatagagtagtggtcagtgagcatattgtgctttctatgccagatgggcattgtaccaagtgttttacatacattaactaatttttcttcataactaataatatccctatttttcaaaatgacaagattaaggcacagagaaattggacactttgctcaaggcctcataagctagttagtgggatagtctgtttgaacccaggtattctggtttcatagcctgagatcttaactgttttacaagatactatgagagtttctagcaggaggttctaacctaacttt

SEQ ID NO: 538 - DNA, 1042 bp, Homo sapiens
tcttcaccctgccctgcctgcagttgagggggcgaagaagaaccctgtgttctcaggaagactgcctccaccaccgctacccagagaacctctgcatctggcatttctgctctctatgcttgagaccgggaggtttaggctcagataagtgagctctgggccatgagagggtaggtccagaaggtggggggaactgtacagatcagcagagcaggacagttggcagcagtgacctcagtagggaacatgtccgtctaccctctcgcactcatgacacctccccctaccagccctcctcttcctcctcctcctcctcctgtgggaggtggtcagtgggacttagggatctttcacctgctgtgcccagtagttctgaagtctgcttgtggagcagtgttttatgtttatccctgtttactgaagaccaaatactggtttggagacaacttccatgtcttgctcttctacctccctagttagtggaaatttggataagggaactgtagggcccagattctggaggttttatgtcattggccacagaataactgtctctaagctatccatggtccagtggtccctgccaagtctgtagacttcagagagcacttctctcttatggggttcatgggaacaggggtgggtgtgacttgcttggtggcctcattccatgtgtgcctgtgcctggggcatggactttgttaagcagagtcagcagtgaggtcctcattctccagccagcctctctgccctggagaatcatgtgctatgttctaagaatttgagaactagagtcctcatccccaggcttgaaggcacatggctttctcatgtagggctctctgtggtatttgttattattttgcaacaagaccattttagtaaaacagtcctgttcaagttgtattcttttaagttcttttattctcctttccctgagatttttgtatatattgttctgagtaatggtatctttgagctgattgttctaatcagagctggtacctactttcaataaattctggttttgtgttttcttttg

SEQ ID NO: 539 - DNA, 1057 bp, Homo sapiens
caggaggcttgcttcaggtttttaggaaccatttttgcaattggagatgtttgtgaggaaaaaaatctctgttgaggggggtactgtgtgtctctgaagtggcctctgtgttgcgtctcaggcgtcctggtcctgtcctggtacccacctggcatggctgatgataacggggagccctcagatgacctggtgcccgccattctggacaccgcccatcagtacagcatccaggtgagtctccaagaagaggccacgtgctctctgccctattctggagagttgctctcctccgcccacagggttagtgcctctacagaagttcttggcagtagcccaaagggataacaaatatgtggcaagtgtggttttgggggagggttcagataaatggtgcctatgttgctcttagttttttgaattctaagaaaactgagaaaactaaatataggaccaagagaagactaaataattatcacttttgttaaataataatagaggttaggttgtaaaccctggtggaaaaagggtaggcaagagccaaagggacctgcagactcaactctctagtgggaggcagtgctggacctcgaggagtaggcaggtgttctcagcaggtgggctcactttcaagaggaaggacggactggacgaagcatttccccacatgtgccaatcaagtaagtcatcccttgcttctgtggtgaaggaagaaaaatgatagagaaagaagaaaagccccactcccctattcctgaagagaattccaccactgacatgtctaacagatcacagcagttttccactgacacagcttcagcatacttattccactgtttcaggcagctagcaccaaccacttggagctggcacaaggttgaaacctattagccaccctgtaacagcccaccaaaatgattcccacatgccctgctgcgggagatgggcaaactgctcacccctgttttggccttcaagggcagcagctgcctttatctctactgtgcccaccactgccaggccctcttctgaactcagcctctcctccaggccatggtta

SEQ ID NO: 540 - DNA, 1050 bp, Homo sapiens
attgaacgtacgcctcaggggcctgtgtctaggattgctgttagcatacagcatttggttgtctttttgtttttttttttgagatggactcactctctgttgcccaggctggagtgcagtggtgcgacctcggctccctgcaacctctgcctcccgggttcaagtgattctcgtgcctcagcctctcgagtagctgaactacaggcacacactactgtgcccggctaagtttttgtatttttagtagagacggggtttcaccatgttggtcaggctggtcttgaactcctgacctcaagtgatctgcccatctcggtctcccaaagtgctgggattacaggtgtgagtgaccgcacttggcctatggttgtctttgttctagccgtgcactgtgccaacaacttattaatgattttaatctaatagggaatatatcttttaaatttggattttaggatggagtacatattattaaggagactaaggaagaagtaaccccagaacaactaaagctgatgagaactcaggacgtcaaatatatagaaatgaagagggttgcagaagctaaggtaattcactctttgttctgattggttttattggttaagaagggaaacttaaattcatcaatctcaagttattcattaatttcttctggcatttacaatctcacttgattgtaataatgatttagaagtatagttagcatggtagagtggaaagagttcaggtttgggaatgagacagacctagggtttgagttctggcactgccataaattactagccccatgacaatgggcaaattcaactccctgaggctcttccctcatttctgtctcaggcgactgttgcagggattaagtgcgtcttgggaagtgcctagcccaatacctgatatttgttgggatcctttcctttaaaagaataaagcaagttctttgctggctggcaataatgatgtgaaatggtttaaacttttgcagtttttttttttttttggtaccctagaagaatctaatataaagtgagaccatattctgtgttctag

SEQ ID NO: 541 - DNA, 1050 bp, Homo sapiens
taacatttaaacaggttaacaaaacagtgcatgtcactcattggtgtttaaaaatagacaacattgtgtagttaaatagcagagctgaggaatataagatgcctctttcatattcttatcattcctctaaatgtcaaattctttagctttgtagatcatttaggtcagcctttctcaactggggttccgtgagagaattaaaattataattttaaatgaaacaactacttgaacacctttcttctcagttttcctaggactgtacacagctagtactttctagatgcctaggggagaagttaattcattgcctacagtggatgccttgggcagtagggctgtgtccgttctcaactttgagaagggctgaagcaggtgctaataggtagtttattaacctttcgattttacaaaaccatttccttctctttactgatcacctttttactcttttgtaggataaaactcagaaagtgaaggtgaagaaagaaacggtgaactccccagctatttataaatttcagagtcgtcgaaaacgttgacgtgttatagataagccttgtcattctgtatcaaaaatctgttgtcgttttctagtaacttcaaattccattactccaaatggcatggttttccggtttgtaaccataactaaattgtcagtctgacatttaatgtctttctatggacaacattaaatctccctcccttctgtaattgtttttggattgtgaaattagtcttatttttatatacttaattttttttttctttgagatagggtctttgttgccaggctggaagtgcagtgtgtgattatggctcactgcaactttgaactcctgggctcaagtgatcttcctgcatcagcctcttgagtagctgggaccacagacatgtgccaccatgtctgagtaatgtttaaattttctgtagagaccaggttttgccatgttggccaggctggttttgaactcgtggcctcaagcgatcctcccaccttggcctcccaaagggctgggattacagggatgagccactatgcccagc

SEQ ID NO: 542 - DNA, 1112 bp, Homo sapiens
tgtgtggcccaggctgtcatgcagtggctattcacaggcgggagtatagcaccctatagccctgaactcctgggctcaagtgatcgatcctcctgcctcagccgtctaagtacctggtaccacaggcgtgcaccgccatgcccatctgctcacaaccctttacgagctcctgtgacacaagataaaagccaattacttaccatggccttccagaccctttgaaggtgattcaccctcttgcttccttacagatcttccctcctgccatgtgtggctagcacgtgctcctatgttctagccacaccgtaactccttaaacttgctaagcttatttccaccccagggcctttgcttgctgttccctttgcagggagtgatttgccatctctccatatgttcactctctcacttgattctgatttctgctaagatgtcccttcctcagggaggacttttctgtccatcatagccaaaacaaatgcctctgtgctctctaatccctcgggcagaacattagctcttatgtaacattacatacatggcctagggtttttcatcctgtagtcatgaaaatcccgttggcacttgggaagctcttagagatacctagctcaatcctctctttttatggagggggagatcgaggtccagggaaggaagaaacttgcccaagttcataggtatagaaataataatagccagctgccatttattgaacatctgctctatgctaggggtttcacatccattcttttgtttattcccattattttcttagtagtctctgattttgcagttgaagaagctgaggctcagagaggttaggtgatttgtctgaagtcacatagcaggagggcatagactgggattcagacccagatctgtttgacaccaaagattgggttgttcctctggcctctgtgggttcccacattccaggacccaggtcctgtgtctcaggccagaagattttctatattggctggagcttctgtgggatgcaggcagtggatgagaagggaaacgacagcaaatagaggaagcacaagtctctggcctcagtgttgggtgcacacaaagcaaatgggagaaggaggagaggggctcccttc

SEQ ID NO: 543 - DNA, 1057 bp, Homo sapiens
aaagggctcagccatttgtctgggcaggtctgcggaactcaaatccggctcatctgcatctcctcaaataaacttctgggaagtgaatgcctgaagcaggcagagtgcagagaagtcagcaaatatgtgcgtagtgaattccaagccttctgttcccagctcctgggaggggccgcagtgccttggggtgtcctgccgtgtctccatcgggtcccctgcctggctgctctaaccctgaggaatggcctccattgtgggcctgtggaaacagggagaagaatctcttatccagcaggtctgagggccacaggaacataagtaacactgaagagtgaggctgatccctggggtttgcgcgagcctgcaaatgcatgattcaacagcactcgcctggtgcctctgggaggcaagctggatgaggatgttgttcccattttatagatgaggaaactgaggctcattgggaagggactttcccaaggctatgttatgagttagttgcagagctttgaacttgggcccagactgagcctgaaacctgaccttacactgagtcccagccccagtccctgaacatggtctctgaacatggctcagattttgccccaaaagcatctggaccaggaggttggagcggcctgggataccccctgaatactttcatactaattctgctatggacagatgcctgcaatcccctagaggcttggacattttccaaaggaaacttttactgaagaaagatcatctttatttatgaaatacttattccgtgctgggcaccatgctaagcactttgcatgaattatctcatttaattctctgaacaatttataagtttgaaactatcattatcctcgttttacaaatgaagaaactggggctctgcgagtaacctttccagtatcccacagctagtacatagtggagctaggattcaaacccaggtctcgatgcctctgtaggatttcattgttaagctgcactgcctaacagggaccagaaattgtagtttttcttcttctcctaaaagcaaacatccaggctgggcacagtg

SEQ ID NO: 544 - DNA, 1044 bp, Homo sapiens
tataaacctttaaaattgctttgaaactaaaatttcattccagttcatgactgcactgttcaaatacttgatatgcaataaactatatcttcccaaagattcatttgcttataaggaactttcttcctctccagcaaaagtttactgaaaatacccactgaaaagtagataaagagttaagtgacatgtcttaacttaaccagccaataaacaactactaatgtctttgagttaaaaggttccaaagagttaactagcactacacattgtggaatcttggataatttaaaataactgcattttcttttatgctaagtgtggttccttgcaagaacactaggctaacattagggttctgccaactacctgttggagttgagaagcttattagacttcactgtgctttcgtttcctcacctataaagtggcttgtgtacttgtttcacttatctcacaaagttgttgagaagataaaatatattatgagaaatacttagagtaatgtaaaatacattatgtgattaagaatgtggtaagacctgaaagacttaagagttgactaatttgaagttcatgaaaattctcacaggactttgaaaaaagaaaaaactggctgggtgaggtggctcatgcctataatcccaacacttcgggaggccaggccaggaggaacgtttgagtcatgagtttgagaccagccagggcaacataatgggaccccatttctacaaaaagtttaaaaattagccgagcatggtggcaaatgcctgcagtcccagctactcaggaggcagaggtggggggattacttgagcctgggaagtcaaggctgcagtgagacatgactgcaccactgcacacaagcctgggtaacagagaacctgtctcaaaaaaagaaagaaaaaactttagcactagataaaattaagtcctaacaaatttacagagggccgctacatatggccttgcaaactatgaaccatacaaattctaagaagtgccatttacaaagcagtcgccccatattggcctacttaaaatcaa

SEQ ID NO: 545 - DNA, 1048 bp, Homo sapiens
tatatgggccattgtaaggacttcaacctttactgagtgataggaagtctttgaaagctcttgagcacaggagtgacatgatagattttgtttgtttgtttatgacagagtctcaactctgtcgcccaggctggaatgcagtagtgcaatctcggctcactgcaacctccgcctcccaggttcaagcaattctcgtgcctcagcctcctgattagctgggattacagacatgtgccactatgcccggttaatttttgtatttttagtagagacagcatttcaccgtgttgacaaggctggtctccaactctcgaactcctgacctcaggtgatccacccacctcgacctcccaaagtgctgggattacaggcttgagcaaccacactgatggttttacaaagattattctagctgccatataggaagtagactataagggagcaagaacaggaactggaagaccagctggaaaaatactattgtagcaatcgaagtgaagaaggatggtggcattttatacataaagaaaccaagacaccaagactccactctcagccaccacactaattgcctgtaattaccatcgggagttctgaaggtgtcaggccatgaaaggaaatcattccatattctccaataaaactgtgagagccagaagttaggcagtcgtcaagtaagtcggatctgcactgcaaaaggagcttccgacttcttggcctagaagaactctgccctatatgtgtagtgcttggaaacatctcttgcagctatcacattccacacccatcccctaattccctatgctctacttagtgagccactgtgtcctaggagatgaaaagacctagtccttgcctttgggaaaatagcatcaggacatgtgctctgactagattccctttcaatactgtattgattgatgttgaagtcactggacagaaattgaggtcgaggaaatattcaatattcatttagttgtaaatgactattacacaaagtgctagattcatgaggctatataatattttctttttttttttttttcaa

SEQ ID NO: 546 - DNA, 1557 bp, Homo sapiens
acggctgtaatctcatcactttgggaggctgaggtgagtggatcacctgaggtcaggagttcgagaccagcctgaccaatatggtaaaaccccatctctactaaaaatacaataattagccaggcatggtggcatgcacctgttgacaggagaggctgagacaggagaattgcttgaacccaggaggcggaggttgcagtaagccaagatcacaccactacactccagcctgggcaacagagcgagactccgtctcaaaaaaaaaaaaaaaaaaaaagaagaatatttacaactttatacacattacatattacatattacaaaattatatacatttccaaagaaacacatttcaaatacagatgcacttatattttattaatctggtatgtgttgtaactcttcccattttcaatagtaggtaaaccaggccaaagaacttttagaaatgaagcagactgactgaagaccccgtatctcaggtgacaacaattctgtgcccaaacaatgtgtcctctgattctgggtgtgaccctgaacaactgaggaggcagctcagctcctgcagcagctctgctgcctcccagatactcactctcccttctcttaggttttgaatttgttatgaagaaaaaagttaagaatagtataaactataaacaagtgaattattttatctcagagtgaaatattagcgttcttatatttaaatggtcaataaactaaagagtcccttcccacagacatagttgcctctgttcctgtaatggggataatcgaacccttcatagaaattgcaaaatcctgttttcttactatgtggacagccaaaaacatcttaggctttatcaggtataacctctgccttggctttcaggtctgaccccagggtctgtcattcttccacagccctccaggtggagagaacttcaactggagcaggtctgtcaacaccagttaccacccccacctttgctcttgttttcttccatgctctatggcctgctgtcatctggaatctacctttactctcagactcagctgcacttccatcccctctccagacagcattcttcctaacctcctttagcatgtgattctagaatgcttggagatttcaaaagccacattagtcaccctcttggtctgggcttcttgaacggttgcccgctgccacctgccccccgctcccccaactctctatcattaatcctcaactatcagctatcactcaatacttactggatcagttttttttttaatctgaaaatttagaaattgaggaagaaaagagattatatcagtggtttccaagttttccctctgcagacaaaatcacatacagcttccaatatatgaaaaagtccagtatataaaatataagtgaagctattgtggttcaagtagagggggtgcctagggctctattctcttggcttcccccactccataaagatactaaaagccaaaatacatcacgtaggcatgtctaagaaccacccatgagagcctgtaaaactccttcgtttacttctttctgcttagtgctgtgaagtg

SEQ ID NO: 547 - DNA, 1004 bp, Homo sapiens
gtgagccaccatgtacaggctttttttcttttttttaatactgggtctcgttatgttgcccaggctggcctcaagtgatcctcccaccttggccttccaaagtgctggattacaggcatgagccacagtgcctggcccatagcactcttgtttttttgttttgtttttctattttttttttgaggcagagtcttgattgtgtttcccaggctggagtgcagtggcacaatctcggctcagtgcaacctccacctccccggttcaagagattctcctgcctcagcttcctgagtagctgggactacaggcacgtgccaccacgcctggctaaatttttttatttttagtagagacggtgtttcaccatgttagccaagatagtctcgatttcatgaccttgtgatctgcctgcctcagcctcccaaagtgctgggattacaggcataagccaccatacccagctggcccataacactcttaaagcatctcctacattgttctagtatttaggctgaaagttagggactttgactatgtgtggaaccacttgaattcatgtcagttcctggactgtactgtcacttgttatgacattattgttacctttagtttttatttttacaaccttatcaggtaggtatttaatgtttacattgaagaagtaaagatcctgaataacttctcaaggttatagtcacacagctagtaagaagcaaagtggcattgttaatacctcccaccattaaaaaaaaaaaggtggttatagcaaagtatacactagaataatttgagttgtttgagatggatacaggtatctctttttttaaattagtaggtacaaacaaagaacttgaaaaccacatccttttagattctttgttgtttctaggagtgtatttcaaggtggttagtaatttgtgtttcctgggctccctttaatagtgttagcaaatttgctttgtgattaccttgacttataatctccccacacactgagttgcctc

SEQ ID NO: 548 - DNA, 1940 bp, Homo sapiens
gagaatcgcttgaaccctggaggaggaggttgcagtgagccaagattgcaccatgcgctgcagcctgggtaacagacggagactccatctcacgtggtaggtgagccaccgctcctgaccgagaaaggatttctatgcattgttctttagttatagttctcttttccttgagttttgaaaaagcgcaaaaactgcttatctgccataaactggaagaacctatttaatgaaaaagtttggtgagaagaaatcaggagaataatatcaaacagtgttctagagggctacttagcatgattatctaattttttcttagaaatttctcagttgattgccctcttgtggtattttatttacttatttttttaaatcttccattacagccatgcctttcttggacatccagaaaaggttcggccttaacatagatcgatggttgacaatccagagtggtgaacagccctacaagatggctggtcgatgccatgcttttgaaaaagaatggatagaatgtgcacatggaatcggttatactcgggcagagaaagagtgcaagatagaatatgatgatttcgtagagtgtttgcttcggcagaaaacggtaaggaaatgatggaggtggaagctgaattactttcttgttcctttgggactctttttttttttttttgagacgaagtctcactcttgtcccctaggctggtgtgtgatggcgccacctcgtctcactgtagcctctgcctcccaggttcaggcgattcgcgtacctcagcctcccgagtagctgggattataggcacctgccaccacgcctggctaatttttgtatttttagtagaaacgggatttcaccatgctggccaggctggtcttgaactccagacctcaggtgatccgcccccctcagcctcccaaagtagtgggatcacaggcatgagccaccgtgcctggcctcctctgggattactcttaagtgtttttagtgggtcattgagcagtggcttgccaaatgtgaattggcaaagcttttctggtgaaatacctttcctactttggtaccatgatgaggaaattaaatgccttcagatatgaggatggtccattgttcctcagcattctttctcttctcccaaattttccttagtattttaccctgctttagccaccaggttagaaattgcatgtgtgtgtatacccattttttcagttggctgtgaagcagagaatatcaactagttttggatgttgacccttgaaaatctttgggtgaaaatatgttcaaatccattgaatcctcattggaaaagaggtttaaccttgcaaatccattacattcaacatctttggattcattccactctgaagaagatggaggtgttaatgagattgctgtacatgagcgtgaacaacgatgcagtggaaaagggatgttaacagcttagtgttcacctcctcaaaagttgaatgagttggccaggcacggtggctcacgcctgtaatcccaggactttgggaggctgaggcgggtgtatcacgaggtcaggagtttgagaccagcctggccaagatggtgaaaccctgtctctactaaaaatacaaaaattagcagggcatggtggtgggtgcctatagtcccagctgctcgggaggctgaggcagaagaattgcttgaacccgggaggcggaggttgcatggagccgagatcgtgccaccgcactccagcctgggcgacagagcgagactctgcctctaaaaaaaaaaccaaaaaaacaaatttaaaaaaatcccatgcagtggctcatgcctgtgatcccagcactttgggaggccaaggtgggcggatcacctgaggtcaggagttcaagaccagcctggccaacatggtgaaaccccgtctctactaaaaatacaaaaattacctaggcatggtgacaggggc

SEQ ID NO: 549 - DNA, 1028 bp, Homo sapiens
gcctcagcctcccaaagtgctgggattaaacttttgatattttaaaagattttagtatccacaaatatgcctcttaaaggtttttgcaaatatccatattgctatatatattaagaacattttagttgttagttttcagagaggttatgtatactaaaaatttgtttgaaagcttgggaagtgatttcatgttaattctttaaaggcggacttcatttcagaggccccgtaagatgaaaggccttttgtagtttaaaaatgaaaccaaaattgatctgtttttccagttctcactttttggcacatatctcctccctcagtttaattaccattttcctttgacagatgagacgtgcaggtaccatcaggaagcagcgggataagctgataaaggaaggaaagtacacccctccacctcaccacattggcaagggggagcctcggccctgaacagagcagctgctgatgtctggaggctgattttcctgttctctgttctccactggaaaggttgtttacgacaaacctccttgtcaaagtgtgtaaaaataaaggattgctccatcctatttgttctattttctcttggatcatgactttcttttcttttctttttttgtttttgagacagagtcttgctctgttggccaggctagagtgcattggcacgatcttggctcactgcaaccaccatctcccagattcaagtggttctcctgcctcagcctcccaagtagctgggactacaggcatgcaccaccacacccagctaatttttgtatttttggtagaggtggggtttcaccatgttggctaggctggtcttgaactcctgacctcatgtggtctacccacatcggcttcccaaagtgctgggattacaggcacgagccactgtgcccagccatatcatgcctttctatactgagattataacctattttttaaatttgattttaaaaacagttgaaacttttagacagttcctaaaaaattagcagctatggaataataactaacatttaatt

SEQ ID NO: 550 - DNA, 1026 bp, Homo sapiens
acaaaaaattagccgggcatggtggtgggcgcctgtagtcccagctactcgggaggctgaggcaggagaatggcgtgaacctgggaggcagagcttgcagtgagccgagaccgtgccactgcactccagcctgggggacagagcaagactccatctcaaaaaaaaaaaaaaaaaaaaaaaaaagaggggaggccaggtgcagtggctcacgcctgtaatcccagcactttgggaggccgaggtgggtggattgcctgaggtcaggagttcgagaccagcctggctaacatggtgaaaccttgtctctactaaaaatacaaaaatcaggtgggcgtggtggcgcacacctgtagtcccagctacttgggaggctgaggcaggagaatcgcttgaacctgggagtcagaggtttcagtgagccaagatcacgccactgcactccagcctgggacagagcaagactccatcacaaaaaaaaaaaaaaagaaaaaaaaaaggaaacgttcagtgaagttgaaggtagatcaaagcatacaaagagagatggcaaaaaaaaaaaaaaaaaaaaaaaaaaaaaaaaaaaaaaaagccaatacaggaaatctcaaaatcaggctgctttaaagaagccaaaagaaatatatatatacaacccgtatagtgtgtatgcacaataagatacacacatacacaccataagattctactcccaagaaattgaaattcaagaacaggcaaactaatctctgaggatagaaagtaaaacaacagttgcctaaagaggggatagggattgaatgggagaggacataaggaactttctagggtgatggaagtgttctatatcctgaatatagtggtgattaaatggatatatgcaatcatggagtctcatgaaagataccttttttttttttttttttttgagacagagtttcattctttttgcccaggctggagggcaatagtgccatctgggctcactgcaacctccacctcctgggttcaagtgattcttctgcttca

SEQ ID NO: 551 - DNA, 1124 bp, Homo sapiens
gcaggcatgtgccaccacgctggctaattttttttttttttttgagtcggagtctcgctctgtcccccaggctggagcgcagtggcgcgatctcggctaactgcgagctccgcctcccggggttcgtgccattctcctgcttcagcctcccaagtagctgggactacaggcgcccgccaccacgcccggctaatttttttgtattttgtagtagaaacggggtttcaccatgttagccaggatggtctcgatctcctgacctcgtgatcctcccgcctcggcctcccaaagtgctgggattacaggcgtgagccaccgctcccgccccatgccagctaatttttttgtagagacagggcttcgccatgttgtccaggctggtctccaacccctaggctccccgccttgccctcccaaaatgtggagattacaggtgtgagccacaatgcctggccattttgaggaatttttaaacactggctttaatttttcaaagtatctggagcaacttctgcttctgagagatagagtagatattcttttccccagtcctcctgctaagtacagctaaaaaccccaaaaacactctatattatacaaaatgaacataagatgactctgaacaagaagaaagcagattggttagggacctccagatccaaggaatgactcagcagtgacctccctaagttttctttttgcctcatatatgtcagaatgggtactggagaagccagcaacccaaaactgccaacgattgcagacaaaagccccaagaaaagcttgtcttttttttttttttttttttgaaagagtgtcttgctctatcgcccaggctggagtgcagtggtgcaatcatggctcactgcagccttgatctcccaggcttaagctgcttagactacagatctgcgccaccatgcctgactaatcaatacagttgttttttttttttgaaacggagtttcactcttgttgcccaggctggagtgcactggcgcgatctcagctcactgctgcaacctctgcctcctgggctcaagcagttctcctgcctcacctcctgagtagctgggattacaggcatgcaccatcacgccctgctattttttgtatttttagaa

SEQ ID NO: 552 - DNA, 1044 bp, Homo sapiens
ggcacgatctcacctcactgcaacctctgcctcccaggttcaagcaattctcctgcctcagcctcctgaatagctgggattacaggtgcacgccaccatgcctggctaattttttctatatttttttttagtagagatggggtttcaccatgttggccaggctggtcttgaactcctgaccttgtggtctgcctgcctcagcctcccaaagtgctgggattacaggcgtgagccattgcacctggcctattttattttttaactcttttctctccttttttttttttctatctcctaccagaaggaacctttaatgtttagaaaaacgttgatttatatcttatttaagctttataatatcctgaaggatagtattacacagatgaataaatttaggcacagagacttaaaattactgtctaagagccaggctccagatttctgggtgaaggtttcacattgtatcacagaagggagttttaaaatcacagtagatgacttgggctaagtgagaaattgtgaaaatgctttaattgttagtatcattattgttgttagttttagtttctgaagtatagtcacacactttaagtgacatacatttccagatctctgaactgtggagaatttcttttccccttattatgggagaagttttacgatatataaatcacattgaaattttcatacaaaaataatacaaaataaaataaaatacaaaaaatacaagaaataaatacaaaaataatttttaaaatagtacaaaatgatgaaattttgttaacacagtgattggaaaatatgggttgaggatttgggattgtttacctaagtgacgctctgaagcaaccttttggttatatgtagattcagcttatttatcctttttagtggatgttgttcttttttttttttttttttttttgagacagggtcttgctttgttgcccaggctagagtgcagtgtggtgagatcagggctaactgcagccttcacctctcaggctcaagtgatcttcctacctcagcctcccaagtagctgg

SEQ ID NO: 553 - DNA, 1050 bp, Homo sapiens
ggccaggtacggtggctcacacctgtaatcccagcactttgggaggccgaggtgggtggatcacctgaggtcagaagtttgagaccagcctggccaacttggcgaaaccccatctctaccaaaaatacaaaaattagccaggcatggtggtacatgcctgtagtcccagctacttgggaggctgaagcaagagaatcgcttgaacccaggaggtggaggttgtagagagcccagattgtgccactgtactccagcctgggtgacagagtgagactccgtcttaaaaaaaaaaaggtcccatcgttgctcactccattttttcccaagcatctacctgttggtcagcttgcctctctatcccctgcccctacacacccccacccaacaaccacagaaagcatattgtctaaagctctgtatactttactgttttttttttttttttacaattttccacattaatatgtgttcataatatgaaaagaaattattcaaaaatataaatcagttggcttccctggtggtctagtggctaggattcggcactttcaaaaatataaatcaaagtccatgactctaaaaataacatatgcattgatatgctcgcccctttgacccttctctcaagagaaattccctgccaagtaatccacatacataagaagtgtaaaaagtccctagattaaaagagcataaaacttcattatggaaacacagtagtcccagctatttgggaggctgagacaggaggatcacgagtccaggagtttgaggctacagtgagctatgatcacgccattgcactccagcctggatgacagaggaaatattaattttagagtaatcagagaaagccgcatgaagaataaattaataagtatttattgaatgtctaccatgaaccagggagtaggtgatgtgctgagaagacaaagatattgtccttgtctctctatgatcttactgttaaatggaggaaacatattggcaaactgacagttactgtctattgtagggagggctatcatatagataaatgctgatgctgtg

SEQ ID NO: 554 - DNA, 1014 bp, Homo sapiens
taggcaaactggcttctctggtgcaaaccagttgttaattgccatttattttctttgctataaaactgtaccagccatctacttactttctcattagagtgaatctggagaaaaggcttaggttagatttaggaaatccaggagaaaaatgcaggacagtcagagtaagaccagggatgggcataatcctttctctcacttgtcttaccagccctagaccttaagggtggccaggacctccttgcatttgccagtagaggttgctattgaagtagtgtaaaacctcttgtttctattcctgctaactccttttgccccatcttatttttctccttcactgacaccctcctatcacacacacattattggttagttatcattcccatctctgaggttcacatatgcagtggaccaccctgcctttagctgtccagactttgactgcaacctgtctttctattccactcctcctcccctcccccaaatgatttgaaatggagaggaaaggaaatggagtttgatggttttaactcttctgtggctgtggcttagggagcagaatgttttgattgcttgatttaggggtcttgaggtctcctaatacaatattctttttgttaatagaaaggccccactccattttttttttctctgagtattttggactcaaagtcttgtgttgaaatgtcggtacctgcccccgaaggggaaaagatccctttcagagtttatttttcccccccattcatggggaattcttctcattatcagaagatgaagattactggtcctttgaacagagtataaatatagccaacaccctaatatatttctaatgattgggctttagctttaaaaacattaggctagatgcctccctattttttgtggcatgatttagctgtaactagcctggaggcaataacaatactaaatgaccttttgtagtcacattaaacattgaaatggtactgagactgccttggtggggagttttggcctatgggaatgatg

SEQ ID NO: 555 - DNA, 1053 bp, Homo sapiens
cctagagcatggcttggatcctgatcagctgatttcctgtctctacagggatgtgatgtgattcctcccccttccttctggaagaaatggatattttttttcatttcctgtttgatagcatattttctgagtaccaggagacacttgatgactataaaacatttgatgtgtggggggtgggaaggaaggaggcttttgttttcagcagaatggctttcatttgaggaattcaaagcacatacatgaacccaagctgttttgttcccatgggagagacacaggctctaagaagattgtttcgaatccctttcctgggctgtgtctacttgacctgcactggtagagccccttctcccccataggttagaaaagctcggtccctcatggagctctgcatgctgtggattctgctcttgccacatccgctactcagccctttttgtgcctaaatccgctggagagcaactattagtccctgggggaagtgacaccacccttggaatggaacctggctggatgccccttgatccctgactgagtgacacagactgggacaggaatctggctgtccagatttcctgtcctctgtcctcactagccgacttggctgcttccaccctggggctgggggtatggggtgtggtgggagctggttgctaacaagcagcgccgcctgtggacctgcacagccacttgttttcctagccaagagctacccgtccagtctggcctgttcctgatccatctggagtgagagcagagacctggaagagagatcagtggggaggcagtcattgtgatcccttttgtttgtagtgaagctttgcttagtgtttgagggcctggggtttaattttgtaacagactcttactatagttgtgtgtgtttaactataagattttcttttcttctcttttctccttcctcgtcctcctcctcatcctttctcctcctcctcctcctccttcttcctgtctgtttttatttttcccaactttataaaggtataattgatatataaaaattgtatatctttatggtgtacaatgtga

SEQ ID NO: 556 - DNA, 1047 bp, Homo sapiens
aaaaagacaaaaaatagccaggcatggcagtgcgtgcctgtaatcccaactactcgggaggctgaggtgaggcaggagaatcacttgaaccggggaggcggaggtcgctgtgagccgagatcgtgccactgcactgaagcctgggtgatagagtgagactccgtctcaaaaaaataaaaataaaaataaaaataaataaataaaataaaataaaataaaaaataaaaggaggcattgattttgggaggaaagatacggattcacttttagtaatttcagttctgtttgctgtgacatgctccggtggaaatgttcaagcacttggcactacagagctgcaataagaagagagccagggttcagtcatcccagcccgatatttaaagtcctccataattgcctctctagcctcctctccaaccactttctcacttctaagccagacaaaactgtcttaatcttatcccattgttcaccacctgcctcaaagccctgtaggaagtcttctttgatctctccactggaagttagttccagttttctaaacttaatgctagttgtattttttttccatatcatttgtattatactttaacatcctatttgtatgtatgcattattttcttctacaggattttaaactcctagaacctgggactatatcatgaacttttttttttttggagactgtctccctctgtcacccaggctgaagtgcagtggtgcagtctcggctcactgcaacctcctgcactcaagcaatcctcccaccccagcttcccaagtagctggggttacaggcgcatgtcaccatggctggctaatttttttgtatttttactagagatggggttttgccatgtgctcaggctggtctcaaattcctgagctcaagcgattcgcccaccttggcctcccacagtgctgggattacaggtgtgagccaccgtgcctggcataaactcttttttgtctctcacattactagttctgtattttgcacagtgtcaaaaaatatttggtgatttacaaagtaaatggaatctg

SEQ ID NO: 557 - DNA, 1622 bp, Homo sapiens
aggtccctgaacctggcacctgcttttgttactggctccttaagtcactggagacatttttgctgtttcctgggttagcagctgctttgggataatagtagcaactggttgtcaggatgtcagttctgcctcaaagaaaatcagtgtatttatatgaggagagttaccttttctgttcttaaatttcttcagggtttgtctgaagagtgagcagttggaagtcagctgtgcccttagtttgatgaccccatgaccctcatctttgaatctgaggagacactgccatttctactatccaagtactaaccaggcctggccctgctcagcttccaaaatcagacgagatcaggcgtgttcagggtggtatggccgtggacgagacactgccatatttttttcgtcctgctctccctctggtgagactctgagttctgggttctagcatgtaggtcagtgcctcctacctggtaagcattcaacagatatatgtgggatgaatgattgaatgaattccttgatcttgctgtccaggttcagtttctctgacactgatacgtgggtgctctatgggagggggacctttgtttttaggagaaagattgcttcaaaggaattatggaaggtgttgatttctagggggctttgggggaactatgggaactctaagatatgattcgttctcgcctcattggtctagatctttctcctcgatagtaactgtctgctgacagacttgccctgtttcaggagcagtatcctgaacctgactcatctgggctctgtccttgagcagggtaagggattttttttttttaacagccatcctgtcactgtagattcagaagccctcaggaccacatctcaggcactgtagtcttggacttcctgatctggctgcattcagtcaagttccactcagctcttaggtgtctgtgcctttgtaagggctgttggagacagaagggctttttttccgctttgtcagcagctggccagagaatgcctattagtctgccagatcctaagtctttcacgtttccctgtctgtgtctggaacttagggcagaatctcttaccacctgaggttacatctcactatttgcctttgtgggacccattggaggataaaagatgaatagccatgaaaggcatgcagagttattgaactatggttctttgaaatgctgtgactctgaggaaagatccctggtctccaagaatacaactggagccagaccattgcaccaccaccctcctttcccaagagcctctttggaaccatcactcattccatagttccaaacatccttgtttttgtttaatttttatctgataaatgttatgaaacaattttaatggtgaaacacacagaggaaatgacaaactagcatgtgttgtcttttaaatgcacttagttcaagtggttaagtcagttgttcctgttgttagattgctgttgtgtagtcgactttccttctttaggtgggaagagtctctgaatagactttaaaaaagcaaaaggaaccagctcttctttagctgattgatcattcctttacatctgactcttttcagcacttaaattcagattgtactatgctgattgctttcagatcatgaca

SEQ ID NO: 558 - DNA, 1157 bp, Homo sapiens
aattagccaggtgtggtgacgggcacctgtagtcccagctactcgggaggctgaggcaggagaatgtcatgaacccgggaggcggagcttgcagtgagctgagattgcgccactgtactccagcctgggcgacagagcgagactccttctcaaaaaaaaaaaaaaaaaagccaggtgtggtggcaggcgcctgtaatcccagctactcaggagggaggctagtgcaggagaatcacttgaacccgggagacccaggttgcagtgagccgagatcacacctctgcactccagtctgagtggcagagtgagactctgtctccaaaaaaaaaaaaaattctcactttcttcttctaaatccattttatagcacacaacaattcttctcttacccagaatgcttatttgtgtgttagcttgtcccatttcttagtcattttcgttattcaaaattatttaaaggagaattgagagtaggaagggaagacttctaatagtcctcttcgtttaaattctgtaatcatagcttccactctcctccttttaggtcctctaacttttgattcttataccttgcatatgaggctctttccttctttttccccccattttagtcatttttctgtagaaaatttctgcttatgcttggggagctagatatgaattcttgttatacttactaagcatcactggttctatctctagatgtttaatagtcaggtttttagatcaataggtttttagatcaatcccaaattcatagtgtcatgaaaagatagatgaggaactgagcccacctggagaagtcaaaggatacttgggccaagtgatataactagttattgacaagcttaaaccatgacccagggttctgatgtacagttgaatgcctttcctccaaatcacattgcttgctgttgaagccttggctaggagtaatctttagtaagatccttgaattgtgactttttttcttttgtttaattttattacagttccttcctttaacaaaaatgctaagtaatataagctttaagagggttaaaattagtccggtttcaaagatatatttgagaattatgtagtatctcttgagatagtctagagatcttagagctacgttggggcctaaggactgagaatcgctgtcatcagactag

SEQ ID NO: 559 - DNA, 1039 bp, Homo sapiens
catcagtccctggctgtcatcattttgctgtgcaaaaagggaacatcagagaggggtccaggagccactccacatatcattcgtaaatgttattgctaatggagagagggatgatggtgggggcaggcgtatttgtgttcatagaggaaggtaggactgtaatctccatgcctagtttctgattggcattgataatataaccatctttcagagagtcagctccaagaggtaactgggaaacatctcagttttgctccgggcactatttcctttgccatctataccagaagctgtggtgaatgggaaagccattgctttctgaagtgcccttaggcctttctcagtgactcttaagttttaagaatcatttgggtgagcataatgctgaaatcctgtagctatgaaagctgcactgccatggcaataaaactccccattgaataagtaaaatggcaatttccaggaatctgggtggtagttatttcaatcaagttgagaaatgggatcaccgagagggggatttccgcagaatctgggctgtcagggaaatctttaggctgtcagggaaatctttattccccattgtcttctccttacaaattccaggagaggagtatgaggttatatttgtgtcctcagtaagcccataaaggtcagccagtgtgctaccttacattgtaattttccttttcaacattcttttttttttttttttggttaaattttactttaagttctgggatacatgtgcagaatgtgcaggtttgttacataggtatacatgtgccatggtggttttcattcgtttatgtactgaacataatcttagtacctcacagacagtgcacatgtactaacacctttcctgaaaccttaaaatataagaaatatagaaatacaggtagtttgtaagtctttgctcttggggaagccaattttggatttcctttgtctttttgtcctatcatactccttgaaaggggtagtaaaagcatttttctctttttccctctctgtagttcaccccagtggggcacat

SEQ ID NO: 560 - DNA, 1012 bp, Homo sapiens
gtgcatccccacacccagctaacttattgtattttttcataacaacagggttttgccatgttgcccagggtggtctcgaactcctgggctcaagaaatctgccctctcggcctcccaaagtactgcgattacagacgtgagccaccgccttgtgctgtctctctttttctctttctctctctttttgataaaaatcaggatcttgagtattctggattttgtcaaaaactgagctggaggtggtgcggtggcctgtaattccagcactttgggaggccgaggcaggtggatcacttgaggccaggagtttgagactgggttggccaacatggcgaaaccccgtctctactaaaaatacaaaaattagccgggcgtggtggtgtgcctgtaatcccagctacttgggaggctgaggcacgagaatcgcttgaacctgggaggtggagtttgcagtgagctgagatcgcaccactgcactccagcctgagtgacagagtgagactgtgtctcaaaaacaaacaaacaaaaaaaccccaaaacaacaacaacaaaaactaagctggataatagttttcttcccaggcatatatgagcatcagagacccaaggattataggtagggaaaaaatgtaggcaactgtattgaaggtgctctgatttttaagaaaattttaaaaattcactggatatgatgtatttggggtgattctttctttctttttttttttttttttttaacctagcagtaaagtacaggcccagttgggtcctacttaaagttttcctgtttgacaatttatcaggaattattattgcttaagatagctttgaagtaaattgtctgtgtcaaagaccttcctccacttctctcacttacctagctcttggcagctgtttccaaaatgtttgcactaactccatagattcatgtctgaaggattagatactccaggaacatctattgggagaaagtttaactacaactgttgtccatttttcaattaatgtgcca

SEQ ID NO: 561 - DNA, 1057 bp, Homo sapiens
tcttctgtgtctatctatctttgtccagtaggggtcactgagggttaggctctcaataagagaaacactaatctagtgataaatgagctggattccttgtctattgtgacatctttgtatattcagtactatgttttttaaaatattagagcagaaacaaaaggcgtgaacttgtattaagaactttatgggcgaagcgcagtggctcatgcctgtaacccgaggcgggtggatatcacctgaggtcaggagttcgagaccagcctggccaacatggtgaaaccccgtctctaccaaaaatacaaaaaaattagacgggcatggtggcgcatgcctgtaatcccagctacttgggaggctgaggcaggagaattgcttaaacccgggaggcagaggttgcagtgaaccgagattgtgccattgcactacagtctgggcaacaagagtgaaattccatctcaaaaattaaaaaaaaaaagaatatttctggacaaaaataacaatcctgggcaagattctggaacagtccccatagacagggcttcttttcttcgtatcatttttttctccatttctttaagatgttggctaccagagtttcctggaaaaagcttactagatagatattatttcattggggaaaagggtcaaaatgccagagagagagattacttaaaatggtaatatggctgttgaggttgactagatattcttgtcctttccctttttgaagcaatgctgtcgaagcctaatttgacttagtcattgagctgttcaataccacacattactttcacttaccttcttgcatttgccactgaggatgacttgatgccctgctaggaggtctcttgtgtggtaatcataataacaagagttggcattaatgagtcaatgtttaatgctttttaaatagttaatgcttactgtgtgccaaatatattatgcattttctcacttaatcctcactgtaacactgtgaagaggtaattttattatccctttttgacatgagataactatggattaaagagattaagtaattggttcatagata

SEQ ID NO: 562 - DNA, 1021 bp, Homo sapiens
gcatggtgatgcatgtttatagtcccagctcctcaggaggctaaaccaggaggattgcttgagcctaggagttcaaggctgtagtgagctatgatcacaccactgcattctggcctgggcgacagagcgagaccatgtttcgaaaaagatggttgagaaatggtggacagatgccaagtggagtggctcatgtctataatccctgcactttggtaggctgaggcaggcagatcacttgagcccaggagttcgagaccagcctgggaaacatggcaaaaccccatctctgcaaaaaacacaaaaattagccagacgtggtggcacatgcctgtagtcccagctactcgggaggcagaggtgggaggattacttgagcccggtagtttgaggctgcagcgagctatgattgtgccactgcattccagcttggactacagagtaagaccctgtctcaagaaatggtgatagaaacagcactagcaggctgggcgcggtggctcatgcctataatcccagcagtttgggaggcccaggcggatggatcacctgaggtcaggagttggagaccagcctggccaacatggtgaaactctgactctactaaaaatacaaaaattagctgggcgtgccgggcgcggtggctcactcctgtaatcccagcactttgggaggctgaggcgggtggatcatgaggtcaggagttcgagaccagcctaaccaatgtgatgaaaccccgtctctactaaaaatacaaaaattagccgggtgtggtggtgtgtgcctgtaatcccagctactcaggaggctgaggcaggagaattgcttggagccgggagacggaggttgcagtgagctgagatcacgccattgcactccagcctaggcaacagagcaagagcgaaactccgtctcaaaaaaaaaaaaaaaaaaattagctgggcgtggtggcacacacctgtagtcacagctactggggaggctgaggcaggagaattgcttgaacccaggagatagaggttgc

SEQ ID NO: 563 - DNA, 1034 bp, Homo sapiens
tgatctcccagcatcagcctcccaaattggtggtattacaggtgtgagccactgcgcctggcaacagcaatttatttaaatatttattcaggttgggagtggtagctcacacctgtaatcccaacactttgggaggctgaagtgggaggattgtttgtacccaggagttcgagactagcctgggcaatatggcaagactgtgtctcaatcaatcaagcaatatttattcattcatttatttattcattcattcattcagtgtcctcctgatttttattccctatgttcagatcttatctatcaaaaataaatccctcatttaacttagttctcttcttaatccttaatgtcaagtatgtaatattttctgactttttaaaaaacctaccattaatttataatctgattttcactctaccactctcttgagaaatagtctcacaaaagcactcttacttatttgtaggaaagttaaaaaactttcttagtctttatcctccttgacttctgctgtagtatttgataccggtgatcattcctatcttgattacactttcttgtatttttgcttacctctttcactgttattgttttgttttgtctttttcttctgtcctttgttgattgcttttccatctcctgccttctaattttggctgttccctgaggctcagtccttagcactctgctcttctatcttactcctaatccagaaagcccatttccatgtctttagctagcacctctgtgcatgtgacttctaaagttaagttctcagctgacccaaactgaattctggtatttccagctgcttcaagaacattttcatttgtaacttctttgctgccattttaaattcaacatatttaaaattgaatttatcaaatccactgcccttttaacaaaccttatgacctgcctatttctgttaatggtccactactgttgttccacactgcaaacttgaaaccttgggtctatttgagggaggggtttttgtttttgtttttgagacaaagtttcactcctgttgc

SEQ ID NO: 564 - DNA, 1070 bp, Homo sapiens
gtattcatataacactttctaaacacttttccttctatgatctcatttttatttttatttttatttttatttttttgagacaaggtcttgctctgtcacccaggctgggacgcagtggtgtgatctcggctcactgcaacctccgcctcctgagttcaagcaattctcctacctcagcctcctgagtagctgggactacaggcatgtgccaccacacccggctaatttttgtatttttagtagagacggggtttcaccatgttgtctaggctggctcatttttatttttatcatatctttgtcaaatggataaggaagattttatttttaaaaactatactatagatttaaatcctttccttttttctcttcttccatttcagggtcatgcgtcttcaggatgagctggtcaccttgcgtctagagtgtacaaacctgtaccggaagggtcatttcacttcacttgaattggttccaccctctactttaaccaccactcatctgaaagcagaacccttaaccaaggcaacccattcttcttctacctcctggttccgaaagcctatgactcgggctgaacttgtggccatcagctcctctgaagatgaaggcaatctccgatttgtgtatgaactactgtcttgggtagaagagatgcaggtgggtgcatatccaaaagcttatgcagtacactgatgtttactggatctggaagcttatctaagaggaccaaattgctttgtgttccctgtgcagattcccttaattattattattcttttatttgagtgatggggtcttgctatgttgcccaggctggactggaactcctgggctgaagtgatcctcctgcctcagtctcttgagtagctgggacaataggtatatgccaccatacctggcttgactttcttaattattgatgctgcctgagacccaagcccccttctccttaaatcttgcatggatgaggttggcacaaattctcacagtcccgtactgaatagcatacagttttctcatttgaaaccctttggaatcttttccctcagctaactgtactctgagtg

SEQ ID NO: 565 - DNA, 1048 bp, Homo sapiens
tgtaagtcttcctgaaatcaagattgaattagacatgagatgcttgggaaagaaatctcaaacccttcatacttcagttttcttttttttttttcttgaaatggagttctgctcttgttgcccaggctggagtgcaatggtgcgatcttggctcactgcaacctccacctcccgggttcaagcgattctcctgcctcagcctcccaagtagctgagattataggcatctaccaccacacctggctaatttttgtatttttaatagagatggggtttctccttgttggtcaggctggtcttgaactcccgacctcaggtgatctgcccgcctcagcctcccaaagtgctgggattacaggtgtgagccatgcagttttcttttatataccaggtgaatttcttaagctgctattaatttctcaacattttagcatttttgtaaatatttggaacacagcaaatcagtttttaaacattgatataatcctttttcaacaattctggatgggatgttgtttatgcctttccctattattgttctctctggttatttcttctctctggcttgtaatcatcatattatatccaggtaacatttatgagattactaaatatgtgctaacgttaatatgcataatgctgtagcaaatccaagttgaagatctcaattaattaatgtagtttagtttttttttttttttaaatagagatgaggtctcactatgtcgcccaggctgctcttgaactcttgggctcaagcagtcctcccaccttggcctccaaaagttctgtgattacaggcatgagctaccacgcccagcctcaattaatttagttctaaaaattcctgagatgctagtatttgacttgttgcctttctctgctcaacatataagctcaattctgctaaggcaatcacatttttccttagaaggtctctaatgtggagctgaagtcttacaaaggtaatagtcaggttctgtgttatttctagggtcgaacaatcttatcagaaggttatggccctttggcatcagctgcatgttaa

SEQ ID NO: 566 - DNA, 1023 bp, Homo sapiens
aaggggttgctgtgaaacccttcatataaatgagagagtaacatcaccacttttttccatttgagtagctacgaacttgagatagagaagaacttatagatgaattctcaaaatcagatcatggaagaagtctgttgatatttcagtcattactgctcatcaacctatcacattttcttgtggctgtaacatgtttggactctcaaagattagtatacagtatgtgaaatttaggatcaggtaggattaggcagaagattccctaaataaagccttgctttcattagtaggatatcaggtctgcttatctctgatgtcgagcttactggtcttttgtgtttgttcattcacagaggacaaagaggagactgtggccaagatgtacatttcagagttgaagaacatccggctacgcctggaggagtatgaacagagggtggtcaaacgaattcagtctctagccagctctaggactgacagagatgcctggcaggacaatgcattaaggattgcagagcaagaggtaagccctaagagccatgtggatgctggttgtggagtgaatgctttcagagttcattggatggcaagagtatggcacctaagaaatgaggcaatagactcaagacagtccttctcaggagttcttcttgcagtctataaatgtcttttacccgtggagaagtgtgatttcagctccatgtgtattgctaaatgttgattagtttcctacagagttgagaaggcaaacagactagtaaatttttctaagcagtatatttgggctatgtattttgaaactgcttagtagagatgctactcttttattctatcccttatgtgcctgtgttactttaaatgacttggttaccttcagtcatatgaccaataaatataaggaatgactctgatttgaatgtgggctctgatacatgctctgtctgtgactttgagcaagtgagctctcatccctagtttactttcttgtaaaatggagatggcaatgcacgatatagggttatt

SEQ ID NO: 567 - DNA, 1067 bp, Homo sapiens
aaaataagatcttccaggttcatcttgctttttccagtctcaaccctggaaatcaactgtttctccaaggagttctgattcttttgggcagagaatattatttagaaactaagatctgggtaccaaatgtattcattgttgttggagtattattgcttataggcccacttagcagacagagctagaaaacataggccgggtgtggtggctcacgcctataatcccagcactttgggaggccaaggcaggtggatcacctgaggtcaggagttggagaccagcctggccaacatggtaaaacctcgtctctactaataatacaaaaattagccaggcatggtggcgtgtgcctgtaatcctagctacttgggaggctgaagcaggagaatcatttgtacccgggaggcggaggttgcagtgagctgagatcgtgccattgcactccaccctgggcaacaagagcgaaactctgtctcaagaaaaaaaaaagaaaacatatatttacaaatatatatatgcatacacacacacacacgtgttacatatacacacatatacatgtacgtaagtttacagatatagatcaatatatttattgatctctcaatttctctttctctctctctctctctctctcacacacacacacacacacacacacacacacacacacacaaattcatatgtatttgtctccccatccagttcccaacccatagcacagggattattctagcctctttccatatttttaacccccttccccaagagagaaaaacctgctttatgttatccacagtatatttacttattgttcagtcctagcatttacagatagtagtttcagaattgttaactcactgcagtaaacaaacctaccaaactagagtttaacatttatttatagttccttatgtctttagcctaaaggtatatctatagttcgaatactgagttcagaaattgcttgtgtgtgttcttaccctttcttccccttcagtgtgattatgttatttatctgaaatacagttaggcttatatatttctgttgtgttccatttgagagc

SEQ ID NO: 568 - DNA, 1024 bp, Homo sapiens
ttccttatttatttctttacaagaatgtaaaacattaacatggttctaaaagtcaaatctatacaaaaagaagtgtattcccctctagctagtccttttatcccctttgccttccttcgatcctttcaattccatccttttcatctcattagtttctggttatcctttctgtctgtctctttgtataaacatatacacatatattttctcattttcccttcttttatatacaaaatataacatgctatagatactctgttgactttgctttttctgcttaaaaatatatcctaaaaccacttaattcacagaaatctttctcatttcatttacagctgcataattctccatcgtatgtctgcttcatagtttattcaaccagcctcctatatatgggcatttaggtggtttccaatatttagctattacaaatgtggacttctttctaccttttttgttcaattctgtctccctctttatgtgtgtcttgttcctggcagcacacccaggaggatttacagcaattgaggtcagacttggatgcagtttctatgaaatgtgacagctttctccatcagtctccatctagttcaagtgtcccaactctgcgctcagaactgaatctgctggtggagaagatggaccatgtctatggtctctctactgtatatctgaataagtgagtgagctgaggttttgggtccaagagcaatattttccattgggataagaaagagaaaggcttaaagtatttcatgaataatacagagagattatagatcctgaagagcatatactgataatgagaggtcttggcttcagttcctagtaacattaagtaggttcatttggactgcagtgaagaagtgccagtgatatgaaaggggaattaatttgcagtgttgggactatgatttacctcacttctgtttgattaaatatttctgaaaataatacttaatggcataaagacaaaggaagagacactaaagaataaaaagaaaagtttttagttacactaggt

SEQ ID NO: 569 - DNA, 1033 bp, Homo sapiens
ctcactcagccttgcatcgctgttccccgtagataaagatggatcgtttgtggtcaagcccagctggatacatgggttaaagagggaattacctcatttactttattgtatttgtaccaaggtatctgatagcagtttccctttgttcttctagccaatctgagctagaaagtatccaggaagttctgggagattaccgagcctgccatggaactctcatcaagtggattgaggaaaccactgcccagcaggaaatgatgaagccaggccaggcagaggatagcagagtgctttcggagcagctcagccagcagacggtgagtgtggtagtagctctggcgagaagagttagaaatttaaattttctttatcataaaagaaaatgatgtactggcaattaaagcttcctccaaatggaagatatccaaattcccttttctttgagtggtttgagcaggatcgtcccaagatactggttttgcatttagactagagaacctgtaaggtaccttcagttctgagtttctgtaactgtattgaaaccactagatggacagattaaaattatctttattttgtttttttttatattacattttattttactaggattagatatggggttttgaaaaccaagggaaaattgtaagtagaagaaaatgattcttttttttttgaaaatgatttattttaagcattttttttttgttggtattttgttttgttttgttttgtttagcattatggttaagagtatgagatctggagttgtattgcctggattccaattctggctcacttacctactataagcctttgaagaagttatttagcttctcagtgttctacttccttatcagtaaaatggacatagtttgttatttatttaacctaccttatgagattatcgttgctaggattaactgaagtgatacatgtaaaatacttagaatagtggttctcaaagtgtggaccccagactagcagcatccgtatcacctggggacatgttaggaatgcaagttcttgggtt

SEQ ID NO: 570 - DNA, 1058 bp, Homo sapiens
aagctgatacagaaatgggattttctattacttttaaaattgaagagtcctcttcccaagtggtacctcaaggaatttctgtaaaacatttagatgctttaacactcttcagctctaaacaggccaatgaaggaaaagtaaacaatttaagtctctgcttgactttaaaaccagaagaaaacttatctcgagaaattgcctgtggggcccagagtgaaccattcccttgtatgaccccaagacctgaaggattgcactaccaggaatcagatggaaaagcccaagtgacaggcccatcccaaatttccaaaacagacaagtctttccaaggaaccaccagacaggagaccaactatcaagattcctgggttacttcgaaaactaaggaaaccaaacatcaaatttcctcatctaatgaatgtaaagaaaagtcataccaagaagtatcttttgacccagcaagaggtcttaaattggaagaaatcacagtttctagaccagattcaaaagaagtcaggtatctagaattctcagacagaaaagaccttcatcatcagggcagcaaaagtgatgataaactttgtggaactctcaaatctgaaatagcaacacaggaactaactggagagaaatttctagaaatggcaaaccctaatgttgcaggtctagaagcaggatccattgaggacatagtgactcagagaggttccagagtcttgggatcctttcttccagagaaactgttcaaaggagtgtctcaaaaagagaatacagggcaacagaatgccatcattagtcctactgttctagagaccagtgaagaaaagacagtgtccctaacagtatgctctgcagtgaagacagagaagacaccacaggaaaagctcagagaaagccctggcagtgaacaaactcccttcatgactgcacctgaaggaaagggaaatggaggtgtaaacccagagcccttcagagcaactcaggtcagtggtgtgcttttttttttttcttcctaaagatacaattagtttaatgctaaaattcttaactgggtacag

SEQ ID NO: 571 - DNA, 1050 bp, Homo sapiens
ctcacatggagtatgaagtccagtcttgtatacctcaaattattgtggattgcctactgattgtcctttgtttggggggatttttttttaccaggcccgtcaccaagaattgctgtcccagcagcaaaatttcattctggccacccagtcagctcaggccttcttggatcagcatggccacaatctcacacctgaggagcaacagatgctgcaacagaagctgggagagctaaaggaacaatactctacttccctggcccaatcagaggcagaactgaagcaggtgcagacacttcaggatgagttgcagaaatttctgcaggatcataaagagtttgaaagctggttggaacgatccgagaaagagctggagaacatgcataagggaggcagcagccccgagacccttccctccctgctaaagcggcaaggaagcttctcagaggatgtcatttcccacaaaggagacttgagatttgtgactatctcaggacagaaagtcttggacatggaaaacagttttaaggaaggcaaagaaccatcagaaattggaaacttagtaaaggacaagttgaaggatgcaacagaaagatacactgctctccactcaaaggtaagggggcagttcctggcatccttggtgaaacaatcatggcagccttcacacaatgtaggtagtgtctggggctcagaataagaactccaggacacagtaggagagctgatttatacttggaccatgggcagaaggtcttcacaaacaatgcacaaaatgtaaaatacataggtactagcccaaaggcctgatagctagctaatacctaatacctagcactggcaggagtatatcacactgatggtgaaggtggaagtattccccttcctgtatcctgaccagcagacttggactcccaagagacatagcacacaggggaaatttaaaccaattgcacagtctttatttctgtctttatttcacagagcatctagggtgaatccttaccttccttcctatctaaagaacttgctcgctcttctaaagtttagaat

SEQ ID NO: 572 - DNA, 1094 bp, Homo sapiens
tttagaaatctcttctctctgtattatttattctgccttcttttctaatattgaggagcaggggctggacgcagtggctcacgcccgtaatcccagcactttgggaggccaaggcaggcagatcacttgaggtcaggagttcaaaactagcctggccaacatggtaaaaccccgtctctactaaaaatacaaaaattagccaggcttggtggtgggtgcctataattccagctacataggaggctgaggcaggagaatcgcttgaacctgggaggtagaggttgcagtgagccaagatcgcaccattgcactccacctgggtgacagagtgagactgtgtctcaaaaaagagggggtgattcaacccagagacctctttcatggaaataaccaagcaattttgtgatgatcatgccactctggaactggaaagactactctcagttagtcccagggggaggcccacatcatcactttctcagggaaacctaccctgagcttccaggccaggttgaggcccatgacccatgttctcatagcacggtgtgctttccttagtgcctgggatagtttagagcacatagtagataccaataaatatttggtgaatggatgaaaagaagagaatcaacgatataaccttgtgaaattagttgcctcaagaggagaggaagaggaatccaaggagacaaagaaggactggctagaaagatagcaccagggtaccacagtgtcatggaagtcaaaagaacacagtctcaagaagaagggaggatccatacttatttctcaccactgcttatccttaaccccctctaatctgatccaacacccatcactgtgctgaaactgctctcttagatattcattggcttcctagttgccaagtctagtggccttgtctgcctcactattcccctctttcattgtacagcatttaatatcagatcttctttcttgaaagttaatttactttctggacattgtgctcttccgttctcttctctggctgctcttctgctttcctttttggtttgtcttcctatctcctaaatatgtggttccttaaactctgtcatctgtctcttctcttc

SEQ ID NO: 573 - DNA, 1051 bp, Homo sapiens
gaaatagaataaaacggtttttttttgctgggcatggtggctcatgctgtaagcccagttgggaggcttaggcaggtgcatcacttaagctcagacaacatggtaaaaccccatctctactaaaaatacaaaaattagctgggcatggtggtgcacacctgtcatcccagctacttgggaggctgaggcaggagaatcacttaaacctgggaggtggaggttgcagtgaaccgagatcgtgtcactgcaccccagcctgggtgacaatgtgagaccctgtctggaaaaaaaaaaaaattaacaacaacaacaaaaaaatttggagacaggatctcactctgtcgccaggctagagtgcaatgacacaattacagctcattgtaaccttgaactcctgggctgaacgattttctcagctcaacctcccaagtagctaggactacagatgcacatgcctggccaattttttaactttttgtagagacgagtgtcttgcaatgttgcttcggctagtcttgaactcctggcctcaagggatacccctgcctcagcttctcaaagtattggaattacaggtgtgagccattgagcccagccagaatttgcttctttagagtcctgccttcagctctctacttagaaatatttgtctttgccatctctgtatatctgaaatcctaatgagtaaatgtgattccctccataaagccttctctgatacctcctgccttccttcttcccacccttctgtcaggtcttttctaacttgcaaagccccatgattttgtcatcaccatggttttggtgaccattagtctaaaaagagggattaatacactgtcttttggaaagtctacaggcaggaaagggcttacaggggtcatgagagttcctgcagagtgtgtggaaagttttctcatgggttcacgagtacatgagagctcaaatagcatcaaaatccttagtatcccacttaaagcaaacttcgtgtcatgctatgttgctttatgagccactccgtagccatgtttataataataaaagtaccaaa

SEQ ID NO: 574 - DNA, 1096 bp, Homo sapiens
ggaagtccttcatgccacccaacttcccagaatttgcagagaggatagaagcttctctcagtgaggtttcagaagctggtgcttcaaatccttccttgcaagagaagaaggagtccagttctgcattaacagaaagttctggtcatttggaccacagggaacctcagtcagagtcagtaactctggaacatgtgtccaaatccataggtattccagaggtgcaagattttaaaaacttaagtggagactgccaggactttagatttcagcagcacagtgcaaaccctcctcatgaattccagcctgtagaatcagaagctgtagcaacaagtggtaacacagatgtaatgcaggaatccagattctcaagtgcaacctggccgagggccacaaaaagtttagctaagggaggcttcagtgagaagcagcacccccttggggacacagcctgcactgtggaaatgccacctctctccccttgcctgagtgaagagctgttagatccagaattgcatgttctcataacccccagcctgagagagaaaacagagtctgagctaaagtttgaggaggatgagcgatggattatgatggaggctgagggagagtgggaggaagagaaactgtcagacagggaaaagacttttctgatggcagatgagaagaacagcctggcagatatttttgaagaaagagaacaagcaaacacagcagtggtggaggatggatccgattgcttagctgctgtcttgaggacttttggccacctatctcttggtcagatttgttgccctgatgacccacagccagccaaggaccagttggctactgttcccaaggatatacccctggattgcgattgtgttcttacaggtgaggatattctcggtgaggtggcaaacagaactgctcaggggttagagggacttgtttcagattcagcatgtactgtgggtactattgatgcagaacagctctctgacacagactcagtgcagatgtttcttgaacttgaaaaggagtgtttatgtgaagaaggagtaactcctctagttgagctacagaatcaaatctcttctgaagggctggctgcatc

SEQ ID NO: 575 - DNA, 1059 bp, Homo sapiens
atgtgttgttcttttggggtcttatgctgcttcagctaagcgggcacttccgagttaacttgactcatccgtctactgccatattaggtttatatttaaacatctgactaaacctactactgttccatgtctgggtaggaaagagcaatggcaggaagagtgtagtctcataaaaacactgattagaggcatctttcttttgaaggggattgatatctgttatttctagctgtagaaactgagttctgtaacttactttaaagaaattgaaatgtggtcagttttaacttgtttgcatcttgatttgtgattttatgaaattcttcccagttttgactctactttgtgagatataaactgtattactgaaaatccaggccttgctttgttgaataaattgcagttatgtggagacttggctgtatataatttgtttatttttctttaatacgtctattagtatgagcaagctgccgatgcagaactagcttgggttgctgaaacaaaacggaaactgatggctctgggtccaattcgcctggaacaggaccagaccacagctcagcttcaggtacagaaggtacgtgcccactctttcctgagctaatagaatcatcagtaacttagagtgactaggagagtttctgactatcccatgtcaagtggaataatttagtggcatgatggtaaatagaaattaattttctatgtatttggttgagatgaggaagaatttttttttttgctttgtgagaaaggaaaaataggcccattaatccataattagcaatttccttgatagaaatttttgtaagctactaaaaagataagctagagaagatgttggataggcaaagtgtcaaactgtataagaacaatttttgatgtggctttttcatagattttgtcttaacctttagtaataacaggaaaagggtctttttacttcttaactacagtttacttttcaaaggctttctccattgacattattcgacacaaagattcaatggatgaactcttcagtcaccgtagtgaaatctttggcacatgtgggga

SEQ ID NO: 576 - DNA, 1069 bp, Homo sapiens
ttccctccccaccttgggtcaataccaatacatgagccaatttttaggatctggcacagagtttttttcaagatcatagaccccagcacttctgttatactctattgtcagcacttaaatttgtgacttgtactgtgttattttacccttgatatgtttctctgtaatagacttctagctgttgattataatttctttggaggcaggaaggggtgaacctttggtaaattattgaacctcaccataccttttctatagtattttatatatacatatacctatatgtaatatatattttgtatatatgaaaaataaccatgtagagtctgaagctttagtgtccagataagtgaaactgacagttatgttgagcatctgctattgatggggtataaatcacatttgcaaagtttggtaagttctgttctgttttctattttggcttatattctattcgtttacatgtagactattaaggaagagacagatggtctgcatgaagagctggagtttattcggatccttggagcagatttgatttttgcctgtggagaaactgagaagcctgaagtgaggaagagcattgatgaggtgtggagaaatggatgaggcactcagttagaacattagtgggcccagactgaagagtggtattgattgaagaatctgattgaatgtttttcccctagatgaataatgcttgggagaacttaaacaaaacatggaaagagaggctagaaaaacttgaggatgctatgcaagctgctgtgcagtatcaggacactcttcaggtgagaggccaggaggtgaccaccaaggaaatacaggttctgttttttgccatttttgtcatttttggaattaagcacaaaagtggatcaccttcacaggactgcagacctaagatagtggtgtttccacaaatttagccaaagttccccacttgtagtgaaaaaagtagcgacatctgtctgaattcttactcttcctgccatgtttatcattgcctgctcatcatagattcattcagctacgttgtgaagctggccttactgtgaaagtcattgct

SEQ ID NO: 577 - DNA, 1050 bp, Homo sapiens
ttattaaatcaccatattattaatataaagatcattattctttatctgtgccccttacctgaaatcacaaacagcacaaggtgctttgattgatttatgtcttcttatgttagcagagataatgctaattctctcccaaattcttctggttgtttttgactgtttacttgtcttttgttctaggctatgtttgactggctagataacactgtgattaaactctgcaccatgccccctgttggcactgacctcaatactgttaaagatcagttaaatgaaatgaaggtttgtatctgggtatggcttttgaagaagaattgttttattatagtttttaaaggcttgatttgatgttaacattgagtgtgtctttgacaggagttcaaagtagaagtttaccaacagcaaattgagatggagaagcttaatcaccagggtgaactgatgttaaagaaagctactgatgagacggacagagacattatacgagaaccactgacagaactcaaacacctctgggagaacctgggtgagaaaattgcccaccgacaggtaaggcaggtggtagatgacatcagtgaactactctccgctcttttctaatttcgtattgaatattccctttctgtcttttcctgagtagcacaaactagaaggggctctgttggcccttggtcagttccagcatgccttagaggaactaatgagttggctgactcataccgaagagttgttagatgctcagagaccaataagtggagacccaaaagtcattgaagttgagctcgcaaagcaccatgtaagtattttcattttttcatctctaaccctattgatttgagaccagatgctgccaccagcagcctttgaatgttgtgtatatcttaagagaaccaagttagatgatatccatagagataaattatgttgttcaacatgttttaggtcctaaaaaatgatgttttggctcatcaagccacagtggaaacagtcaacaaagctggcaatgagcttcttgaatccagtgctggagatgatgccagcagctta

SEQ ID NO: 578 - DNA, 1028 bp, Homo sapiens
tactgtcctttcccagatagaagagcacaaggtaagtatgatattatgatgctgcattctttttgaaagcactaattgaaagaaatgcccctttatcttatcttaagctaaaaaagagcactattgttccctcaggtttttgctaatgaagtaaatgctcatcgagaccagatcattgagctggatcaaactgggaatcaattaaagttccttagccaaaagcaggatgttgttctgatcaagaatttgttggtgagcgtgcagtctcgatgggagaaggttgtccagcgatctattgaaagagggcgatcactagatgatgccaggaagcgggcaaaacaagtaagttggggaagaaagatactaattcactgaagagtcttgggctgcatgtattgagtctctgggatgattctcaaacgtgctgtatagtgtgtatattcattcctgttaacttatttcttatgtaattttagttccatgaagcttggaaaaaactgattgactggctagaagatgcagagagtcacctggactcagaactagagatatccaatgacccagacaaaattaaacttcagctttctaagcataaggtaaagcagttaattgctcttaggtcccaagccatagtattcgctaaagcttgtatcttgccaaaaataaaaatcagagctagtaaaaagaaaaccaattggttaatgtttaaaagtcaaaatgatgaagccagggttccattttatatctagatggtctaatcatgatatttgctcatttaaataacagtttaaggaaagtagttatgggagtaactagttaaaactgtaggctttcacaaattgtcaggcacttctatatatggtataaacaaaaaattataaatttcttaaggataagctatggttaattttagttcaaaaaaagtggtgatattcatactttatttggtttctagcctgaaaactcaaattcttttgttccaaatcaagatgtcgtctgacttttaacacttttttcttttctttctg

SEQ ID NO: 579 - DNA, 1021 bp, Homo sapiens
ggcgagcgagcggatcacttgaggtcaggaattcgagaccaacctggccaacatggtgaaacaccctctctactaataacacaaaaattagctgggcttggtagcgcatgcctgtaatcccaactactagggaggctgaggcaggagaattgcttgaacgccggggtcggaggttgcagtgagccatgatcgcgccactgcactccagcctgggcaacagagcgagactctcaaaaaaaaaaaaaaaaattaaaaccacatccctgtggcaggagcttggtaagaatatgttcagtgtgtgtcactttgccagaaaaatgtaatgatatgattttcattctttagtgttaatttgacaaaatgttctctttttttttcccctcctttcctccatcctttactctttactgtctatagttcttcctcggcaatcaggtacagtgtgccttgcaatgttctccttctcaatggatatggtctgtgtagctaatgctgcctgttcttcgctatggggagaggatgtaatctgaagcatgcctgggtcgcacctggttgtcttaccaagtggagaaactgttgatggggccagcattgcaaagctatcttagcagcaaaagaatataagtataattttttataaaggagatgaaatggaggaaagtgaagctatggtatcagtccattacacttctaagaagagcctggttttgtacttctgtgttagaagtcagattaccaaatagcacagttcttatttatattagaatcttttgacagttaataaattttgtaatgtatggtaagtcaattcctgaagaacttcagtactatttaaatatctttttaatatttgtagttacttatattgtatgttataattacaaggtatctgagaagtgtagtgtggagatcgtaattggccgtggcctgaagtatgctgattatggccagccagccaagatttaatgggaccaaattagacttgcaaaaaagattggatgctttgactccacttggtaac

SEQ ID NO: 580 - DNA, 1056 bp, Homo sapiens
tggaatgtagagaatgctatactgaggacagtacaagatgtgtgacaaggttcttaacaccagtgtgcactatcatttcttacctccttttacacagctattttaaaaggtagaagatatctcaaactgcatgtagcttttagtcatgtgtaaaaaaatgaaaatattttactagctagatttgccagtctcctggtactgccaaaatcagatatttcagtttctgaatgtatccgtggcacaggaaatcatgatgttttggatagagagaaaaaaagtgctcctgcctaaataatgggtatacttgtacctaaggtactgtgtatgtttttgatcattagacatattagctcccccagataagtgaacatctaggaaatttcatttatgaagatttaaaagacacattttgaaatagaactcattttttttttcagattgttatacagataaaatttaccatcctaaccatttttaagtacaggactaagtatatttgtgtcatactaccgtcaccaccgtccatccacagaactctcttcatcttgtaaaactgaaactctatacccattaaacaatagcttagaactgaattttaacatgcccgcatcagccagtttcaggtggccagcataactcccttagcaaagacagcctctttggtggtcaatgaactgaacttgaggtggctgccgtcatgtctggttctgtaggttcaatggtagatcttttctccagtgaaaagaatggtgagggggaaaatcctatcacagtagtcaaccaagtactaggaatcttctcttttttttaactttaggactataatacccaattttgggaaatatttgaatcaatgtaaatattaagagtacctttactactaaattcaagtgctagtacataaattttgcttaatcagaatttggtgtttccttctagttcgagaaaaatgtttactttttacttgtgggattgctccagaaatcaattttcacagcttccaactgtttattgtttgttgtcgcctcctcccatcccagccttttctattatcaa

SEQ ID NO: 581 - DNA, 1090 bp, Homo sapiens
gctactcgagaggctgaggcaggagaatcgcttgaacccaggaggcagaggttgcagtgagccgagactatgccactgcactccgtcctaggcaatagagggagactctgtcgcaaaaaataataataaataaatatatggccaggcacagtggctcacacctgtaatcctagcactctgggaggctgagccgggcggatcacccgaggtcaggagttcaagaccagcctggcccacatggtgaaaccctgtctctactaaaaatacaaaaattaacggcctggtggtgtacacatgtaaccccagctactcgagagactgaggcagcagaatcacttgaaccggggaagcggaggttgtggtgagctgagattgtgccactgcactccagcctgggcaacagaacaagactccatctcaaaaaataactaaataaaaataaatgtttgtgtgtgtgtataagtgtatgtgtgtatatactgcgctccagcctcagcgacagagtgagactgtatctcaagaaaaaaggttttgaaaaaggaaaaggaggtgttgcttcagccacatcttaaaggaggtaacacttgaccagaaggaaaagggatctggatgttcttggtacagaaaccacaagttcatatgaacagaagtgtcaacagctgaaaaagtaaggggacaagtagtcccatgggactgcagccaaatgtacaaggttagcgaccagataagactctggacgggtcagcaggaggggccaggtgatggatgccagaccactgggtcctgggtacttaccacattgtgcttcctagtccccaagatgtggtcctcaaaaaaacgaaaagtcacggtcaaatgaatttgggagatgccaagttaaagctctcccaagcagggaaatatagaggaccaaaccccttttgtaggaaaaccctagaaaacctcacttggggaattctgctataagcagtgaaacaccatggaaggattctgagctgttgacaacagattttcatttagaaattcattctgcaaaatacaaaaattagccaggcaaggtggtacatgcctgtagtcccagctacttggg

SEQ ID NO: 582 - DNA, 1138 bp, Homo sapiens
agaatcacaaagccagaaaaggcttcagcaacttctgtatggatgaggaaactggggtgcagaaaggctgtgagatttgcttaagatcacacaggatcagaaccctagcttctgctcacttgttcttccaccccatgccatctctattaagtctgctgttttattcttgaattccagaccctaaaaagtctgccagtcgccctgggagtcgggctgggagtcgagccgggagtcgagccagcagccggcgaggaagtgacgcttctgactttgacctcttagagacgcagtctgcttgttccgacacttcagaaagcagcgctgcagggggccaaggcaactccaggagagggctaaacaaaccttccaaaatcccaaccatgtctaagaagaccaccactgcctcccccaggactccaggtcccaagcgataacactgtctaagcacccccaagccactatccactttgaatcctgctccatacattgggtgtatatttattctgaacgggagaagttatattgttaaaagtgtaaaagaataattgtgttatgaagctgccttattttttttctttttgtaagttactattttcatgtgaatatttatgtagataaaatttgcctcctggtaaccctgtaatggatggggcccagaaatgaaatatttgagaaaaacaagtgaaaaggtcaagatacaaatgtgtattaaaaaaaaaaaagcctattaatagggtttctgcgcggtgcagggttgtaaacctgctttatcttttaggattattcctaaatgcatcttctttataaacttgacttgctatctcagcaagataaattatattaaaaaaataagaatcctgcagtgtttaaggaactctttttttgtaaatcacggacacctcaattagcaagaactgaggggagggctttttccattgtttaatgttttgtgatttttagctaaagagagggaacctcatctaagtaacatttgcacatgatacagcaaaaggagttcattgcaatactgtctttggatattgtttcagtactgggtgtttaaaggacaaatagctgctagaattcaggggtaaatgtaagtgttcagaaaacgtcagaacatttggggttttaaact

SEQ ID NO: 583 - DNA, 1123 bp, Homo sapiens
tacttcagtgcctgttacttttctttctttctttttttttttttttttttttttaacaatcttgaactcatgagttcaagacttctcagcttctcaagtagctggaattacaggctcaagccaacagggctacctgggctacctgttacatttctttctaccaagttacatttctttctaccgattagtgcatagttagtcctgaatattaatggtaagaaacttgtttttattatttttagtttcatcacagtaatttcccagtcagccttttaaaatttttcaattttaccacgaaatcttcatcaccacttcaagtggagtcaccttaaatgacctttcctggtaccgattatctttggataatgagatgttgttttatttgttgttctgttatccattcaccaaacatattcatcagctgtcagagatcatttttctttcatttcaaagcttatcttgacttttgaaggtgaactcaaatactgggaaactgcatttatttttgtaattttggagtgttctgaacccagagttacttttggtaatacaggtctttgtgtgctgctatgaaagaaaggggtgtgagttccctgaaacccacaggtggctttggggtggctgcatagcttactggtagaggcccagggattaagggaggacaaatcatgagtgtgtctcagaagtatatggaaagctggctggccctcttttaacctaagagagtttaagcagctggattttcaatcttttcagaatgaatctgagctttttggacgtacaattcgtgtcaatttggccaaaccaatgagaattaaggaaggctcttccaggccaggtgagtaggagcaacttccagattccctgtgatgttctgcagtttggccttagttgcattttttgtctctatttacttggaagtagatgctaaatgctgcttcctggtagataggagtagatgatggttcacattgggaagggcatgcaccacctttttagagaaacaagtgagtttgagcttctcagcaaagccaaagtgattgtttctgttatgagagaaattcctgcctgagctcatctttcccagttttcttgatattccattcctggggtctccatcaag

SEQ ID NO: 584 - DNA, 1072 bp, Homo sapiens
ggcattttggattttggattttcacatttgggatgctcagcctgtactaactctgttctccttgactccttcttcacttggctggcaggactcctgcctcttcttgtctccttttacctagatggctgctttttctgtctttgctgtctccttcttttcctgacccttaaacactgaagtggctcagagcccattctttggttctccagaagcctgttaccctgtgctccgtttttctaactggtggtttgtagggcccctctttactatactgaactgacatgtgtaggtgatatagcccactgacccacatcgttattttaaaaatcagtattcatctgtaactataatagggaagaacatcagaggaaataaacgaatttgtataatactcgaatatgtttccagatgtacatgcttaagcacagctgtgtcagaacacaaagtgaattattcaggcgtctgcccctgtactcaaacgcagcagttagaaatgcagacgggagtgtcaactggataccactaggagtgatgctattggtgatacggctttgtgaaatggtagataaagttgattagagtccaaagtaaagaataatctgtttatttacatagtagttacattcctagaagattccatggaaaatcaaaagcactccaaaactttgggcttatatgtataatggaattatgttttaggtgcagataactgtaaacacattttttacctataccaatatctggcaggatatttgttgttttgttgttgtttggtttttgtttttttgagacagggtctctttctgttgctcaggctggagtgcagtggtgcaagacggctcactgcagcctcaacctctccagctcaagcagtcctgcctcagcctcccaaatagctgggattataggtgcacgccatccataatgccaggctaatttttaagttttttgtagagacagggtttcattatattgctcaggctagtctggaactcttagcttcaagtgatcctcccacttcagcctcccagagtgctgggattacaagcattagccactgcgcccagcctct

SEQ ID NO: 585 - DNA, 1030 bp, Homo sapiens
gttcactttagtccgacagcagggccaagatcacgtgaggaaggaggcaggtggggctgaggaggggtaaggatggatgcttcctccaacccatctcctctctctcttgcagggacgaggccagcagctctggctgctcagaaacagactccacagagctggctagcatcctctagggcccgccacgttgcccgaagccaccatgcagaaggccacagaagggatcaggacctgtctgccggcttgctgagcagctggactgcaggtgctaggaagggaactgaagactcaaggaggtggcccaggacacttgctgtgctcactgtggggccggctgctctgtggcctcctgcctcccctctgcctgcctgtggggccaagccctggggctgccactgtgaatatgccaaggactgatcgggcctagcccggaacactaatgtagaaacctttttttttacagagcctaattaataacttaatgactgtgtacatagcaatgtgtgtgtatgtatatgtctgtgagctattaatgttattaattttcataaaagctggaaagcagctgcctgtttctgtctgtgtcctcagccactcactgagcccttctgccttaagactccgttagagaacacactgagccccaggtgctactgggtgggggcgaacatgtctggagttgtggctggagtgcagtggcgcaatctcggctcaggcaatccttccttctgcttcaccctctcgagtagctgggactacaggcatgcaccaccacgcctggctgatttttaaatttttttgtagagatggaggtttcactatgttgcccaggccaatccttctcactggactcaagcaatcctcctgcattagcctcccaaagtagtgggattacaggtgtgaaccactacacctggcctcttgctaagtcaagactgttcttatttgaaagataagaacaccctagtgtagagagggatttagctaaagtcacgcagcctttagtgacctaactggaattttatcccaa

SEQ ID NO: 586 - DNA, 1034 bp, Homo sapiens
ccaggctgctctcgaactcctaacctcaggtgatccccccacctcggcctcccaaagtgctgggattacgggcatgatccaccgtgcccggccccaccagacgtttattaagaccttaatatgtatgaggcacattttaatgagatagcctttgtggcaaagaatacagttcttctggagtttacagtgggagaggaaatagacaagtaaatgagggatggcttacagtgtcatagtgcatagcacagggctacaagagcacagtggagaaatacctgagccaggtgcccagggttccaggaggaaatgggaggctaactcttgaaatatttatttagctacatagggaatccggaaaagggatttccaggcagagactactacaggtgcaaggacctggagaaccggacagctgaaagaccatgacgagttcagtgtgactggaattctagtaatggctggggaagtggaggaagtgagatgtggtcaggtcagtcatatgtggaggacattgtaagtcatgctaaggaatttggatttttaccctgaaagctatggagatgctttgaagggttttatgcaggaaaatgatgtcgtcagatttatatttcagaaagttcattctgtcaagtaggaggggaccagccctgtggggaagtaaaacagtgtttggaagctcttgctgtagacatggcctgaactaagacagtggaaatgggaatggagaggaggcatcagatgtgagcaatattaagaagatagaatccatagaattggaggctgattatgggaatgaagaggtaagaatagcgcgattgcctggctttctggcttagggaactgaatgggtagtaccattcagatagagagtatgagaggtaaattagggaagtgacatgggaaaaaatgcattttgaatgtttttagtttgaggtgtttgtagcacatccaggcaaagatgtctaataaggtgggtcagctaaaggaaagagcaagagtaaagatacggaggcaggagagggcctaaattgttc

SEQ ID NO: 587 - DNA, 1120 bp, Homo sapiens
ccgcacccggcgtgaagggcttttaatgccttgttgaatttgtttggatttgattttgtgggtggcagtttgctaattgatttgcccaggtccagcataaagaaatttctgggctgggcacagtgactcacgcctgtaatcctgacactttgggaggctgaggtgggcaaatcacttgagatcaggagttcaagaccatcctagccaacatggtgaaacaccatcactactaaaaatacaaaaattagctgggcgtggttgtgcatgcctgtagtcccagctacttgggaggctgaggcaggagactcgcttgaacccgggaggcggaggttgcagtgagctgagattgcactgctgcactccagcctgggtgatagtgagactctgtctcaaaaaaaaaagaaaagaaaaaagaaatttctcgctttttccagaaatacttcctcaattgggtaggcataattgatatctcagagaagtttaaataaaatggtagcagcaaaagtactttgtagaatacagcctgatgtgcaaaccaaaagtggtgatattgttaagattcagtgagtatatttttgctttggagtttagctattgagtctgtaaaatgttttgtttccaacctagggatgatcttttattctcaccctttttcctggttgcagttatttttttagcttttaaaaagtgactttcttgaggctgagttagagactagcctggtcaacatagtgagacccctgtctctaccagaaaaaaaaaaggtgacttcctcctttcagttttttgtgaagcattgtgaatcaaatttttttttacttaagcaaatgcaatgtgtcactggaagccgaacctctggtttgaaatttaatgctgagatttgaaatatgagagttctcgagcggtatcttacccaattttagtgattattactttgaaatgttgacatcagtttctttctttatttgtgctaacctggctttcatgacctatacttcagtttctctatgacaaccagacaaatctttttaaagttctctaagaagaagcatttttcatcttgttagtcttcactgacttcatatttacaaagaataaattctgaactcttttttccatc

SEQ ID NO: 588 - DNA, 1069 bp, Homo sapiens
tcattggtttaatcagtgaaaccaaatgcttagagaagaacagtggctcctgatttgggttagatttagatggcatcttttttttttttttgagatggtgtcttgctctgtcttggctcaccgtaacctccgcctcccgggttcaagcagttctcctgcctcagcctcctgagtagctgggattacaggcatgagccattgcacccacccaccatcacgcctggctaatttttttatttttgtatttttagtagagacggggttttgccatgttggccaggctggtctcgaactcctgacctcaggtgatctgcccttctcagcctcccaaagcgctgggattacaggcatgagccattgcacctggccttacaggcatgagccattgcacctggcctaaatggcatctttactggggcaaagtggtgcctgttatttggtttctgtgttaaacaagccaacttgtatcttctggtagcatgtgtaggttttactttgtgacatgttaaaacctcgtgataagaattcattagaagtagaactaactactacatagtttagtggtaatttagaagggatagtcaagtagagatttttattattattataaaatattatatgttaaaagaaagtttggaaaacaggtagaaattgtcaaaaacccatcacccaaatgtgacaaatattgtaaattttgcgttcaagtttttttccacacttcatttagctattcccctataattagaagtccaagatagatatagatagatcaatagatctaacattgcagcaaacatctccatgcttatcacttttctcacattatgatttactttcttaggataaaacctcaggaacaggattacaaaattaagagaagcattttgaagcaaatcaattgggctaccatagtagacaggctgatttgtatgggtgctttattttcaattttacctaaggatgatgacttagaaaaacaactgtgggacaaagtagaaaacatttcaagcatagcaacttcctactcaagtagaaattcatgctactgtcttaattgcctggtgggatg

SEQ ID NO: 589 - DNA, 1093 bp, Homo sapiens
tggttaatttttgtatttttagtagagacgaggtttcgccattttagccaggctggtctcgaactcttgacctcaggttatctacccgcctcagcctccctaagtgctgagattacaggcctgagccactgcgccaggcctggttttttggtttcaaaccacaatagacattgctggagaatcaagctcatagtttctttttactctgcatgatatccctccaaaagcttgtctgttctcatgacttcatgacagttctttgccaatgatttgcaaacattatctccagtcttgattctttcctaggctttatttctaaatactcactagtcatttccacttagaagctttgtcttcttttcaaactcagcatatccaaaactgacctcatcttgttgccctaactagaacatgccacaacccatttctgcctataatgtcattattctcttaaggcccccatatttgcaaatcaggagtcatctttgcctcccttctctgaatgctgctgtgctcacagtcagtaccatacagttagtacttgttctcagtttaatgcacacttgtttcatatgacctcctagggcagaaccaagattcgtgggtggaagttgcagggaggcagatttgcctccatataaggaagaactttttaatactttgagctgtctgaatggaatggactgcctccagaagtctcgggttctccatcactgaaggtgtttgagcagaggctgcctgactaattgctaattgaaaggactgttctggcataagatggtgtttttacaagatgatttctagaatccctctaatcctgagagccagtgagtcgatagaaggtagctttgtctctcctgctagactcccttaggacagggagactattttacctttcttttatattctgtacagcacttaattcaggtgctggtctcttaattgcctaaagatgattatttacaggttaattgattcttttcattttgttccaatatttggttaaacaccaaatattgtggatttttttcctttgaaatatcttggggagaccaaggcaggtggatcacctgagatcaggagttcgagacca

SEQ ID NO: 590 - DNA, 1052 bp, Homo sapiens
agttcaaaggcaaaatgtgatggtcaagaaatagaactgagagctggatccttgggaaagggtgagaaggcataaagccaagttgggtatgggtaggacacattaatcattgcctcaaaggctgtggtggggaccccatgtgcactggcccatgtagggcactactgggaatggtacagaggggagcagagaggatgatgatgttacctgcacttattgttccaggggcctgtggcaaaagaactgagcggactgccatctggaccctctgccggatcatgtcctcctccccctccaccatgcccccctcctcccccagtctctaccatttcatgctcatatgagtctgcttcccgctcatcactgttcgcgcagattaatcagggggagagcattacacatggtgagtgagcacttggacacgaacagtaggtacaacaagttgtgtgggccagaccccaccaaccagaaccgtctgtaaactacaaccctggcttgtgtggtggagactcgtttggtgtgtcctgttcctttaagggacggcaaagctggcttaaatggaaattgaaaatgatgatcacagttggaggaagccatctgccccatgggaaagtgacttaatattaggtagcatatatagaggaccctcttgtgccaaggcacagagctggcggttttccccagagctttttccgtggcaccacatggcctctgggaaggcattgtgttagggagttaacttcctcagaagatgcatactggttacatggaaaatttgcatgagagtgacctaatgttggtataaagtagatacccttaacacagctggtggaagtctgagttgtccagccacttctaggaatctatgatcatagtagctaaaaatggtgtaacaacctaaatccaactgtaagagaaatggctaactaccacatgtcctcttgatgaaatgttttttatttttttattttttttgagacggagttttgctcgtttcccagcctggagtgcaatggcgcgatctcggctcaccgcaacctccacctcccagg

SEQ ID NO: 591 - DNA, 1186 bp, Homo sapiens
cgttgacacactccctttcttctcctagataactgtaagaaacttggcctggtattcgatgacgtggtgggcattgtggagataatcaacagtaaggatgtcaaagttcaggtaactcgatattttggctccttctttttgtccctgaggaattaattcaaagagacatggtagacccacagatgttgctttggtgggaatctgattctacaaagtctgtaagctgagctgctttggacgtggcagaagaagggttggctcttcaagcaagttcttttcaggacccatcccaacccacccgagtatccagtgtcttgcgcatctgtgagcttttcatgtagttgctgagtcacgtgaaacaggaaaccttttcctgcgacttactgttgtccttcccaaccactgggactcagttctctttgtttactctgcaggtaatgggtaaagtgccaaccatatccatcaacaaaacagatggctgccatgcttacctgagcaagaattccctggattgtgaaatagtcagtgccaaatcttccgagatgaatgtcctcattcctacagaaggcggtgactttgtaagtttcttgatctctttagtatgatgttaaaaacagaagggactgaagatttctggcattgaagaaagctattttatgaacattctgcactgagcaggtaaaaacccaataatgcacaccaaaagtacacagaaatgaggtagtcccatgtagtggagccccaaaggtaggtgctttctgcctaagtggagctcaaggtagcaaaaaataatggggatgagccatggcaccttgtcaggctggtgctataaagccatatgtactgttatttacaccccatagacttaatagtctgtccaagatcgctgaacactagaacatagcatggctctgtgggtttgtctcttgctacattgtaccgtgctcctggggttaagtggaagcaagcattgggagaaatgtgtgagatttagccccagctgttctttagctcagatttaaacctgctgtctcttctttatttgcagaatgaattcccagttcctgagcagttcaagaccctatggaacgggcagaagttggtcaccacagtgacagaaattgctggataagcgaagtgccactgggttctttgccctcccttcacaccatgggataaatctgta

SEQ ID NO: 592 - DNA, 1049 bp, Homo sapiens
aattgagtaggtcggtatactaaaaatagctcaactgactgtaatgattcaggtatgcaaagatcagataatgcaatatattagttaagggaacttttactgtatatggtataatggtctatggtatatttccttgtaagttgtttctctctctctctttttttaaatgttaaagtaatcaagatgatgctaacagtcagttaccagaactcatacagggaccatttgtgtggaaactaaagctgcagaaaatccagcagaatcctgcgctactattgtagttatttgtagttgtttaggcagaaaaatcaaagacaggaagttaggaatgtttgaagacattattctagggtaatgaattcagataagatgtatttcactcatgttaaagctatcctctgaaaataagacttgcctatagaagtatccccaaccaaaagcctattaggaactccctagcccagtcagacagaatgtgtattccagggagaaggctgtatcctgcttatgttagactgtactacatacttcacgtcttaactagatataccaattaagaataggcaaaacctaatcagttgtcagaaggaagatatatatgaacaagagagaaaacaactccatggaactcagaaggagagtccccaaacatgaatttggcagtgatttttcaacactgtccagggagaacataagccagctttccaccatcatttggacaaatttttagtgataggacacatataatttatcaggctttattgtggtttcattttcttttggtttagattcaatactcaccagataacttctcagatgccacagtatgaggaatagggtaccctgtgtggtaagaggactattccccccattgtaaccaaataaactggcatttggcctatatggtaattttcttcataaactttataaaaaataaatatatattttgttgaggatacagggctagtgaaaaataaaaatatcaatataacattaaccttttagaaattagttagcataaattaacccttggaagcctaatcaattcc

SEQ ID NO: 593 - DNA, 1029 bp, Homo sapiens
catggacatacatctaagattgcatatgtagatctcctgttttgatgatcacctagaattctgttttgtggttgtgcctttaattgaccaatgtcttgctatttactgtaaatggtgcaagagtgaacatcttgaaaagggcggcagagtggtcttagcaaaaaaaaaaaaaaaaaaagagcatcttgtgctattatttctgtattgtagatttcaagaactgggctaggatatttccaccttaaaaagaaacaaattgaagttttaaaattattcttgaaatgctaccatagtttttgtagttttatagatttaacattatttttaaaaaataactttgctatattagatgtctattggtaacaaaggattacataccattcttattctgagtaaactgtattttgaactttaacaaatgagaaagtagagaacttttaaaaagaaactcaaactgtggtttttatttcagttgctgcatatcatggtgggtggtagtattttctgctaaagtgtaatggtacaggtcagttagacattataaatatgataaacctgacacctcaaatttttaacttttcacatggactttttctcctcactccaaagtaaacgcgagtcattctaagttaagaagaaagaagcctgaggacaagtcaagctgttaaagcaaaattgcagcatttgttaaatattgctattggtgaactaataattagaaatattactttctgtatcaattccatattttaagtcctttctcagtggaaaataatgcaacatattgggtgggtgtgtgggtgggtgtatatgtgtagtaaaagcctattttaacatgaaggttaagggatgggggagactttatatcttgtagttttcacttgagtgaatactaaactatattcttatgcctgtgaacatttttggcttatattttccaaagaaatgttgacgtaaatggaagcttatgttcctagagaatttcaggagtttaaaataagggaaacaaattagaattttagaacatgg

SEQ ID NO: 594 - DNA, 1062 bp, Homo sapiens
attgcttgaacccaggggttggaggttgcagtgagctgagatcgcgccactgcactccagtctgggtgacagagtaagattctgtctttaaaaaaaaaaaaaagacagcaacagaatttcacaaggctttgagtatagtcttttttggttacttattttcaggaaatccaaataggttctttcaattcctaggtgtatcagatatgttgaaaaggcaaaactaatttttatattgttaacttattttctgggtgtgctgttcttgttctaggagtcacatgatgcattattggaatttgggaataataacctacaaatattggttcatgttaccaaggaaggggtgtggaaaaacccagttcttcttaaaattctgtctcaacagccagtagaaacggaggaaggtaagtcttaagactatattggatgaggatttagttctgagaacgttggaattgattatgggttaaaattttgggaatttaacttgtgtatatatctagtctttctgtttttactttgagtagtaaaaattaactattagcatttaatgttttgcttaagtaaggattcttgcactgttagttttaagtccctttacactcatttttaaattttgcattgagtagcaatgttcatacaaagttcctgagacagaaatgaataatctgctgtaatctttggtgtgtggtagagctttgcttatacttttcttttcttttttttttttcccgagacgttgtctcgctctgtcacccaggctggagtgcagtggcaggatctcggctcactgcaacctctgcctccagtgttgaagcgattctgcctcagcctcctgaatagctgggattacaggcgcgcgccaccacgcctggctaagttttgtattttttagtagagacgaggcgttaccatgttggtcaggttggtttcggactcctgacattgtgatccacctgccttggcctcctaaagtgctgggattataggcaagagccactgcgcccggtctgcttataccttttttattggctgcaacaactgagggccatgaaaaaagtt

SEQ ID NO: 595 - DNA, 1069 bp, Homo sapiens
aggacccagtgggaattcagtttgggagtagaagaaaaagtaaacaggagtatagaaattccagatgtagtttaagtaagaatcaagattaagatgaactctgaacaaggaataattacaaaaggtttaattaagtttaaaatatgccacctccaccaccttcttttatgctaattggctgcctgttagaccattggtgtttaattgcctgattattttgaaagtcttaatacttctactttatccttgtgatcatacaaggaatgagataatacactcagaatacactaatgacagaaagtctgtgtaaagaaattgaggatttgcttgtttaggtattttatctcctaaagcacagttctttcaaatagctttgaagagacgtcttcccagaactttgtatgcatctggatctcacttctgatcttactttcatgggttatgtgtgggtattttggttggtgtatgattgcactggagggggtcattatgaagagtcgatcagacatattgtcaagaattcagcaggacgtttcagccttctttcagatacacactgtgatagggtttaaatggaagcattggtgaccatttatttctttaagaaatatacaaggtccgtgcagcatcatagtactggtctgtagcattactgcagtttaaaaggagtctcatgtttttaaaactggtcagtattcttttttcccaggtaatgtctttgaagctaacagatgattttcccaaagatatctagggttacttgaaatgtaagtttgctaactgtaactcccacctttcttctactcaaggatgcaagtgaatgaagtattattatatgaataagcttaaatctactttgattcctttttgaaaaaataaaacatttatcaactttgatttttaaaatctattactaggaacaaattgttttcagtatacctcagaactaatcagggaaatactgcattgaaaaccactattctagagaaaggtaatgataaaatattaatggcactggccggaatactagtttacattgatagcctaagcaggaaaataacttaggaac

SEQ ID NO: 596 - DNA, 1050 bp, Homo sapiens
gaaatttcgctcagagacatttacaaaccacagtaaaaagtaaaaatgttttaaactttatagcagttatgtttaacttatttattaatcttgaccccaaaagatttttggctgttgaagaaaattaaagaagtactagaggagtaagctccctgtagatgcctctcagtggtaacgtaattggaatagtcatgcatttgaaaaaggtgaccattttgagtgagatggtgtttgtatatagagaggtgtaattacggcagccattttaaagtcataaagttgaactttgaacctccacagtaagctttcagtgagtatttgatagactggcctttgatttctgtaatgtgctaagcttaaattttgtgttacacatttgtatttcttcagatgtagttacatgtctgttctgccccagctagactgtgatatactaaccaatatgttgtctaattcacggttgtgtcctaagtaactggcgaagactagcatatgtgttttatttaacagaattgtatgggagagaaaagaggtcatgggggtcaattactattgtaatagctttaaaaattttttttttctgtaatagccttttttaggggatgatcatcccttaattccacagttttatttacttcattcctaaaatacctaaattctgaatctcagtgtaacatgttaactggacttcatgggcttcttgctatgtagaaacacagagtgatgtttgtatgtatatatgtgtgtatgtatttattcatttatttttgagatagagttttgctcttgtcacccaggctgcagtgcaatggtgcagtctcagctcactgcaacctctgcctcccgggttcaagtgattctctgcctcatcctcctgagtagctgggattataggtgccagccaccacgcctggctaattttttatatttttagtagagatagggtttcaccatgtgggccaggctggtctcgagctcctgacctcaggtgagccaccacactggccaaaacacagagtaatttaaagttcttgcttagtagctaaattc

SEQ ID NO: 597 - DNA, 1057 bp, Homo sapiens
tgacccaccgtgcccggctgaaaattggtcttttctcacagacctgatatgtttccatctggtgatcctcaagtttctggcatttaggaccaaatttaatgagcagcctcagtatctgttcatactcacagttagcatgtgtgcttctcctttgcatgaatttgttttccgtattataggaggtatgtaatacccagaatgagtagtacatgtaacaaagttgtgatgttaacagctttggtttacatatacaaactgaagtgtgatgacaaccctgattatagttttaccagtcaggtcacctcaggttctcttgttctgcttttattttcctgcatcagtcgtttcatgtacttgatcaagtgcaatatttgtgtaggtataaagcaaattcaacagatataagtggcaagctataaaccattcgatgtttgatcataaatgactattgtaataaacaactatttcactaaagtgttttctttaaaatatttcagagaaggatatataaaacaacaactcatgtaccaccggagttaggacagatcatggattctgaaacatttgagaaatctcgactctatcaactggataaaagcactttcagcttctggtcaggactctattcagagactgaaggcactgtgagtaatttacttcttggagagacagtctgtctggttgttttcattttcatatttttgtaacacaaaagagggtaccacacttacaagtcccagaatgctttcttaacctttgttattgatagtaacggctgtggagcaaaaaagacagaaacataactgcttagtcagttgaaaactatagaatatgggaactattaccctgaagccaggtaggaaaaagatcctcttccattaggatccagctgagatgtcatgtcttctaagcaaccatttgaaactccctgcctgacgaatgtggatagggtagcattctatcattattcctgtcagagtacttatctcattatgttgaatttgcctggatttttttttttttcttctggcacagtcttgctctgtcacccaggctg

SEQ ID NO: 598 - DNA, 1456 bp, Homo sapiens
gggtttgcatgtttaattgccaagggacatgctaataagtaggataactgggtttcaaactctgttctgctgagtctttaaaatgacattgaaaaatccattcttgaaactctaaagactgcaacatgaatgtgctaaatttatctctggggattttctggctgcatttatgcttggcaggaagaatattttgggtaactttgaaaccttgttttgtttggaaacaagttcattaatttctattttgtgttgattagaattaataggtttgtatgttttggtcacagagatcaagtgagaagattagcttcgactttttttttttttttttttgccgtagtactttctacctgagggaacctaaatagagtcattgtgtggccatttatggttgccactgttcacataaatatgacactgcacccagacagaaaattccagcctctctgagacactttctctaatatctcacagatatcaataaagggcccactgaagaaatggaatggctggggagcagagtaggtcagggtcgaaaagtttaaattgttgcttctctaatttttgcatgtttctatgtgagcagtttcaccttcttgagcctaagttttctcatctttaaaatgagaagtgggctgggtacggtggctcacgcctgtattcccagcactttgagaggccgaggtgggggcggattacctgaggtcagaagtttgagaccagcctgaccaacatggcgaaaccctgtctctactaaaaatacaaaaattagcctggcgtgttggcacatgcctgtagtcgcagctactcaggaggctgagacacaagaattgcttgaacccgggaggtggaggctgcagtgagctgagattgcaacactgcactccagcctgggtgacagagtgagactccatctcaaaaataaataaaaataaaataagaagtgtgtggatgttaagccataccttgtatggtttgtggcaaggactaagtgagtgagatagcgtaaatgaagctcaatgcgtaggaattacttagtcattgggtttctttggacaagttacttcaacctctcagttaaagtaacctttcagttaaagagtttcagttgcctcatctattaaatagagatgattatacccttttccctgcctgtttttcaagactgtagtagtgaagccaggcatgatgactcaatcctgtaatcatagcacttcgagaggctcaggtgggaggatcacttgagcccaggagtttgagaccagcctgggaaacatagtgataccccatctttgcaaaaaaatttttaaaaaatcaactgagtgtggtgatgtgcacctgcagttctagctacttggaggctgaggtgggagggttgctggagcccaggagatggaggctgcagtgagctgtgatcacactgctgtacccccgcctggtgacagagtgagatcct

SEQ ID NO: 599 - DNA, 1053 bp, Homo sapiens
ctcactgtagccacgaccttccagattcaagcaatcctcccacctcagcctgcctagtatctgggactatagatgaattatactacactgggttaatttttttattattatttttagtagtgacagggtctcactatgttgcccaggctggcctggaactactgggctcaagcaatcctcccatctaggccttccaaagtgctggaattacagttgtgagccactgcactcgtcctcagttaataaggtttaaatgaattttcagctgtaaaatgcaagacatttacccattgtcttaagctgcctaatgtcatataatatagtttcactgcatgttaattttaaaaattgctttaataatgtatcctttgtatttatttatcagttattttaaaaagcagaaccagtttctcagtttcttgtggtaatgttttctttttgcagactttggggttcttcatgaaagatgcaatcaagaaatttgttgtgactcagtgtattttgttgcctgtgtcttcacttctactttacattattaaaattgggggtgactatttttttatttatgcctggctgttcacattagttgtgtctctggtgagtaaaatctttatttcgttttcttttgcaaaagttccttggtgagattactgtaatcttcattggcatgtaaacagttcttaagaagcagctgaaatataaataggtgcttatatacatttcccccttggtttctgcttttgattgtagacacaggagtattgactgaccataaatttccttctccttatgctaactcttcaggtcatagaaactagttgttagtcacttttaatgattcagttgtcaggcagttttgggttgtgcatttgcgagttgccaccagaatgactaagtgtgataatttaatgactcctgactgacctccactgcctaaaatcatggttattttgaagagaaatgagatttaagagggacaagagaaagaaagcatatacttaactggctttcttctgcttcccttcccttgcctttcccttccacgttagacac

SEQ ID NO: 600 - DNA, 1025 bp, Homo sapiens
cacataccacctaactttctcagtttagttttcctagtttgaaaaatgaaagtgccttgtaaactaatgtgttacacaaatgtctgcattatttacttttaccattgctaatcataaattttttaatcttgattttattagttttacttttgactttattcccttttaagatagtctggttactgggagccacagttagaatgactcacccagtaattccctagtctttaagccaaaaccatttcctatatatggagttctggcatttttgcaaatgtgctttatggtacccttgaggatggtctctggatgtttcccgatttcaaacttgtatgaaagattagaccagggaatttctttgtgtagaaattttctcatagttgtcttaagttttaactcatgtacattaatctttagctttgctttacatttgttttctgttgatagccaagtcattgcttgttaaatattccttagaaatgaactttcctatcaatttaaaattattttagctgtatctgtggcactttttttttttctcttttgagatggagtctcgctctgttgcccaggctggagtgcagtggtgtggtcttggctcactgcaacctccacttcccgggttcaagccattctcctgcctcagcctcccgagtggctgggattagagacgcctgccaccacacctggctaatattttgtatttttagtagagaggggtttcatcatgttggccaggctggtctcgaactcctgacctcaggtgatcgcccaccttagcctcccaaagtgctgggattataggtgtgagccgccgcacccagcctgtggtaccttttaaaaagtaaaaaattcaatggcgtgaaacaacagaaggagttctgcttccatttctagttgttaaacgcctttctctagccaagatcacatatatttctggttttttatagctagtgcactataactctgacagtcatggttagattgatagttttactgaaagtaatttatcaaaatccccatta

SEQ ID NO: 601 - DNA, 1024 bp, Homo sapiens
cctctgcctcccaaagtgttgggattacaggcgtgagccaccgtgcctggcccatttcttttttttttcttttctttctttctcttttttttttttcctgactcttaacaccactcaatgacccatctttacaaaaataaaaaattcagctgagcgtggtggctcatgcatctagtcccagctacttgggagactgaggtgggaggattgcctgagcctgacagcccaaggctgctgtgagctatgatcgcaccactgcactccagcctgggtgagagagtaagaccctgtctcaaaaaaaaaaaaagaaaagaaaagaaagagtgaaaaaaagagtaaagggtaaatgaaagttcataacctttaaaaaaaaagtccttatcttttagagatatatgctgaagtatatacagatgaaatggtatgatatttaggatttgcttcagaataatccaggttggagttgaggggcagtgggtgggagtatagctgaaacaaaattggctaggagttgataattgctgaagctcatggttaattatgctctgctttcgtttgtttgaaattttctgtaaggtaaaaaccaaaagaaagggtagaagagatgttacagtcgggtttagactggggagccaaggaaagactcctttgaggaagaaacatttcagctgagacccttgtgatgtataggagttggccaggctgcaagtggcatttggcagttagggaaagagtttttttaggcagcaggagcagcatgtacaaagtccagcaagccctgaggaaggaacatgttggtcccttgaggaaatgaaagaaggctgctaccataggaattgagaggctgcggaaggaggcatgggctagacctttaagaccttggaaactatgttaaggattttgttatttaatccaatagtaatagaagaattttaagcagcacaatgtggctttgcttctttaagagctcaagttggctgtttggtggagaatggttttggtttgggctcaagggagaagagaa

SEQ ID NO: 602 - DNA, 1067 bp, Homo sapiens
tgtatattagatttattgttatcatctttaaaaagctgtaacagctggaatgcatacatgaatcttgcatgctgttagcttggtgggcttggagtgagactcctaagttaatgagtctggctggcctaagagctgtaccttgatatagcttcattattttttattctcttcctacattgaaacgctttaatttcaattttttctttcttgggagtaaaagggaagccccccgccccccaaatccagttgctaaagttggtaatggaaatcagaggttacgcttaaccagaaaatggctttagaaattgctttagattgtatttatagatgtattaaaggtctaaaaaggtgagttacatttttcagttacacttcactctgttttatgaaggaaattatatgccatggagatagtcgggaatttggagatttaaaaagctcttgggatttatccctcacaagtgttaaggagtctacttaaaagcctaatgggaaacacatttattggaattgattaatagtataaactcagaatgataacactgatcattgcctgccaagtagacattttaattggtagctgtgtatctaagagtttcaaatgagatcttgatttattactgaattgaatgtatcttggtacacaaatatttcagtaaaaggaacctatggagtgggggaaagacagcttggggcaaatgattgggaaatcctagtaaggtagagggaatcatgaattggaaatcagaatacacaagtttaaatgttggttctgacactctctaggttggttcttcaattgtacagtagtggaattgggtgagaagtttttcagttctttcttgatctgacgttccatgtttctacattctctttggtcacagtgcatgcaagagatgggaaatggaaaggcaaaccgactttatgaagcctatcttcctgagacctttcggcgacctcagatagacccgtatcttttctggagcaacttagaaggctgagtggtattttgatgcttggggagagtcagacaagactccagtcctgtaatgtgactgggtcatctc

SEQ ID NO: 603 - DNA, 1084 bp, Homo sapiens
taaatctctgtttgttataaattaccaagtctcagatattctattatagcagtacaaaatggacagagaaagtgactttttagtgtgttgtgctatctggtaagccaagtcccccatcaccgttcttttcttgacttttcttgtgtcgtattggacctttattcttgcataaattttaagattttaaaatctagttccaaaatcaaaacaaaaccctgctgggactctaatcagaattataatcattttatattatctgacattgttatgatagcaaatctcctctatgaatgatatacattttcatttacacaaatcttgttttatgccttttaatgatttttatttgtattttcttcacctttattttcttattattaaatttgttctaaatattttataggtagaattactccttctgaggatggaatatatcccacttccattctattctaggtgctcatttcttttttttgttttttttttgagacagagtctcacactgttgcctgggctggagtgccatggtgcaatctcggcttgcagcaaccactgcctcctgggttcaagcaattctcctacctcattctcctgagtagctaggattacaggtgtccatcaccacgcccggctaattttctgtatttttagtagagatggggtttcattatattggccagtctggtctcgaactcctgacctcatgatccacacaactcagcctcccagagtgttgggattacaggcgtgagacaccatgcccagccctactaatttctacatgctcatttctaaagcaaggaaaatatttattttgtgtgtatttcttatgaggcaactatctcacatcaattctcctattaattctagcagtttttgttacagactttttctagatatggtatcatgtcatcagcaaaaagatatagctctacctcttcttttccaatatttgtgctagttttcttattttatttgacaaatactctaagacaatgttacaaactaatatgatggcaagtttctgattttatttgaaattgttttattgttacactatttagggtaccatttacatttttta

SEQ ID NO: 604 - DNA, 1021 bp, Homo sapiens
gcaagcggccgggagggcgcggccggaggcagaggccaggcgagacacccggctgcggcctaagaggccaggctgggtgggcttggctgcagccgccagccccgtgttaaagcggcagccagggaggtgtatcctccccggggtctgcaagacgccggctcagggcatccctcccattccggccctcaaagcctcgctcctgggggcgctgctgggaaagcccacccgcctgggcgggcccttgatgggaatgtggagcagaccctcgtccactccggaggccgagggtcctccgggcttccgaaggaagccgacctcaacgctggacgcttcttggagaatgattgcgttgagtggagatgtggtctgtctataaaaggccgggagggaacaatatctgttaccactcagtccgtctctaaagagacactctttaccgctgaaaacctcaagagtgagcactcccacgcccccgtctctggtcctacctgggtccaaggccgatgtggtgagtaggagtctgtgtgcagtctttgagtccgagggtggcatgtctgggagcactgtgagggtggggcatcttcgatatgaagcttctcagccattaactgtttcccgagtaagattcgaaaattcgtgcactttggtaacaagactttttatgtattcaggggtgggatatttctcacaagctccaattcctagaacacacgcagctcctgtctctgcatatagtcacacacacacacacacacacacacacgcctataagtcacatacccatccttctccaacaaacttcaaaaagttgggccagctcccttcccacgtagctccgactgttcttggagtgccgtatactttggacctggtcacggtcaaagcacctgctcagattctagggtttggttgagatgatggatttgagttgtttccaaatttgcctattactattctgcagtagtcctcattatactaaatttacaccatttgaagacataccctcttccccaattttaac

SEQ ID NO: 605 - DNA, 1025 bp, Homo sapiens
tatatagatatatctttggagaaatgtctctaaatcctttgcccatttttaaattgtgttgtctgtttattgttgatttttttctcccctccccctattgttgaattttaagagttacttatatattctagatacaagcctcttatcagatatatgatttgcaaatattttctcccattctgtggattttcttttcacattcttggcagtgtcctatggagcacagaagttttaattttgatgaattcctatttattttttattttgtcacttccactttttctgtcatatttcacaaatcactgcctaatccaaggtcacaaaaaactttttttctgttttcttctaactgtttgatagctttgtttcttacttttagctctctggtccattttagttcattttcttatatgatgtaaaatggatggggagttcagtgtcatacttttgcatgtggatgtctagtggtctcagtaccatttgttgaaaagacttttttttcccctgttgaactgttctggcaccagttggatatgtttaataagatttttcttactatcacaaagcatatttccgaatcaagcatgtaatcattataactgattttctacaaactcaacagtgaacatgatatgatattaaggagctgccttgattctcttgcaagttcgctagtgatacacactttagtttgaagataaatgtgctgttacaggaatcagtgacattccaggatgtggctgtggatttcactgcagaggagtggcagctgcttgattgtgctgagagaaccctgtattgggatgtgatgttggagaactatagaaacctcatctcagtgggtaaggacaatgagtggtaacttttcagtgtaattcagtgtatactaatagtgctcattttttaagacttgggaacgtttgccaattgtggtcgctcatgcttataatcccagcactttgggaggcaggagaattgcttgagcccaggatttcaagaccagcctgagcaacgttgtgagactg

SEQ ID NO: 606 - DNA, 1092 bp, Homo sapiens
actctaccttgtgcctaatttactgtctttccacaggtcacaagttaaggcatctgctcccattccctcttcagcagttttattcttaaagctcaggaggagtgaggcaaatataagatttctttcagaatgagatactgtatttgaaattatagacgtttttctctatagcatgttgatgggaaaaagtaactaggaatgttttgttgtactcctttttagaatctgactacccacttgttgatgaaccagggaagcatcgggaaagcaaagacaattttttgaagtcagttttgctcacattcaataaaattctgactatggagagaatccaccattataatatgagcacaagtcttaatccaatgagaaaaaaatcatataaatcgtttgagaagtgtttgccacctaatttagacttacttaaatataatagaagttatactgtagaaaacgcttatgaatgcagtgaatgcgggaaagccttcaaaaagaagtttcatttcattagacatgaaaaaaatcatacaaggaaaaaaccttttgaatgcaatgactgtggaaaagcctatagcaggaaggcacaccttgcaactcatcagaaaattcataatggagagagaccctttgtgtgcaatgattgtgggaaggcgtttatgcataaagcccaactcgtggtccaccagagacttcacactggagagaagccttatgagtgcagtcaatgtgggaaaacattcacttggaactcctcatttaatcaacacgtgaaatctcatacacttgagaagtcatttgaatgtaaggaatgtgggaaaaccttcaggtatagttcatccctttataaacattccagatttcatacaggagagaaaccctaccagtgtatcatatgtggcaaagcttttggcaacacatccgtgcttgttacacaccaaagaattcatacaggagagaaaccttacagttgtattgaatgtggcaaagccttcatcaagaagtcccatctcctcagacatcagataactcatacaggagagaagccctatgaatgtaacagatgtgggaaagcattttcccagaagtcaaatc

SEQ ID NO: 607 - DNA, 1080 bp, Homo sapiens
aagagagggtgatggcctggcaggtactttgggggtagcttaggccatggcctgggaatgggggacactcactttcagaggtgcttttcctggtacatgcatggcccaagattggggtgtgcaggccctcagggttccaggcttggaaacaccgaaacccaagtgacaggctgagagtcttcgagatccagggttgctaatgtgacccagtttggaagtggccctgaagtccacggtgtgagtgtatggtgtaggaagaaaggcatcagggctaggggcatagctgaacggtagaatcggatcagggattttgctggagagtgcaagcattcaaacactgaggttttggtggagccctggagtccagagtcaacggacctgggatgtgatgtgaggagcaagtaaaccgagagaggaatgctattgagaagtgtgctctgtccgagcctaggaagcacagcattaagtagtatcagatttaaagtgacaaaatctgatataggaagcattttaggggacattttcggacttgggaagtgtattaatagaacagttatacattattgagtctcaggaccatacaagtagttttgagatgttgtatatgaaatttgctgctctaggaaggatacaggtcatggctgagtttccaaagccacattagcaaatattaggtagttggtagttatttgttgagtaaatattgttaggttcccctttaagggaaagggagctagccagaaattttcggtcttggtttatttccttgtatatgtgcctaaaaagtatacccattcccatgtgtactttgaattttttgtttgttttttcaaataagcagctccaaaccaaaaaaaagcccatgcatagcttcttaaggaacaggacttgtcaacactttctggttcatattcaaaaagtttttattccaatccagagtcgttccagtcaacttgttgggaatatgttcttttccactgaatctgaatcgtagttacttgtattgctttacatttgctcgtcccagtgtgtgagggccatggaaacacatttatgttaaacatctgtgttttcctaatt

SEQ ID NO: 608 - DNA, 1038 bp, Homo sapiens
gcaagacactgttatttaaaaaaaatttttttttaagttcttgaggaacctgtgtttgttcattcagtagatgtgtattgaatccccactatgtgcaaggcatatttgccttgagggtgtatcagaaacaaaatgattatgtttgtcttacaaacgggggaaaaaataggagcatgaaaaatttaagcttaaaaaataatatgccccctaaaaaaagagaacatgttacacaagtctgaagcaagtgaatatgctaattagagaaatagatttgattgtgtgccaggaatggtttcttggggagaaaaaaaatttatcatcactgattagtgaatgtgtagacagtgtttaatttctttacatttgtactgtaaaggcaagcttcttatcaatgctattgcagaagagccttaaacattggtttcaacccatgagatagtctgagaaattccaactttccagaacatgtttccttcatgttcacttcaggatgttggatatagatggaagtgggtggagctctctttagagctccaaacagaatcttttgcttggatggtggggccaggttgagtggggagctgcctggactccaggtttcctctaccctctaacataaacaagattcctttcacaagacaaaacaggcacgtactcctagcttgtggaagtcttaggtatccaaggagatggtggtggttgtgggtttttttggggtttttttttgatacagggtctcactctgttgccaggctgaagtgcagtagtgcaatcatggctcattgcagtctcccagctcctcggctcaagtgatcctcctgccccagcctcctgagtagcgggagctacaggtgcgtgccaccacacaggctaatttttttttcttttttgtagagacgaggtctttctatgtttcccaggctgatcttgaactcctgggctcaagcgatcctcctgctttggcttcccaaagtgctgagattacaggcatgagccaccgttcccagcccaaggagacatattctaagaattgaaggc

SEQ ID NO: 609 - DNA, 1879 bp, Homo sapiens
gttttttattttttattttctattgagatgggggtctcactatgttgcccaggctgatctcgagctcttgggttcaagtgatcctcccgccttggcctcccagagtgctaggattagaggcatgagctaccatgcctggctgaacctttttccttaaagggccagatattttaggctttgtggctgtatgatttttgttgtaactcttcaactctactgtttagcatgaacagacaatataaactaattaggggctggacatggtggctcacgcctgtaatcccagcgttttgggaggccgaggtgggcagatcacttaaggtcaggagttcaagaccaacctggtcaacatggtgaaacccgtctcttcaaaaatacaaaaattagctgggtgtgatggcgggtgcctataatcccagctgcttgggaggctgaggtgggagaatcgcttgaacccgggaggtggaggttgcagtgagccgagatcgtgccattgtactccagcctggatgacagactgaggctccgtctaaaagtaaatgaataaataaataaataattagggttgatgtcttccagtgaaactgtttctaaaaacaggctgtaggccagatgtggcctatgagctgtagtttttagacccttgctttagaatacttcactaaatacttgatcctttttcttcatcatacaaaatactgatagtgttttattgctgttatatatgcagagatggtttaagtttgagcattgaaaggatgagtaagaatgtgtgtgaagtaagatgttacatatcgttttctattccacagaaaaaagttttcaaatgttctgttcatgccttcccgtcactttcattgtttataccagttgctgtgccttcatttttctctagttgtgctacaactatattatgatctggcccctgtttcaaagattatattgtactagataccaaatagaaaagtatttttgtttttgaaggaaaagtggctcttctgccagtttgaaaatgtgtccttgtgtacagatctttaaggagagcagtgtgcagccacttctaagcctaagtcttttaggaagcatggttttccagtaggcactttgaaaagcggcttcctcttaacacagatataccttcaaacgtcaaacttggcattaatcagagttggggaagtagagctatgttattcattcttgtattatagtagtgaagactattcagtagcctgccagtaaatatgaccagctggtacccagctatgtaagggtttagaatgtaagtaataaggtttcaggcactaaacgtagtgcctgaacttagtttcctgcatgactatataaaaaccttagatgagtttaaatagagactattgaaccttctcttctctctagtcactttgccttcccttgtattcattcatttattgcatcttcaagtagtgaagtgtaggacttccccaccaaaccaccagagacccctttggaatgtgttcagtatacatcattgctggagtggcttagtagagtgactggcccagggccaccagctagtaggcagcaagcgtccagtacacagacgtaggtcttttaatttccagaccagtgctgtttttcttcttgtgaaattgtcaattttagattggttttattttggagagtataagccttcttaagaaatgctttttagctgttgtgatcgataatagcataagtcctaaggtccatctgtgtaaacataaaaaccaaatagtctgttagtaaataaatcctacccccctttccctcatccatccatttatttttattaatattcttcctttctctgtatctcccatcatcatttaaaatataacatcttacaaaccttagctcattt

SEQ ID NO: 610 - DNA, 1036 bp, Homo sapiens
gaaagatatttttgtttgccccatttaaaaaaggttaaattgagtcactgtcttcattttcatgagtaccttgtagaaaactattaataatgataaataactaaacttctctagattaccttaatttttttgttgttgttctcagtacatctaagagagtagcatataggccatgtgtatgtggtgataaatgaaaatgcaggggtcttacttggttatttaggacttaagattttatctagtcattttcaactgtgattgaacacttccctttaactcccttcagaaactccaagatcatattgtatcccaggtactagaatttctgttcagctgtttataggcctccaccacaagaaattggctccaaacctattcccattacatcatcacccactaatgtcattacaccagaatgaaatctgctttgaggcttgtattgttgttttccttccatttctttcccctcatcatttcctttagaaggaaaagggaaggaaaaaaaaagaaaaaaatcagagacctgtaaacatttaagagtgaattggacatccccacaggctaaacctagagttgtcagctttcattccattctgctgtgatagagtgttctgcccagtatgtatccacatggagcctggaaagtaacaagtctggtcatgtgacaactggctttggtgctttgctttcagcccctcagaattagttcctaatggctcacatagctccctgccagcatcccgtcactggcacgttaaaccttttcaaataattcctcagaatagagattcttaggagagcactaaatttctccattctttgtgtttaattaaactgttcttgcattttaatatttgccagataagcgcttaagacattacaatacaggttgagtatccttaatctgaaaatctgaaatccgaaactttttgagccctgacatgacgctcaaaggaaatgctcattttcgattttggattttcagatttgggatgctcaaccagtaagtataatgcaaacttattccaaaaaaaaa

SEQ ID NO: 611 - DNA, 1027 bp, Homo sapiens
tcatgatgttgaccaaattttagtacctagacttagtctatcagaagttaaaagagaattactttgagggattcagttttggttcaagttttgtgggtgaagagaaagaaaagtaaagaggaagttgtctttaatccttcttgtattggtgactaattaaaattctcctcctatgtacttttgaaagggactcctagacctctgccatgctatgtcttttatatcaggtgcttagaacaatgtctggcatgtagtaggtgcacaataaatatttgaacaaattagactccacttcaggtttagtgcaaagcaacatcaattccatatttgagtaagaatgcaatccagtaaagtcagggtaatttttttcccttgtgtgactcttattttcccctcttctcaggagtgcaacacgtgatggcatctgcttctctgactgcgctgctgcctgtgtaacatgaccaaacattttagcatttaatctgtccctttccagaactcaacagtacttaaaaccagacttcctcagatgtgtcagagcctcttaggttgacacctcacaatatctaacagattaaaaagaaaaaaattccttatgtttaaactagccaatcataagtaaaacttacgagaatattcataaaatgtgatctcagactgggacacaatttgtttcaaaaagaagtaattgaagtttgctagatgatatatttcatgatgtgttggaaacactggcctcaagtccttttggtctgcgtcctgtaaaagcaatttatctttcattttagcttgttctcatgattcttaaaagctctgtagttgtctataaatccaggtggtgttcagctgggattgaaattagttaaaaaccatatcaagatgattgtgcaccagagtgattgtgtaaaaccctatattcccgcacagcagagctctgggaacagcaaataacagacttcttcgtgttgagttttgccccagtgggcctctttgaaaataggaaagagaaagctaactttgtctttat

SEQ ID NO: 612 - DNA, 1031 bp, Homo sapiens
caaggggaaaaacaagaatagaatgaacctgcgctactgtttccttttgttgaaattttaataaactgaacttctaagtctctgttactccagggttagttttagtagagggttcatggaaaatgttgatacctaatttggaaaaggaaaagatgaaaaattggtgtttgaagtttgtagagcagagtggtagccaagcagcttgttgggtttgcatggaaaaattagatgtcttggtgtacattttatcctaatagattctcttctttctataatcataaaataggttctgggaagactgttgatgtttttccaaaatacctttttttgacatatatttgagattttctgttggtcttgcaaaagaaagttcacttatgcttgttaattacatcaaatctgaaataatatatgctccttccataatgtgatgatgcaaattcccaggtgagcatattaggtttagtgagtcacatttcagaccacttatagaatcaatcatttgacacctagtcccagtagagattttgctgattttagctaatatctgcctttgcaccttcctcttcattgcagctctgaaactcaaaattgatttttttcctagaattgcatccatcattgggcatgtgtttaaataccagtagtttcaaaataaaacaaaaaagggcttaagtctcaaattattgagtagtgctgatcaaaaaagccctttcctaaactatatccacagtgaagttatatggtcctcccccactccaggcttgttaagaaaaaataacacagctgttcctaaaaggcagctgacaaattcaccctcatcctttttctatactcctctacccccacttgaaacaaattttggagacaaggccattgctactgtgatgagaaaggagctctcctccccagtttctgttgtcaggttagtgcaaatgtcagaaatggccactatcagttgtaaagaactgtggatcactgtggtcaagtgccccggcgttgctgttagtttggtcactgaatggaagaaa

SEQ ID NO: 613 - DNA, 1025 bp, Homo sapiens
acaagaaagaatatgaacgtctgccttcccgtctcttctgcctgcccctctccaaaggtcacactagttgttttttcagcaccttgggtgcatatagctcttaattgtgattgtaatagacctctgtcctttagagctcattgttttaagcatgcagattgcatgattcactaggtgccacttgggaaattgtggcagaatctcacaggagcaaagctgtgccttgttctgcttgctttgttatataaaactttatttttaatgaattatttcatagtatattatccttagaagcagtcattcagtgacagccattctccccatcccagcctgtattaataaccagtcagagaaagtctaggagaagtgggcatcctaatgaacatttgtaattctgaccctgcatgagggcctttggattagcaagccctctgtcacctccttactagagtagggtgtgcctcactgcgtctccgttctttctgggcagtctttgctactgtaaacatccttgactggaagctgtaaggtgttcagaggagctttcagtcggatgtttacagcggcaggctgccacggtcgtccccagctacgcaccggctttgaaacattgcaggtttgtgcccacaggctcaattcctcctcttgggggtccttccctcctctctcagaagtcacaacaagaactcaggccatttatcttccttcagaacaaagagtatcatacacctgctttccttgttgaaattgttttctccttttgtctatcagaagccccctttaaaacaagattgtgagctctgtgatgaaatcaggccttgctcactctcattgtgctaactccttgttttctgtgggctgcctgctgaatacactggctggagagaagggtcacatcctgtcagttcctccaaattcctcagtgcttctgggtctctcggggtgtcatacagctccttattccatcttagccagactcaaaatgctatgatccatctgattttaaagtgtgtctagctgaaaca

SEQ ID NO: 614 - DNA, 1073 bp, Homo sapiens
agggtggacacaggtagaccaatgagaacctgcttcagacttccacgcatgagaccgtggggacttggaacagagtggcagctgcagaggtgggacaagtggtcagattctagatacattttgtaggcaaagttgacagggttttctgatggggtgttaagagaaagaagagagtcaaggatgaagctaaggtttttggcttcagcaagaggaaaaatcgagttgccatttgttgacatggagaaggcaatgaatggagcaagtttcggtcaggagatttgggaggtgccgggtttgtgatgcctatctgacattcaagtggagtgttgatctggcagttgaatagagaagtgtggagtgcagagcagaagtacaggatggagatgaagatttggtgtcgaaagtgtagaggaattgaaaattatggatctgaagacatcaactagtgagtggagtaaatagagaatagaggtcccaagagtgagccttggatcctgcagtgtttccaggttgcagagatagaggaggaactaacaaaggagactgtaaaggagaggtcagggaagtaggaaaagaactgggagagggtggtgtttcaaatgaagaaagggtttgctggaagaaggggtgatcagatgtgttgagtgctgctagtaagtcaagtaaaatgaggacaggagttgatcaatggatttagcaacatggggttatttgggagcttgacaacagtagttttggtgaaatggcaggggtgaaagcctgactggagtaggtttaagagagaaggggaggaaaggaattggaggtagaggatagagataacactttcaagaattttgctgcaaaggagagcagaaaaataaggtgaggtcagttctagccttgtccacccaccttaaaagtcacattcccacgtgtctccactcctcccatcctctttccccttttccccaatccatcttttcttttcttttcttttcttttttttttttttgagacagtatcttgctctgtcgcccaggctggagtgcagtggtgcaatcacagcgcactgcagcctcgacctctccggc

SEQ ID NO: 615 - DNA, 1207 bp, Homo sapiens
cgaatcagctcggccgggctcgtcggacggagaaggccgtaggggagtggagcggcgcccccccccacaccctccgcccttgctcttcgtctgcgaggaagcccggcagtcgcccatccattcaagcagtgcgggcctcgggcctccggcctcggcgcgggctcagccgcccggggctgggcgcggcagctccgcgccgtaggacgagggggcctgcgaactcgccggccctgggccccgcggctggcctttgggcctcacggcttcctcccttcccggcggccgggggtcggggcgctggcggtgtatagagctcaccacgtttgcgtggcgcccttccgtccacgctcgttacagtttcgaatcctcagcggccctgtgacgcgggcggcgcagagattctcacccccattcccctaggtgagaacccgcgttgcaggcagctcaagtgacatgattgaggtctgcacactagtgatgggggctggcacttcatctcataacattgaaagaaaaagcatttcccccctcagtctttgttgaatttctctgatgcgtcttgatttacgttacttctgtgccggaaaaccttcttgcgccttccgtcaccttcaggattaagttcagattgggcatgccagtttgcacatgatctggcccttgcctacctttccagtttatcttccactgtatatccctgcttccccgccttccccctcacggccttacctctgttctctgtagctgccctgcacctgcctgttcaccctgttccctttcctgtgctctgagtcgtgcagtcagtccttcaaggcccattgcaagtcatatctacaaaacaggagccgcctggatccgcccactacccccaggacttgtctcaccttcctctgatggccatggtactgaaagcgtctgctctcatcgtccccctttatagtctaaacatgttttctgtctgcttccaccgtcactgaattactcatttatttgttaatgtttcatctctccaactggactgccagaaagttgagatatgggcccaaatctgattaatgtttgcagtccccaagcacagtagctgtcatgtaagtcagtagcccataaggatgaatgaatgagcctcccgcctgatctttatgtacactggcatatgtattgccaggcactgagactgcaagaatctaaagagagaaactaaagaacg

SEQ ID NO: 616 - DNA, 1416 bp, Homo sapiens
gccatctgcctgccttggcctcccaaagtgttaggattacagatgtgagccaccgtgcccagccaactgatgctttttcagtacaaaaattatttatggttaactaaggagataagatttaggtttttcttttttttttttttttactttgtcactgtgatagagataacattcctggcacctctctcatctgacctttttcttgaaatgatgtggaaagttccataataacctttgggaaggatgagcctgtccaaaagaataaccttttagtacaaagagttgtctaattcctgttaactgttaactaacattatacagggttagagagtccgtgttacataattactgatactgaatcaggaagacagaacagttgttagaaaactaaactgccagagaagggtttagtgcctaacctctgaaacaactttgttcttctagcttggtggaaccgtgggggacatagaaagcatgccctttattgaggccttccgtcagttccaattcaaggtcaaaagagagaacttttgtaacatccacgtcagtctagttccccaggtaagtaagacattgaaagttttactttgggggagatggagaggagggaggaaaggtaaaccggaatgattttcactcattgtctagtagttttcacttgaggtgcaggaagcagagaataaagaactttgtaagtttaaatttgttacaatcatacttttttgaaaagatcaaatagaaaacatttgaaaaatcagggcagttgcatttgcagatgtagattggccgtgtgcatttgtctttactatatggtggaactagagtaaagaggctgtttttaaagacaaatcttgtggagaggagtcaatagtaacaaaaattgggaagccggaaagcagatggatgcatagaaccgactaagctgaccttgagtgccggatcttaagcccgcagcagtgaaagcagagaagcagccctgtttgccctgcagaaccccaaaagctcaggagtgggatgagggtgggcctcatgtaactactgcttcagaagactcagaccctgacatctttttcctacagtgcacagttgggcgttagcctcctcccaccttggcagaagactggaggcttgttctctggggagggttcctggatgagcagacagtagggacagttgagggcagtaacactggactacaaacatggggttatgtgtaatgttaacgctgttgacagtccttgccttcttccaccatttggttcccagaatcatcatgtttaggcttggccattccacgtaggaggttgtaagattgtcttctggggtatggatagcccaggataaaagacactggctctggcggctccccatgaaataagccagccagattttcaccatgacaagcctacacactca

SEQ ID NO: 617 - DNA, 1055 bp, Homo sapiens
gaggcttgttattttctaattagagatagtgggctgttccagaagaacccattgccatcggccattccctgcctctcctggttccccaaacaacacctgtgtccctcctgcctcttctccgtgcctcgttgtactttgtgcttcagccgggtggagtatctttcggttcccctagtaccctccactctccctatgattgtactttttcactggctaatttctgttaagaacccatgtccccctcttcctgttggcttggcagtctcctactcactctcatccttcaggttctagcgaagacatagtgttgtctgagaagctttaactgccaaacctcctggcccttggccttcagggttaactgcgtccttcactgggctcctgtgtggtgtcgcatgtatgctgctgatgggcccatctttctggtgtgtgtgtgtgtgtacatgtgtggtgtgtatctcccttcacagactctaagcttctggagggcaagggccacctcattcaactttctgtttctggtgcctggtgtctagggtgttgtaggctgtcacagagatcttagtgtttttgttactgtacctatgatgcaggaaatccaaaatttggaacctgtaatgtatctaagtgtggtgcttagtatggaaattctagtggtgatacattgagcatgtagctttggccaggttttagatatttctggcctagcaagtgaaggaaattcaattctgtagcagaataggttgtcattaaaattgttcaattttttttttttttttttttttaattgagacagagtctcgctgtgtcgcccaggctggagtgcagtggcgcgatctttttggctcactgtgacctccacctcccaggttcaagcgattctcctacctcagcttcccgagtagcttggattacaggtgtgcaccaccactcctggctaatttttgtatttttagtagagatggggtttcattatgttggccaggctggtctcaaagtcctgacctcaggtgatccacctgcctcagcctcccaaagtgctgggattacaggtg

SEQ ID NO: 618 - DNA, 1028 bp, Homo sapiens
gttattttttttggtctttggtatgaaaaaaattttttgtaggcaaatttgtgtgagacgttgaaactctttgtaagtttcaaaacaaaaacaaaaaaaaaatttttctttacaaagcctgccatgttgatctgaaaattacttcctctttactggtctgtacacagaactcagataatagctattcccgttatattcttcccaggtgtgtttttgttgttttttgtgggggttttttgaggcagggtctcacactgttgcccaggctgtagtgcagtggtgcagtcagctcactgtaacctccaactcctgggctcaagatccccccgcctcagcctttcaaagtgctgggattataggattatgggcgtgagctcatcctggccagacgtggttttttttcccttgaaatagctattttggtctcatgatagcgtgtaccttctgagtaattgggtttttcttgacgtttatttgatagatatgatcgcttgctggagacctgctctattgcccttgtgggcaaatacacgaagttctcagactcctatgcctctgtcattaaggctctggagcattctgcactggccatcaaccacaaattggaaatcaaggtaaggagggtggcacaggtacagccaaaggatgagcagggaagcagtctgtagtctcgtaggtgctgtgtcatatctgctttctgtttggagctcagaattactttttaaggaattactttttaaggattaaaaagatttgtggttgcttcgtggctttgagaagacagtagagcattttcaggaattaatgaaggggagagatggctagaggagagggtgagagagacttgagttcttggctatgactatcaggtaaccaaataaaatgccctgtggaaatggggaccactgatggaccacaggcatgctgcacagttgatagctggaggctcttggagactttgttggcatgtgggctgcctttcctaacctgtgcttatcacttattgcagagtgggaatgacagtattg

SEQ ID NO: 619 - DNA, 2639 bp, Homo sapiens
cagcagctgagctggtggaatggtggggcatggccctgcttgtctgtgggtggcagtagagtgtcatggttaagagcatggatgccgtggctaggcgcgttggctcatgcctgtaatcccagcactttgggaggccgaggtgggcagatcacgaggtcaggagattgagaccgttctggctaacacggtgaaaccctgtctctacttacaatacaaaacattagccaggcatggtggcatgtgcctgtagtcctagctacttgggaggctgaggcaggagaattgcttgaacctgggaggtggaggttgcagtgagccgagattgcacctctgcactccagcctgggcaacagagtgagactctgtctaaaaaaaaaaaaaaaaaaaaaaaaaacatggatgcctgagcccggtgaccagggctcagattctagctctgtcatctacaagcggtgagacctagacaacttacttaaccctctttgtgcctcagtttccacattgttaaaaagggatggtgatggtgccttcctcctagggttgttgtaagaagttcatgaatacaaagtgctgagaattatgcctggcatatggtaagcactatgtcagctgtcgttaaaccctcccttctgcctgtcccctttattccttttcttcctggcccatcagctgaagcttttcaggaagagatgaaggtcagaggtaaagttggggctcagtgctgaggttgttaaacaggccccatgtagctgtccccacattggggtttgctttctacttcccaggtgtttctcagcgtgagagtttagtttgctttgtgctgctggacaggttcctgcagaatggcctgttgtacgagttttaagaatttaaatcccattacacagccctgacttcttatttgctagttctttccatcattcatttattttatccacttggagttagtctgtggctgccatgtgtttgtcaggtggcagaggatgagagatggatgaaaaggcaacggtctccgcctttaaggaatattgagtctcttaggaaggaaggagcacataggagaggctgaacctgctgtggcagacacatgaggaaggcagacttcctcatggagggacaccaggttgggttgggtaggatggagaaggctcggaaggggcattcctgttagaatagatagagcacgtccaagggcttggagatgtggagcagttggaaacactgtggatggaaattgtgaattggaggctgtctggagacaggctggtgagggcctgcccacaattccatgaactgggccaaatctgggtcttaccctgaggttcaggaaactaactgcagggtttaggtaggagattgtagaaaagtggtgaacaccctaatttaaaaagtgggcacgagatttgaacagacacttccaaaaaaagatgtaggtgataaacacgaaaaggtgctcaacacctctagttagggaaatcagtgcagatgaagtcacaatgagatagtgacacaaaccccctagagcggctgagtgttagagaggctgtggagctcttaccttgctgccgggagtgtaaaatggcaccaccacactagaaaacagtctggtagtttcttatcaaggtagagacgtgtgatccaataagtccattcccagatactcacttgagagacttgaaaacgtccacaaaaaaagatttttattcaaatggacaaattattcgtaatagctgaaatctcgaaacaacccaaatatttatagcctgtcaatggatcaatttgtaatggtttatttatatagtagaaaccactcagcaatgaaaaggaagaaaccaggctgaacactgactggctcaagcccataatcccaacacttagggaggctctgctgtgggaggatcgcctaagaccagtagttcgagagcagcctggtcaacatagcgagacccccgtctctgcaaaaaaaagttaaaaaagaaaaggaacaaacaactgataaacacagcaacatggatgaacttcaaaaacactaagcaaaagaagccagacacaaaaggttatatactatttggctccatttatatgatgttctataagaggcaaaacgaatctgtgatgatagaaattggatctgaggttgtttggggtaggaggtagaggggcacattctgggaagatggtaacttatgttttgttttgttttgttttgttttgttttgttttgttttgtttgagatggagtctcgctctgtcacccaggctggagtgcagtggcatgatcccagttcactgcaacctctgccttccaggttcaagcagttctcctgcctcagcctcttgggtagctgggactacaggtgcatgccaccacacccagctattttttttttttttttgtatttttagtagagatggggtttcaccatgtttgccaggctagtctcgaactcctgacctcaagtgatccacccgcctcggccttccaaagtgctgggattataggtgtgagccaccacgcccggctcattctatatcttggtgtgtatgtttgacaaaactcttcaaagtatgcacttaaaatgcttgtattttattgtatgtgaattatgcttcaatatggtagaaagaaaaagaaaaaa

SEQ ID NO: 620 - DNA, 1038 bp, Homo sapiens
ccttaggggagcattttaagccaagaggtaagataaattgttaatattaatatatgtatttaaaattttgggctgggcacagtggctcatgcctgtaatcctaaaactttgagaggctgaggtgggaggattgcttgagcccaagagttcaagaccagcccaggcaacatagggagaccctgtttctacaacaaaaacaacaaaaccagctgggtgtggtcccagctccttgggagatcaaggctgcagtgagctgtgatcacaccactgcactccagcctgggtaacagtgtgagaccctgtctcaagaaaaaaaaattgtgaacaactcagtaccaaagatagtgcagtggcagtattacaattatgtatactatctttttcacttgcaataagcatgttcttaagttactaagaaaagtccatagtttcatatgcagtttctaagttgatagtgtttacatacaattcattgtcacagtagcacaatgtatggggttaattcatggcttcagtgtcttggtaatggcccgttaggcgattattgcaagttggactggtagaaaaggggaattgcctttgtggtttgttcttttgtgcagtggagtgctggttccaggaggatttggtgttcgaggaacagaaggaaaaatccaagcaattgcctgggctcggaatcagaaaaagccttttttgggtaaggagctctgcagtgcagtcttcacttaagagtaggaaagagtggggaacggtgccacgtgggagcctatgaacaaagtggggggattactgaaacatgctgtctttgtggataggagctcaagtagaagccttcatgttttctctttagagacaaattcagtcttggaaagcttatttatgcttatgagctacatgtagatgtcgtggaattttgagagaatgaattgtgaattcctgtccatttaatgaacccagctgtttgtagcacacgtgaggttgagttttatatctgctcacttggcacaacagctgactgtaattggacaaaatgatttt

SEQ ID NO: 621 - DNA, 1033 bp, Homo sapiens
gcctggaaaatagggaaatgctcagataatatcagctcttcgcctagctgtgtattactatgtgacagacctccctaaagctcagtggctcccaacagcagtgacttctcatctcagtattctgtggtttggctcagtgcctgggtttcagctgcacgtggtgtactatctgagatggcacactcctgccttgtgttcagctgtgagctcggcccagccgggacgtcaagatgctgtctccacctagtggctcatcattcattaatccagcccaagcttcctcacacagggtgggcagctggactccaaaatgacaggcctgttatgcaggcacttatcaggcctgctgatgtcccgttggccaaaacaagtcacgtggccaagccccgagccggcaggggaggagaacacacatgggtgtgaagactgagcatgctgcactggggccaccctggaatggtccaccacagcccatttattctctgtagcccacccgacaaatactagattttcagaaagaccttgtaaattctgtggaaaataaagtaacctgaaggaatgtaaaagcagtttgactttataaagaacaagtgactctggtggccagcatatggtttagggctgggtttcattcaccctttccctgagaggctgcttcacagtgacctggcggtgtggcttagtttggtagacagcatgcccttgagtgctggcttctgagtcctgagaggcactgtcttatcacccgccaccccagagctggctttctggtctccctggatccttcacagccccagacctctgcctctcacttaggttcccaaatgggtaggtgctttggtgatgagcttacacttcagttgagactggaccctggttcaggccaggaggagaacagtgcccagcgttcacatagtaccaggaacttggtcctttgccttttggtctttagtggttttgctttggttagacggtaagttcaatgaaggttagaaaggttgagttgaaatcagttcatttctgactgagctat

SEQ ID NO: 622 - DNA, 1615 bp, Homo sapiens
tggactgggccatcagtgcatggcccacccagtcctcagatgcttgctaagctgcagggtgctagccctgcatcccttgcctttgagcagtcatcaggctagctggggcgatgacagacatgttatgacacatccagtccgtgtctgtgctactgtatcagtctttctaaggaagtgatgcttaccgtccacagtgctggggcgggactagcctgaggaggggctgctgtggtcctgtctgcagatcaggaggacaggctgaaggacggagcctccacccaaccgaggttacaaatgccaactgggaggcattttcttctgtgacaaaatgtctcataaggaaagcctggagaattagagcttacttacaagcctttgccacccactcagcgagggaggtttctctctagcggaagcagagttctgtagttggtgtctgttttctgaacatctccaggtcgtagacatgccagaacacaacccagggcagatgggcggaaccatgaggctgggcaagaggagaaccctgttccagaccaagaactcagtcatgagtaagagctgcctcacgctggcccagcctttggctctgcgtgcccaggacgcgtgtcttagggtgatgctgtggcttcgaggagcaggctggctttttttggtttcgttcttgcttttgaagttcattctttcctctcttattcatacccttttaggatgcactgtgatagccatagaagcagtgtgggtcttagaaaggacactggcagtgcagtcagactcctaggcatgggcgcctcaacagaatgaggcagtgaggttacattcatccttatcggttactttcctattaagaccagccatatcaattgctgatgtttggcaatttttgtcacacaaagatggcaatttcatatgattcagcctaagtagattctgttctaataaagtactaatagatgctgaaggtttagggtagttttcggaggaaaatagttaagaaaatgactattacacagatttccttcttgtctactgggaaaattctgcctttactgtattagcagaggcacccttgtgtctgtctgggcgttctgtagcagcatagctggagtcacttgagtatcggatctttctcttaccaactctgatgttctgtggatttggggatctcgaggcaactgtgaaatgagtcagtagagcagcccgttcgcaaatgtccagcttgttcacatgcagccactgagggctgatgacctttgatgaccatgattggaactgaatgatcatcagaggtcatctgtgcagctcttaaaatgcctcccatcctgccacgttcccagggccttgccgtttcgtacatcctgatttgctttccaaggcagttttctagcagcaaagtgcccatactttgcaatcatgtgtttgagggtggtggtgagagtcttgtttctgttacagctttctgtagtgttgtcagaaagagtcaaaagcccaagaattagtctaaactgtgttgttaagagcaggtgaccttagcagattcatagaaatagccctcaaaagacctggctgtgtggatgatgaaaagtaaagcaggaaggaggatgtctttgtgaac

SEQ ID NO: 623 - DNA, 1029 bp, Homo sapiens
ctctatttcagatcatcccttttttgttggggttcagtaccaccctgagttcctgtccaggcctatcaagccctccccaccatactttggcctcctcctggcctctgtggggcggctctcacattacctccagaaaggctgcaggctctcacccaggtaggcgcactctttgcttcagtaatccattagtcttctctagtcctttaggtggtcgctgattcattacagcaacacgtcacagtcagtcataagaaaaaaaagccacaggcgcctggggtgaaagtttcctctcctttcccggagctttctcacggtgtttccctggcatattggccaggtccccctttctgcagcatctgagctctggtggtgctgaccagatcacacttggcgtaggaccctctggtccatgttaaggggaactagtttttcctgggaagtaagccacaatgggtaggtttatgtcccattgccacctttatccagaaccagtactcagagttggtggtagggtgtgtgactgaagtataaatggaatgtatatcttttgtagctagaagaaggaaatctttctgcagtttcatgttaaatatattatgtagcaaacagtctttgtgattcctgccatgtgcaggcaagtgtccctgtaggaaccgtggttacaaaaacagggacgtaaagtgagtttttggtgggagatgatgcgtaaaccatctgaattctacagggacacctatagtgacaggagtggaagcagctcccctgactctgaaatcaccgaactgaagtttccatcaataaatcatgactgatcttgtagcgtaagtggtactttaaagttttagtttttaaaaacatggtgataacacactgcgattgcaagaatatcatggaagtttagggctgaaaatttttatctgccaggaatgaaagtggtgaggtcttgaatataatccagaggttgagagagaaaagaaagtagtgaggtcattgtgggtatcaaatgggcagcccttcctccaagttgca

SEQ ID NO: 624 - DNA, 2944 bp, Homo sapiens
tattctggaattccttcaaagttggaacaattgccaaatagacgtcgaatgtttgtctattaagtgacagggtttgtaggttcataaagtgcaataactgtgggcactgccacgaaatgtaaatgtcctttgagataactgtgtggactgtgttggcagaagtacgcattctgctggtgaggtatcaaatgagggagtgtcagtcatctggggtctggaataagaaccaggggtatgggtgtgtggttccaccgctcctgccctaaggcctgggcagggggacctccctgaatcctgcacaccgtgtgttcatcaccagtgggcctctggtgctgggtcagtgccggtctgacctgctgatcccagctgtttcccctcctgccttggttggttgaccccctgtcctggcatagcctaagtaggtggtgggtaggcatgagaagttagtatcaggaggagggcctgtgtgctaggtaagcgtttaacacggatggactcattaatcccctgaccagggagtttgctataggctgtttcacagtcttaaggagctgatacaacaagaactgttaccagtgaaggaggtagatatttggtcagttacatggaatttctgactgcctcgcaagtggagaattgcccgttagtgacactgttacgaggtgctgtggagaaagaatgcttgcattgggtggttgtagaagtcgatgtgtgaggtcttgaaaaggtctgattctgtaggaattataaatttagcgtctaattattcccagtaggctccttctactgctctgccatgaaaaacaggcttagtttcccatggcagctgactagaaattctaacttttctactttaatgtacatcatataattcccacttttttttttcttttaaacagggatgattcttcaagagacccttcaaacttgggtagagtttacagctctgactttacactcggctttggagactttctttaaattatgtttttattaagattattttattatgcggaaaggtatttgggaaacttgtcacttgcatgtcccatcacgtgtactggctcctctgtggtgtctgcctgttgcgtgacactctccttgcagttcttgagttgcggcagaacatcgcgatgggaaccgatggtgggtggggctgcagagtgccccatcggtcaccttgtttctcaactacctcgcatcattgcagatgctagcgcgttgcctgtcgctttcccttggatacctagaccgttataaagtgtgccacatggacttaccgagcatggagagaggattttagctaggatttgaacacttggtgctgggaacctcagggtattgcttgccactaagccatgaaaccagagacaaaatctctatactgccctgagttggggggaattctcagtgccaactgtggctggtcctcattcaaagggacggtcagtttggtgtcaacatgaaacaccaagatgtctgtctctgaagcgtgattttaaaatccccatgcctgtggctgcgcttcctatttctagggctgggaaacactccttgcatcaaggggtcacttacagaacaaagaatcttttgggggaaacttcctctaaaaccctctcatatatagacagctttgactggagggtccatttttcttccaggatggtgttactgcagttgaaagggcaatatgaagttactttcttaatgtgacctagcaataggcatagctacgtggcactatattctggccagactcgatgtgtactctaacttaagaaataaatcagtaaggcagaacaagagacatgctttgcttctcattctctttatgtcattggccagatgggaagcgtctgagcacgttgctggcttgcttgtgtgcagtcagctgaattgtcagtgccgggtgctcctgcaggtgagcagccttgactcagcagacaacctgagagtttgtttaaaaactaagaaatgaggctttctttttaataggaaccagaatttttcataaagcttcaaatacaggttctcagcatgtagagcgagatgaaaaggtgcatgggtgctattatggtgctatttatgactgagaaaggggagggataagcatgatttaggaaggtggtcctttcctctgccaggcactggacgtgggtaccccatatacacagccagtgagcagtgggccagactgtcttcaccagcagaactgcttgttatggtactttgaacgtggctgattgagcataattctaacctcttctcccacctggtggtaccaggagattgtcttcattttaaattttatttatttatttatttatttttttgagtcagggtctcactctgttgcccaggctggagtgcagtggcacaagcacggcttgctgcagacctcctgggctcataagatcctcccacctcagccttccaagtagctgggactacaggttcacatcaccacgcccagctaattaaattttttttttttttaatagacagggtctcgctgtgttggccaggctggtcttgaacgcctggcctcaggcgatcctcccatagtgcagggattataggcatgagccattgcacctggtcaatagtcttttttttgagatggagtctcacactgttgcctgggctggagtacagtggcgtgatcttggctcactgccacctccacctcgcaggttcaagtgattctgtttgcctcaccttcccaagtagctgggattacaggtgcctgccaccacgcccatctaattgttttgtatttttagtagagatggggtttcactatgttggctaggctggccgtgatctgctcatctcagcgtcccaaagtgctgggattacaggcgtgagccaccacgtctggcccgttttttttcaaacattccccaaactgagggtctgacacgcccgttgttgacatcatggt

SEQ ID NO: 625 - DNA, 1008 bp, Homo sapiens
acacataaaagagtgcctggtctgccacagtagatgttcgaacacatctgttagataaataatgatcacagataatagttacttgtatatttttctttctctccaaccagactatgtctctattgaggcagggtccttgccttgctcacgtctgtatctacagcatccagaggtgccttgttgcaaactatcaagtggcagagctaacacacacctgtacactgagtgcagtggctcacgctgtaatcccagcactttgggtggccaaggcaggaggatcgcttgaggccgggagtttgagaccagcctgggcaacattgcgagaccctgtctctacaaaacaagtaaaaaaatcagctgggtgtggtggtatgcaccaatagtcccagctactcaggaagctgaggtgtgaggatggctttagtccaggaattcaaggttaacagtgagctatgatcataccactgcactccagcctgggtgacagagtaagatcctgtctcaaaaacaaacaataaacaaacaaccacccccctcccccaccgccaccacacacacacacctgttaaagtaaaagggcctaatatttaactctctccggcaaaggctaagaatctcctcccatttgccttcattctgggtcccgggcctaaaaagtcaaagtacactttgtctggcctggcctagtccagccccttttggagcagagattctagcatattgtcttttcaagcttatagttgggcactggggagaggtatgctagagccagcaggggctgcttagagtcacagaaatcccagtggctttttggaggtgttaacagatggaaagttggagggggctctgtgagccagtcacttctccctgtcttaaaagtctactgtgatgctaagagagaaaccaagtgcagagaggctctggagaacagagagaagatatggggagagagtgtatatgcaagaatgtgtctttcttggaccaccttagataattcctctaatcaga

SEQ ID NO: 626 - DNA, 1050 bp, Homo sapiens
cctagctactggcctccacctggcactgcagtggggaaggggtgcagtgggcacaggagaccgaggcagtcctaacagagttgtctctggagttgttctctcctcaggacccacagcaacctggtcagcaatgacattttctcctccatctgctttccagcttcccatttgagtagcgggtactattctttcttgtgtggttgtggctcactagctgaaggggtagaagggcaaaagtctctttgctattaaaggtagaaaagataagagcagtaattgtgtggcccgtggatggactgttgttctccttgggtctcaggttcaccacctgaaaaatgaagtgactgagccagatgctctctgaggattctccaccttcataattctaattctaaggagaaccaacatggacggaagaaatggaaaacagaaagtagggaggtgatatgtggaaagtgacaggagaaacataaaaacaaaaagaagaaaagggtaaacaagatgaattgaacgaatacatttaactctgttctctccaaaaactcactaaaatgagccagataataagagaggagatgacaataagattaggaaggtggaaagcggactggaaacgtagcgactgactcaacagacccaacaaagctgtataccctaaagctggagtggggagtgatgagaaccacgctctcataatttgcaaaaggcctaataatcggcagagttggtgcctctggaggtgagtgtgagggggatctaataaaagaaggtttaactgaagtcttttaagaaacaggattttcacatctagtaatgtgactcttttactgaaataactaaaaatgcaggaatccagagagataagaagagtaataaaaacaagtgtctatgaaaagacacctataagaatgttcataatagtttattcataataaccccaaactagaagcaacccaaatatccaccaaaaagagaagagatacaaattgtggtacagtcatatgccacataatgacattttggtcaatggcagactgcatatatgacagt

SEQ ID NO: 627 - DNA, 1076 bp, Homo sapiens
agaacacatttcccccaagtgtgtcctgcactccccatgccctggcttactcctccctgtagatgtattcactgtcctcaagggtacagagttcagatgcctcctccaggaagccttccctaaaccctttttagctagcttaggactcccctttctctggccctctccctgctggtagcaggttttagtcatttgtgttctgtctcatttcccctctctaccctgcttttggaagacagtggcagtgtcagaaccattctgtgcccacagcacccagcatacagtcttgacaccaagaagccaccagtgtgtgtctagtgaaagagtagggaactgagtggatggtgcaggatgctgaggcaggggacagtacattgggccagagtggctgggagggcttcttgcaggacatgtagctccagctgggcttgctgcatcaggcagcatggggaaagatgggaagagggaacatgaggctggaagtaagcagagaactgcagttcattgaaggtcttggggccaaacactgtgagaggcaccttgacacatctgcctttaacgctctcagcagtccctgaggtggttttactgtgaccaaatggtctccctccagggtctccaaagccggcattggccccaggtacaaggaaggccctgaggcccgtatttaggagtgaactggtcacacagttagtagatgggaaagctggaatccagcctacatgtgtctccctccagggtccccaagcacctctggaacagtgtcctgctggcgggggggtgggggggtgggagggacacactgaaggctttgaatatgggcaggtataaatcctaaaacgtgattgagaatatgcttggagatagtttagacccatgagttcatttcccagacggtgagactgaggccctggaaggggataggagtcttgccaccggcatcactgagcagcaggccttggatgagggcccaggcctcccgcctgcccattggatgcggtttccacagcaccacactgctagggacacaccgattctccctgtgcctgggctcccagtcacgggctgtgtgttgg

SEQ ID NO: 628 - DNA, 1029 bp, Homo sapiens
tctattttaaaacttcttttcctccctctgtcccaccatttccatccattttatccccctctccctttttcagaaatgacataattagaggggtttaatgttctgctgctgaaatcttcattttcttgggtaatttccactatttcatcaaggaataattaattgcattgtctttaatcaattgtttgacaaatccagcagcgggaggaattctcccaccatccccgcagctgctctcccctcctgggtgaggcgccagctcatgccaacaggagcgcttggctgccagcgctggggtgggtgagtgtagaggaggggcccccagtttccccagcctcctgtgggggaggggagcccaggcagccaggaatccacccagcagccacacggggagcacccagctgagctcaactgtgagctcggcctcctcaaagcccagtcaggtcggcggcggtggggggtggggggatagatcccatttagcagatgcagaagctgaggcttgaggaggatcacagggactgagagatggagagggactcaggtctctcgggctctgagacgcaagacagggaagataagatccaaaactgaatcttagagatggaggctggttaccagtaactggtaaccgggagagaggaaagaggagaagggaaggacgtccccaggcagagggggaaagtgatagtagtaatagcgaatgtttttatggtactcatgaaatggcaggtcctgttctaagtattttatcatctcaataaccctgggaggtggcccctcttataacccccgacttacaggtgaggaagctgaggctcacagaggttaagtgatgtgcccaaggtcacacaactagtgaggggcgtagcagttgtgcatttattcacgaacagtgctgcttcccccagccaccctgtgacaacagacgaatcctatttcactcgtggaaagcccagccccactgtggccaaccacgtgccctcatgatctccccttcaaatgcctctttctcctgtccttcccact

SEQ ID NO: 629 - DNA, 1091 bp, Homo sapiens
gtaccaggctgggcacagtggatcgtgcctgtaatcccaacagtttgggaggccgaagtgggaggattgcttgaacccaggaggttgagagcagcctgggcaatgtagggagaccccatctctacaaaaaaaaatagaatcataaaaattagtcaggcatgatggcatgtgcctgtaatcctagctacttgggaggctgaggcaggaggatcacctgagcccagaaggttgaggctacagtgaactgtgattgagctactgtactccagcctgggtgacagagtgagactctgtctaaaaaaaaaaaaaaaaaaaaaaaaaattcggaacctggatcccttgaatggagtggtcagcgttgaggaaacactatctaataatataatttagttccttaaaccttctcttgttcctctccaaaaggacctgtggccatatttcagaataacagtgtactggcgaagatcctagatctcttgaaaattaaccctgaattaatgctaatttctaaagacccagattacccagagatttaccaatgagagtgggggtttacagggatcagatgctgaatggaatgttgatctgagtctgctccctgagaggcagcagtactatcagtgggtacttccccaggttctcagtacagagttagaatagatactctccggattggcagatttactgcatggttccctgacccatagagcaaggacaggccaagggaaagccactataggttcccaaatcacatcaaaatagtaagtcaagggcactaatgcatattaaacagaaccacaaagataacatgactgtgaaagaaacatgcagggattgtgcttccagttaactttctagtttggccagcgtgtaaattggatgagtcttgaaaaatgaaaatggatgattataattaatcaggtggtgattccaattatagttccacaatgttccaaaagcggtctcatgattggaacaaattaatgtagatttgacacccagaaactattttccctcctatatcctgatcaccagagaacatcagaactactttattttctcatggcagggacaaacaacagcacacctgc

SEQ ID NO: 630 - DNA, 1025 bp, Homo sapiens
atataactctgacttcacatttcagcaagtgaaaaagtagttaaatgaccccagaattattagtcagaaaaatgcatcgcagccctctccaccttccaaaacactccagaaagtgaggttgagggtagcttgccaagacttggcccttctggtgtgaatgacattctggactcttgaacataaactgctggcagtgttagcttgctttgcattagccaattgttgcttctcaaagaagggcagcaggatgtggatctttgcctcattacaacattctagttgcagtggcccttttgaaaggaactccctgcaatcttatgtatctctgggatatgaaggtgcagacagggcttggctgtgttctcacttactgtttcaatcagcaccctttagactgcaagtgatagaaactctgatcaaacataaacagagcaggatatacactggcttatgtaaacaaaaagtccaaggactttcagtcatggctgcatctgggtgtttaattgacatcattaaaactctttctttccatctctaatttatgcctgcctatttttgcctttttttttttttctgggcagattttcttgttgtgatgcaagatgtccaccagttgctacaaactcatccttacagctcacaatctcgaaagaaaaatttctagagcgcactagaaaaagtctcagggaagactcctattggcctggcttgggtcatgtgtttatccttaagccaataactgtgcccggggatgggtgctccagtggccagtcatggctcaagagttccccctgcctggctgtgtggggaggctgccccactgagccacacacatgaacagagcaggatttatgtttgtttgtttttgcttttttttttttttaaggtagggtttcactctgtcacccatgctggagtgcagtggagggatcatagctcactgcagcctcaatctccagggctcaggggatcctcctgcctcagcctcccaggtagctgggacctcaggcctgtactaccatgcc

SEQ ID NO: 631 - DNA, 1069 bp, Homo sapiens
ctttggtcgaatgcataaacccatcccattaacccattgataaagtttgttatctgttgtactgaatggagatacttcaagagggatgtaagttcttgtccccatcacagaaagctattgtcaacctcactgaatgagtttatatgttggtgataggaaaaaaaaaatcacaatcactagttattatttcctaaatcaccatatgagtataccaagtccagtgactaataaagaggcttagacactgtctggcacttctttcattgatagtcattgagcatttccaggaacagattatgtgttggatgccgggaatgtagagatgatgagagagcctttgccctcaggtagcacgtggtcccataaagaagacatgggccagttgtggtggcttatgcctgtaatcccagcattttggaaggccaaggcaggagtatcacttaaagccaggagtttgagaccagcctggacaataaagtgagaccccatctctacaaattttttttttaaagttagccaagtgcagtagcacatgcctgtagtcccagctgaactcatgaagctgaggtgggaggatcctttgagcccaggagtttgaggctgcagtgagctatgattgtgccatagcactccagcctgggcaacagagtgagaccctatctcttaaaaaaaaaaaaaagagagataattataagataattgtgataaagtgatgtgttggtgtcaaatgctagattcaggttgacacactactaagtaccttacatgttatctcattttctttttttttcttttcttttcttttttttgagacagtcttgctctgttgcacaggccagaatgcagtggcgtgatcccagctcactgcaacctccgcctcccaggttcaagcaattctcatgtctcagccacccgagtaattgggattataggtgtgtaccaccacacctggctgatttttgtatttttatttttattatttatttatttatttatttatttatttatttatttatttttgagacagagtctcgctctgtcacccaggctggagtgcagtggcacaatc

SEQ ID NO: 632 - DNA, 1026 bp, Homo sapiens
ttgttgcccaggctgtattgcaatggcgcgatcttggcccactgcaacctccgcctcccgggttcaagtgattctcctgcttcagcctcctgagtagctgggattataggcatgtgccaccacaccctgctaattttgtatttttagtagagacggggtttctccacgttggtcaggctgagtcttgaactcctgaccccaggtgatccgcccacctcagcctcccaaagtgctgggattacaagtgtgagccacggtacccgacctctagcacagttttaaacctggggagtggggtggggttttgccccctgtgagacatttggcaatgtacgtaagcatttttagttgtcacaactagggatatgctactgacatatagttggtagagatcagggatgctgctccatatcttaatatgcacagaactgcctccacaacagctcagaatgtcagtagtgccagggttgagaaactctgtcttaacacatcaacagttcatttttttgttctgtcactcttgcttagctgtgtacatttttacatagttatgtacattttgcctttctttttcactttatattttaaacattttttacattgctacagtgttttcaacttttgaaaaaagtatactaattttatttgggaattgaaaaactgtgcataatatgtattttatttaagatgtgtgtgagttttaaattatatttgtgtgaaaggagtggaaaatagaagaaagaaaggttacagtgaaaagtcacctgacagcatatttcagtttttgtggctgtgctatgtactttgttccctagagtcactcaaagactttggaatccaaagctcagcctttgctcagaggcaggagatgtgctatggcgtaagatagggtcctggcccctgcaatgcagttggagagtacctaccaggagaaaaaacaaggagactgcacccattctccttgtcctcttctcgtttaaaattctttgtctcagtttgctttaccaccttattctttacatctag

SEQ ID NO: 633 - DNA, 1067 bp, Homo sapiens
cttttagcactttgaggtatttgcttccagtcttttctttgtgtgtctggtgtttacatagttataataatacttttgcattgtgctttttctcttagcattatcacatatttcttagcatttttccatattgccaaatagtcctcataggatgctatgtattcttagtatcttgggctctctgctacccaggactaaaaccacaaataactgtatgatgctcaaagaccttgtagggagaagggggaagatatgagtggggaccaggtgaaggaggtcgggggaacagaagaaaatttttagttatatgtcatgaagaggacctacagaggtgcaggattcagacttgggtgtttttcatcagtatgagtatcagctgataattaaaaccatttatcatctataaatactgttgatgtggaaatggtaagactctagaaaacttagcaatcaaggagaaaaataataaaaatatggttttgcttttaaaaagcaaaatagtatatttatgtggactgaagtacaataacaattatgtctgtcactgcaatttgggtcagattaacttggttaaaagttgtatttgattagaacagcaagtcctattaatagttagtggttttaatcacttgaggtcaggagttcgagacgagcctgaccaacatggtgaaacctcgtctctactaaaaatacaaaaattagccaggtgtggtggcacacacctgtaatcccagctactcaggaggctgaggcaggagaatcacttgaacccaggaggcagaggtacagtgagctgagatcacaccactgcactccagcctgggcaacagaggtagactccatctcaaagaaaaaaaaatagttagtggctctagtaacacagatatcacttcatcgatcagcagatatttatctttcatatactgtcatactgcaaactgttatgtcatgattacttgcaacctaaaaaaattgatattgatagcaggcttagaccaagaagttgcagaaaagaactgaattaatgagaagtcaacataaattataagacatattctgtgagtaaa

SEQ ID NO: 634 - DNA, 1023 bp, Homo sapiens
tttcccagaaagatgattacttattatctgggtttgtttttgtttttgtttttttgcgtgtgttcaccatttcagaggtgattttaaacatggatttccaacatactttgtgttcatcatttttcaaaataactgctctgaagggtgtaaagctgaccaggaaggtaacctgaaaataaatacatgtgtttctagtaaaacttctttcaagtataaggatttgggtcaatacataatgtcctctgactgcctcagtacttgttgtacacccctactacagagctgataactttacagggtaacttatctgcttgcatatctgtgctttcccactgtgacaatctactaggataggaccacaggggtatttgtaacacagaaagatgtgatcaagcaactttagtttagatgttgggagcacactttggaaacagtctgcctgggttcacatcctagctcttatcaactacattgtgaccttgaacacattacttagctctctgtccttaacttccttacctgtaaaatgagaataataatgtccctaggactcagcaaagaatgaaggcatattttgtactcagtaatcattgagtgaattaatgagtaaacatacaaacaaatcaataagaagaaaggtgattttatttaacaggataacattttctttagaattactgaaggaaactattgtacacatgtaacactacagtttttaaaaggtcaaatttttcaaacaaaacataaagaaaagcagactgaatctcttatgcaaatctcactaacctcccattcttccttcccacattctaggaaaaagattaatgatgttgagtattgctccttcctgtggtgtctgggaaggagggtagttgtgttttctaatcttttaacctcatcttctctactctttctttttttttctttttctttctttctttctttttttatttttttgaaaccgagttttgctcttgtcaccaaggctggagtgcaatggcgcgataccgactcactggaacc

SEQ ID NO: 635 - DNA, 1036 bp, Homo sapiens
aaccttgtctttaaactatggaaacataacaaaggccacttctgttcttctatggccattatgtatttacagaaggaaattaaattggtctggttaagtctggtctttataaagtcattcatccttcttaatgtgacaaatgagacaccttcatatatattaaatttaaagcaccaattcatggattttccattttttaaatggaaaaatatactttaaatggaaaaattttaaaaaaaattattttgaggtaattgcaggaggaagggttccttattacagctggtgaggatgggaattccttttctccagtagcctccacttacagcacatggctgagaaggggaggagtgacttgtgacttctctccccggggccgccactgataccacaaggcaggtgggtgggggtggcttattgtgctaggtggtggcctcctctgacaccgccccagtggaaagggagaagtgtgcctcctcccttccaggtgggttggaattctaaactcaccacctggtctcccctcacactgcagggtaggggagctctttattattcggcagggataaaagtcccttatccctacttggccttctctgacaccaccccagtcagggaattggaatcccttattacagcctggtgagggtggaaatctaggctcccaatttgggctttgctggcataagtggaggtgaaggcacagttttttctgtgacgttcagctggagtaggtaggtgtccaaaattgtgtttcttccttggccttttctggtgctttggctaaagatggcagacttttgtttggacttttttgttttttttttgttgttgtttttgtttgtgcttgttgacattgtctgggttgctgtcttcttcagctacaactcagggatctgtgaggcaaaaagaacacccaggaaactcacagccatgtcgttccttgggtcttgagttccctagctggtctgccttcttctttccacctttcaaagtcttttaatgtttgttttatatataatgttcagagttttta

SEQ ID NO: 636 - DNA, 1033 bp, Homo sapiens
aactatgaccaggagggtggtatcatgttgtacatacagactgccaagagctcacccaccctcttagatagtttaggggaatggggtggtagtcacttaagtgggtacttttatgtgactgaaggcatgagagtcttcaggaatggcaaggattgagtatgtgatcaccttgttgctgttccctactttgtctgcatcttaattgatcgttctagaggcccagctgtgacctcttttatccagtctataaaatgctccagccagtctttgtgggctgtaggtaccttatataaggcttgatctgattgcagggtggggtcaaataggtgcagcttccaagatgaccaacaagagtaagagtagactttaaagatgtcatgctttaggtgcgacagtgttcttcctccggtttccagggacccaacactccaagtcactaatacttcccttctctctgctcagggagatggtactggagtcgccagtatttaccgggggccatttgcagatgaaaattttaaacttagacactcagctccaggcctgctttccatggtaagtgaggtccaatcaaggttttgggttatagccagctggttcctgggcccctcttgaggcccagtgctgtctcttgggatggaagcaaatgctttccttctcttgcttggcccaggactcacctttaccacctcctttcttagtctggtttgactgagaaaaccagtaggtatgctggctcacgcctgtaatcccagcactttgggaggctgaggcaggtggataacctgaggtcagcagttcgagaccagcctggccaacatggtgaaaccccatctctactaaaaatacaaaaaattagccaggtgtggtggtgggtgcctgtaatcccatctactcgggaggctgaggcaggagaatcgcttgaacccaggacggggaagttgcagtgagctgagattgccccactgcactccagcctgggcaacaagagcgaaactccatcttaaaacaaagaaaagaaagaaaagaaaac

SEQ ID NO: 637 - DNA, 1073 bp, Homo sapiens
gtctcaaactcctgatctcatgtgatctgcccgccttgacttcccaaagtactgggattacaggcgtgagccaccatgcctggtctgtacaactttagttatagaaaccttggttttatctcagtgagttctgggagagtttttttttttagacagggtcttactctgtcacccaggctggagtgcagtggcgcagtcacagctcactgcagcctcgacctccctggctcaagtgttcctcccacctcagcctccttagtaggtgggattataggcgtgcagcaccacacccagctaactttttagagatggggtttcaccatgttgtccaggccggtctcaaactcctggcttcaagcgatcttcccacctcagcctcccaaagtgctggaattacaggcatgaaccaccgtgcccagcccttggaaaactttttatgatgaatttggttatgtatagcataaatgaacctctacactcaggattctcctgctgtagtctgaatgggttgtttgctacttacatggacatgggagagggtggcacctctcttttgaaagcccgagttctggcagctctgctagtctgatatgcttaccctcttccctgtgatcctcaaacctggtaccagtaccaaatggtagagagctttccttaattcattgttgcctagattctccaacaggtaataatcattttggggcactcgttaaacctacgaattcctagatcccttccctggagtatttgattgagtggctttggggtgggaccaggatgttatgtttgtaacaagtatctcacatgcttcttaatagagaagtgtgggaaacactactttagttagtggtgggatgactgtcttttattttaatatttggatcttaggaaaaaatacggaattagcacaatacatcattttacagttattacagcttatagtgaggcaatattgaagttcaaatagtgattagcttaaaaaataaattgtacctgtggatgatagatattgtaacagttgtgaagatgctatttgaatgactaaggtttaggaaacactgtgtttcattcta

SEQ ID NO: 638 - DNA, 1024 bp, Homo sapiens
gagataaattttgtcttagcacagctttgaccagagagaactgtttttatttgctcatccagtaaataatatatttacaagaaagtggttttttttccttcttccgttcttatttttcattcttccttgtcctagaatcataactggttaagtcgatttctgttagatccctggctgtagcttattagagtggccatagtcactggtaacttgacatttttcttcctgtttgaaggcaaagctgcagacacgtctttaggacttacccttcgggttgtttgtaggagtggtggtggtaacgtgcagtagacgcactgtattccatgggctcccttgtaagccgggcatcattttcaagatggctgccaaggctagtagtgctagttacatgggtgcagagcactgggtatgccagtagcaatcttggcctcacaggtatggtacttagtgccatctcagcattgtcttgcttgcttactgtagaagacctaagcagatgattaaaagaacaatgtggaatggacaacaaatgggcaaaatcaagcttaaggacagaatcattgcctgatgaaaaactgttcattaatcaatcatagagtattgtggaaacactcagagtaagagataagcatttggtgatctattctctacttttgcaattgtgggaaaatattttgtttcttccaaaatcttaggattttccatcttgttatatactgtttgctttcctggctggccgaaactacgtttttcattaattttttgataatggcttactagcaagaaggaagggaatgcttatatataattggcatactgatagctttttaactgatctctctgaactttctagtgttttagtttgtatttctgtcttactctgattatcgttactagtctaacccttaaaccagtggttttcaaatttaagtgtgcttaccttgggagggtgtgatgtaagtggtgagttcctccttctgagccttggattcattaggtctgggtacatttttaacaggaatga

SEQ ID NO: 639 - DNA, 1049 bp, Homo sapiens
aattaaatacagggaagatttgctttaattaaggaaaatgtatgtgataaaagaaatcactttggaagctagcagttggttctatatgtagttcgtgtagtggaacaaatagacttggctggaggcacctgtctcttatgagggagggagacagactgacacataacgtgctgttttctgtataaaggagagggtgcagtgttcgggatgactattgtgacgacttttaattggggtttttggatgcgctggattatatatgctaggattgtaaggaatttttataattacaatattgtatgtaaattttctgcctttaaagacataatttcattgtaaatgtgtttattccagcctgaattaccacctgatgaattgttacaaccttgttagaattaattcatgaaagggcttctccctgatggttatattgtgaagaaggtgctaagtaacatgagcatagagcttttaaaaatagcagaagttttggctttattttgttagactgtgtaatctagaaattctaagaaattcattgagttattcttttgtgaactgtgtctacaaaacataatcggagaatgtgactagaggggtttattagctccccccagattactgttgaattttgttagtggttgagtattgatccatattcaccaaagattaccatgaattggcaacagtttatagtgaccagaataggaatatttttctgtttccagagtacttaaaatgtttaaattaataattcttaatgttttgaggtgaaagaatttggagcagaggtcacaaatttgtgaccttctggctaaaactactcccagatgctttgattagacagtacagtattttttaaaggaattgggattaattactaacatttataattcaggagataacaccaagtaatccagattattatatttttaagatctgaactttagctggctttgggggcctgtatttccacataagtaaaaaccacctggccatattgtcaccacatttaggtggggtatactttttttacgacagccttcacgcct

SEQ ID NO: 640 - DNA, 1119 bp, Homo sapiens
agtaggtcccactccctgtgtcctcccaaagtacaatcctttactcttgaaatctaggatagagaactagtatccagtttgactcgtgaacaatgtgagtttgaaccacacaagtccacttacacacagattttttttgataaatatattggaaaaatgtttggagatttgcaacaacctgaaaacttcagatgaaccacatagccaagaagtatcccccaaaataaggaaaagttgagtatgttgtagatactagtctgttttattatttactaccataaaatgtacacaaatgcattagaaagttaatacagccatttgcagttgagaaatgtaaacaaacataaagattcaggcagcattaaatcataactgcacgacattcactgtagtaatattgtactattataatatgtagccactgcctattgctactgcagtgagccccttaaaatgccatgtgacgctaatcatcttcacatgaacagtttatctctccagtaaattgcatgtcagtaaaaagaacttgtagtacacaggtattgtggtttagtgcaatactgtaagtcttcaatagcaccatgggacccatgcaaagtggcgctagtgatgctgagaaaagtcatggcattgtaagaaaaagttcagttgctcgatatgtgctatagatgaggtctacagctggaattacctttcagacagatgtacacttaccgtatcgataagtgcagtactgtacatgtattttctcttacaactttcttagcattttcttttctgtagctttattgcaagaatacagtatataatacatataagacagaaaatgtgttaaggatttatgttaccagtaaggctttccagtcacgagtaagccattaaattttggaagagtcaaaagttacaggcagatttcaactgtgcagcaggttggcacctcaaacttctatccaccctcatagatactgagttattcaaggatacactgtattaccttcctgtccccctagtcctggggctgcagttgctgagtttgctaccctccagtcttagcccttggaaacatacagtttgtccgaaggcagaatcatagacaatatgtgggaaacagaagtgagt

SEQ ID NO: 641 - DNA, 1033 bp, Homo sapiens
agcatatagatggtaaatcctggagtttttataaccacaggattgtaaattagtgtatgcagttacgtgaattaaggtgttagactagtgtggtctggtgatctgcaacaaagtagtagtataagagcatttagttacggataaatttatgtataataagtcttatttaaggcaatactgtggattggcaaaaaagttttctaaaatttagcttattttttatgtagatatacagctaggataaagatagttatgttttaaaaggagtgggaggggggtcaaacatggtgaacatgctggagtagagtccgggagtttggatggattgggccatgaaaagcaaatgctagaattcctagttcctgtggcatggagaattatctggcaagctgtaattgtcttttgacttactaaaaagttttccagggaagttaaatttttttgcctttgttttcccattttgagttgcattttgtctatttttaagacccttaccaatctggataggccatagtataggagtggtagcaattagattttaatttagaaatctggctagtattagtgaatagtaaatgcccaataaatactaaaaagatttgagtacctaccttagtaatgtaagttattaagtgtttagtgtagtttttctcattttgcaggtaaaaaagccaatgaggcagctttcctaggttacacagctgttaatagttgagtcaagactaaaaatctagcagggcgtggtggtgcatacctgtaatcccagctactcatggctgaagtgcaagaacttgaaccccgaaggcagaggttgcagtgagccaagatcgctactgcactccagcctaggcaacaaagtgagactccatctcaaaaaaaaattgagtactgttatttctttttcttttctttttttttttttaagatctgcaaaggggtttaataatgcaaatatcacatatatttccatttttaacaccatatttaagttttccattttcttaacaatagaaagtgataaaaatgtttttcc

SEQ ID NO: 642 - DNA, 1051 bp, Homo sapiens
gggggttctcatttttatgatctcaaggaaagttggtagttgggagatgcaggataaggtgagaatgtaactactacttctgttggtaaccatgctctagaggtaagaggagggtgtgctagaacagttaatgtttaataggataaggaggggcagaatatattttgctagtcattgctaccctcttaattatggctcagtaggtcacactttaatttcttagacttttttttttttttgcctatcttacgggtaatgaggctacaactgtttgcaactgctgaagtcttgaaagcagagagcatggtggcttgtgttttttgatttttgccaaatttcctggtacctaattggcagccagagagtctctgggaaaattaatctttgacaacatgagatttatttcattttctaacttgttcaacttggttctgtcttgcaggaatgacaccaaggaagatgtatttgtacaccaggtgagtgcttgtgtagatatttgcacttctgattcaaggattgtaagaagaaaaggttagatatgttctcagcttttgttccttataaaaggttaagtccaaccaccagtttatttacttacgacaggagtagtagcatgcttaaaaatgtatacgtggaaatgtgttagagttgacttaattatcctagacatttcaaattggaattttgtcaacagctgtggctttctcaaatgttgagtcaaactcactgcattaaatatttatacctaatttcagatgaacagattattccatgattctaaagttgaacaaataatgttgctataaatacacagaaactttggcaagaagttttcaaaggcttttaggtgtacctgtagggacaaatctccataatcaagggtaaataagacagacctgcaaaacatagtaattgaagtgagtacttgaaaagtagcataaagagccttctgcttactttaaatcactttgaatgggtattgggttttttttttttttaaacctttggagagttttggctggcttggaaaatgaaaaaatttcactagttt

SEQ ID NO: 643 - DNA, 1033 bp, Homo sapiens
ttcctaccctaacacctgtgtcaggcctcgagacactcctgctcaaaatccttcagaggcttccagtctcacttttgagcagaagccagcatcctccaggagcctccacaatgtgcccccacctgccccatgccatctactctctcccctggtttactccacccaacctcacaggcttccttttcatggcactcttccacctcaaggcattcacacctgtttttcccttctgactggaagaatgttctgccggataagttagtggctttcttcctcagttctttaggtctttgatcagcagggcctcccctgcctacctgtttaagatggccaccccttcccatggccagcccccaattcctggccttcctgattttcctccatggtgcatgtcatctgctggctacattaacttgcttgctaactatcttgctctgataggagttaagctacataagggtagggatttctgtctgttttgttcactgctgctatatcccagcatctataatggggctaaaagagtacagaacaaaagctcaatacgtatgttgaaattaataaattatggataaccatgaagaggcttggcagctgagtgaaggaaacgagggctgctgctagaaagggactgtggaaccatgtcttagcctgcttgggctgctgtagcaaaataccagagactaagtggcttaagcagtagatatttatttctcatggttctggagactggcaagtccaggtcaaggtaacagtagatttggttccggtgagggtcctcttctgacatggattgcacaaagccaccttcaccaccacctcacggtgtcctcacatgagagaaacttggaaagcaactcggagtaagaaaacctgagctctagtcctgccaatgaaacttcatcttaagtcctaacgatcacctcctttgccaataccagaagccacttgcctccggaatccaggacatgggagaaaattaaacacctaattaaaaaaaaaggggtataaatagtactcacttcctaaagtt

SEQ ID NO: 644 - DNA, 1069 bp, Homo sapiens
aacagtgagacactcttatcagttggggaaagttttatgttggtctagggaactgtttactattcaagtttccagccatcagccaagggccagccttgcaagaaggcctttctgaggatagcagtctcaggcctgcacgtaaactcttttctgcatacatatcatactgcattggtcgttatcacatgttaaatttaaaacaatgaggaagatttttttttcctaacaagggtttttggtttttgtcttggtttgttttgttttccctaacaaaggcaattcagatttattattggctggaacttctgatgtgaatttgacacagtggaacctgagactgcattgggctatacttctctagttacttacctatctctattaaactgaacttgaagacagggctcctgtctctttctgtttgtttcttaggcactgtgggtgaaaagtaaagaatgggagggtggggacgggagagtagagggtagaaagcatagaagacagcttcctagaaattgagtgtctgcactttttgttcttccaggtgtcatcatgctgtttttctccccattgtctctgtctgctttttactgcctgatgtggtcgctctcgtacatcttctttccagatgctctgtggggcaaggcagcctgtctttcgccacagcactgaggaagctaagcagctctaccagctcctgccggcctctgtggggtttgtgtcagcatattgggtcaagcctgcactaaagctttgtatgtacctgtgttgccatatactagatatatggtatgtctgttgccatgaagttagaaacccaaagcagggtcagtgaacttcacttctttgtctttattcagggttctgactcccttgcggacaatacttgtttatgtcatgtagagcagaatatccccccgcctcaagctcaatgtgggctgggtttgggttccagctccattaccagccgggtgactgtgtgctactaaggtccatcccttggaaaggagtgagagccttcagaactggtattggcctcagcctcagccctgcctggtggggcttcctgaag

SEQ ID NO: 645 - DNA, 1043 bp, Homo sapiens
gaatcaaccttgtgacagtcctcccctggacaaagagtctcaggagctccccaccgagcaccatgtgacccccacccctgcccgcaagagataaccacctttaactaattttccactacctacccaaatcctataaaactgccccacccctatctccctttgctgactctgtttttggactcagcccacttgcacccaagtgaaaataaacagccttgttgctcacacaaagcctggttaggtggtctcttcacatggatgtgcgtaacgtttgatgccaaagaacccgggacagggggactcctttgagagattggccccctgtcctcaccctcacttcatgaagagatccacctatgacctcgggtcctcagaccagcccaaggaacatctcaccaatttcaactcaggtaagcggtctctttgctctcttctccagcctctcttgctacccttcaatctccctatctttccaatttcagttctctttcctttctagtagagacaaaggaacacattttatccgtgaactcaaaaactctgacatcggtcatggatttgggaagacagtcttcccttggtgtctgatcatagcagggacgcctgccttgatcattcacccacattccattggtgtctgatctccatggggacgcctgccttgatcattcacccacattccactggtgtctgatctccacggggatgcctgccttgatcattcacccacactcccttggtggcaggtcaattgcagggatgcctgctttgcctgttcactcacattacagcccaggactcagtcaaggatgcctactggaagcctggtaggtgcccacctccatttctccatgtctctaccttcctctttaaacttaccttctccattatgggcaactttccaccatccattcctccctcttcccccttagcctgtgttcctaaaaacctaaaaccccttcaactaacacctgatctaaaacctaaacatcttattttcttctgtaatactgcttgaccccagtacaaacttgacaatagtt

SEQ ID NO: 646 - DNA, 1058 bp, Homo sapiens
aagacaacagattttaagagtaggtcaagatattatcaaaaagacagattctggctctatgtgaggacattcccaactctaccaactaaacaggtatgggcaaaaaaaacaaagaaacaacactgaagtgaatggctgtgcaggacttctgactcaaagaagagaggtaaacagcaacactttgttattactaatctgtgcatttatacacgttactttttacaaggtgctttcacacatcattgggctagctggtatttttacacaggaggaagctcacccagagtcttagctgtcaaatcacaacactttctttctgtaacactgttctttctaaaacaaagctaatggaacataaagcaaatctgttagaacccccatttgcactcccccagggttccaggaacaataaagaagaagatactagtgaaaatgtggtaaaaacgatgtttgtggaagcaaaggaaaaactccaaaaatagaatagcttaccttgtccataaatgattgaaagatgaagtgaataaaggacaggaactcttcgtcaacaaaaaccatgttgatagaagagtgaaaaattagaaattattggtaacaaattaagaatagctggaaacagaataaatacagcttgtgagattagttttccttgttcatacatgtattcaacagttattattagaacacttagtatgtcttggcactgtgctaggctctagggttacagcaagaaacaatgtataggccaggtgtggtggctaacacctgtaatcccagcactttgggaggctgaggccagtggatcacctgaggtagaagttcgagaccaggctaacatggcaaaaccctgtctctactgaaaatacaaaaattaactgggtgtggtggcacgtgcttatagtcccagctactgaggagcctgaggcaagagaatcacttgaaccaagaggcggaggttgcagtgagccaagatggcactgctgcactccagcctgggtgacagagcgagactccatttcaaaaaaaaaaaaagaaaagaaacaatatgtagacatggc

SEQ ID NO: 647 - DNA, 2038 bp, Homo sapiens
catatagtatgggcattcttgtgtgtcactaaatattctttgaaaatgtgatttttaatgtcctgttaacttactgtttcatcatatcttaccatatgtttagccagcccctacttggccacttgagttgtctcagttttcattattctaaataatatgaataggaacatctttctcacctttttatggctccagttctgctcgttttccttcccatgggcctgtagagtgagacaatgtcccactttcccttttctggctcgcccgacccacttatccagttgggaacagggagtaaaaaagtagttgttccatggggtcagggtccgagagaagtgggcatgtggggcaggttgtacgagtgtgatggggaaagaggggtgagatcctgagggccaccgcagggactgctgggtctatatacaattttaggatggggatacttatttatgtttgaagtagaagaaaaggagcccatggagaaagaatgaagatattagagagacaaaaggctcaagattagatggacagattagctacagggaaaaagagaaggaagaggaatccttgcttcagcaccttgaaggaagaacaaagacacagatgtaaaccttcagtagactttgggggtgctttcagagagttagagagtagtgtaccctccagtttggggtaagcagggcgttcctattgactgacttgctttctctttgaagagggcacagggcaggagttatctgctgagggtaaagggaaggaaggagcattcattagggggataaggagaggattttgagcgtaaaagagagaaaagtgaaggtctacctagaatagtcagacaagagaaagaaagaaaggtcatccaaactggaaaataagtcaaattatccttgtttgcagatgatatgatcttttatttggaaaaacctaatggctccaccaaaaaactattagaactgataaacaaattcagtaaagttgcaagatacaaaatcaacatacagaaaatcagtagcatttctgtatgtcagcagcagacaatgtgaagaagaaatcaagaaagtaatcccatttacgatagtttaaaataaaatacctaggaattaaccaaagaagtgaaagatctctacaatgaaaactataaaacatcgatgagagaaattgaagtggactccaaaaattggaatgatattccatgttcatggattggaagaatcagtattgttaaaatgcccacactgcctaaagcagtctacagattcagtacaattcctatcaaaataccaatgacattcttcatagaaatagagaaaacaatcctaaaatttatatggaaccacaaaagacccagaatagccaaagctattctgagcaaaacaaacaaaactggaggaatcacattacctgacttcagattatactacaaagctatagtaaccaaaaacagcatggtactggcataaaaacagacacatagaccaatggaacagaatagagaacccagaagccatatatctacaatgaactcatttttgacagatgccaagaacatacattggggaaagaacagtctcttcaataaatggttctgggaagactggatattcatatgcagaagaatgaaactagactcctatctcacaaaaatcaaatcaaaatggattaaagacttaaatctggccaggcgcagtggctcacacctgtaatcccaacactttgggaggccaaggcaggtggatcacgaggtcaggagttcaagaccagcctggccaagatggtgaaaccccatctttactaaaaaactacaaaaaaactagccgggtgcagtggcaggtgcctgtaatctcagctactcgggaggctgaggcaggagaatcgcttgaacccgggcagcagaggttgcagtgagccaagatcgcgccactgcactccagcctggccgacagagtaagactctgtctcaaaaaaaaaaaaaaaaaaaaaaaagacttaaatctaagacctcaaactatgaaactactaaaagaaagcattggag

SEQ ID NO: 648 - DNA, 1081 bp, Homo sapiens
agaagcccaagctttaaccttgagagcttctcttctccctaaggccccggggaagaggaggatctatacagacaggctgtcctgaacagagcacaggtggcagaggcaaagactcacacagtgtctaggtggtggtatcccagtcccagcagaccgtgagcccttgccccatctccacgtgacatactctgggcttccccagccgccttcacctgtgtgcatccaccaccagccaccatgaactgtgtactccctgaagactacagcttccttggtcctgtgctgtcttcacactcagtccacgctgtcagcctaacactgatgggaaggtggcttatgctagtgtgcagtggccacatcatgaggtcctgccaccatttaggggcttttctcccaagtcggtgacataagctgggcttatggttccatccttctggattcagctttaaagggctacacagtctgtccctgggctcagtcatccaaatctagccttcatagtggaaacagtttttgcctgtgcttcaggctgggctgtagcctcaaaccactgctgtctctgactctctgaacggagtccacccatggttttgtttgctctttggagtttgtaccctggtcctctgcaaatgctcctatagtgctgtccttcctgtcctcaggtgctctccctccagcccagtggttctgactcatcccatgcccagtttgctgcctactggaagccagtgctgtccatggatgcaaattcctggcagcgatggctgcacatgcatcgcctggtgctaatcctggagcatgacacgtgggtgcccttagggctgggccatagttggggtggagtatcggggtcagggggatagggaatgatgggaaggggagcagcagatgagctcttaccaactgtggccaaggaaaaactatagccttttccttgcctccctgctcttcagtccccataacctcaggcaaggcctagaagagagtgatagtagtctattccttttctccaagcctggggcctggaggtctaacctcagtccacacccctcttcctagaccaatccccaagcacttgcac

SEQ ID NO: 649 - DNA, 1053 bp, Homo sapiens
ctctcataccatcccagtaaccatgagatactccctctcattgcactgtgctagcattagtgatatactagtgacccagacagagggacgctgtaactctgtggagcttgtgtagaatgggggacagttgaacaactgaattacacaacttacttcaattacaattgtgaagaatcctaaaaggaacagtagaagctgctacgaaagcatgtaacagggatctgaccatctgaagtatcagggaaagcttcttagaggaagtgatttttaagctgagactcgacggatggtgaacagattctggcaccaaaggggcaagtgttcctgactgagaatcactctcagaggcctgagctttgacctctctgtgatgactgatattcttgttgacctccaatccccagtgatagtggtcattctctctggcatttgatcacccctgaccaccaccacccacttaggaggaggtatttcagttccctgacctcatgctccttctcccagcgactgcttcttcaagaccttcatgacagccacgtgtgtaactctcttctggtggccgagagtgaagaagatctgtggcgcagtgagactcccttccactcccgtcagcgggcaccactgcccagtgatggtgagatcccacccaggagcctccctcacaaggcagtgctgccgccctttcttttaccgaatactctggtgaaagctgagggcagagtcctcattacttggtcatcagtgccaagtactagagagagagcaaggaggataggacaggaaaggatcactggccttggctgctgctgcgagttcatcagtgattttcatggaagtaatttcagtagagagatgggaatagaaagcagatgaaatgaaaagtgaaagagggtgataggtggggcagagaataactactcttacaagtagcttggcagtgaagagacagagaaaatagatacggcagtaactaaaggaagatgggggcaaggaaggagctttaaaataaagtagagacttgagcttgtttatattctatagggaaagagccag

SEQ ID NO: 650 - DNA, 1050 bp, Homo sapiens
ccactggccagtactgacaggtctgagtcttgggaagtaggcagcccgtctgttgccacctccatctcccctgagctcagggacaactctgcagccaccttttcatccactgtcaaatctcagattcccgtgtttgtggcccctgctctatgttcctctccagattctgtgttctctgccctttcccagtggctgtatgcgaaaaatgagctgttcaccttacacatagctactttcgtgtctccagatttgtgagtttatcaaggcatgttctccctcctctctgttttcagttagaaccttttcaagccagtagtccagaaatgccagttccaactctctcatgtttctgtgaccagctccccactccccaggtttccctctcttccaggcattaggaagagaaggcgtgcctgcccctcctgtgatcccatctcagaggccaggctggcccctcctaccctggggaggagctgcccagcttgctatcttgacagccagttcccagctctaggagcttctctaaaggactttagtttgcacacttgccataagttatgctctttcccccaaatctgaattcctttagacactgggttaaaaaaaaaaatgtttctacagcaaaatttaaagccaggtcttcccttcccaccaatctttaacaatcaccaatcactaagtcttgtcccagtttccttgaggtttaaatgggacattttttccaccagaggttttgacccccagcaagaattctggcagtttatagccccttggcgtgagtgggtccccccaaccccttctgttctgtcccttcttcccagtccctcccctgcttcccttctcccctatcctctgcactaaactgtaacgagcagtaggcctctgaaagcctggaactgccatcccccccaatcaaaagacagcagctttgccctttcagaggaaggtacctaaccaggcatcaagcatctccttgaattttcctaatcaaattgtagacaggcatcaccttcccccttctctttcctgcccagcacacaccctctcagt

SEQ ID NO: 651 - DNA, 1062 bp, Homo sapiens
cctgccctctgagtcacttctgtcccatctcagtgttccacaggaatgcaggagctcctaaggaaagcagacccactctgcctgccagtcagagccttaaagactcccatccctgtgccccaccagaccagtgtgtctgtcctaggcttagtgtctgctgtctcctgttacttatccctcagggacattggagctccccacaccactcattgctgcccaccagctatacaactacgtggctgatcacgccagctcttaccacatgaagccattgcgaatggcccggccagggggcccagaacacaacgagtatgccctggtgtcggcatggcacaggtaaggctgagaggggcatccagcatgcacgctgcaggagctggggttgggacatacttgcagtagggagaccaatgttttcttgggcaggggtgaggtttgttttattagaaccccagagttgacatctccccaacccgtcctgcacagttctggctcctacctggactctgagggacttcgacaccaggatgactttgatgtgtctctgcttgtctgtcactgtgctgcaccctttgaggagcaaggagaggctgagcggcacgttctgcggtcagcagatcccctaccttgaacatgcccatttcccagcctgccccaccctgccctgtgtgtctcttgctacaaccaccactctcctgccctgctccccaccccaggctacagttcttcgtggtgctcaccagccagcgagagctcttccccaggctcactgctgacatgcgccgcttccggaagccacccagactgccccctgagccagaggctcctgggagttcagctggcagccctggggaggcctcagggcttattctagcgcctggaccggctcctctgttcccaccactggctgcagaggtgggcatggcacgagcacggctggctcagctggtgcggctggctggagggcactgccgtcgggacaccctttggaagcgcctcttcttgctggagccaccggggcctgatcgactgcggctaggggggcgcctggccctggcagag

SEQ ID NO: 652 - DNA, 1033 bp, Homo sapiens
aggcagtggcattcagcactggcaaggctgggagacaggaagaaatttggcacatttgaggatcagaagaggaagttcccgttctggcaggaggagagcatgggcaggtagggctgcagaggtgggaggggccgactctgcttggctctggggtcatgctgaggagctgggccacagagtctactgctgaggtcagggacttggtctgtgtggctcacagctatatggctggtgcctggaaggacgcccagcacatagtaggtgcttagggagtatcaaaatgaatgagcgagggagtgaagggaaaagatgggcatttttaccagatggggatggttctacatgaacatttccataacctgcttttttttctgcataaacagcaaatttttaatgtctttctgtgtcaatacatatgctgttgtgatgaaattcttgatgttttctcatgctttcctttctgtccaggaaggagtggaggccctggtgcccggcccttggtgctgagtatccagcaagagtgaccggggtgaagaagcaaagactcggtgagtgtgccccacagagtggccaggagcaggggtgcacaggggtcctatggaccaggctgagcagcttggatttgatgcagggtcagtggagagctatagagggggtgtcagcagggggcatgacatgatccagtgtgcactggtgagagattgtggaggcctggaccagggaggcagtgacagaagtggagagaagggatgtgagtgctatttagggaggtagagtagacaggacgtggtgaaggattgaatgtggggcatgaaggaggggaggtgtcaaggatggtgcctgagtttctggctggagtggatgatagaggtggatggggaatgacatacagctcgtcagctactgtaggtgtgaaataggcttccgggtgatgtcctgggacttacaccaggatctttcttctgcttctccattcgccacgtttctgtagaaaagactgttcccatcgactgtaggttgtcgtagaaagagc

SEQ ID NO: 653 - DNA, 1114 bp, Homo sapiens
ggtgtccctgccctggggtcctccagcccttagagggagggagggatttctgttattagccggcttaatgataatagttaaggcatattgagtttcttggtgggagacatcatgctagcaagcacagttgattttgtttttttctgttttaccctgggagataggtgctcttattatttccatttttgaaacgagggaaccgaggcacagagagggtgtatcacttgccccagggtcacataaaaataaatgacagagcagggacttaaacccagtgtggtctgaatccatatctcaccctcaccactacatagtaccagaccttcaggtttaatagcctcccagcaagaagggtgtggtaaaatagtaggggaaagtgtgttctctctgccctgatacctggggacaggcacacatgtattacacatatgtcacatatatgtaaccgattctggccaggcacggtggctcattcctgtaagcctagcgctttgggaggccaagttggaaggattgcttgagctcaggagtttgagaccagcccagttaacgtagtgagacccccatctctacgaaaaaaaaaaaaaaaaaaaaactgggcatggtggcacacacctgtggcccagctacttgggagggctgagacaggaggatcacttgagcccaggagggtgaggctacagtgacgcagtgagccatgatcacaccactgcactccagcctgagtgacagagcgagaccctatgaaaaaaaaaaaaaccagattccttcctggtctccccgctgcaattctcaacagcctctgatccattatctgttttgcagcttgagtgatctttaaaaaatgtaattcaggatcaagtgactcccttttaggaaagggagaaacaccttccagtggcttcccgttgttttaggatacagatcaggatcctcactgtggtctcccagggccactggcttcccaccctgtcacgcgccagctgtccagacacatgctgctttccgtttgccgtgctccttgcctggccccttctgtcactggctccatgtacccttccaggcctcagcttggtgatgctttccttccctcatcaccgcatccaaggagatt

SEQ ID NO: 654 - DNA, 1288 bp, Homo sapiens
cgaactctggcctgggctctgagtctgggcctcgggagagggccaggtaagtgcctcccagtctgtccagtccaggcggctgctgccctccctgctccctgcccagcctcctgcccctcctcccgcccatgccccacacactgcccaggtaagttctgtgtctgtgcctcatctccgcccccactctgtgctggtcacactagcttagctgatgggccatcctcggtgggtctgccatgtcccagacctgctttggcggctgtttctcctccctatggccccgcatctcgtctccccatcacccacattcccttcctcatactccccatgaaagttacctgagagccatgtgatcaccctgagctgactgcactcggggacaggtctgagaatgcggccatgtgacccagcctgcccacgtgtgccttgaattgtgaccacgtggccgtgcaggggactgtctgcaaggctgtctgtgtgagactctggtgttgtgtgtgagagactccgatgctgcagctgtgggagtggcactgcccatgagtgtgagtgtgtgaccacacctgaccagctggctgtgcagcacctgtgtatgtgcatcagtggatcttgggcatgacccttgtctttgtgggcgactctggcctgatcctgtaaccgtatttgtgggtctcggtagccccccagacagtagactgtgtgtgtgtgtgactctgtggttgctgctgggcgtcctgtgtgtggtcacacagccacagtcagctgctgcgtgagactctgtgtgatagggtgtcatggatgtgactggctgggtagcattgtgggattgagatggtgaccacatctgatgtggccatgtgatgaccagaaacatggcggtgtctgaagtggtccttatgaagtgggttatggtcacaaggtaagccaccgtgcctggctcttccatcctactttacacaaatgtcattaaaagctcatttggaggccaggcacggtggctcacacctgtaatcccagcactttggggaggccaaggtgggcggatcacctgaggtcaggagttagagaccagcctggccaacatggtgaaactttgtctttactaaaaatacaaaaattagccaggcgtggtggtggttgcctgcaatcccacatactcgggaggctgaggcaggagaatcacttgaccccagcaggcagaggttgcagtgagccgagatggtgccattgtactgcagcctgggtgacgagcaaaactccgtcttgaaaaataaataaaataaaaaag

SEQ ID NO: 655 - DNA, 1024 bp, Homo sapiens
tactccgtggcctacgaggcggtggacggcgaggaccgcgggcggcatgtggtggatggcatcagccgtgagcactccagctgggacctggtgggcctggagaagtggacggagtaccgggtgtgggtgcgggcacacacagacgtgggccccggccccgagagcagcccggtgctggtgcgcaccgatgaggacggtaggcagtgccaccggggcgggaggggaggcgttctgcctcagacaccacccaccaagctccccagggccttcctttcctgaacacaggcccaggtcaactcatctttctggttcaggtgtaatggcctaaagtggggggatgtcacttacgggataactgaggcccaaatcccagcctttggggctgtctccaaagcagctgaaaccttcacaggctaagatgggagaagcagccctgtctaagatttgaaaggtcaagattgggcagattggtgtaaaagatactcaaagtagaatcagcaagactccacgttggctggacattggcatgattggggcctaggaggagtcaggacaggttgtgctgactaggggtggtcaaagacctggtgccccacctccacctgttcccccatgtcgaccctccccaccaagtgagaggcctgggccagaggggtgggcagggccagtcctgggctcttacccgtggcgggcagagggagccttccgtgtgcctcaccagggacagatgatctaaggaaactgtatcagggcctttcctgggggagtggggtgctgaggcaggaccctcaagtttgctgtgcccacctgagctagggttgatacctccaggcctgacttccttctctacctgaccccccagtgcccagcgggcctccgcggaaggtggaggtggagccactgaactccactgctgtgcatgtctactggaagctgcctgtccccagcaagcagcatggccagatccgcggctaccaggtcacctacgtgcggctggagaatggcgagccccgtggactcccca

SEQ ID NO: 656 - DNA, 1063 bp, Homo sapiens
tggcagctgaatcctatggtctgtctctgaccctgtccttgtagatgggaaaactgaggccagtgagagaggactctgcccagctagggtgacgcctttcccgtccctcccctgctgccctgggcatttaccctgatactctgagggccaaaaagctggggccctgtctcctgtgctgtttgtgtattttatgtgtcatttgcatgtttgttcccggtggttcctgctactcagctgggtggccttggagatagcagtcactgtcctgcagtgacctgccttctatccaaaggagctgctcgcccctgcaaccccttcctccctgctgcactgcccctctgctcacgccacactcctgctctccctaccccctccctgccctgtgttctctcatgtcaaggctgttctggccctggctcctccgcgctcagagatcctgggaagaggtggggcagtaggaggacagagccgtggacatgggggctccttggcagccagccatgccatgtgtcactgtctcagcctggacctcaggttctcaccagcctcccttctgtctctctaggaaaaggacccactctccgtcctctaaggatgagcagtcgatcggactgaaggactccttgctggcccactcctctgaccctgtggagatgcggaggctcaactaccagaccccaggtagggcactcctatggcctgtgtgcccccagcccagacctagcaggcctgtgggtctgttctgcaggtctcagggtcgccactgaagttcctgggccgcatgcacttgttcctgctccttttcttcctttctgcccttctccctgtgctcatccactttggttggaatgactggggagcccccatatcctgcagctggacaggtgccccaggccaggaccctcttaggtggcaaagccacttagccactgccttgtcttcagtcaaggcctctgaatatgggctgaggacctcccagagcccacgtctctgccacagggtggccagtgtctggcgcacgctctgacgcctccacatgaaagaggggcatgttagcagtggg

SEQ ID NO: 657 - DNA, 1290 bp, Homo sapiens
gggagagcctggcaaggcattcctcatcaccatcgtgtttgcaaaggttaaaacaaaaacaaaaaaccacaaaaataaaaaacaaaaaaaacaaaaaacccaagaaaaaaaaaaagagtcagcccttggcttctgcttcaaaccctcaagaggggaagcaactccgtgtgcctggggttcccgagggagctgctggctgacctgggcccacagagcctggctttggtccccagcattgcagtatggtgtggtgtttgtaggctgtggggtctggctgtgtggccaaggtgaatagcacaggttagggtgtgtgccacaccccatgcacctcagggccaagcgggggcgtggctggcctttcaggtccaggccagtgggcctggtagcacatgtctgtcctcagagcaggggccagatgattttcctccctggtttgcagctgttttcaaagcccccgataatcgctcttttccactccaagatgccctcataaaccaatgtggcaagactactggacttctatcaatggtactctaatcagtccttattatcccagcttgctgaggggcagggagagcgcctcttcctctgggcagcgctatctagataggtaagtgggggcggggaagggtgcatagctgttttagctgagggacgtggtgccgacgtccccaaacctagctaggctaagtcaagatcaacattccagggttggtaatgttggatgatgaaacattcatttttaccttgtggatgctagtgctgtagagttcactgttgtacacagtctgttttctatttgttaagaaaaactacagcatcattgcataattcttgatggtaataaatttgaataatcagatttcttacaaaccaggactctgtctcagctgtttctggaaccaaagagtctgggccaaatcagtagctaggatgggttctggagattccctgctcctgaggagacggggagggtaccctaagtatttgtgccagtgtaggctcctggcatggctacccactttcagaaaggagtggttataaaccctgaaaaccaggccaccaagagccagccaggccagagccaccagtgcatgtgaagagcaccctaggccggggagcataccctttgcctctctttccctttaagattctgtgggttgcactatcggggcattgggactgcccctctcccactaccttggaggagagggatggccctgtggcagtagagactgaatgtatggaaattggttagtgagatctcctgtaattattgcaatgtggata

SEQ ID NO: 658 - DNA, 1023 bp, Homo sapiens
ctcggaagctgcccctaagggccccgacacatttccacgttaggcaaagaggatactcatcccaagaaaactttggcctatcctttcgttagcgacatcctatagtaacctcaccgcccttacccatctaccggaccggcccacttccaggtactagcttctttcaaccctgattagttatgggtgaccaggagcccgcctatgattggccagcttcgcgatccagctagaggctcactggccgcggtccctagtggtacagcgtttcctcccggcaacagcccgagccggcgctcataggctgagcacactgaggtcgggactgggaggtggctgcggcgcgtgctcattggctggtgtatggcttgcagccacccttgaattggttgactctgtacggctgcgcagatgccgactttagaggaggcggagtttcggccttcgcctgctggaaaagcagtaggatcggccagtggcgacagcaggagctgagcctaagccctggcggggctttgggctgtaggtgagaactatagggttttggaattctcgaggatcattgccgctgtagcagtgaccgtgagttttggtgggggaggggcggtgggggtgggtcttccagcggtgagtgatcggcatgtttctcggccaataggagaaggagcttccagaatgggttctgagattggtcctttccaatcttcaaggccaatggacctcgggagaggggggcgggtcatctgggccttattttcttcttcctgcggccgagcttcactcgccaaggcggcggggccgggaggggccgaacctgtgcgcggtgaggttcggggacggtggggagcagggtgcgctgcctttggagtgatgctcgcgggagcggctgcgagggaagggtgcgggagtccgagggggttgttagcaacagctagctttattgagtgggtaagtaccgggcctagtgcttagtgcttcgcttgcatcatctgagctaatcacagcgaccctgcagggcagggggtt

SEQ ID NO: 659 - DNA, 1056 bp, Homo sapiens
cccggggaagggccccaacattgtattcacatgattgtatgtttttataaaatgtgcaaaagtaagatattttggattcatttttctttttaagagggtcttcaaaattaaataaacttcgggtttctccacacttggagctgcccttgcagaggacttagtccaggtggagatgagtatgtaagcagtatagagcagtggaaggtgcacttaagagtgggctgtgggcaaatttcctggtatgtaaaacagggagaacagtatacctgccatgcaaagtttctgccaggttcatgaaaagcgcctgtttagaaacacgccttatttttgataggaagcctaggagatacgggtaactggatttgccttctctcctaccttacacagttgtgctccgtgttctgctcccaggcctgtaactagatttctggtggattggaggcgcttttctcctttctgagctctccaactctcaaagagagtcttggagctgaaccgccatacctttgggccccagatagggggtacggaactgctggaccctcagtgaggagggtgggtaaaggaaaggacatactggtgttccttctagaatggcctattttcattgatatgctttgtcttttttcagttgaggtggtctattgcgttaccgagctgtggggatgcacccacttagctgaagttctcatctaaaaacaaagtatttattttgctttctccaatcagttatgaagttttccgtgtattgccagtttaaattttgtcctttgagttctgggtacagtgcaactgaacttgtctgtagcttgatttcattaagtactgctgaaactgcatcttagtttcaacagaacagtttcactttagggttttaaaattatgttactaatatcaaagggcttttaaatcatgttactaatatcaaagtacttttgaacccttaagttttgttatcttgtagccacgtaacttttattaggtatctggtttagctgtgccctagggaggagccttggcctcccaaagtgctgggattacaaggcgtaagccacc

SEQ ID NO: 660 - DNA, 1024 bp, Homo sapiens
ccacacccccaccctaaattacttttctttctttctttctttctttttttttttttttttttgagacggagtttcgctcttgttgcccagtctggagtgcgatggcgcaatcttggctcactgcaacctttagcctcccgggttcaagtgattctcctgcctcagcctcccgagtagctaggattgcaggtgcccgccaccatgcccagctaattttttgtatttttagtagagacagggtttcactgtgttggccaggctggtctcaaacttatgacctcaggcgatgcacccgctttggcctcccaaagtgctgggattacaggcgtgagccaccgtgcccggcccctaaataacttttctagaggtagattccaggtgtgaagtcttaactgtgtcttttgaatttctatattatcttttactgttttcagagttgatgtttccagcacttaattttaatttttatattattttatactcttaatgtgtttcttcagattcctgtctgactaaagggacctcaaaaaggagggaaaatggcttctgagtctgaaactctgaatcccagtgctaggataatgaccttttatccaactatggaagagttccgaaacttcagtagatacattgcctacattgaatcccaaggagctcatcgggcagggctagccaaggtaaggagctgggattgttcaaatggttttgttacctagggcagagcagtaagatttttttcctacatttgggccggaactgtgttttactgaaagttgggtggggtgatgactttagtgaatgcggttctatttgcaagttaattcccgttgttaacatcagaagcatctctgcttttaggtaggaagagagctacttggaatcttcagaaagggggaggtaaagagctagtgtctccaggcctggctgctgttgtgcctcagccctcttggtggagctgggtgctgtggtgttattgaactgccagtgagtgcttatgccatctgacttctcttgctctcatttc

SEQ ID NO: 661 - DNA, 1026 bp, Homo sapiens
agagtcaagtttttgtgggaattttttggggtgggaggtgcaggaagccaataaataacacctgtcctttttcctctcaattcggaactatttaattgatgatacaagagtcaggcatatggagctcagaatgtcgctttatttacaagttaaaatgattgaagaaagtgacttttaacctgtgactaaatggccctgctactttttttttttttgtggggggactgagtctcgctctgttgcccaggctggagtgcagtggtgtaatcttggctcactgcaacctccacctcctgggttcaagtgattctcgtgccccagcctcccgagtagctgggattacaggcatgcaccaccactcctggttaatttttgtattttttttagtagagatggggtttcaccatgttggccaggctggtctgtaactcctgagtgcccgcctcagcctcccaaagtgctgagattacaggtgtgagccatcgcgcctggcctactcatttactcttgatgtctccaggcccctctagaggcaaagcatttccatggaagcactcagcttccatgtggtgtggatgtaggccagaatgcactccctctccaaaagacagatcctagtgaagtgaagcacagctttcaagggggtggggagaagaaaagccaggactccttccgtgtggaagtgtgctaggggaaggggtcttctctctgacatgtctctctttttcagtcctctgctcaaaaacccttgagtgtcttcttggttcctttttatttcggtatgtacttttcaggccgagcctgatgataataccctaataaataaccctctctgctccatcgccaaccatccctccacctccaacatgtgctggcttgtttgtttgaactacttaaaagtctctaaaactgtcttggctgccctgccacttccctctactttctaatcatttatggcatgcctactctaggccaggactgtgccttcaaggagctcacagtctaggatagataggtaagagcaaa

SEQ ID NO: 662 - DNA, 1044 bp, Homo sapiens
aggaaattggggggactgatgagttagtagttttttcactgatttattcttcaaatgtttattgagcatttactatatgccaggcacagttttaggtgccaggactataccattgaacaagacaaaaaagtccttgcccttctggtgcatacagtatagttgaaggacacatagaagcaagtaaatacacagtatagcagatggtgagaagtgcagggataaaaattaagtcagataaggggaatggaagatgaagtagtaaggaatgacatcaataagttgacactgggatgggagtcagtgtgcaagtaactggggaatggcatctcaggtagaagaaccagcagtgtcgaagccctgggtggcagcacatatggcacactcattcagggaacagcaaggggggccagcatggctggggcagagtgcctgggcaggctagcaggcgtgcttggaaatgaggccgtcacatactttgtgatcctgtttgcatcaagggcaagttcagaatgagaagggcatggttgagggcaccagagatggcaatggcagggcccttggaatgggggacagtttgttgtgtgtagctggagacatctgggaaacctaagtctttgtgccctagccctgagggtaatgctgcaggtgctaagatgtggtgcagctttgcctggcggcccaggcctcagggcacctattgagtctctccttcgatactttgatgtcagttcttggcaagatcagaggtccatgttgttgttcagagagttctgggtaagataatatggtataagggccagttgtggactagctaaatttatgggaagagctaaatttatggaggaaatgtggtactggtctcttccaatgtcctggctgggatggtgggtatctggaaaggcttgttttagctcccatctcttctctcctttttacttttactttcccatgcttatctttccctgataaggaggaactaattgatcttcatctccatatgccaggcctgcaaactccacgtgtgagtaaccaaagcctctgttt

SEQ ID NO: 663 - DNA, 1023 bp, Homo sapiens
tgcctcagcctcccaagtagctgggactacaggcccttgtcactggcgcccagctaattttttaattttttgtagagatggagttttgccttgttgcccaggctggtctcaaaactgggctcaagcaatccgcctacctcggcctcccaaagtgctgggattacatctgtgagccaccactcccagccaagggaggtattttaatagtctttcaggtaattgtgtttattattctctgatatccaccaaaactcaatggaagtaacaactttttttgtttgtttgtttgttttaagagatgatgtcttgctttgttgaccaagcacctcccgagtagctgggactacaggcatgcatggctatttgtagaaatggggtcttgccatcttgcccaggtagtctcaaactcctgggctcaagcgatttcttttgcctcaacctcccaaagtgctgggattacaggtgtgagccactgctcctggcaggttcttaaaagttagttgcagtgtggaatctgaaaggtcagtgaacgtttcatactgttaacactaaaacccattggtctcttctgaatggatctttcacccatgcatccttttataacatcatactttggtcatttagaaaatattggtgcactggcctatcgacagcctccaaatgttgttaaatattattataaatttaatttttttttttttttgagacagagtctcgctctgtcgccaggctggagtgcagtggtgcgttcttggctcactgcaacctccacctaccgggttcaagcgattctcctgcctcagcatcccaagtagctgcgactacaggtgcacgccaccacgcccaactaatttttgtatttttagtagagagggtttccccatgttgtccaggatggactcaatctcttgacctcgtgatctgcccgccttggcctcccaaagtgctgggattacaggcatgagccaccacgcccggccataaatattttaaaaattacatttgttagtatcactaataatc

SEQ ID NO: 664 - DNA, 1034 bp, Homo sapiens
tgcagtgatatgtcttctcttaaaatagttttatttttactaacatctaccagataccagtatagaactcacttgagaagagagtcagtctctaggtacaaggtgaaagtgagctgcagtgagtgggaagaagcaacgggcaattggcctgctgttgttctaagaccctaacatgggaagtattacagtgaagtagctcatttatttctcccatggctcaaactactgaggcagtttcaagccagtttttaaaatatagtgttatatccttaatttactgttttatatagaatatttaagtgccttttaaatgcttagcttataattatcactaattacttgtgtttcaaaagtttacttaaatttctctgcactgacttatttttaaaaccaaggagactacccaggataaggagtgtttgtatcagtgaaatgcagaattctgtatttagaggcattcattgtctgtattggtagtggtggatccatctctatcaataatttagatggaaatgtgtgtgaagaacaagggtctccttttccgctaagggctgctgacctgtagaagatataaccaaggatcagataagattttcctagatcagtagggaagggaattaactttatggaagactcattgtgtttcaggcattaggctagacaatttacaaatataatttcatttaatgtaattcttactgcagttttgtgaagatgccattattatccccattttccagttgagcaaactgaaacactttaatttaccaaggttatattgttggaactggaattcaattcctgtctttaaaacctatgttcattattttattgaaaaatataataaatactgaaggcagaacttaatttaatattctacctggtaaaaagagagagagaaaggggctcagagaagtaatagtagagagtgtcaggaagggggtgtgaaaagaaaaggagggaaagagagaaagttatcaaaagaagacagagaggcttattaggtttgaaggtgacaagctgctattcacttg

SEQ ID NO: 665 - DNA, 1032 bp, Homo sapiens
catcagtcactgcgcctgacctagatatgttttgatacgcaaataccattgtgttacaattgcctacagtatttcagtacaatcacatttctaaatacactctatgatatttgcacaatgacgaaattgcctaacagcgcagttcttagaatatatccctgtcgttaagtgatgcatgactatatctgagaagctatcagaagaaataaaatggaatactaaaaaatatttagtcagtcccaaagaaggaaggaaattttgacacatgctgcagcatgggtggaccttgaaggcatcatgttaaatgcgtaagccagtaacaaaaggacaaatactgtaagattcctcttatacgaggttcctagagtagtcaattcatagagacagaaagtaaaacatggctgccggagactggaacagaggggagcggagagttcaatgggttcagagtttcagtttataagatgaaaagagttctagggctgcatggtggtaatggatgtacaacagtgtgaatgtacttgatgccacagatgtgtaaacttaaaatggtaattttttttttttttttttgagatggagtctcactctgtcacccaggctggagtgcaatggtgcaatctcggctcactgcaagctccgcctcctgggttcatgccattctcctgcctcagcctcccgagtagctgagactacaggagcccgccaccacatctggctaattttttgtatttttagtagagatggggtttcaccatgttggccaggatggtctcaatctcctgaccttgtgattcacctgccttggcctcccaaagtgctgggattacaggtgtgagccactgcgcctggcctagtttttgtttttttttttgagacaagtctcactctgtcacccaggttggagtgcagtggcgccatctcggctcactgcaacctctgcctgctgggttcaagcaattcttttgcctcagcctcccaagtagctggtactacaggcatgtgctaccatgcctgactaattttttttgg

SEQ ID NO: 666 - DNA, 1050 bp, Homo sapiens
gtgggagcatcccagtttcctgaggacatacactccattgcatgtttacatgcacaccccatatattcaaatacagacctcttccaggagaggagtaccacactgtactgtgtactcatgccaaaatgcatgtaggtggacacactccttctcttccctgtttacagtgcaggacacacagatcagcacacctgccccaaattcacccagacccagtggagcctggctctgccatgtctagggcagtttacctgttccacatcactgtgcctgttgacaggaagtgggaagagactactttgattcctcagcttgctgccattgggtccctatgggagcctcagaatgacgtgactttgagggaagagtatctctgtgtttttaggtaaagtcaggtgggcctcataccatgggtactgccagtgaatgccagggagactgctggcctgttgagggcagttaattcattttgccgtccttagatatggtagattgatgattcacaaaacagccatgagggtcaggcagttgtagtagagtggacaagaggaaagacattcagagaatatgatcacagccaccactatttactgagggtctgcctgttttactgtgtgccagcactgtgctgagtgcttgatacacctctcagctatctcttacaatcgctttttatttttattttttttatttttaatgtttatgggtacatagtgggtgtatatatttatagggtacatgagatgttttgatacaggcatacaatgagtaataatcacatcagggcaaatggggtatccattatctgaagcatttacggtttatttgtgttacagacatttcaattacactcttttaattatttcaaaatacacaataaatttttgttgactataatcactctgctgtgctatcaaatactagatctccttacaacagctttgatatctttaattatagataaagaagctaatgctcaaagacatgaagtaacctgttcagggccattcatatctgtctaactctagagcccatcctctctcccttagc

SEQ ID NO: 667 - DNA, 1028 bp, Homo sapiens
catccattcagtacattatggaataccaactctgtgccagatgtgatattgggtgcagaggtgagccctgccctttatgagaacccaaatacatgtaagctaggatagtttaattgaaagcaacaaaaactgactggggataactgtttttaaaaaggaatttaccagaaggacatgggtacccacagaatccaattggaagctaaacatcgagccctcagaaagaacatgaagggcagccccaggaatctaggttgcaggaacaagtggtccccctcttcagcacattatttttctccctcgtgtcgctgagtttagggaagaaattgtcccactaacctagcttttgtcaggtgcctacactttggacataaatcccatcgacagtctcaccacttgcctgcaatgggagaagagcagttccctgaaggaaacccaaggggcttgtttctaaaaggacagaaacaacagatgtgcattgcaggttcatgaataagttctggaagggctggagagcacagataaggtgcatttaggctaacaagttagatcagagaagatgttgttcgttcaacattccttccacatgccaagcatagtgttaggtgatgcacctgtgaggaaaagaagagtcttagtggaacttctagactagcagaggagaggcgtctgtcggtaaatgtataatcacaaactggagaaagtacactgtggcacaggagcatttgaagggtgaggtctacatagggaggacaaggaacgctcttcttttttttcttttcttttttgacggagtctcacactgtcaccgaggctgaagtgcagtggtgcgatctcggctcacggtaacctccacctcctgggttcaggcagttctcctgcctcagccttctgagtagctgggattacaggcacgcaccaccacacccggctaatttttgtatttttagtagaaacggggtttcaccgtgttggtcaggctggtctttaactcctgaccttgtgatccgcccaccttggcctcccaa

SEQ ID NO: 668 - DNA, 1040 bp, Homo sapiens
atggatggatggatggatggatggatggatggatggatggatgatggtaggatgactgcgtactttcctatttgacaagcatgccttgagttgcagctctctctactctgtgtgttcatgtccctgcaagcctgctcacatggccgatgctcaataaatccttgcagaaccaccttactacctactgtgattcctttctattgttagtcatctttgtgcacctgtgtcccctgccctgtaccaggcggacatcatgaaggatcagaattgtgtctctttccttttctgtcttgcataagaccttttccacagttgactctgatgacgatggccacacctacgtacaagacatcaaaccaggggctggttggttttcccactgaatggtctggcgtctggcttcttggctctggtgcctcatactatgagttcaggcattgtaaatctcccaacttttacacattatgaaggcaactatgaaggaaaaagtgtgtgttctgtataccaggctagtagagagatgtcagcctcatgttaacatctagggaatggggtatttgattgtggtagaaagccataggcttcactcttagaaaatccttaatttagtactctggaaaaaaacaaatcaagtataagccgtaagcaagtgaaatgccaccagaacggaagagatagagtaattaccaagttgaatcacactgatgaacaaaaggcatgttctctaggacatactacagtatttaaactgtcttcagcagtgaaaggaggaggatgaggaggacgctcatctcctgctgtcctgacagttgggtcctgcagagtaggctgttgtgtagctttctgttgtgtatcaggccagttctttgaactatgtgagttaacttggtctttagcacagtaaattggcttggcctcatttgatttaactcacaatctaaggtacaagctagaactgtcctgcctctagctgcaaaggtttttctagtccagtgctgtcttcagaagtccagtgctgtctctcctgtctcacagatacc

SEQ ID NO: 669 - DNA, 1033 bp, Homo sapiens
ataagctggggcttagcacatattagagacacagacggtagatgctggtcaccaacaggaccgtgcctttgggctttgggttatgtggcctctgcagacaatctggccatcaaccaggctcttcctgaggcaggggcgcctgcctgacatggcagcttctcagcacacagtttcctcccctacgttccccacttccctccctccttcctctacacaaggcacaggctgtcagcagagtcagtgggagcctgtcagcaggagcccaggcactgcccccttgagggcctctggctcagcctctcctctcctccttcagcacaggcctccctgcctgtcacacatgtcatgcatgtggctccagcttgtctggacacggatgtggccacagttcctaggcaggcggggtgggggcagtagctggcagtatttcagaatggggggtgggggtgtctgtgaacattggaaacatcactggaagcctggtgctttggaacagggagatcaaagtgtccatgaggatcacacagaggcggtccccagactgccacaggtgagcaggaattggcctggattagccctggaagatccacatggtggaggctgtcaccccaagctgctcctgtctcttgcagctcacaggcatttgctgagcacctgctatgtgcttggctgcaagccggggggtgctacacagcctgcgggggaactgggcaataacattagcatgtgctaagaggtcactgtgcacaaagaacactgatgacccagaggagggtttggtcagccctgtgtggctcagggaagacctcagagaggtagagatgctgcagtccagtcttgaggaatgagcagaagttcagcatgtgaatgataaggagacgagaaccccaggcagagggaacagtggtatagaggcatggaggcgttaaagagcctgatagactctggaaattatacatagttgtacggggctaaagcatagggaaagggaggagaagagggggtatctgaggctggagaggtagacaggagc

SEQ ID NO: 670 - DNA, 1020 bp, Homo sapiens
agagagctgatggctgttagagtcaccccaggagagttggtggtccgtcctaaggcagtagcagcagggagcataggcgtggacacatctgcctactcttgctgtgaaagcctaccatggttaatctctattcccagacctgtgagcacaccaggaaacattctctcaggagcctggtggggaaagtgctttcttcccagatgttttccccattgctcctggatgttctgacaagagcagaacaggttgcatcagcaggagtctggcagcttcacacaggggagctgggtccagacttgactgaggcagggacattcctgaaggaggagggatttgacaaggaatgcagcccacagctggccttgaggagaagctggaccatgccgggccagcagcactggctggctttgtaggcctctgttgtgtcctgtggattggggaaatgagatgtgagaagccttgggccagatgtggacacttgcaggcagaggccttgtggaataggactgtgtgctggcagcagggctggcagtgtctccagcagcaggcagacctccccaccgggagccagggggaaaggctggctctcccattcaaatgcatgtacgtgtgcaggtatggatatgtgaatgtgttccggcctctccggtggctgatgttgctgaccacaccctccgcttcactctcctggcctctgtgacactcactataatcataataagtaagatttattgagcttgctgtataccagaccccgtgccagatgctgtaaaacgcacagcatctctaatccttacagctatctgggaagtaggtcttctcagccctattgtatgcacaaggaacttgaggcttaaagagaggacacaatgtgcccctggtcacagagatgtggagctgggattaagcctctgtttttcacactcccaaagctgcagtggtacacagatgttctgtgtatgtgcctgtggacgtttttctgagaagaggagttacagcttttttttttaggaaacaggc

SEQ ID NO: 671 - DNA, 1027 bp, Homo sapiens
caaacggagggagctgggctggcatcgggtggggaatgggaaagggagggggtggtgactgcgcccagcagcttcttgttgcccaagaagttcacgtgtagggctggagttgaagggtctggggtacactgtccccgtgctcctgccgggaactgcctgcctcagtgcccccagcctgctcctgagaggtaggctgggagcagctccaaagcgaggggctgaagaggaatgtgcgcggtggagcccagagttgggctgttggagaggttgagctgctgctaggaggtggagtgcaggctccatgctaggatgtgtttgcattttgtatgtgtttcagtgtgtgagaccttattttgtatgttttgagtttggtttgggaagggaacagaaatcacctgtaagtagtatgtgaattgtgttgggtgctgagatgaatgtgtgccttgatgtgtgctgtatgttgatgtgttgtgtgttttgtgttgtttgttgatgtgttaggccttgatggatttagagcgtggacgtgtgttggaggtgtgtgtgttgggttgtcggagtgtatattatggaggataggagtgtatgttgtggcattggtatgtctgtatcagagtatggtttggagatgcatgttgggctgtgggggtatgaagttagtgtgatgggggcttctgtgtgttaggggatcctagcacgcagaccccctaacctgtgaattggggtaaatggagtgtttctttgcttaatcattccacagatatttattgagtgtgtgatacatgctgtactttgctaggtactgaggatatgatagcgagcaaaaccaggcacagttcttgctctcctggaacttacaagtctagtttctgggggatgggtagggtgggaggagggaagaatagggagtgttctgggcctggatggatatgtgtgtgggtgttttcaaaggtgtatctttgatgcggagggtgtctgaatgtgtatttgtggatgggtatgttggaagagtgcacagggggactgt

SEQ ID NO: 672 - DNA, 1617 bp, Homo sapiens
tcctgacggagacttcgcccttcatgtggtccaacctgggcattggcctagctatctccctgtctgtggttggggcagcctggtgagtattggggtggtgggactgggggcaggggctgagtcatggcaggtggtgtcactggggtcttaggcatgctgagggcagtgacagcttgggctctgctcatcagttttttatccttccaccaggggcatctatattaccggctcctccatcattggtggaggagtgaaggcccccaggatcaagaccaagaacctggtcaggtaagtgtcagggtccttggacttttgtcagaaccagctgtgttggcgctgcctgtgtgtttgatctgacatactgtttctgacaagccaccttgtgggatgggatgttataggggaaagattgctggggacttactgggcaggaaggacggtttctttctcatttctttctcctttccactccttacccctaatctctaccactaccagcatcatcttctgtgaggctgtggccatctacggcatcatcatggcaattgtcattagcaacatggctgaggtatggaaggccagggtggtggcgggaatccattccagtgtgttctacacattccttagagattggatggggtgcatcaggatggtttctgattacttttcttcttccctcagcctttcagtgccacagaccccaaggccatcggccatcggaactaccatgcaggtgggtggatgggcgtatgaatgcaaaatgctgggacttcatgcctgcttccactctcccccatcccagcttgggccatcattttgatattctctcacctactttttctgctttgcagagtggggatggtgattggccccattagcccatatctcccccattcctggcttagcctcactgcacccctctctatcctcccaggctactccatgtttggggctggcctcaccgtaggcctgtctaacctcttctgtggagtctgcgtgggcatcgtgggcagtggggctgccctggccgatgctcagaaccccagcctctttgtaaagattctcatcgtggagatctttggcagcgccattggcctctttggggtcatcgtcgcaattcttcaggtgatgaatccccttgggaagcctctgtgtccttgtccccaacctagccttaccctccttctggagaagctgaagtgctctccttctctacctataactatagattcccccaaacagcttccacctcctcatttccatcttctggttttctcctacaggggctctctatttttgtctctgatttggtgtcactgacaacagccctgttctttttcccccctttctaatgcgttgtatctgtatagcacttagtcctccctctttctgttctctcattttatctgccatgcttttcatgtctccagtctgtatttgtgatctagactagaatggaattttgtctgtctatatcagtctgtcatggtgtgtttgactgtctctcggagctatgtgtatctccctctcacatgcctgtcagtaggacaccattgtctaaattgtgtgtgtctagtctgtctgacagtgtgtgagtttgtgactaaggatcagcct

SEQ ID NO: 673 - DNA, 1025 bp, Homo sapiens
cacctggaactcccaaagtgctgggattacaggagtgagctaccatgcccagcctcaattttgctttaaaagtccttggtgaagcagtacaattattattattattatttttttaaaggcatctgttttttgtttgtttgttttatactttaagttctagggtacatgtgcacaacatgcaggtttgttacataggtatacatgtaccatgtttgtttgctgcacccattaactcgtcatttacattgagtatttcttctaatgcaatccctcctccagtttcccaccccacgacaggccccagtgtgtgatgttcccctccctgtgtccaagtgttctcattgttcagttcccacctatgagtgagaacatgcagtgtttggttttctgtccttgtgaagcagtaaaattattgttttgtggtttcatgtatcagtagttattttatttttattatggattggtatttcatcatacagatagataatttgcttaaatatttacatgttgatggacatttaggctgttttccgtttcttggtattatgaataaaattggtatgcacattcatgtgcagatctctgtgtggacgcatattgtcatctctcttgaattaatactttggagtgggattgttggagcatatgacaggtacttttataagaaatttccagtttcccaaagtggctgtactattttgcattctgatcagcaattttgagacttctagttgctctacattctcaccaacatttggcattatcaaccttttaaactttagcaatggtaataagtgtactgtggtatcttattgtggttttaatatgcaatttcctgatgattaatgatttgagcatcttttcatggactttttgccattcatgtatcttccctagtgaagtattcattcaaatcttttgactgtttttttttttaattaaaattctttttgagacagggtctcactctgtcctttaggatggagtgcagtggcatgaggctcactgcagccttgacctcctgg

SEQ ID NO: 674 - DNA, 1035 bp, Homo sapiens
aggacagggaatatgtgtcatccttgatgggagggaggagatgggacatcgtgggagatggtgggaccaagagggtatgacacctctaagagctgagaggaccaggcaagtgtgatttttgcaagatattgttggggagagatcaagacattgtaacagtctgagagttggtgggatggggaggggactgctctgatttgggcgtaggatggtgttcctgggagtgggtttctgtgcctttacagtgtgtcagtttgcctgtcattgaccctgtaggtgctgctttgttcagggattgagctggactaaagaattttcaggaaagggtctaggttgtggttcctttctgtggtttccttcctcagaaaaaatccaagaagtcctctgagacactgactttcaagaggcccgagggcatgcaccgggaagtctatgccttgctctactctgacaagaagcaagtattggagtcccaagtcccccaggttttggcccctgattcacctgccatgcccctaactcctagttttctctaacaattttctcctccccagcaagggctcctgcttgcttagcaggatgcaggaggacctgaagtcttttgctccaggacatgactttcttgctatagggtagggtagatcagctccctgggacaaaaagctctttaacacaccttctgattctaacctcgcatctccctaaacctccctgccagggatgcacccccactgctacccagtgacactggccagggataccgtacagtgaaggccaagttgggctccaagaaggtgcggccttggaagtggatgccattcaccaacccggcccgcaaggacggagcaatgttcttccactggcgacgtgcagcggaggagggcaaggactacccctttgccaggttcaataaggtaagctaccttcattcggacacaggccaagattgccctcccactttgagccatttgtgcgagctctccagtctcctagggttggttctgggggcacgcttatgcccaactgtgattaccc

SEQ ID NO: 675 - DNA, 1069 bp, Homo sapiens
ttagacacttaactacaaaacaaaagaatgacttttttttttttttttttttttgtcacccaggctggagtgcaatggtgtgatctcggctcactgcaacttccgcctcccgggttcaagcgattctcctgccttggcctcctgagtagctgggattacaggcgcatgccaccacgcccggctactttttgtatttttagtagagacagggtttcaccatgtttgtcaggctggtcttgaactcctgacctcttgttccgcccgcctcggcctcccaaagtgttggcattgcaggcgtgagccaccgcgcccggccaggaatgacttcttaaaccaggatttgattttggttgaactttgctttcagaactagaactacctgctatccaagacttgttaaccacgttttcatgggcaaattacaaaaccctttcaaccccagtttcctcttctataaactagtggtaatattattatctccagaattaatcttaggagtaaatgaaattatgtaaaggcatttagtctcataaccgggctcctagaaagcactcaggaatgttagttctctatccatttcccctgtttatctttgtgtttgatgaattataggatgatatgaaatgatctgaaatgaactgtaatataaacatcaataaaacaccaataaaaaattttattctcacatctggatgctatactaggccttcacctcctccaaaagttacagttttattaatattcatttattatttattattatagtcaaagacccagagaagcattccaggaacaaagcagcaggtaagatttttctgggaaaagacagagattttgagggacccaggatttgggggtcatttaagcagcagtggatgtcagtcttcaagctttgcccatttactcttggtcccttttggttcaggaaaggaagaacaacaagcacgaaaccattcactgagacctttgcgggtgggggaggagggatgtaaacaaaagccaacgctctctttagttcacaatggctcgcgaccccaagacttccaagctctttggtgagggccagcag

SEQ ID NO: 676 - DNA, 1023 bp, Homo sapiens
gtatcggcattgtgttggttcatttgattttattttagttttcatttgtccagtgatgtgcaagtgatcaaggctagttataatgtgacctccagccaaaactgccttgtgttagggtgtgacagattccgcccctttttttctccaaatacaagttgaaaatgaaatcttctcttagctaatatgccacaaagtaacatctggagattgagatctctttcttcttacctaacagatccagcttgtctccatttttctatctttttagcccaaacctgtatccgactccagagcaggaggaagcttgttagtcaagtcagaactcatagacgtggatatccattcccctctgagtgtcaaagccataactcttctgtttgcctggtttgcattgtgtggtggtggcatcccccatggagatggatccctcacacaggagtacgcctgggtggagaaaaattaaatgagtctgtctcccaaagtgaaatggaattctgaccttgaaattaatgagattctgatcagaagggtggggaaacttctttatttccaatgcggtgttatacaaattggagtccctttcctcttttattcatttaaaatagtcttcccttatagagtaccctgtgttctcctttttttttcttgtacacaagcataaaacctataggagtgtctgtgaggggagggtgttcgtacaccctcgttattatccagagttgcatttgtgactaatctttaataaaaaacaaaggtgcaaagtgaaaaggaggctgtgctaccctgtggtcaccctggagttgtgctttttactcccttccttaccttaggtggttagcacatccctcactgggtcatactagatagcgtttgtgcttttgattgcgaatttttggaaggcaggagaagtatttttctgtaaggaagggttgaagaggcactaagacaaagtctgcagcagctttcttggctcctgtcatatgccgacgtgtgtcggaatatttatggtctgttttatgtaaa

SEQ ID NO: 677 - DNA, 1035 bp, Homo sapiens
atcatttaaattgtggcatgtatggttgaacagaatgtgttgttatcctttgtaacttcacatgtgtgctacagggtaggaatttgtaagtatctctttctttgcagcaagaagaattttctgcgaaagaaccttcttacaccttttccaagaaaagatcctggattgggactacatgttgagcctggagaaatgataggctgtagtatgaatcagaacacctggtagatgctaagtaaacagaaggaatttatcatcttccagccttacccaatggattggacttttctgttatcttaatcacactactttagttttagtgtttaaaaaaattattattttttgtctggtaccaatcatctaaaagggtttagtgttcattgcatattgaataccttagtggtggcgattataatctagtttttactttaagttttcatcatcttaccactcttcagcattgcacagaacagcatctgtaagactatgtatgctatcccaaaggcgtagaggtttgaggaaagaaaggaagaacttatttatgccttgaggtttcatgatgatgaaggtagggagggagttttccaagaatttgtgaaatcacctttctcaaatatagacttattttattacttggggtactattaataaaaaatcgtttataacttaacaaaaatttaaatctacttttttctcctaacccttagaaacctaagattggagcctatcccctttccaaatgttttcccacagcattacatcccctatcgtggagtccacacatacggatctgcttttggtgtgtattttagaaaaaagtttccacctagatcctggccaaagttgcaaacagtcaagtgatgtggaggttttgtagacacatgtaaccatctggcaattcagatatgtggctgtcagttttctctgtggaatgcgttctggtttaagatgacctagaagaaatgaaagttgtgtttttgctggggagacatggtgctgtgtccagtacattctgttaacagatctgaagcttta

SEQ ID NO: 678 - DNA, 1055 bp, Homo sapiens
acctccgcctcctgggttcaagcagttctctgcctcagcctcctgagtagctgggattataggcgcctgccaccacacctggctaatttttttgtatttttagtagagacagggtttcaccatcttggccaggctggtcttgaactcctgatgtcgtgatccgcccaccttggcctcccaaagtgctgggattacaggcgtgagccaccacgcccagccaccaaaagtttatttttaaaagatgattcagaagactgtattatgggacaggcttataacctagcatttatgattgaatcttggagagatgaattgataaaactgaatgattcctctggttctgtaattactacttggttctatttcttccaaatggtcaagtggatgggattacagtcacaattgctgggaaagtgtctgatttgtgtgtgtgcgttgacaaaattagttttcttttctgaatttgttttttcttctgagttagtttgtaaaaaaggttaactgatggttatttcagttttaccgtccaaaaagcacagactggtctaggagctatatagtgaaggtagtttaaaaatgaaataagacggccgggcgaggtggctcatgcctgtaatcccagcagtttgggaggccgaggtgggtggatcacaaggtcaggagttcccagcctaaccaagatggtgaaaccctgtctcttctaaaaatacaaaaaggtagccaggtgtagtggcctgcgcctgtaatccaagctactcgggaggctgaggcagagaattgcttaaacttgggaggcagagagattgcagtgagccgagatcatgccactgcactccagcctgggcgacagagcaagacttcatcgacttcatctcaaaaaaaaaaaaaaaaaaaagaagtggtcaaatgcttgctgctttcttcaagtgagcaagatggggtaaacagcagatgtgagtgctaaatggaattccatttaaccagctctgtttgtggctatatctatgaaactttttctccacttaagttggcgctagagccacataggagtgggc

SEQ ID NO: 679 - DNA, 1101 bp, Homo sapiens
gcactttgggaggccgaggtgggcggattacttgaggtcaggagtttgagaccagcctgaccaatatggtgaaacctcgtctctactaaaaatataaaaattatccgggcatggtggcatatgcctttaatcccagctactcgggaggctgaggcaggagaatcacttgaaccagaggttgtagtgagccaagatcgtgccgttgcactccgtcttgggtgacagactgagactccatatcaaaaaaaagaaaaaagaggaaaaaaaaaatggaagaaacctttggataggttagggttagaatcttttctctcagctcagttcttccctctgattttaggaggagtcaaatccctctccttccatttccaagtttaacagaatcgtcctaatgtatatgcctccttgacacacaaagtccctgaagcaagtttccacttttctctgcaaaagctccctggagcgcagggagctcttgtcttgtatctagttaaatgcctcgattaaggatgtaatcatagttgtttggctctgtaaatcatttgaccctcacctaaagcagcctgggcctctggggggcccagcaatgaccattctgaatctgggaggacagagtggagctggagatggctttcacccttagtggaaagacagccagttttagggggggtaatatatttttctttttccctaggttttcttgtcgagatcgtgtgtgtgctcacacacacacatgtgtgagcaaaagagagaataaaaagaaagaggaaaaggcccaacagtgtacagcaactgctagcacaaaggccaggggagggacttgcagagaaagacaaggaagtgattttgcccagtttaaatcccacttgaaccatgtggtttctgagtcctgaaccttttgaggttcaagttgagtgcactcttgacaaaacatgattttctggttcacatcaaaaaggctttaaaagacttcgaagtcttttccttaggacatcaaacagtccacaacaaagcagggtgctgatgagatgcgtgcaaatgaacagattaaattctctcctgaggattagattctccttaagaagcatgtgaagttggaaa

SEQ ID NO: 680 - DNA, 1051 bp, Homo sapiens
ttgtttcctttttttgtcaaactagtctgcaacaatagaggatgtcaaccaaagttaaggaatgcagtgagctgggccagcagggtgacgggatgggtgcgcgtgcctgtggctccctgccaccttgcctttctccctctgatccttcttgccttttgcttctcggcagcactcactttgccctaactaggtcacatacgttccggacaggatgatattcatgtctctagaccatactggaaggttctggctttgaggttttcctgggctgtgaggtgtgtgtttccccacgtcctctgctttcctgggactacactaggcagggcaggaggaggcaggtgggcagaggaatagcagccgtttgttctggaggccccttccttctcccgtcttgactgcaaagggctggaaagtcagcttctattgtgattaagttataatttaaggcagtgaacatgtgctctgctggcggctataaagattcaaatcataaagttttacagtggaacggtttctgtaaaagcatcgttaggaagtgggaaccatgcctttaattcttatgacatatgggactgcctggtttgttttggtttcagtggagtttagtagggtgatggtctgactaattaaagtcagaccttcttcctctccacaatgcggtgccccatcacaggacagtgtagaaaggtggaacttttctccccatctcagctcatcagggatggcgggggcggggggcggggcgggtctcagaaatcaggagtaactctttgaaaactaaatagtttaaaatctcttccaacttactaggcttcatttcttggggagtctatgtgttcctctgttcctttctggccaggggcaaacctcaacagtgaaccaagcctgattgaagataatttccttcagaggggtcagctgagaagataattgggctctgtaactaggtcaatggtagaaacaaagagaataataatatcgtagctatctcatccaacttccacctaacttacatgcctggttaaccgacactctgtatatcctgtataaa

SEQ ID NO: 681 - DNA, 1096 bp, Homo sapiens
gctcacgcctgtaatcccaacactttgggatcacttgaggtcaggagttcaagaccagcctggccaacatggtgaaaccctgtctctattaaaaatacaaaaattagctgggcatggtggggcacgcctgcagtcccagctacttgggaggctaaagcagaaaaattgctggaacgtgggaggcagaggttgcagtgagctgagattgtaacactgcactccagcctgggcaacagagtgagactccgtctcaaaaaataaagtaaaataaaataaaatagaaaatgatgagttacgtcaaatgctcctgggagatcaaggacagagatgtacatgtcttcaggatttggcaatatggagggcaataggtcactttgagaacagtttagtggaatgacagggcaaattcaagttgacatgaattgaagagctaatagggggtgagaaaatgtatgcagcagatgtagacaacaccttggaggtgtctggggataaagaagagcagaagactgagcgtggtggcatacgcctgtaatcccagcacgttgagaggctgaggtgggaggattgcatgagcccgggagttcaagaccaggttgggaaacatagtgagactccatctctgcaaaagaattttaaaaattagctgggtttgatgacgtgcacctgtagtcccagctacttgggaggctgaggcagggggaatcacttgagctcaggaattcgaggctgcagtgagctgtgatcgccctgctgcactccatcctgggttggccatcatcctcagcaaactaacacaagaacagaaaaccaaacaccgcatgttcttactcataactgagagttgaacaatgagaacacatagacccagagaagggaacaacacgcacacagggcctgttgggagctggaggttgagcggggggtacttagaggatgggtcaataggagcagaaaccaccatggcacacatacacctatggaacaaacctgcacgttctgtacatgtatcccttttctttggtttgtttttctttagaagaaataaagggggaaaaaaagaagagcagaaaaatatgatggcaagtggagagga

SEQ ID NO: 682 - DNA, 1023 bp, Homo sapiens
ttggcctcaccctggaggccatcttcactgaattgtcccctaactcagtactactcagtacttgtgtcctgactcagtactactcagcacttttgtcctaactcagtactatccagtacttgtgtcctaactcagtactcatccttccacctgggcccatcactcctcctccttcaatctggcaccaccatctcttctctcacattttaaatatccctcttcctaccaatgcctttctctctgccttcacacaccctcaaatctcccctttaaatcttcttttaatcttaacttccaagcacattactctcccctcttcctctttccctttactgataaacttgttcaaaagacatctcactcacattgcctccacttccccacctcccattcagtcagcccattcactcaatgagctctatcccacttcttcactgacattctgatcacctcttctttcttcaaagccgctcttcccttagcttctctgactcatctctttggatcttatctacttctactcctgctcattctccttccccagcttctgcttgatgtgccccttcagtatcgctgcttcccagagtacactgcttcacttctctccttacttacgcatcttcccggggtgagctcatcatgcctgtagtttcacctgccacctaaacactgatgaataccatggctgcaacttcagcctcaacctctctcctgagcttcatgcccatattccagctgccaactcactatctctccttgaatccttgcagagcacctccagactcaacatattcaatactgacatcattatattcttccaagcctgcaacttaaatgatccatcagcaccatctaaccacacaagcagaaacctagtttgacctagagtcttccctttttctttccccgttatctgtcctctttcaccaaaggaaggaggaaaggaaggaaggaaggaagggagggagggagtaaataagtaaaacttgggaagtaggagagaagtgagttccttgccttgta

SEQ ID NO: 683 - DNA, 1060 bp, Homo sapiens
ctcatccccagggaatacccagcaagaggtcgggaggaccacaggagacaaccactcccaaacaatgatctcagttgcccactgtgaactggagcgggggtgggagaagaacagagcaggagcagacaggaaaatgcttgatctctgccggggccccagaaccatctgagccaaggactgctctccatccctgtcttctgaggctgtagattatagtgggtagtcacttgtgctctggagtcagacagacctgggatcaccctgttcctcttgttcttggccctgtgatcttggcatgctatttaacctctctgagcctcagtttccttataggtaaaatgggactaataccagtactagccagcacgaggttttaatgagttcatgcatgtaagtgctgagtgcagagtctggcacacgataaatcctttataaatgccactcagcattgctctggggctagccaaccttttcctccctgttgccctgtgttttaagattgactgagggctctatagaactgtcctccggagaaggagggaagtgcatctctagctcacctttctggaagttatcctttcaatctccaaaggctgggcatggattagcctaaagccttgtggaactttgccttccaagacatgtttgtttctagcagtgggctgcaaggagaagccttgtggctgtgattctgctccatgcccactccacggcggatgcctgaccagtgttccaaggacattttgaaggaagagaggatttctgatttccaggaggggttgttgtatgtcctggaatgcaatctctccattctcccactgggtacagagaaaaaccacaggaaaatggtgagaagatgctgaatgagttaatgcaaccaggaaatacttattgagcatgtaccaagtgtcaagcatggctctagaccctgggaatagagccacaaacaaagcgggctaaaatccttgcccttgaggagcttacgccgtagttctctaggaaggcaagcgggacacctcggcgttgcctccaccccttccatgtggccatggtccattgt

SEQ ID NO: 684 - DNA, 1285 bp, Homo sapiens
aaacctgccttccttctctgagaatttgcagatgaagcccagtccattggggtgctttccagggacaacaagggatcatctgctggcctgtgtgtcctgagcaaggagcgcatccagtattgtgcctttcttgaccattccatgagattcgtttccttagtcattgaacattgtggtatcatcagcaccttcttccccagggaggcattcccttggtgtaggcatggtagggaggaagctttgtgttggcacactgctccttactacacttctagaactctcagggtcctttgctcaatgcctttctgatgtttcacgtccattctccatcccagccctggctctagagtgtcaaggctacctaagtctgagattccaagagttagggcagccaaaatgaagagttctcgatctgtgtccacaaagtcaagtgaggcactaggacacagtcatgtcacctatagtgaagacacaggaaagtgaagagatggactgggctacagaccaagtttcctcaaactccatgcccagttctggcaggatggtagctttccttttggtttgggtctttctggggttgctctgttttggagttggagtagctccctgcctcaggctcacaacaggcaggagctggagccctagcacactcactgggaccagtctttgttgatgctgctcagttaggaggtccccttgaaacaggagggcattctaggttgtgaagtcagttctggtttcctatcttgcctttgccactttttagctacttggacacgtaccttgatctctctaagctttgggtttcttcatctgttaaaatgggataatgcaatctagcttcagcaagtggtagtaaatgagctaccttgggtaaggtacttggctgtgagcctgacacacggtagaagcttaaattgtaacatagcagctctcacctgtgttcccctcctagattgcattcatgagcttcccgttagggtcactgtccatgagaaagttcttcctggccctgctttggggaacctttccctcctttgctggctctccccactccccatcagtctggtcccagagtagccatctctgatcctgctgtggcattctggaagggactagagggaagagagtttcttgttttgaccccttcctgcttcagtgacaggagggctacagagagggattagtgagctaattagaaatgattgcattgctcagcattaattagcagtgttgtgggcttgcagtgtgcactttggaactgagccccctgtgggacaacatg

SEQ ID NO: 685 - DNA, 1022 bp, Homo sapiens
tcccattaccactcacatccagcaatgacaggccacctgtaagctctcaagcttcctgagccaattgtctcccctaaactgcagaacaggtgcccccaggagactgtccttgcccaaagtccacgtcccttatgattcccccgcctcagtccagcctctgcttcctgattgagtacatctgtgaaacctgagctgttcgtacccccactcttccagcatcctcagcagcttcctgctgtccacgagataaacttcagctccttcaggtgtggcatttgaggtcctcttgcatgccatctcctttcttactgtagcactttgcctacatgtgggccttctagccagactgggctcttgggcctcttggcctctgtttctgctgttcccttggcctggagccccacctcctcctgggtgtagccagtatagtcatggtcaatcacacagttattagttgatcatggaatcagtctgccaggtttgaatcccatctccctgactctgtggggaccttgagcaagctacttaatctttctgtgctttagtttctttgtatataaaatggagatattagaatcttatggggtttttgtaaggtgtaaataagataattatcaatccctcagtacaatctctggcatttagtaagtgcttaataaattttagctattttatttgtattatcattattattccctaaggccagtctcctataccatcttttctacttttccaggaagcattcttctccatctgtgagctcccctggatcctgttcatttgttttaggagggtgggaaggttccttgagagagtcctagctattccctgttcagcagtgcagcccaaggagtcctggaaatgcaggagggaccttcaggtgcagggcttggcccacacacaggactaccagggcatctgatatatctaggaagtaacaaggagccctggaggcaggccagggctgtggcaaagagacctagatcatgtgggacacgcctagtccctgcatctgtccccct

SEQ ID NO: 686 - DNA, 1024 bp, Homo sapiens
tagccacgtcctctgctctccttcccattatgagagtgtccctggttcctatcacaggccctctcttctgcttattctctgaagcacattccctcaaagacttcccttctgtagctcacctctccctttttctctgctggaccatctccattgacgtgcaaatatgctctctatcttccattgttaaaagagcccctctttgagaatttatggattaaaagagacttaaaagacatgtaccaaaaaggtaaaattatagcatttagggatgtacacccctccttgaccccaagttgccccccagctattcatttctttaccatttccttcctacttgacctcccagctgctttcgacccagttgatcactccctcactttcttttgttggcttctgtgatagaagttttcctcccaccgtctggttttgccttagtctcctttgcttgtttctcctgtttctctaccagactgttaggtcaccctcttccttctcatctctgtatactttttccctaagtggtttcccatgtggatgtctaacagacatcttaaatttatggccagaattcttgagtttcttcccaaagcctgtccttgttttccctatctcaggcaggcgcggtggctcacgcctttaatcccagcactttgggaggccaaggggggcggatcacgaggtcaggagatcgagaccatcctggctaacacggtgaaaccccatctctactaaaaatacaaaaaattagccgggcgtagtggcatgcgcctgtagtcccacctacacgggaggctgaggcaggagaatagcttgaacccaggaggtggaggttgcagtgagctgaaatcatgccattgcactccagcctggcaacagagtgagactccatctcagaaaaaaaaaaaaaaattatctgagcatggtggcgcgcacctgtagtcccagctactcagggaggctgaggcaggagaattgcttgacccaggaggcggaggttgcagtgagcccagatcatgccactgca

SEQ ID NO: 687 - DNA, 1033 bp, Homo sapiens
tgaaaccccgtctgtactaaaaaaaaaatacaaaaattagctgggtctggtggtgcacacctgtagttccagctacttgggaggctgaggcaggagaattgcttgaacccaggaggtggaggttgcagtgagccgagatcgcgccactgcacaccagcctgggcaacaagagcgaaactcctcaaaaaaaaaaaaaaaaaaaagattcataatactttttctcaaggacttagattaggtctctctctctccagaaatgttttcaggatagctataggttcctgtacttactcaagacagccgctctttgtgggagatatccttgccctcaggagctcctagatttgcacaatgtggacaaagaggttttggggttactggtacttggtctttctaatttttcctttctaaggaatatgggaagttggcgagcccctttcctggtagctgggacctatttcaccttgtacagaaacttggaggtttgcccctgaccaccctcgagatcgtgcagcactgactggctactgctctcggttctccaggtcttcgaagccgctccactcgcatgtccactgtctcagagcttcgcatcacggctcaggagaatgacatggaggtggagctgcctgcagctgcaaactcccgcaagcagttttcagttcctcgtgagtaacgaatgtgcccccaaccaccatgtttgaggccctggagcacattgcttggtccctgtgctagaatatcctgagattcatccattcccccagcttcagaactggtctgctcctgccctaccaacacggctttcttatttggaaatcatctcttttttaaaaaaacttaattgaaacattacacacacataaacacagacatgaacacatagcattgagtatttagttctgtgaatttttgtaaactgaacacacttatgtaactaacatgatcagagcattaccagtacttcaaatcgcctgagttcaagccctgtttgtcacatgggggcatgttttcctgtggccatggaatcagt

SEQ ID NO: 688 - DNA, 1100 bp, Homo sapiens
agtcacagtggctcaagcttccttccccgcttccacatgcaggcatctctcgggacaactggcacaagcgccgcaaaaccgggggcaagagaaagccctaccacaagaagcggaagtatgagttggggcgcccagctgccaacaccaaggtgggtgcgagcgtgggcctgtccgcctgggaggtcgccttcccccgctctccagcgtgctcgggtctttccgtgtgacagttgtgcgttctttcttgggctctgatttctctgtagtagggcctgggtgtcctgtccccctttagctgttggataagtaagtaccaaagagggaatgctccctcaggcccccaaacctggagcttaggatttcagagagaaggatactgtgtggggacttgagcttctggagagggtggcgcctcgcgtcatagtcagaagcctagtcttgttttttttacagaggcttaattttcagcatttggggtcaggctttcctcttggaggcaagtagggtgatgaaaaagaatccttaggcgtggttgtggccgtcttggtcacctgtgtgccacttgccaatgcaaggacttgtcatagttacactgactgttgcctcctcccggcccaggttcctctccctcacttgccttgctctccttggtaacctagttcctgtaaccttgtgttttccagattggcccccgccgcatccacacagtccgtgtgcggggaggtaacaagaaataccgtgccctgaggttggacgtggggaatttctcctggggctcagagtgtgagtgaggccctttgggagtgggtgggaaaacgcacctaaacggtcttaagattcaccaagtgggcctggcgcggtggctcacgcctataagcccagcacgttgggaggccgaggcgggcggatcacctgaggtcaggagttcgagtccagcctgggcaacagagcgagactctcagtaaaaaaaaagattcaagtgcttttagcaagtagtctgtggcttagaccaaggcatttgaagtttctccttgctgaaagatcttaaggtagctggggagttctctccacccaggctgtcctgctccaatctctttttt

SEQ ID NO: 689 - DNA, 1655 bp, Homo sapiens
gggttacgggcgtgagtcaccgtgcccgacctgctctgatctttctgaactctgcagcctgagagattggggctggtaaagactgcgggttgccaaacataactagaaacgtgggttagggggttgtggaagacgaactgatgccccatggcttgtaaaggctgagagttcccttatttctccttaaggcctcatggggctgaagaacctggaggagtgtgccagggccatttgtcctccagtttacttgatgccaaatttctcctgtgagcaggttgtactcgtaaaacaaggatcatcgatgttgtctacaatgcatctaataacgagctggttcgtaccaagaccctggtgaagaattgcatcgtgctcatcgacagcacaccgtaccgacagtggtacgagtcccactatgcgctgcccctgggccgcaagaagggagccaagctggtgcgtgttacttccctgtaggggttgtggggagggcagcctgactccagccttctcgtgatgaaaactctgtccagttctgctactgaagggagagagatgagagccttttaggctgaggaaggccagcactggggtgtgcagggttcgagaaagctcccagggcctgccttccttccctgagctcatatatttgtatccccttttcagactcctgaggaagaagagattttaaacaaaaaacgatctaaaaaaattcagaagaaatatgatgaaaggaaaaagaatgccaaaatcagcagtctcctggaggagcagttccagcagggcaagcttcttggtgagaaggctgttgtgttggaggtggggagtcgcagagattgagtgtgccgaggcacttttcccttgtctcagttcctttgactgccagccatgcagtctaaagggttcactgataacaggctgcgagcacaaaggggaacgtttggtcaccctattcgtatgaagctgaaatgggaagcattgggtagaagagtctgcataggcccgtgcttggagtctttgtatttggggaagtctctgcccaggctgagggggctgtctcagtgatgaaaactttgtccagttctgctactgacagtaagtgaagataaagtgtgtctgaggagacagctggcttcatgcttgcccccagggtacctgaacccacagagattcttaagcgggtggagaggtttgggtagggccaccttgtcgttgtgctaaggatcacctactctcttgcagcgtgcatcgcttcaaggccgggacagtgtggccgagcagatggctatgtgctagagggcaaagagttggagttctatcttaggaaaatcaaggcccgcaaaggcaaataaatccttgttttgtcttcacccatgtaataaaggtgtttattgttttgttcccacatttatgttgcctgaatatatgactgttttctctgctttatttccttgccctgcaaaactgatctgggtgggtggctgcaaccccttgccttaacctctgcctcctactgtcctgagccaggctcaccacactgtaaagtccctgttctcaactccatgtccctgaaggccagatttattatgtgggctatgtctatagtgggaacatttctcaccacattttggtggggatagggatgtggcagaggctatgag

SEQ ID NO: 690 - DNA, 1077 bp, Homo sapiens
tggaaggtctggggtagacaaaaggaagggtcagtctggcttctgtgacaccatctttctatccttctctagtggaccctgatgacatacatggttgagggtggtggctcaagcaccatggctcaggccaagcgctggctctatcagagacctcaggctagtcaccagctgcttcgcatcctcactgatgctctggtcccatatctggtaggacaagtggtggctggtgcccaggtgagtcctgagagagagagaaataggctgggatttggtctgtaaggaccagaagcaagagtgtcctaaacctgagagggcaggggtcttaatgccagggatgaaagaaccttggcctccagtgatctagcggagcagccaagcccatcctgacactgacagtggggcttaatgctctaagtattcagacaccaaagttagtgctgggatctgaggaaagtaaatttttttttttttaattactgggtttttagggtcaggcagtatcagggattgaagtcatttggggaaaattgaggtggattttgtatgtgggggaaacttcctctttgtgtgttacatatttttcttcaccataccctaactaggcattgcagctgtttgagtcccatgcagggcatcttggcccacagctcttcaacaagtttgcactgccttacatccgtgatgtggccaagcaagtgaaggccaggttgcgggaggcaggcctggcaccagtgcccatggtgaggattgggatgggttgagtgaaggtggtcctgtggagctttcaggctaagtcctgcatggactggagtgaccactggagggcagcagaagtacagtcaagaaagattagtggttgtagcaaggccctctgtagcctgagatctgcttttttctagatcatctttgctaaggatgggcattttgccctggaggagctggcccaagctggctatgaggtggttgggcttgactggacagtggccccaaagaaagcccggtaagccatggaagggtgaggccttgaggttgaggtgggggtgttggctgggggagctgccatgtatgcagttacca

SEQ ID NO: 691 - DNA, 1024 bp, Homo sapiens
ttcttgggcagcagtcatattagatatgttagattgccttatagttcccccattaataatcaaacggtactatttatataagccttgtcatgatggtatcttaggccatttggctatgaggtgtctgttttgtggcatggccaacttcctctgaaagcgactcttttctaacctggtcacacagcaatttggacagcaagagagtgctacagagatcagctgatgccaaagaggaactggcagggcagcagaaactcaatcacacaggcagaaaatgggtcagtacatatggccctaaaaacctgcattcaagtgactaaaaatcactgaactcctgctcttagctaagaactacatcctggggccacaggaaagaaaactgataggcccctatactgccttgactgctgtcattcctataaggcaagaatttcttaacccttctcatgtcatttgctcctgtaacacatattcaggagattgaagttaaacatgaaggctctcaagatgtatgagttggctgggcacagtgcatgcctgtaatcccagcaccttaggaggctgaggtgggtgactgcttgagctcacaagtttgagaccagtctgggtaacatggcaagaccccatctctgttaaaaatacaaaagaaaggctgggtatggtggctcatgcctgtaatcccaacactttgggaggccaaggcacgtggatcacctgaggtcaggagtttgagaccagcctgccaacatggtgaaaccccatctctactaaaaatacaaaaaattagcgaggggtgatggcaggcgtctgtaatcccagctactcaggaggctgaggcaggataattgcttgaacccaggaggtggaggttgcagtgagccaagatcactccattgaactccagcctgggcaataagagtggaaaaaaacaaaacaagaccaaaatacagccaggcatggtggtgtacgcctgtggtcccagctattcgggaggctgaggtaggaggattgcttgagccgatgg

SEQ ID NO: 692 - DNA, 1340 bp, Homo sapiens
gtggcacaatctcagctcactgcaacctctgcctcctgggttcaagtgattctcctgcctcagcctcctgagtagctgggattacaggcacctgccaccacacctggctaattttgtatttttagcagagatggggtttcaccatgttggccaggctgacctccagctggccaggctggtctcgaactcctgacctcaggggatctgcccacctcagcctcccaaagtgctgggattacaggcgtgagccaccgcgcccagttcatcttccatcttttcacctccactgcatagatgtgcctgttatatttctgagcccccttcccccagcattgaccttggggtggtgacagtagaaggctgaaaccaacatagctgaaacctctgcttctctcacctggcaggtaaaagcagctgttaagtatgcccttagcgtaggctaccgccacattgattgtgctgctatctacggcaatgagcctgagattggggaggccctgaaggaggacgtgggaccaggcaaggtaaggactggggttgtaaatagaggtgggataagagaacttagaagctgaagctagggctggggcccagctggagggaatctggcatcagcttccttccagttcctctcccagagttgagggtgggtgagaccacgtgctcatggctcttctcactgtgggccctgccccctgcactaggcggtgcctcgggaggagctgtttgtgacatccaagctgtggaacaccaagcaccaccccgaggatgtggagcctgccctccggaagactctggctgacctccagctggagtatctggacctgtacctgatgcactggccttatgcctttgagtgagccttgccagagcctcatctggggaatcagggggttgagcaggatggtgttagtaacttattgtaagtcacagcagcagagcaggataggaacactcatttgcatgccaagctgaggagcttgacatgggatcttagcctcttctgctacagcagcttagctgtagctacaggagtttaactctggaaaaaggaaggcagtctcacatggtgtgtaccccagggtatgcacctgtaaccctcctgctccctttattcatttagaaaaggtgctgacttttctgttgagcacctggggttacagtaataagtaagtctcagcagaagatgtgagaagagctcaccattagtgccgtgccctgtgctggaagaagggtggataactccctgaggatgagttaaggaagacttcctaggggagaggagatatctacgtctaggaagaggagggggcataggcattccatgtaaacttaacacc

SEQ ID NO: 693 - DNA, 1028 bp, Homo sapiens
agacatcattctgtttatagcactctgtttttagtaatggttatttccatttacaaaatagggtaattctcgattgctgtaaatgtcaaatcctagaaaacgtagcattcctatgtatgatgttaacatcattctcaaatggttgttggccaaagattcatttgatgaatccaatttttatgaaataggcgattctgatattagttgtgtttagaaataactccggccaggcaggtggctcatgtctgtaatcccagcactttgggagactgaagtgggctgatcacttgaggtcaggagttcaagaccagcctggccaacatggtgaaaccctctctctactaaaaatacaaaaattagttgagcgtggtggcgggcgcctataatcccagctactcgggaggctgaggcaagagaatcacttgaacctgggaggtggaggttgcattgagccaagattgtgccactgcactccagcctgggtgacagagtgagactgtccccccccaaaaaaaaaaaaaaaaaaaactccgagaacagttttatatttttattttcatgctgaaagtcagatttgcttcagcttcaaagaacatgtttatgtaaaattaaatgagtgctggcaatgagctgtacttttttttttttctcttaaacgggaaaagggttaaaataagtcttatgaaatactgcttggctgggtgtggtagcttacaccagtaatcccaacactttgggaggccaagcaagacctccatctctgagaggatcacatgaccccaggagttcgagaccagcctgggcaacatagcaagacgccatctgtacaaaaaaaaaaaattttttttttaattaactgttcgttgtggcacttgcgtgtggtcccagatactggggaggctgaggtaggaggattgcggaagcccaggaagtcgaggtggtggtgagctatgatcctgccactgcactctagtctgggtgacagagtgagaccctgtctccaaaaaaaaaaggaaagaaacaaaata

SEQ ID NO: 694 - DNA, 1093 bp, Homo sapiens
ggataaacctgctgttaccttaacataaatcaaggcagtggcaacaaatagtactagcaattcttgtgttcttcactatcaccttcacttagaaaatgtccatgatgaagcgttacaaactgaagtttattaattctcagtccttgactacatggttttaaggtaacctggcaaaataggaattatggatggagcgcttcagcatatcaaaagtggctaccatggttttctttatgaaaagcccttgtgtgattaagagttgattgagctacttttttcatgtaactttactggcttttattcgaaagaatgttttatttgaaagttttatttttgaaagaatgaccaacagacaaacttttatttagacttgatacttagcagatgttttctccaaaatgaatacagtgagcctgtcactttaagggaaataactgacagtattgggtgctagtgatagaatgtgagctttcacatgaaaaataaaaattttggataagttatatatcaactgctgttgtgagactgacagtatcctaatactttgactgttctgatgaaattgatttttaagttgtggtaaaacacatataatataaaattttccatctttttaagcgtgtaagtcagtagtgttaagtaaattcacattgtcgtatacccaatcttatcttgcaaatctgaaactattacccagtaaacaactccctctttctgtcttccctagcccctggcaaccaccattctgctttctgtctctgaatttggctactttaggtacctcgtataaatggaataatagaatatttacctttttgtgactggcttatttcacttagcatagtgttcttaacgttcatccatgttgtggtgtgtcagaatttccttgctttttattgtgagtactgctgctgtgacgttgggtttatgtaatcgttcataagtagaagatctagaatacaagatagactggtttttaatgtaccagtatgagaagttcatcagtgttttcagattatacagtacaactaacctttaagaaattaccacttgttggtcaagtgctgtggctcacgcctgcatcccagtactt

SEQ ID NO: 695 - DNA, 1024 bp, Homo sapiens
aagtatattcagaatctaaccctctctaatactcctcaggttcctgtctagatttttacggtttctttcctttttttttaaatagagaaagagtgtttttgtttgtttgtttgtttgtttgtttggacatagggtcttgctctgttgcccacgctggagtgcagcagtgtgatcctagttcactgcagccttgaattcctgggctcaaacagtcttcctgccttagccttgcgagtaacggggactacaggtgcataccgtgatgtcagctaatttttgtattttcctatagagatgctagtctctaactcctgggctcaagtgatcctcccaccttcgcctcccaaagtgctgggactacaggcatgagccaccatgctcagccttagactttttcttttcttctcttttcttttctttttttgagatggagtctcgccctgtcacccaggctggagtgcagtggcacaatctcggctcactgcaacctctgcctccctggttcaagcaattcttctgcctcagtctcccgagtagctgggactacaggcacacaccaccacgcccggctaacttttgtattttcagaagagaggggggtttcaccatcttggccaggctggtttcgaactcctgaccttgtgatctgcccgcctcagcctcccaaagtgctgggattacaggcatgagccactgctgcccggccagactttctttccaactggttttctccccagttctgttcttgttctatcttaaagtctatactaatgtgatgctgctctctccctcttcctcacctttatttcccataattcttccccagcttactctagccagaagagttttctgtttctcaaatattttaagcaagcttcttttagagctttgaacttactattgcctctgtcctagagtgcttttcctctgtattttttttttttttttttttttggcttgccttcttaagttctctgcttcaatttgacattgtccctgtggtcttagctcattcttgttataa

SEQ ID NO: 696 - DNA, 1033 bp, Homo sapiens
agtttcgctcttgttgccctggctggagtgcgatggcgcgatgtcagctcactgcaacccccgcctccctggttcaagtgattctcctgcctctgcctcccaagtagctgggattacaggcatgcatcaccacgcctgcctaattttgtatttttagtagagatggggtttctccatgttggtcaggctggtctcgaacgcccgacctcaggtgattcacctacctcggcctcccaaagttctgggattacaggcgtgagccactgtgcccagctgtatttaggtatttttatttaaaaatgcatggttgtcttacaacataaaatgttacctaagtttttaagcacacataaatactttctcttaggttatttttcccagattactggagaggtcagtattcccactttcctgccattaagggtatttaggaggaaaatttgagatgtcttattctaatctagtagactacccttaaacatgacctccatcacaatttactgcttagattctctagttactctcaatagactcttaggccattagttggcctgactttgcatgaattctgccagtattttactccatgaaagccagtcttcttaccttacatagagaagtactttctccttttgttcattatacttacgtaatttttgtccttcttccttctgtctagatattaatagctaagacttaatacacagtgctatttgttgtctaaacattgttttcagtgcttttacatacattaactcatttagttcttgcaatagctctttgaacaaacagttattaacattcccattttacagatgagaaaactaaggcactgtgagaataatttgtctaaggtctcacagctagttatgggttaaaggtaggatttgaatccagttagaagaactccagatattctgcgctttacatcatgcctttccatgggccttaatcatcctctaggtcccagccaaaggtcctttaactattctgatccatactgacatccatcttttagcaggaggaataccta

SEQ ID NO: 697 - DNA, 1028 bp, Homo sapiens
aggaagaaggagaaaaaacagaagatgaatctctggtagaaaataatgataacatagatggtatgtggagttgcatgtgacattcaagagatgcgacgttgtatatttcttgtatacagtggtggaaacggggctctacctgtcctggatggtctctcctaagatgcttggggtgatgatgcctgcatctggtggagattgcagtggggatagctgtttactgaagctgacagcagatttttgaaagagaataacttattttctcaagtaaatccagttatttcgattggggttttttaaatcaaaaagataaaagcaagattaaattggtgttttaaatactattacaaccttaagtgtttttctgatgcaaatttttttaaacagcctgtgcagttcagttattttaatagcagtacttttagagcccttgtacattttttatgtgtgcgaaaattatataatttctaagctgaatttggctgctatagttttacatatcagatgggggagaatgaaaagcttggcatctcttacctaactggtaatcagaatgctcaagtaaaacaatacctagtgtaacaagcttgggtttcttttgcagtaagttgctctgctagccgggatgctccctttccttttctctagggggcagataatttttaggccatctgctgaaacttggtaggctttttgagggtttaaagggaatgtatttttagtttccatttatgcctttatcattaaactcgaagacatgtttatgcttcatgttctttaaccatgtagaggaagcaagggaagagttgagagaacaggtttatgacgccatgggagaaaaagaagaagccaaaaaaacagaagacaagtctttggcaaagcctgaaactgataaagaacaggacagtgaaatggagaagggtggaagagaagatatggatataagtaaatctgcagaggagccacaggaaaaagttgacttgactctagattggttaactgaaacctctgaagaggcaaaaggagga

SEQ ID NO: 698 - DNA, 2091 bp, Homo sapiens
tagcccagggagctactgagaaatcacctgaagacaaagttcagatagctgctaatgaagagacacaagagagagaagaacagatgaaagagggtgaaggtaaccgggatatgcaagagctgcagtgggtggagtacattctggatttgactcactaattatgggtaaaagtcagccttccattcaggattttccgtctgcctttggattaggaaagggctaaatgaaaaggggggtagtttaacaaggtcgtgatagtcaagtaagttcaatcaaaagcagcaagtcttctttagctggcttataaactaacacttttactaactgcaaaataggccttctgtgtgatttctgagacttggctagctatcagtaacttgttgcagcatactagccaataaagtgggatggaaaaggtagatgaggggtggggtaggtagggaaatagtgggctaggctggcagagaatgctgaatggatgttcacttgcatgcctctggattttaaaattattgttcacatgactccttttctgtgcgttgggaagcagctacagagcagtagaatccactgaattggtacactgaagcaggcatgccatttaaatgaaggcagttaaccttgactgttgtatcaccagagttaaagaattctggtgcccctctttaagtcttcaggaagtgtttagaggcttattcacattagttaaaacaggccccccccaccttccccaaggcaacagaaaacataaccattagctctcttcctgttttccttcctcatttcatgcttgcttcggctgctaaactgaatttttgttacttagaatattataaagtgtggatgctttctataatgctattggtctaagtgtgattaaatttcattaaggtgtataagcctctaattattacataactggcacgtctgacttttgctatcatttgaggattctactgtatataagtttcatctaacattggcattaataaccacaggtatattccaactaattgttacttcttgtaattgccagactacttcaagagttctcgtaagttttagattttcagagacccatcttcaatactttgaactcattctggtaaacttccttctacctatgtgcaggtccctgtactccagccaacacaggctcagtaactggaaatgaattggctaaaatggtagcaccattgggtttcttaatggagctttaggagttctttatggaaaaaagcacagaactaaattcctcaaaaaacaaacaaacaaaaccacacacacaaaaaaacaaaactcccatgtcttgatcttaatgattgtgagcaaggatggtaaaaagctctgctggctgacccctaagaccttgaatggtaagctacaatacagatatcacagtcccttacagattgttcgaaaactcgttggatcataattaacattgttagaactctcatacattacatctgatcctaaaacaatactatgtgataggtagtattgcccaagttacagtgatgaggttgaggtttaaaggttacatgacttgtttagggtcataatactgaatctgaacccagatctgccttgaatatattattcttcccaagttaccacacattgaagaagacagtgttcatccttttcctacacccactgcttagaaattttgtcgtgggctgggcgcagtagcttcacacctgtatcccagcactttgagaggccgaggtgggcagatcacatggtcagaagtttgagaccagcctggccaatatgttgaaactttgactctactaaaaatacaaaaattagctggacgtggtggcatgcgcctgtggtcccagctacttgggaggctgaaccagaagaatcgcttgaacccgggaggcagaggttgcagtgagctgagatcatgccgctgtgctccagcctgggcaacacagcgagtctctgtcttccaaaagaaaaaaaaaatctgtcacttatttaaaaagttaactatattttaaaagccccaggcttttcatatgctgcattttttggtgttgtatatcagatactgttctgcttgtaaagacaatacagttt

SEQ ID NO: 699 - DNA, 1945 bp, Homo sapiens
acctggtgatctgcccaccttggcctcccaaagtgctaggattacaggtgtgagccaccgcgcctggcagccattgccattactttaaaacctttcccaacttgtgcccaggtatcaatggcaatgccctgatgtcctcagtaaatttgttaaagtatcttttttttttttttttttttttgagacggagtcttgctctgtcacccaggctggagtgcagtggtgcgataatccgctcactgcaagctccacctcctgggttcacgccatgctcctgcctcagcctcccaagtagctgggactacatgcgcctgccaccacacctggctaatttttttgttttttggtttttttttttagtagagacggggtttcaccatgttcgccaggatggtctcaatctcctgacctcgtgatccgcccgcctcggcctcccaaagagctgggattacaggcgtgagtcaccgcgcctgaccctgttaaagtattttctaagcttctttgaaaacggaatctctttgtggttgctgctgataaaactcctttgacctgacgattgctctaagtcctaattgccatatttatattcccatagtaagagtgtttggagatagtgtttgagcttttttgctggtgttaaaaatgcataatgaaagatggcagagagaggcatattatatccaattcatgagttgtttgtgttaacagaaagcttattttaatcacttaacattgttgatttgtctaatcacagtagcgctattgattaggagcctgacctttagatggttgacttgtgagtgtattcaatatggtgaaatatggtgttgatatatggctgcagattttagaggtgtcattagcaaaggtataggagtaaaataggggttatagtattccttactcaaattctgtatgtgctagagctggctggagtctgtggcatgctcattggtgtaagtcggtaaggactatgctttttgctccacatctctgttgtgggaaagctagtctcttgagcattcttgatcagaatggactggaataatttaactttcgtactttcccaggctattagtattatctaatgagtggcttaaagataccagaaacactgactgaggtctccacctgcttctggctgaatgaatgggagcttctagccattgaataagaggcagtagccaatgtttcttattctgaatggtccaggttgacttttataagagaaacactcagccttttaattgctgaaggtctgacccatagactaagattgcacattcttagtctaggttacacttgaactagactgcacccactgacgatatattcagttcaggtgttaactcacttggattagcatctggcctgtcctatctgaatataggttgagacgtgtattggaatctctgactagtcagaatacgttcttagttatattctcaatactgaggaatttttacttgtagaaactgaaggctcagaagaggatgataaagaaaatgataagaccgaagaaatgccaaatgattcagtccttgaaaacaaggtatgttgttagccactcagtactgttgtcagcctttttctgtttttgggagactggagctcactcttgttgcctaggctggattgcagtggggtgatcatgatcatggctcactgcagcctagacccgggcttaagtgatcgcctcacctcagcctctcaagtagctgggactacaggcttgtgccaacatgcccagctagtttgcaggactgtagcttacctagtttaggcacgattattatttttttaagagatagaatctctgtctctgcccaggccggagtgcactggcatgatcagggctcactgtatctttagcctcctgggttcaaggaatccttctgcctcatcttctcagatagctaggtctccagatgtctgccaccatgtc

SEQ ID NO: 700 - DNA, 1080 bp, Homo sapiens
accacgcccagcctcagtaggtttttaaaagtcattttgactttctttatagccaagggtcctggaaataactataaacaaaaatggaatgttaaatatgggtgcattcccataggatgggtctgaattctggaagtattttatgttgaatgctgtccatttacttgctcttctttttctctttgttagaaaactatgtgcaagctgtggaggagttccagtcctgccttaacctgcaggaacagtacctggaagcccacgaccgtctccttgcagagacccactaccagctgggcttggcttatgggtacaactctcagtatgatgaggcagtggcacagttcagcaaatctattgaagtcattgagaacagaatgggtgagtgaagacgagctgcttcatggtgatgttggatccagcaattaacaaggaagaaaacagttcttttttgagccattactaatcactttattctttttagctgtactaaacgagcaggtgaaggaggctgaaggatcgtctgctgaatacaagaaagaaattgaggaactaaaggaactgctacccgaaattagagagaagatagaagatgcaaaggagtctcagcgtagtgggaatgtagctgaactggctctgaaagctactctggttggttccgttaacattttgataatagcatgtttggtaccatttatgttaatgttctatttgccaggaacttttcatcatgacttggtttccagggagttggtgggctcatctaattattcctatcaagtaatgcagtggttaagaggaaataccctggagccccagactatctgggttttaattccatacttacgtgtggccatgggcctttctctccctcagttgaccgatttgtaaaatggggataatacaggttgagtatccttacctgaatgcttgagaccagaagtgttttgcatttcaaatgcttttggattttggaatatttgcatcatactcaacagttggatacccttaatctaaaatctgaaatgctccagagagcatttcctttgagtgtcagtcagtcctcaaaaagtttcagattgt

SEQ ID NO: 701 - DNA, 1042 bp, Homo sapiens
ataacttcaataaagattgtaagcaaaggttgaggctttgatggtttttttcttaattattggctgaatctgccttggagcactgctggttttatatattagccaaaggttttgttctggccttctgtactgatctgtgttcctgatcctaattcctatctgtctaacgtggaggtgatcaagtgtggctgtaggcctttgttttccaatggtgctatattctgttttcaaacacttcactgaacccagctgtcttgcaaactttcagtggtgctgtccctggatgggggctacaaaaacaagaattggtgaagatcttgctcttcagtgctgaaaatggatgatggactttggctgtgagccaggcctaggatggttcttgtcctatatccacctagtcttcacctggggctataattctgtcctggaaaaagaactctgaaaacctgggtcaggggaatgattcctaaggaaaacggtctgcatttgagctctggtttgaaagtagccaaggggactgatggtggacactccagatgtggttggaagcatatgtggggaggctggctggttgagttttgttattttctgtatagaaaggttgagatatatcaacacttggaattgttacccatctgcagaattgacttctcaaataaagatgctaaaaatctccttgtctggaattatgtttaaagatcttaagtggggtcttaggctgcttttttgagatgggatcttgctcttgtcgcccaggctggagtgcagtggcgtgatctcggctcactgcaacctctgtctcctgggttcaagagattatcctgcctcaggaggctcccaagtagccagcactacaggctaatttttgtatttttggtggagacgaggtttcaccatgttggccaggctggtctcgaactcctgacctaaagtgatctgcccactttggcctcaggaagtgttaggattacaggcgtgagccacttcacctgactgcctggagcatttctgtgtgcgatagagggtttcaaaggcagaaacg

SEQ ID NO: 702 - DNA, 1051 bp, Homo sapiens
tgggaggccaaagcaggcggatcacgaggtcaggagatcgagaccatcctaacatggtgaaactccgtctctactaaaaatacaaaaaatgagctgggcgtggtggcatatgcctgtagtcccagctactcaggaggctgaggcaggagaatggcatgaacctgggaggcgaagcttgcagtgagctgagatggcaccactgcactccaccctgggcgacagagcaagactccgtctcaaaaaaaaattggctgggcatggtggcgtggcctgtagtcccagctccttagagggctgaggtggtaagatccctcgatcccgggaggtcaaggctgcagacagcggagagcacgccactgcagtccagattgggtgacagagcgagaccctgtatccaaaaaaaaaaatgttacatcaaccctatgaattagtatccatatttcaaaggtgaatgaactgcaccataacaagattaaataatttgttcaaagacacacagctaataagtagtggagccaggattccaaccaagtttgacaccaaagtctgcactccaacaggctattctctctcagtactaagttaatgaggttattttgagcattaaatgagttaatgctcaccgggcgcggtggctcatgcctgtaatcccaacactttgggaggcctaggcagttggatcacctgaggtcaggagttcaggaccagcctggccaacatggcgaaaccccatctctcctgaaaatacaaaaattggccagacatggtggcaggagcttgtaatcccagctacttgggaggctgaggcacaagaattgcttgaacccggtaggcagatgatgcagtgagccaagatcgcgccactgcactccagcctgggcgacacagcaagactcttgtctcaaaacaaacaaacaaattaaaaaaacctaaattatattggttggtactatcgttattttgagttgtgaactcttaagccccaaaataggaggaaaaaaggaaacagaagctatgaccttccagttttgttttggttttttttttaatt

SEQ ID NO: 703 - DNA, 1052 bp, Homo sapiens
gctgaggtgggacccctggaagttgaggctgcagtgagccaaggttgtaccactgcactccagtctgggtgacagaatgagaccgtgtctcgtaaagaaagcaaaaaacaaacaaacaaaaaacaaaaacaaaaccacacacccaaaaagaaactcttctgcaaagttgtttttccacatgggatcctaggaggatccttaattgggcttcaggaaatctgtgaatgtcctgaaattccagttctcaaaattctgtggtttaaaagtgaaagcttaggttccaagagatcaaatgcaaaaatgactggaaagcacataataagtaggtgcttaataagtagtcttatctcattttgtttctgtaacatattgtttgatccattcctggtcatataaagtagatgctgaataaatatttgctgaatgaaaggatgaatcagtgttttagcactttcaactttctgtgttcatttgtatttcatttttgcttttaagttgcatgttattgaaggtaagaactatgtcatcattttgtctaacaatgcagagctaaaggctttgctcacaataggtgctcagtcattatttattgaatgaatgaatggagaatgattcaaatattttgaattttggtaatttgagtaataatggttatatgataggagtagacaaaggaaatagaatatttttgaggatggcagaagatgagttcaactttagttcctaaaataccctcagtgtgacagaaattttaaaaaattattttaatggaaatcagaacctctttcctctgcattacagggttagtacattgggaaaagcatagggcagaaagcacacagaagggaagctgcgtaatatatatagggaactataatcggtttgttattgccagacccagagctttacgttgaaggtgtaaatgctaggttagagattaaagaagccttgattgttgagggtctttagtgtgatataaaaggataattggctgggtgtggtggctcacgcctgtaatcccagcactttgggagaccaaggtgggtggatca

SEQ ID NO: 704 - DNA, 1031 bp, Homo sapiens
tagatcagtttgatgtgttacttatctgtatttgttacagcttccttcattgacatataatagatatacctcatcgggctgatttttttcgaaagtttcttatttattataatactcctgattaggtgggtgttggcttaaaaatgtctacatgttgatgatattattggacactgcttactgaatgaggagaaagaggtgttggagtggaatgggaaggttctgtcaatgttttgtattgcctgtattttctgatagtacttttatactttgaaaacctgtatttagctcctcttataggcatataaagaaagctctaatattaattttagcattaattgaatgttagagatatttctgactttatatgccaggtaaagtctaccatttaatgattttttttaaactaaaatatgcttttctttattggatataggaagggtatgaataaaaggataaacataaataaacttaactaagaagtgtactcattatgaatactatatcctgtcaaaatgtctgtcatcccatgacctttctcacctatttttcctttggcattttaataatcaatatcctgtgtcctttacagcatacctagcttttactaagaaatatgtttctggttttagctatggagggggaagtataatattttggcacttttaaattgtagtgaatgctgtagagatgtttaatataaagtttttatacttcagaggagatattaaagactcatgttttactctttttctctttgaaggatgtagtaactggagttagtcccctgctcttcaggaaactcagtaatcctgacatattttcatccactggaaaagttaaacttcagcgacaactgagtcaggatgattgtaagttatggagaggaaacctggccagctctctatcgggtaaatatctgattttgttgttttaagaaatgtgggaccatgtggtcaatatttaagtgtatattaattgaattggcatcttgacagtttcttctctggtagtagtcttgtatagaacat

SEQ ID NO: 705 - DNA, 1031 bp, Homo sapiens
gagtctcactttgttgcccaggctgtagtgcaatctcggctcactgcaacctctgtctcccaggttcaagtgattctcctgcctcagcctcccaagtagctgggattacaggcacttgccaccataccccgctagtttttgtgtttttagtagagatggggtttcaccacgttggccaggctggtcttgaactcctgacctcatgatccacccacctcagcctcccaaagtgttgggattacaggcttgagccactgtgcctggcccaattaagtctattttgattgccctctcatgctgtcagtgtcactggtactaattgtatagtgagggtcaaggaaaagattctgtaaggttgtaacttcaatgagtaaattttcctgggaaagaacattctttttatagaaatgattctaaatctggtacagttgtgctgctttggtttacagctctgtggtatacatatttagtacatgaggacagggaacttgtttggcacatcatgggtacttaaagtatatgtataagaatgagggccgggtgcagtggcttacgtctctaattcctgcactctgagagtctgaggcaggaggatcgcttgagcccaggagttcaagactagcctgggcaacatagttgagaccttgtctatacaaataataataatcataaaaaaaaaattagccgaggatggtggggtgtgcctgtagtcccagctactcagaaggctgaggtgggataatcgcttgagcctgagcagttgaagctgtagtgagttgtgattgtgccaccacactctggcgacagagtgagaccttgtctggaaaaaaaaaaaaaaaaaaagccttttgtttgtctaggctttgtgtgataggcagggccttacaaaattaaagctgtgtagcctgggcaggttgctttgtttctgcctgttgttacaaattatacccttttatcctcaaacttgcttttgtaccaaaggcacccactggctttctgctcatctcacactgttccctctatccttaggt

SEQ ID NO: 706 - DNA, 1031 bp, Homo sapiens
ctttcacttagtctaatgtcttcaagattcatccatgttgcagcatgtgttcctttttgttgccgaatagtattttgttgtatgtatatatcatgttttgtttagctgttcatcagttgattcatttccttcattcttcaccttcattttctaatgtttattgagaggatttatctgagggcttatttttcccatatatgtagaaatcatgatcctaattagtgattaccagggcatgttctaaaaaggatcatacaatcgtatcattatatgtgcctagggatggaggagaacttaggtggaatattgttcaagattagttcttcttcttcttaaaaaaaaattacatagagtgaaaatctgttgttaacagtgggttgtttctgccttttggctattataagtaatattgctatgaacattcatgtacaaattttaatgtagatatatgttttcattcctcgtggatatatatctaggagagaagttgctgagtcatatgataactgtatttaatcatttgaagaactttgatttctctacatccttgctatcctggtgggtgggaagtgatatcttgtgtctttgatatgcatttctctagtgactcatgatgttgagcatctttcatgtgcttaccggacatttgtttgtcttctttgaagaagtgtctatttggattattggccatttttaaaattgaatgtttcttttattgtaagtttgtaaaataattgtttctttagacctgaatccaatttcttctctttcccagggaactgctttttgttttctcttgtgctttttttttttcctgagctacttatttacctactgtaacttcaagctagctcttctcttcccattctcccgcctaaagattttcagttgaatattttatgttaggtggcacatttgctagttggtattaaatacctatttctgctttgaccacccatactggaataaacctcagtgtctaccctgcttctggctgtgacatttctgaaaaatcttaactagaatgtatt

SEQ ID NO: 707 - DNA, 1028 bp, Homo sapiens
tctgtcatccaggctggagtataggggtgtgatcttggctcactgcgacctccgcctcctgggctccagtgatcctcccatgtcagcctcccaagtggctgggactacaggcaccatcacaaatttttttttttttttttgagacggagtctcgctctgtttgccaggctagagtgcaatggcatggtctcagctcactgcgacctccgcctcccgggttcaagtgattctgctgcctcagcctccccagtagctgggattacaggtgcctgccaccatgcctggctagtttttggtatttttagtagggatggggtttcaccatgttggccaggctggtctcaaactcctgacctcgtgatctgcccgcctcagcctcccaaagtgctgagatcacaggcgtgagccaccacgcccagcaacatctggctgatttttgtattttttgtagagatggggtttcgccatgttgcccaggctggtcttggactcctgtactcaagcaatcctcctgccctggcctcccgaaatgctggcttacaggcatgaaccacctggtgcccagtctaggaagactcatatcatgaagatgtaaattttctccattaagctatagatttaatgcagtcccgatcaaaacccaggtagtatttttcagaaaatatcaagctgatttcaaatgtgtattgaaatgtaaaggacctagaataaccaaaacaatattaaaaagaagaccaaagttagaggaatcaaacttattttatgactttgtataaaggaacagtaatcgggtcagtgtgattattggtataaggatagatatatagatcactggaaccaaatagacaaatttgccaaggcaatttaatgggggaaaaggtagtcttcataacaaatggtgttgaaacaattcacacaaaaatatcaacctctatacttacctcatgctgtacaaaaattaacttgaagtgggtaattgaacaaatgtaagagcttaaatcataaaatgtgtagaggaaaacgagaaa

SEQ ID NO: 708 - DNA, 1041 bp, Homo sapiens
tcttttaattaggctgttattgtcatgtgttgcttcgcactggtatatttacagtgctgagcaaagattgaaaagcagtgctactggtgcattctatcatatagacaatataattactagtgatagtttagttgcaatagagaactaatatttactagaccctattcctagtttaacgtatgttctcctttattttctccagaacattgagttgtcattcttcatttttgcaatatgtcttatctatagaatgtatagggaacaaggctggtttcagcatgtgtagactggtggccttaagagatagcaatgttaagaaatagtagtagtgtacaataaaccattaatatagcagtcctgagactactatccttagaaaggcttgtgcggaaggccgacccttggctggtatctggaaacttgaatggtaaacagtttcctacactgataaaaatttccttgaatgataagagtgacttactgtgcaaacaatgtgatttatgctgaacatttacttaccttctgggagtctgaaattttggtatgtagtaggcaagagggtgcctgtgtgagcagctccattaaaaactttggacactgagtctttggtgagctttcctggtagacaacatttcatggatatagttactaggtgttgctggaagaaataagtgtgtcttatgtgacttcactgggagcgaactctgggaagcttgtgcttggtttcctccagactttgcctcatgcaccttttccatatgctgattatatgcagggtcctgtgagtactcctggaggatcatggaacctggggatggttttggtgacccctgacacaggtagtctttgaaggatttatgaaaatagttaagggtatagccggagtaatcaggcaagagaaagaaataaacggcattcaagtaggaagagagaagtcagattatccctgtttgtagatgacatgattgtatgtgtagaaaaccccatcatcttggcccaaaagctccttcaactgataaacaaattcagcaaagtttcagg

SEQ ID NO: 709 - DNA, 1046 bp, Homo sapiens
caacaacagcccagctgggagccaaatcaggaaggcaatcccattcacaattaccacaaaaagaatacaatacctaggaatactgctaaccagggaggtgcaagatttctacaatgagaattagaagacactgctcaaggaaatcagagaagacaaaaacaaatgaaaaaacacaccatgctcatggataggaagactcaatatcattaaaatgaccatactgcctaaagcagtttacagattcaatgctattcctatcaaactaccaagaacattcttcacagaactagaaaaaacgattttaaaattcgtatggaaccaaaaaagagcttgaatagccaaggcagtcctaagcaaagagaacaaaactgggggcctcacgttacccaacttcaaactgtactatagggatacagtaaccaaaacagcatgttactggtacaaaaggcacatagatcaatggaactttatttccggcagaaataaagctgcacacctatgaccatgtgatctgtgacaaaactgacaaaaacaagtaatgatactgggataactggctagccatatgcagaagattaaagctggaccccctcttttcttttttttttttttgagatggagtctctctctgtcacccaggctggagtgcagtggcgcgatctaggctcactgcaagctccacctcccaggttcacaccattctcctgcctcagcctctggagtagctgggactacaggcgcccgccaccacacccagctaattttttgtatttttagtagagatggggtttcaccatattagccaggatggtctggatctcctgacgtcgtgatctgcctgcctcagcctcccaaagtgctgggattacaggcgtgagccactgtgccccgcccatattttctttatctagtccactgttgatgggcacctaggttgatcccatgtctttactattgtgaatagtgctgtgattaacatgtgagtacatgtgtctttttggtagaatgatttgttttcttttgtatatttacccagtaataggatt

SEQ ID NO: 710 - DNA, 1033 bp, Homo sapiens
atacagggcttggtacacagcaaacttgtaattaatgtttgaggtcaggcatgggtggctcacatccgtaatccaatgctttgggaggctgaggtggggggattgcttgaggccaggagttcaagaccagcctgggcaacctagcaatatcccgtatctaaaaataataacagttacaattgtttgttgagcaaatatttaaatgaataaatggaactaatatgtggcttcttctcatataagaagtctagggaaaaccttttcagacaaggtatagtgtaactcaggttgaaatgacaaatgtgagactatttgcagtcacacacgcagttgcacatgtgattttgacatcaaacatttttgtttatttttgtttacttgcatgccttgtaagtttcatgttttactaacaagacactttattctttgagtgttacatgtcgtttggtttggcttgcttctgtatgttaaaaaaacgttctgtcttttgaaaagataccattatctaattggttttaagttaggagaattctaaattacagggcacagtaaaataaatgagcaattataccgaggaagagcaaaacaaacaaaaaagaatcatggaaccatgttttgtatatacgtggggagaagttatcctttagatctgttttttttttttatgtgagtatgcttgaatgtatatgtcatgagggtagtgggctgggctgagctggggaggagatgtgcatcatatgtagggagtagacttaagctagttatttttaaataatactttagcaagggaattagtacttgtttaagtgttcatattgccttaatattagcatagctttttcatcaatatgttcagtatctcaaacgtcaaatttgcatgaaaatattctcccaaacccctaatccttccctgttttatttttcttcattgcatttattatcttctaacatactgtatattttatgtattcattttttgtttaatgcctgtctacatccacttgaatgtaagctttaagaggtcagggatttt

SEQ ID NO: 711 - DNA, 1035 bp, Homo sapiens
gtcttttttgtggtaaaaattggctttcatcttacatctacttttgaagcatctacacatggagagacatttgagattgaagttccttgtgaattgaaggaggtgcttttatacttgccctgtttcccaatcaactttatgggggatgattttaactttgaaaggtcagggactagccaccataagcaaatttttgttatcaactctcttagtgccataatttccacattatttgcccataaggcacatatagtaatctgtcttcattgtatagacagtgcaatttcccaggttctgaattgaaaatatttgttgtgctgataaaattattgccttcaggcaaaaactaaattgtatagtatttttatgcaccccccccaaccccctgcttgctttttgcctttgctgttcaaaaacgagagtacttagagtgtcattgtttacgggtacttaattattttggaggatatatgacaacataatgcatactgggaagcattattattgagaaagccttgggactttttttattttgcaaattatgactgtcataaattatggtcatcttacaaaatgtgattcagctaatttttagtctttaaaaacaaaatcttcaagaaccaggtagatttcaaacattcaatttcttcttgaaatttcattttaaaaaggctgatgacatggataaaaatgtaacctaattatttgcttctgttgttctacatttccttgttcttttctgtgggaagcttgataaaagaaacatttcagtttgtactcttcagtttttagtaccactaagatattttcatcaagtcagtaaattagatggctttgaaggttaaggaatttatctcactcttgtccctcttctttgccctgactcatgtattcctattctatgttgcagctacaccagtcttgtacctttgtttgtttttttcatagtcatttttttctgacattccccccattcctgagtggttttatcctccttttctacctatcaaccttctgataatccccatgcagtta

SEQ ID NO: 712 - DNA, 1096 bp, Homo sapiens
aaatagagaacagagaaggagcgagactgagtagaaagatcagctgagttttagacatattaaggacaaggtagttgtatgtacaactatagaggtcagcaaaaagatctgggatagagatacaaatttgagattgtaaaatatatagagaaaggagagtgtacaagcagaactaaaaggacagtccccatttaagggtctaaggtgatgaaggatgagcctgcaaagatgtttaaatggtgtgtttgcggggataagaggaaaaacaagagaatgtggcttcatggcaagaaaagtcttccaggacagaagagtgaatgatactatcaggtgctgttgagcagtggagccaaaaaagataggtggactaaaaatgcagtgaagcttcattaccctggcgttatacattacattggcagtgtgccaagaatggtttaaatgggctggtaaggtctagggatatttatagagtgttgaagaatgagtaggaagtgagaaattagagacattggatgtagataactcattcaagaagtgtggttgtgaagggaaataaaattgataaggcagtatttgaagagggatgtgtagttattaagggaatttatttccttatctgaagctggaatagacttgaatgtgttcagaatgctaatcaggaagatcattaagaacatgaagagtcaagagataatgagtagatcagagaaggctgaatggaatgggcttcacctgatattgtaatgtattaccaggtattaccagcctagttgctggaaggttatgagtaaaataatttatggttatctgtctaaatgggagtactcttgcctcagccaagtttcctgattgtgtagcttttctccccaacttgctgtgaatattccctgggaaaaggaggattgagaaatcattgctccttggactacctttatgtggttgggcccttcttgttccactgtgccttagttgtcacagaatgtactgatctggagtcctgggcatcaaatgcaggcttttgtataggtgtaaggaagtcggaagggatggatttccacggatgcgcttccgtgcctctaaaggaatgcagagaggg

SEQ ID NO: 713 - DNA, 1049 bp, Homo sapiens
acagttaaagttccatggtacctcttgtacacagagctgggcaagtctttgtagggagtgtgcagtaggaggcaaagtactgcttagcatttgtagtaaagaaaacaggtaagaaccacaaaacaaatatttgaataagtttaattactacaaaatttgttgtgtggaaaaactgatgttaataaaatgagtgacttaccatttgctccactgtttctcgtcctcatagcctgatctggaaaatttttaaagtttctataattgtcatttaagtcttggtcagaaggagggggcatcatatttgtgtccctgtttgcctttcttagaatggttctcccaagagcgaatcctatggtgtgctcattccaggttataaaggcccgtttcctctgatatatccttcatggacatagagaaatttagaatttgcctctagtttggtgttcttgtcctttgagagagcgtttttgttaattaatttttgaggctttcaattgctgtgcttttcacgtaatatgttagttgcattaaaatggacaggaactcaaatatgagtttctagacttatgtgacaacttggcattatacaaaatacacattcttccactcaacaagtaattcctccaaagtctccaaattggtaagtggaagtatagcataaaaattaacagcttgggtttgcaagtcaggcagatgtgggtttcagtcacggcactattacttactagatgttttttggtaaaatcagttactatatttttgtctttttgcctccattcactttgtcatttgctcaaatctttccatccatgcatccatcatactatattattttagttccagttaggtgtaggcactattctagatactggagatacagtagtgaataaagcagacaaggtccctgtgctcatggagtttccattctacttaagagagacaaaaacatgtatgatatgccatatggtacttactgctatgaagaaaaataaagccagatatcagagaggaggatgtgtgtttctgtgggggtgagggtttaaatttta

SEQ ID NO: 714 - DNA, 1031 bp, Homo sapiens
tatctccccctgttttagacaaccaatgtttcaattgcccattctacttctctatcaaactattactctaaggaggatatctcactctgtccattgttggacattatgggctgtatagtgtgttccttggtctgaagaatgatggtgggccatccaaatccatgcaatatcttccgttctgttttttttgttgttgttgtttttgtttttactctgagaatttttatcttccatgggataagcaaagcccactccagagtcagtgtctattcctgtcaagacccctttgtagctcccagggctaccggcatcagtctcatttgccagccatgttcagggccttcctaccagagaatctgcgccatagccatcagcaatctctgtctctgttgctgagaaacagaacagttctttctggcattttgtacctgaaagggtgcaaaaggatcatgtctagattcagctcacctctgcactgctgcattgcccccatactcactttttttcagggactgagttggccacctcaagggagcacatgggatgtctacttatccatccctgtcaccttaatgcatccctcaaatctccttagggccatgctccatatgggcattcttttaacaggccagatttccattgtcctctcacctgagtatatagccaagccattggttacattgcatgaggtcagtaaagactcaaacacaggggcttctaccattgttcaattcttccatcagtcactgttagaaaaatataatgcaattcagcccaccaagcagatctgtttttaccttctttgatcagaggagtagtcttccaaagcaggatgatggttttcatttaccttggaattgccatccatgaaccaaacagctcttgatcaattttttttaattaaattttatttggaggagatttgctctgctgaagcaatagaaattagaattggccaaaaatatttttcctttcttttcttttttttttttttttttttagattcaggggtacatgtgcaggattgttac

SEQ ID NO: 715 - DNA, 1048 bp, Homo sapiens
gcccggccgatgttggatatttttttcatgagtttgttggtcacttgtcttcttttgtgtctgttcgtttctattgcctactttttagcagatttatttgtttttttcttacgatttaagttccttatagattctggatattagtcctttgttggatgcgtagttggcagatattttctcccattctatgggttgtctttttattctgttgattgtttcttgtgctgtacagaagctctttagtttaattaagtctcatttgtccattttcgttttggtcatatttgtttttgaggtcttagtcataaattatttgcctaggccaatgtccataagagtttttcctaggtattcttttagggtttttatagtttcaggtcttaaatttaaatttttaatccatcatgtgttaatttttatatatggtgagagataggggtccagtttcattcttctgcatatggctagccaattttcccagcaccattcattgaatggagtgtcctttccccattgattattgtggtcaactttgttgaagatcactttactgtaggtgtatggattgacttctgggttctctgttttatttcattgagctgtgtgtctgtttttgtaccagtaccatgatgttttggtgactatagccttgtagtataatttgaagtcgagtagtgtgatgcttccagctttgttatttttgcttacgattgcttttactatgtgggctcttctttggttccatatgaattttggaatggttttttctgattctgtgaaaaacgacattggtaatttgattaaaattgctttgggcagtgtagtcattttcacgatattgattcttcctatccatgatcataggatgtttttccatttgtttgtgttgtctgtgatttctttcatcagtgttctttagctctccttgtagaggtctttcatcttcttggttaaatgtattcctaagtattttattttggttgtggcaattgtaaatgggattgagttcttgatttgattctgagcttgaatgttggtatatagaaat

SEQ ID NO: 716 - DNA, 1058 bp, Homo sapiens
gttacataggtatacacatgccatggtggtttgctgcacccatcaacccataatctacattaggtatttctcccaatgctatccctccctggactttttaaagtttttaatgcagaggtatggattagtgatttcaggtcttccttttttgatataagcatttaaagctatatatgtgcctctaagcactcctttaactgtattccataatttggtgtgtgtgtctttattatagtgtaattcaaaatattttctaattttctttgtcatttcatctttgaccaatagattatttagaaatatgtggtttcgtttccaaatattggaagattttatattttattgtagttgatttctaatttaattctgttgtggttagacagcataatttatggaatttcaatattttgaaatttcttgagactttttttatggcctagcatgtggtctttcttggtgaacatgcaatgtctgcttgattagcttacctgaactctagcccatgcctcctcagcttagtggaactactgtgctctgcttgaactctagctgtctgcccttgtaagaaaattgctcccaggcagctgaggagggagcagcctgacttttgagtttcccttctttctgggttttctttcttgcattacatgtgtcccagtgcctgaaaactattacattgtatattttgtctattcttatggtaatttgtagtagaatggctagttctctttcggtaatgtcatagttacaggtggaagtttgccaatctttaggtccctgcctaaaatcgaaactttttttctttagttctcactgaagacaaagcgtgtactttttacatcaaatgtaaagctataaaattctcatttatttctactttcttgttttcttctttaggtaactcgacagtatgtaaagtttgttgtttaacatgacttttgtccctgttataatctatagaactgaataatatttacttaaaaaagttaggtatctttttctcactttattatcagttaaataaataatttcatttaaggctttatcataggcagtga

SEQ ID NO: 717 - DNA, 1066 bp, Homo sapiens
tgagatcataccactgcactccagccttggagccagaccttgtcaaaaaaacaaaaactaacaaaaaaacacactctggttatagttagaaggccactaggtaagagacaatggttatttgaacccatgatgattcagataagaagtggtcagatttggggattattttaaaggtagaattgatagaggaggaagagatatccaaggattgagctctggggcaagttttagaggttggggcgatagtgaggaattagactaaaatgaattagctattcattcaggaacaaggactaggagaagtatcttagaagccagttgaaaaaaaaatgttaaaaaaggaaagcgtgattgatcagtaggtatttgttaagctttttgttagagaatagtaacctgaaaaactaaaagtttaagtgaaacacaatgtatcacacagatttaagtgacattatttgatacaggagcttaaattccacagacagtttgggacagtgatagactgacataggacaatgttagaggctaacttctctctgaaggcacctcttctagacgtactagcgcttggcgtatgaggctgagaaagattgtaagttgggtagcccccaagatgtacccagtcctggcacatggttttgagtatctcttgatgactatggtctcagaacacacaacctggagcaacatcttacagctttggagcttgttaaatttcatgtttttttttttttttttcatagacttactaacatgtgtggtcactgtattagtgcttcattccattcttcttttgtatccatgccatgcaaagtgccagttcattgatatgacaagattattttagcttgttgtttgctagatatttttatattcctttaaacattcttgagaatctgggatgcagttatttagaaattgtttgatcctttgaaggaatactttcaggctttgtttggtgagaccagggcagcacttgaggctaattttttcttactactgaggcaatactttgagtactctatttgatgcccatgtattgtgagttttttccactcaggctgat

SEQ ID NO: 718 - DNA, 1044 bp, Homo sapiens
atttgatgagtataactattataggctgaattatgttctactaaaatttgtataggttgaagtcctaacccctagtaactcagaacgtcactgtatttggagacaggatctttaaaggggcaattaaggttaaatgaagtctttgagatagatcctaatccagtatgacttgtgtccttacgagaagaggggattaggacacagacaagcacagagggaaggccatgcaaagacaaagggaggtagccatttagaatccaaggaatgaggtcatagaagaaaccaaccctgctaatgcccttatcttggacttctagcctgaactatgaggaaataaatttctgttggttaagtcacccagtttgtgatacttggttatgtatggcaaccctagtaaaccaacacagctattgaggcatttggctgcattgccccagagttggaaaacagtgtccccttgcatcatagtgtagtgaggactagccctgcttaaggtcttaagcctctttattgactgtatcttagggatggtcttaggaccttacaaattgttgcccgtaataatttgaaggacaatgaagatacagtcttgaaatgatacccactctagctctgtaatacattgcgttttatgccttgattggaaggaatgagtctgttataaacaaacgttgatgctagctcttaagtgtctcagatgggtatgatgaaccttaagaggcataataaatttcattgtgatttgggttaaattaaataaccactaacctttactccatttgcatgtcttctaagaaaatgattccagagtattgattggcactcagatgggggtgttgcatttttagagtaagagtgctagattgactttgtgttgtaagtggtgtccttgaagagaggaggcagttgtgtctctggctattcactggcccagctgtaggcctgctggagagagaagtttgatgttaacagcttaatggaacacagaatgacttaggttttgaatcagttttgaattgccatagactttgtcagccctgaagt

SEQ ID NO: 719 - DNA, 1057 bp, Homo sapiens
cctaatgggtaatgatctgagcatcttatctcattgttagccatttgtatatcttttttggtggaatgtctgatcaaatatttttgttcatttaaaaaatctgttcgttttttttttaaatattgagccttgagttctttgtatgttctagatacaagccctttattagctatatgatttgcaattattttctccctgtctatggtggttctttccatgtatttggatggtgtcgtttgaaatgcaaaaattgataattttttattttttattgatcatgcttttggtatctaagaacttacttgcctaacccaagctgttttttttttccattttcttccagaagttttacattttctactcctaaatttaggtttatgatccatttgagttaatatttatgtatggtatgaggtcaaatgtgtgtgtgtgactgtccaatttttctagcagaattcgctggaaagggtatccttctactattgaatcctcttgacacctttgttgaagtcaattgaccacaagtgttaacagtttatttctggactctctcttgccttccattaatctatatgcctatccttgtgctaattccacactatctttgtttaatgtggctttatactaagttttgaaatcaggtggtataattcctccaactttgttctttttcaaaattattttatgtgttttgggtgctttgtgttgctatataagtatgaggatcaatttttcaatttttttttgggggggtggggtcgcaggggacagtcttgcttggtagcccaggctggagtgcaatagcgcgatctcagctcactgtaacctctgcctcctggattcaagtgattcttgtgcctcagcctcccaagcagtgggactacaggcatgcaccaccacacctggctaatttttttgtatttttcctagaaacggagtttcaccatgttggccaggctggtctcaaactcctgacctcgtgatctgcccaccttggcctcccagagtgctgggattacaggtgtgagccaccgtgcctggcccaatttttcaattt

SEQ ID NO: 720 - DNA, 1049 bp, Homo sapiens
gggttttaaaatcgtaggccacacacctatgataacctgatctttgacaaagctgacaaaaacaagcaatggggaaaagactccctattcagtaagtggttctgggataactggctagccataagcagaagactgaagctacatagtacccctcctttacatcatatacaaaaatcaactcaagatgcgttaaagacttaaacgtaaaactatgaaaaccctggaagacaacctaagcagtaccatcctggacacaggaatgggcagatttcatgacaaagacaccaaaagcgattgcaacaaaagcaaaaatggacaagtttaattaaacttaagaggttctgcacaacaaaagaaactatcaacagagtaaacagacaacctacagaataggaaaaaatatttgcaatctgcatctgacaaaggtctaatattcagcatctataaggaacttaaacaaatttacaggagaaaaacaaccccattaaaaagtgggcaaaggacgtgaacagatacttttcaaaagaaggcatacatgcgaccaacaagcataagaaaaaaagctcaatatcaccgagcattagagaactgcaaatcaaaaccacaatgagatctatcatttcacaccagtcagaatggctgttgttaaaagtaaaaaaataacagatgctggcaaggttgtggaggaaagggaacacttacacactgttggtgggagtgtaatttagttcaaccattgtggaaagcagtatggtgattcctcaaagagctaaaagcagaagtaccatttgacccagcaatttcattactaggtatatacccagaggaatataaatcattctgccataaagacacatgcacacgaatgttcattatagcactattcacattagcaaagacatggaatcaacctaaatgcccattaatgatagatgggataaagaaaatgtggtacatatataccatggaatgttatgcagccataaagaacaagatcatgtcttttgcgagaacatggatggagctggaggctacgatcctaagtaaac

SEQ ID NO: 721 - DNA, 1061 bp, Homo sapiens
ggttcagagtagtgggagactgtcaggttagagagtggaaggcattccatggtgactgaggtagttaggggtatgggcatgattggattcctcctgatggtttcttaggggaaaatggttatcatttctaatgataatctctttcttgagattgatctcattccttccatcagccctacagagtctggctgtggccttccccatagcttctataacctacttctttttctgtcattctcccctcctgtcatccactcttgacttctttgctatttcttgaacatcccaaatttgttcttgtctcagtgcctttacctttacttttctctctgcctctcagctctacttttgtctgagtccttcatatcattcagctctctcatcagacttcacttccctagttagcactcccacaccagtctcttatttcctttctccttttctccctctccctccctccctctctctctctctccctctatccccctctccccctctccctctctctccctctttctgttctttcttcctcttccttttcccacagcactgttcactccagttatgaggatagagactgttcttttgttccctactgcttccctcctaagacactgcctagtgtgtagtaggtgttcaataaatatttggatgaatataaatggcaaacttccctaatgccttcaaaagatagactgactttcaaataaattgatatagacttttcagtaatagatgttgcatgaaatggcttttcatcaccatctggttttctccaaccagaagaaaaagcttcagacattaacatgtagtggaaagcccgtttatagaagaaacccagggctgttctgacatttattctgaaatgagaatattacttaattcacggactaaacgttctaaaaataataatttcatagattaatagttttggggggttcttagagaatatgagaatattttgacttgtgctttttattttgtaaatcaatttgcagtggtcattcttcattagatactgtttaaaacatggtttttgcccgtagggagctccttgtgtt

SEQ ID NO: 722 - DNA, 1050 bp, Homo sapiens
cctgagagtctggtgattctgaaactgaactttgtccttgggagaaggatctcaccttctttggctcagattctcttagcctagaagccagccttttagtgtgatgatggcccctttccaagaatcagtaaatctctcaatcacaagctgtcactttagaagataccaccaagagaacagggatcccagggaactggagacatacttgacctttaaagcaaagctctcattgtgcttaggtgctttcctctaaaaaaattgactgaaattagctggattagctcaaacagcacatcctagatttttagagaaactcagcatacatctatctgacctgacctttttatcatataggaataaatttaacatgtctagaccttgtatatagttgcacaactaatgtgagtactgagcagtagttactactggctgctcttctctagatgattatctctctatttagattctccacagttagcatttagaactaaatcttcctactcaagtggatttgattgagaacaccacctggccttttcagcctgcctggatctgtagactccagctttgagttaatgtgtgtaacatgcttagtactttacaaatgttagcatctgtattatctcttagcaaatcactgcagaaaatctagggggcaagaatggacataaaagcccagtttgtgactgtagactatacttatccagctgttgagacaggcagcactgattgttccacgcagatcccacatggcattagattatatcctcaaatctttttttttatagataattttattatactttaagttctagggtacatgtgcacaacttacaggtttgttacatatgtatagatgtgccatgttggtgtgctgcacccattaactcgtcatttacattaggtatatctcctaatgctatccctcccccatccccccaccccacaacaggccccggtgtgtgatgttccccttcctgtgtccagtgttctcattgttcagttcccacctatgagtgagaacattcggtgtttggttttttgtccttg

SEQ ID NO: 723 - DNA, 1026 bp, Homo sapiens
tgccctcacctatatataggctccccattatcagctccctaccagagtgctacatttgttacagttgatgagcctacactgacacatcacccaggcactagtttacattaagattcactgttagtggtatacattttgtgtgtctgggcaacattatcatttaccattatagtatcatacagtcttttcactgtcctaaaaattatctgtgctctgcctatttatttctttctccccttaactcctggcatccagtaatcttttgactgtctccacagttttgccttttccagaatgtcatatagttggaatcatacaatagccttttcagactggcttctttcacttagtaatacgtactgaagtttcctccatgtctttccatggcttgatagctcatttctttctgaataatatcctgttgtctggttataccacggtttatttttatccactcacctactgaagggcatcttggttgcttctaagttttggcaattgtgaaaaagccgctataaacatctgtgtataggtttttgggtagacgttaatttttaacttatttgggtaaataaggagcacaattgctatattgaatggtaagagtgtatttgattttgtaaaaaaaaaaaaaaaaaaaactcttcaagctgggcgtggtggctcacgcctgtaatcccacactttgggaggccaaggtgggcagatcacttaaagtcaggagttcaagacaagccgggccaacatggtgaaatgtcgtctctactaaaaatagccagacatggtggtgtgcacctgtaatcccaggtacttgggaggctgacgcaggagaatcgcttgaaccagggaggtggaggttgcagtgagccaagattgtgccactgcactccagcctgggcaaaagagtgagactctgtctcagaaaaagaaaaagaaaaactcccaggccgccttccaaaggggtggtaccattttacattcccaccagcagtaaatgaatagctcctgttgcatcatatccttgcc

SEQ ID NO: 724 - DNA, 1121 bp, Homo sapiens
tgaaaatgcaaaagaagctgggtgcggtggctcacgcctgtaatgccaaccttttgggagaccgaggtgggcagatcacttgaggccagaagttcaagaccagcctggccaacagggcaaaaccttgtccgtactaaaaatacaaaaaaattagctgggcatggtggcgcacacctgtaatcccagctactcaggaggccgaggcaaaagaattacttcaacctgggaggcagaggttgcagtgagcaaagatcacggcactgcactccagcctgggcaacagagcgagactctgtctcaaaaaagaaagaaagaaaatgcaaaataaaatcacaaaaagatattatatgaccaataatggcttaaagagtgacaaaaccaagtatagatgagtatgtgaaacagtaggaatccataagtgctgctggtgagtgtataaattaatacaactattttgcaaaacagcttggtgttttcttacgtaaagtacagaaacaagcaaactagaacacaaacggacacatattatataatctcatttctatgaaatgtccaggatacacaatttcatagaggcagaaagtagattagtagtagccaggggctcgtgtagatggaaatgaagagtgactgctaacactcgagtagagggaaatgaagagtgactgctaacaggtatagattcatttttgggcgataaaaatgttctggaattatataatggttatgattgcatagctttgtgaatatactaaaaacctctaaactgcacacttaagggtaaatgttacatgaaagttatatctcacttttaaaattgtatgagagaaaaactagagtgtttagagttgcatatttagttggtaaagctataaggaaatgattatcataatattgactttagatggggtaaagggaggggttttgatcaggagggattatgtggagggattttggaagatggcattgttaaacctagatggtgtttacacaggtgcttgctatataattatattcctttataactagttaaactgtataaatgaagcagctgattcaaggtcaactgactgctcccagttttgtttataacttgtttctctgggatgaatcatcactta

SEQ ID NO: 725 - DNA, 1054 bp, Homo sapiens
gtatagtgcttctctgaattctattagttgttctagtaaattattgaatgtgggagggctgtgagtactccctgaacttgcagctagtcagccagatatgctggtggtcttggcccctccccctgccatccccacaaagacttatgactggtgttggaagtgcggcagtcttgttgaggactttgctcttaaactgtggggtctatgctaactctatatggatggcatcagagtttaattgcagtatacccaacttgaggtagtgtcagaatagcatcttctgaaaagtctgcagagcctggccagttggaaagaatgcttgtttattatattgttgcttgcagttggtgggaattcatcattacttccccttgcattacagatgccttttgccaaagatttccatcacatatatagtggtctgttttttgctattaccctggcaacaactccataacttggaaaccatttcttttctccaacgttggccatatttggtaatgtagaatgttgaattgtgaatcagctctaaaaatcctaataaataaatgaaccttaaaaattgattacttaataagtacagtatttaccttatttatataagagcaaagacttatcatatgatgcctttcattctggtaggtgtcaccaagaattcaatataagactcagaaaaagtctttgacttagaaggtgttgtaaactaagcacattctgatttcattatcatggccttatggaagccctcatcacttttcatttggcttatcgaagataccccctaactccttttccctctctattctgtccattctaaattttagagtaagacacttttttttttttttttgtctgagacaagatcttactctgttacccaggctggagtgcagtgacatgatcgcagctcactgcagcctctaccttccagggctcaagcagtcctcccacctcagcctcccaaatagctgggactacaggtgtgcaccaccaccctcagctaattttttttagtttttgtagagatggagtctcactattttgcttaggctgg

SEQ ID NO: 726 - DNA, 1033 bp, Homo sapiens
cgacagagcaagactccatctgaaacaaaacaaaacaaaaaaagaacaggaagagactaaagccagagaacctccactgggtggctatgtaaagcctctctgaaggatgagaagcagctgccatgttaggtgcgaggacccaggtgtgtgtagaccattccaggcagagggaacagcctgttccattgataccatgggtctgtttcattgcctgggtttaggagtaggaccaactaggaggcttcagggcctggttttttaccactgagacccaaacaggtctatgctaagtggcatgacatttgagtcatgtgcatggaacatggatctctgggctgtcctcttatacaacatagtaagaaaagctgctggttattggtgggatggggagaagtgtttcaaccctgccaaacagagtatcaggaatcgtttgtttctgtgttactggctggcgctttggaggatcacattggtttgcaatgtcaaacaaaagacagattgaattgaacactaaggatagacccattggtcctacaatttcacttcaaactatcacacattcctaaacagaaggaatgtgccaagctagaccaaataccaagattcaaaaagatcactctctctggttcctttggttctcactataatgtgtatttttttactacagccatagccacagagctgacaggtaatagcgggtataatggggagaggggctgggaaactgctatgcatggccagacaatatggtttgtgatgttgtggttggtgaaaactggttgtgatgattcttctctgactgtgggtatgaacattgggcctttcatgtcttgcaaagaggcccaaagggatctccctctacctgctggaaccaaggctcagagctcatatgcttggaggcaggaattgctgaatagttccaaacttctgagcttagggacaagtcacccttattcccacagctttgcacagtcagatgactgcagtgaccagatagaggaaatagaggcatcatgtggtggcatttcttcct

SEQ ID NO: 727 - DNA, 1047 bp, Homo sapiens
tacatttgcctaaacacacactggaaatcagaaatcaccacctggtagcaaaagaaataaggcagagtcttagatagacagcttagataggcagctaagaactcgttcacagatgtgtatctgtcattttgacatgactgtgtagttaggtccctaagaggtttggagccagacctccattctcctctgctggggatccaggccaggctcatgttcctatccacagtccccccattccaactcaccatctgtgaccagacaggttcactaagcagctctccaagcacctgcctaactcccttgggtcctaaggttaagtaagaggatcctgagttaaatgaaactctctctcacttaacaaacttcccggtttagaaaccagcagtgcccatacactaagtttacacagttgggaggtccagtggaagaacagaggaatggaaacccatttgcctggggaaatgaaagacttcccagaggagacacaatatttgaactgagattagaaggagaattaggagtttgtcaggcaggcttggcagggtgaaaaagccacacactgggaagagcataaacagacaggcatgaaacagcatagtaaaggaggaagatagcaaacacctgtgtgtccgtacagcaaaagagcttgccctggagggagttgggggagatgggcaagaccaggtgaaagagggccttgaatataaagctaaggcatcttgagttgactttacttgaaggtgatctattaatgtcttcagttatcaggtttcccaaatggcagtttaaggaaaccaggatcagagggagcccattattttgctatttccaggtccttcaggcttagctccaactgagctggaactagaagggaagtgtttctttcttgcttttcttcccaggccaccgcacaaatggaagagcgactagcagagtttatttcctccaacactccagacagcgtgctgcccttggcagatggagccctgagctttattcatcatcaggtgattgagatggcccgagactgcctggataaatctcgga

SEQ ID NO: 728 - DNA, 1052 bp, Homo sapiens
ggtaaaggcaggggtcagggtgtggccaggactgaagccgggtcagcctttgatctcttccatgtgagagtgtatgctgcccagtcctctgggcagatgcctcggggtggaccttctcactcccagaagcctcctgggtgggcaggagttcagattcctctgacatccgatcattgttcctttcccagacaagattcccacgcctcttactaccacgcatcctccattccctgagctctggggaagcattgagccgtgtcatcaggacatggtctatcaagaagtttaagagttctatggaccagggggtcccagacccttctcactgatatgcatgcccttgcccccttgttctgtgcattaattaaggtgtgagagaaggcagtttgggtggcagagagcacagctcaggtgctgagggtccatgggggatgggccggactttgtttcccagggctgtatttctggtgcggcacaagtccacccggcagcgctttgccatgaagaagatcaacaagcagaacctgatcctacggaaccagatccagcaggccttcgtggagcgtgacatactgactttcgctgagaacccctttgtggtcagcatgttctgctcctttgataccaagcgccacttgtgcatggtgatggagtacgttgaaggtactgaggcaaaggtggcctggcatggaggccaaggcacagtctgagacttagccttaaacagggaccagcagctttgtacagaggtgaagtttcagggcccagctttccagtccacctttggcattggtttctgcctcaggatcacagagaccatttggccacagtgggcacaaagctccctgcctctaccatgagaggcattctgggataggatgtagcaggccagcagctatagaatcttgcaccccaaagcctgcacgctctctactgctggtatcagacagcaacagaggaggcagcagagctacaaaagcccaggattaggtgctaggaggtttgcatctggaccctcagaagaaaggaaagccattaattaccctgactgg

SEQ ID NO: 729 - DNA, 1086 bp, Homo sapiens
agcgatcctcccacctcagtcccctagagtgttgggattacaggcttaagccactgtgcctggtcctttgggccttttaaagagactttattggttgtccacgattgaaacatggacaaccatatcaaaatgttattggacaaaaagggtctgatcaaaacccagcaaagcctgtctgtttagattcttattggcctctctctgcggcattccttcctccagggtatgagtcaggaccttctctggaatgagggtcttatgacccacaatcagattagagttctactctgggaaggtgagaggagagcaggagaaggtcagaaagagactgtttcctgaagcctatttctgagtgccccagcattataacaaacactgtaacaatggctatggggcttatgagccaaaaactggatgaaaacctgcacacacacacacacacacacacacacacacacacacacacagtaatatcacaactagtaaataagtcgaccatagtaatatgtagagccaaatagcctaccatttattgatttacagtattatacttgtcagatggtatgctatgcatgttaatatgttccttcgatgtctcatgacaaacctttagatagtacctcatattataataaagaaatgaaggtttaaagaaatcaattttaatttcatatggctcattaatggcaaaactggaactcaaatctaggtccatttaattccagtgtctaattttctcaatgtacaaatatatatatatatttttttgagacggagtcttgctctgttgcccaagctggagtgcagtggtgtgatctcggctcactacaacctctgcctcggttcaagtgattctcctgcctcagcctcctgagtagctgggcttacaggcgtgcgccacaacgcctggccaatttttgtatttttattagagacggggtttcaccatgttggccaggctggtctcaaattcctgatctcaggtgatcttcccacctcgacctcccaaagtgccgggattacaggagtgagctaccacacctggcctcaatgtacaaatattaatgcatggtcttactctggttt

SEQ ID NO: 730 - DNA, 1044 bp, Homo sapiens
cagtcattgcagcagcctcaccagcagtcaatatagcctgacaggcgggagcccaggccgctcaaggcgaggcagctgggacagcctgccagacaccagcaccaccgaccggctggacagtgtctctattggcagcttcctggacacagtggcccccagcgagctggatgaacagggcccacctggggctccacgttccgagatggactgggcaaaagttatagctggtggagagagggccaggactgaggtggatgtggcagccaccaggctagggagcttgagagctgtgtggaagcccccaggggagaggcttcaaggtggaccacctgagtcaccagaggatgagagtgccaagctgggcttcgaggcccactggttctgggagcagtgccaggatgatgtgaccttcttgtaacaactattccacccttttgtaatcctgtggctcttttatccattagatgtggtctcccccaaaattgattctccctcagtctgagactaggaagaggctgcactgaaatcagttaccatggaaacctggctcatcatttctctagtccctagggagtctctgcctttatccctcaattattgggtccctagagctagcttgctctttctttctttctttctttttttgagacagggtcttatgctgttacccaagatagagagcagtggcatgatcacagctcactgcagccttgacctcctgggctcaagcgatcctcctatttcagcctcccccatagttaggaccacaggcatgcaccaccatgcccagctaattgtttatttatttattttttttttgtagagatagggtttccctgtgttgcccaggctggtctcaaactcctgggctcaagggatcctcccgcctcagcctcccaaagtgctgggattatgcccagcccctagagatacttctatagagatattgactctaaaggattgacctatggcttttggtatttagtatctctcactactccccccagctaagtaaggatttaaggaatttaggactccctggag

SEQ ID NO: 731 - DNA, 1028 bp, Homo sapiens
atcctcctgtcttggcctcccagagtgctgggattacagacgtgagtcactgcagccggttgggagcattgagctctgggggtgggttgagggttaaaaggcagagggaaaagagctcattaggggactgaagatgagatcccagaaaggtggagagtagtgtcatggaaatcaaaggcagaaaatatttgaggagtggtcagcttcgtcaagtaagatacatgtccattggaattagggtcatgtaggccattcgtgatcttggccagagtggaaggggcagaagacaggaagagtgggaggaaagaaggggagctatataacttactagaagtttgcctgtggagaggagagataagcaatcaaatgaatatttgtttttaagataggagataattaagtccattttaaatgctggtaagagctagtagagagggagaggttgagatacaagagtgatcagtcataacagagtgattctctgcagaaatgggaagctttagccttggtggggaggagggatgctgtctctcatctatcagaaggaaagattggtatgaattatcagtaactaaatgaacagagaataagagcatgctccctcccctgccccctgctatagagactggtgagtcaccaaaccagatccctgaaggttggccattccttttttttttttttttttttttttgagacatagtcttgctctgtgacccaggctggagtgcagtggcgcgatctcggctcactgcagcctctgcctcccaggttcaagtgattcttgtgcctcagcctcccaagtagctggaattataggtgcccgcccccacacccagctcagttttttgtacttttagcagagacggggtttcaccatgttggcaaggcagatctcgaacacctgacctcaggtgacctgcccgccttggcctcccaaagtgctgggattacaggcgtgcactgtgcccagcaggccattccattttgcaggctgagccctcagacatttttggccaggggtctccaca

SEQ ID NO: 732 - DNA, 1034 bp, Homo sapiens
ttgcttgaacctgggaggcagaggttgcagtgagccgagattgtgccactgcactccagcctgggcaacaaagtgagactccatctcaaaaaaaaaaaaaagctgaatgggataatggtcatatagagatgcccaaactgagtttggaggcattctcagagagagagggtcatatgggagctcgggaaaggttatgtgaaggacaagtatttgagctgggcttgctggagctcctaaacatagattcaggtgacggaatgattattggtttgtaggtcctctgggctctcgagcattgggcctgaaaagggctggggtccgccgggccctccatgaccccctggaaaaagatgccttggttctgtatgagcctcccccgctgagcgctcatgaccagctgaagcttgacaagtatgtgcactggtatttcataagcagttttggttctctgtatatgcacgcatacttgggagggcagagggtattttggtgtgatttctttttaggattgacatatgttttcagagagtagatgattggggaaggagactgcctggggaagagcctgtggtcatgtccagtgagtgggcattcctcatcccctcctgccttcccaggatgctcactcaggaggaggagtgattgaggtgatgacacagggaacccatccctctctgagctaactttctaactcctaaagtaggaacttgctatggttttacgatttatcagccaagaaggtcttcttttaggcagctgcctctgttgcctccggatcagcaggacacagcttcctgagggtgctcccttgcccatgtctgagcacgctgttttctttgctgtgttttctcagggagaaactccctgtccatgtggttgttgaccctattctcagtaaggttttgcggcctcatcagagagaggtaaatgagggtgaggggaacgaggtatgggctatgggctgagcctgggagactaccatccctgggacagcagcagcgtaggtgccaaagtggactgaaggctgttattct

SEQ ID NO: 733 - DNA, 1193 bp, Homo sapiens
tcattcaactaatattcactgagctttgtcctatacactgaaattatacaggcgaatctgacatagtctctgccttaagaaatcctagtctctgcctagttgagaagataaagtacagtagagtgtgattagtactctagtatatatattatggatgagggcagagtggtacagtgtccagactcagagtcatacagacctgagttcaaatcccagctctgctactttctaccggcatgattttggataactgtttacctctctgaatcttagtttcttcatctctaaaatggataatacaatttccattcgtgtggattacagaacagaatacaggtaaagtgtttagttagtaccatgcctaccacattaaacgggttcactaaatagtagcagccattacgtatatagtgccacaggagcacagagttgagagagacaagcagcctggagtcactgaggaaggctttgcataggaggtgacatctgaggaacttgcctgtggaaaagagctctaggcagaggggtggcatgggcaaagagacataaggaaagccagcattaggagtgacaaggtcaggattcctggaccgtgacaagcttggagagtgtcagagaagttcactggggcctcattgagaagggctttgaatgctaagctagtgagcttaaagagcttggacttgatgctatagatggaagagtcagtgaagggtctgcatttaattgcgttgtcaaagcctgacccaagggagcaagactgattgctgattcttggttgagtggttgagttttgtgtgccttccccagtatggggctggatgtagaaaaggtatgggcctaatcttgcccatgtagttcttggagaaagagggaaggttgtcctttatgattttcttgaaaaaggcttaaaagaagtagtagaggtgtggagagaatgggaggacaggacagggagaatagagattggggaagagatgtgaagggaagcagagggaagctctttagctctactagctgtgaggattctggtgggacatggagcctggtccaagtccctttaacactgatggcccagacaaggcctggagtctaatacagaaggcgtctggctcagaaggttctgagttgggtaggctgatgtggaggggaggactccctgaaagcatgggtttgtcatatgtccacatgat

SEQ ID NO: 734 - DNA, 1027 bp, Homo sapiens
gcatgttatgagtacactacaatttattctactggtttggttttgtttgttgagacagagtctctgttgcccaggctggagtacagcgttgcagtcatagctcactgtaccctcaacttcctgggctcaagcaatcctcccactttggcctcctgagtagctgggactacaggcatatgccaccactattggctaacttttaaattttttatagagatggggtctcatatgttgctcaggctggtcttgaattcctgggttcaaatgattctcttgtatcagcctcccaaactgctggaattatgggcatgagcccctatgcctggcttccatctttttctgtttggatatctggttcaccctacatcatatattgaaaaaaccgttctttcccccattgctttgcagtgctaccttcttcataaatcaaatgttcatatatgtgttgctctatttatggactctattctgttcctctggtccgtttgtctccttgtgtcagtacttctctgctttatttactgtggcctaataagtcttgatatccattagtgtgaatattccaactatagtcttttttttttttttttgacacagggtctcgctttgtcacccaggctggaatgcagtggtgagatcatggctcactgcagccttaacttccgggctctagtgatcctcctgcctcagcctcctgagtagctgggacaacaggcacacaccatcatgcctggctaatttttgtattttgggtagaggtggggttttgccatgttgcccaggctggtcttgaactcttgagctcaagcaatctgctcagcctccaactatattcttactccttaacattgtcctagatattcttggccctttgcattcccatgtaaattttagaatcaacttgtcaatttatacacctactgcctgccatacccaccaaaaaactctaactggattttaattgggctgtattgaaacagataaattctgaaagatctttcatttttataatacggaaccttccaat

SEQ ID NO: 735 - DNA, 1045 bp, Homo sapiens
ctgaacctaaatgttccctataagaaggttctctgcatggacaattctccattcacttccttctttccctaacactggccaccctctatgcgggggtggggatcagagaaaagtctatgaggggagcctggcacagtacatttattttgccccaccaccaccattttgtccacctctgaaaggtaagagcaacttttgggtgaagcactctaaaagagcgatttctcatgtttagtagaggaggaattgaggttggggcttttagaaggaaaatcatgcaggttctatatccattttatagctgaggacacaaggccaagaaaggaacagtggtttgctcactcagattatggcagaaccatagtgaagacccaggaaatgtccaggttctgaataaggaacttaccttgcagagtcagattctgtagcaaaaagagcacctcgctctgacagtcagcgagattcatgtcatggaagctcagtcttttcagggctaggttgtactctggataggaggcagagaccatggaccatggaccttagctttcctagagaacagtgctaggtccccacctactcctctcccttcaccattctggctgggtcctacctttgagtgtttgcaaaacaagcccaaaatcctggggagaggcaaaggtggcactatccagggacagctgctgcagagaacccgaggccttcagaacggagcacagcagtggggctggctgggctccccgtggaaatcccatctccaactgctccaggcagttttctggatatggtggggaaagaagattccagctggccatctctacctcactcccatagcaggtcccatcctgttcttaagggattcatctaaaaaattatttattcattcacttgtcgttgagtgcctaccatatgtcagcactgtgctagattctaggaattgagcactaaatatgagatttagtccttgcccttgtagaaattttagaccaggaagacaggctacccagacacaagcaaataaagtatgcagagtggtgggataggagac

SEQ ID NO: 736 - DNA, 1473 bp, Homo sapiens
ggtgctcattcagactaaagccaaggctgtgggggcctgaggttccccaagactaaaacatttctttgatccttaccctgcctccatgcattcctccatactggagtgactctcagttcctatttgaggttcttagaaggaactaggcctctgctgtcctcaagcaaaagtgtcattcctgttgccttagctatttccccagactccacttactgtggtaatagttaggaatgacttcctgcttgaaataactgcatagcagcaacacagaaaggccttgctcatcagcagcaggacattaagagcaggaaaaacaatacctggcaaccaaatctctgctcaactttgagtgaaggcaaagaaggtatccttcggtcctacctcacactagcacttttcctacagatttgctggcccacacccagtcttgaaaaacacttgcaggtaaccttagcaaggcttcagctttataagtgagtgagtcagatggttattacaatatctgtgcctaaaatatggacaaagatggtgagtcaagatattgtggctgtttctggctataagaggcacaggggaaatataggttagataggtaaatactggactttttcagacatgttaatggttgatgaagacaatgggagacagaatatttggaacaccccagacacaactgcagtgagcagcatgacacagtgatcaggaacatgcactccagaagcagactgcttcaacctgaatctgggtctgccattcactaactgtaatttaggcaagtcatttcacctctttctgccttagtttcatcatctataaagtggaagatcactatactgacatcacagcatttttgtgacagttaaatgagtaaagttatgacagctctcagtggcttctttctcacaaattaacgtacgagcagacaagagatcatgaagttttattccatcaccactcttaagaatctatgggccgggcgcggtggctcacacctgtaatcccagcactttgggaggccgaggcgggggggatcacaaggtcaggagatcgaggccatcctggctaacacggtgaaaccctgtctctactaaaatacaaaaaattcgccgggcgaggtggcgggtgcctgtagtcctggctactcaggaggctgaggcaggagaatggcgtgaacccgggaggcggagcttgcagtgagctgagatcgcgccactgcactccagcctgggcgatagagcaagactccgtctccaaaaaaaaaaggagtctatgctaaaattcgaagctgagagatgcttgagatctagtccagaccactcattttatggactcgtatgctatcacgatgcaaagtgatttagtactttgttttctgtgagggtaagggaaatgaggcatgatcaatgaggtgaagtgatgtttgcccaacaacacaatccttggcccatcctcagtgggctggtaggggaagag

SEQ ID NO: 737 - DNA, 1024 bp, Homo sapiens
ttacctgttaacagatgtgtctaatgaggggaggaagcttggtaaaatagagaaactaagattcacaagatatgggttgttgttctggctttgctattaattgtggtgtgcctgtgtctcacttttatcagtataataaagatcatatacttggctttgtgtttcataggacactgaggaatgaggaagaaaaataggtgtgaaggtactttttgaaaagcacgaagttctagcaggtatcaggggtaatatttaccggaagaacattatggtgccttgctcataatcattgactgagaaagagacagaaagatactcacctttcttgagggcagtttcctcaatcctctccaagtaatatatattgagcagaggtaggatgctttgaagtattgggcctgggagggctacaaaaatcaaaacaaaagtttacttttcctcccctccccctcccacccaagaggtttccaagcattatttattctactggaaaggaaaatggaagggtagacttctcatttgacaaatggaacctctagaagctaatctagatctgttccaaactctagtccacttatcttcagccactcagttggaagctggaatttcaggggcaagggtgagatcatcccacaaaacaagctgacatgctaaatgagcttgacatgcttatttaggagctggtcagttcacttctgcccaagcaaaatgaaccatttggcattgaaaaggacctactgaatatgtgtgataaaaggtctttcataatctgccctgctagtatcagctccctgctttgcctcctacatttcagccacacttaactactttttcatttacctaacatattatgccgctttctgcccctgtacctttgtcatgctgttctttccaataggaatgtcctttgtcatgctgttctaataggaatgtcgttgccactttcagtatatcaactactcatctttcaagtatcacatgccctttattaagtctttcctgaattccttttccatttttccag

SEQ ID NO: 738 - DNA, 1032 bp, Homo sapiens
cctcccactgtgtggtcattctaaaaatatttacatatatttgtcagccaagcactggtttaggatctgggagtaagatagacatggttcattccttcactgagtttatgagccagcataggaaacagaagtagaacaagtgctaaactttggtaagtctctcaggtatacctttctcagggtaatattaactgaaccccccgccccgcctcccatttattttcctcctagcatttcccattatcacaggttaccttatttatgtgttcattttaactcattaccctgtaagtttcttaagtggcaggcatgttttgttacagttataactcactcagcacttagaacactacctggcatataggagatgtcctgttgaattaatatgtaatgttaatgtcactgatggggaggtacaagtttttgtggaaagataggagggacagatttgtgtgtggataggggcttgtttagagaaggcttgcaggaaatgacagttatcagatctaaattctaaaggaagaataaaagatgaaaaaagtggggagttcactaggactcaagtgctgcttgcctatgtgagaaggggagtggtgagaagaggggcagtactgtttcaggtcttgaaggaccttgtaagccatgacattaaagctgccaattgattacctccttttctttcccccatctaggtggcccacaaactctttaacaacttgaaataaatgtgtggacttaattcaccccagtcttcatcatctgggcatcagaatatttccttatggttttggatgtaccatttgtttcttatttgtgtaactgtaagttcacatgaacctcatgggtttggcttaggctggtagcttctatgtaattcgcaatgattccatctaaataaaagttctatgatctgcaaacctgcccgtcttttttttttaattgagaatttttttttttaatttgatattttcttttagttttgagggggtggggagcggcaaggaggacagggtcttactttgttggctaggc

SEQ ID NO: 739 - DNA, 1066 bp, Homo sapiens
cacctaacctggagctcagccaggcttctcttgccgtgtgcccaagcccttctgttggacctagacccttcttttccaggtcttgtcagccagcttgcacagtttgagtcagcatccagccttatgataggcattggttgattcagagagatatcacattcggtcatagccttctggaagtccagagggagagaagaaaaggtggggtcatgggcttaatgaatccaatgcaagagagcccagcctgtgtgctggacaattcttatctgactgaatgctgtgggaatccattagaagggagatgagtaagggtagggttacttggaggaggaggaacttgaactaggaggaggaagaagggcaaagaagaagtaattgagagttgttcttctaaggcatgcttaactatcagcacctcaccttcatcccagctcctcatcaagcgacaactcttgatccgaggaaaacgggatcacagaatttgtataagaagggaaattagtgtttacttagtctagccctcatattttatggagggagaaattgagttctgtggagattaaataaataatacaagaattggaggtagagccagaactggaacccatctttctttttctcagttcatatccttctgcaaattcctctagagcagagaatacaatttttacttctttgagtgccctcaaaaatggagacattggccggggggcggtgactcacgcctgtaatcccagcacaagctaggaggctgaggcaggtggaatacttgagtccaggagttcgagactagcctgggcaacatagacctcatcttcattaaaataaaaaaaaaggagacatttatttatgggattactaagctggttcatagtagtgaccactattagataaggtggacacttgcatctcgcattctttaccattcccaccctaccttgttgttctttgactcagaggccaggtatcaagtgtcatttatcatcaagcttgcaatatttttctcatagtagcactaagagcaaagtgagatatttcttgaactcatgtctaccaataaagagaa

SEQ ID NO: 740 - DNA, 1051 bp, Homo sapiens
agttgagactacaggcatgtgcaccatgcctggctaattttttaactttttgtagagatgaggtctcactatgttgtccaagctggtctcgaattcctgagctcaagtgatcctcctgcctcagccccccaaagcattaggattacaggtgtgagccaccgtgcccagccgtgttaagcactttagatgcaaagaagaatgctacttcaaggctgggcgcggtggctcacgcctgtattcccagcactttgggaggccaaggcgggcggatcacgaggtcaggagatggagaccatcctggctaacacggtgaaaccccgtctctactaaaaatacaaaaaattagccgggtgagatggcgggcgcctggaatcccagctactcgggaggctgaggcaggagaatggcgtaaaccctgtggggcagagcctgcagtgagccgagatcgcgccactgcactccagcctgggagacagcgagattccgtctcaaaaaaaaaaaagaagaagaagaagaagaatactacttcagggctctacatactcttggtaactccatccttctcccgctccacttgtccatcagctggagaagggacaggacctcagagctctgcatgttcatggaagacactaacccccccatgtcacaactttcttttttatgtgagctcaagtttatttcaaataatacaatgtttatttgaacatgtttctatcttcccttataatacaatattatacaaattgatattaatacaaataatatttgttagacacttgcccagggctgagattcagtgggagcactatcctggcacgactggttatttatgactgacatccatgccagtgcctgatgtgaagatgcatgtgccatatctgatgttgagtggtttgactaccctccctaaatgtttcctaagtgtagtgcaacagtacaacttccttttctttcttctgtgactgagtgagatcaacatatttttttatttttgagacagggtttcactcccatcgcccaggctggagtgcaatggcacaatctcggc

SEQ ID NO: 741 - DNA, 1050 bp, Homo sapiens
caagcaagttaataaattagatggccacctttaaatgaaaggatagaatagaaaacacgtgcatcacacatagtaaaggtaagtattatattatgaagcatttgctttagagagcatgtgtgtgtgtgtgtgtgtgtgtgtgtgtgtgtatagaaacacacttactaggttttttttttgagatggagtcttactctgtcacccaggctggagtgcagtggcacgatcttggcttgctgcaacctccacctcacagattccagcaattcttctgcctcagcctcccgagtagctgggattacaggtgcacaccaccatgcctggctaatttttgtatttttagtagagaaggggtttcaccatgttggctatactgatctcaaactcctgatctcaggtgatccacccacctcagcctcccaaagtgttcgggttacaggtgcgagccactgcaccggccttttttttttcaagacaaagttttgctctgttgcccaggctggagtgtagtggcgtgatctcagctcactgcaacttctgcctcccaggttcaagcaattctcatgcctcagcctccagagtagctgggattacaggtgtgtgccaccacacccgagtaatttttgtatttttagtagagacggggtttcaccatgttggccaggctggtctcaaactcctgactttaagtgatccacccgccttggcctcctgaagtgttgagattacaggcgtgagccaccatgcccaaccagagttctttaaataataatagacttaccttaggatttgatttgcctacaacctaccaagaatatattctctgtgaaatatgacataaatgtgggataatgacccaagagtgcttctcaagacgagagacgtgcttttctgcatgtctgattttcaaaaactggtttgccacccaggagatgttttctcccacatcaacttggatagaagagcttatggcagacaagctgactcaacactcagactgatgtcaccagatcaaagtgaaaaatatgtagctctcatgatccaaataaa

SEQ ID NO: 742 - DNA, 1044 bp, Homo sapiens
gtcaggggcatcctgggggatgggtcttctatcacttggtaagatctgcacccctaaattttcctgctagttttccccctgagattttgctttattttttgcgctggtaccttagtgaccctagtgcctcaggatatgtgtaggtgaaacagaagaagtaggctacttttctgttctttctaaagagagctccaaattattctcttgtctttcaggaaaaaaaaaaaaagtttatttatccataaattgtctgtcattggttttctaatcaatggtgtgtgaaatgtcttatttctttatttcaccttggctctgatgcattggaaatgaggacttgatccctgggctggcacttagaacttaaacaatagggtccaagtggagctcctcttctgagagagctgaatgattagctgcattatttaaggctcattttagacatctcccagccgcttgtcaccaattttattcctcaggattgattttagacttcagacataatattcgatgatatatactatagttaagtttagcaaatatggactgaggacattttaaatactgagactttttttatgactacaatttattgtgggccctgtcttcggtgagctaatggtctaatacaggagacaggagacagacctccaaattgcagtgtagcataatgagggcaatgatagagatatgtgctggctaacacaaagacatagaagacaggtacctaccctggcatgggagctcaaggagacttccttgacatttacgctgactgcaggataagtaggagttagccaggtggaaactgtcatctctatcttgctagactttaagcatatactgctgttaataaagcccaggttatgctgtttgcaaagataaaatgtgttcctgacataatctggtcaaagggacagaaagacagaaatgctaaggacaattcagcagcatgaccagataaaaaacaccatatttcatatgcaaaagtcaactcaattgaaacatttgtaaaaccaaatttgacattataaaagtatatcagag

SEQ ID NO: 743 - DNA, 1050 bp, Homo sapiens
cattacctaatggccaaagcctgcattcaaaataagtaatcagaaaaacatataaaaacacaataagataaacagactaaatatatgcagtcattttatggaaccaatctgactagattggatgcagactaggtaggatgcaaatttaaaaaaaactttattcttcttccacttataaactttaaacctgctttgtggagcaagttctttttatctctggggaaagatcctgagtaagtctcatagagttctcattcatttaaatcacaagaacaatcttaggtcagtaattaaactatctggcccagtgtaatactgaaactttcaaatacttatccacttgagctcttctttccatcccagcttggtacttctttggtcctagaagccagcagtggtttatcatcgacttattcttactgactagctccccaatacccagtagctgctgtttctgggccctccaggaatggttttaggaggaaaggggataaggagtaaagggctggtactattgtgatcatgccaaagggcttggtggatattccatgcttccctttctctcaagaggaaactccctttcttggagactctctcactagaactttccagaggtgattcaggggacaagagaataattgtccttaggcagactctttttcaagctggtcccagagctttccctcttgccagttaattggtttaaggacacagttgcacatccttgccttgcctctgctgctgtcctctgcctttctgtctgttctgagttatagcctttcacatcagtcctgtactccccaaactccaaggagcacaagtcagatcatctaagtgatcctcttgaagcctcttgtttaagatgggggaagcacccttccttttccatggcactctggcattccaacaacactttaaataattttttctctcaaaattcttaagcctctcctctttaatccttcgccatttttatgtattattactttatatgatgagctaagagttacaaaactggtttttagaaatctccttagcaaatgttttact

SEQ ID NO: 744 - DNA, 1029 bp, Homo sapiens
atgctgtttctgaatcataatatgcctttaaaatatctgtacctaaattaataatacccatactactacactggttaaaaaataatctacacattcagggctgggcgcagtagctcacgcctgtaatcccagcagtttgggaggcccaggcgggtggatcacgaggtcaggagattgagaccatcctggctaacaaggtgaaaccccatctctactaaaaatacaaaaattagccgggcgtggtggcaggcgcctgtagtcccagctacttgggaggctgaggcaggagaatggcatgaaccggggaggcggagcttgcagtgagccaagatcacgccactgcagtgcagcctgggtgacatagcgagattccatctcaaaaaaataaaataaataaataaataaatacataaatgaaataatctacacattctgcaattattctttattctgttcagtaatggcaaataatattttaaacttgttaattatcagttacaagattccatgatgagatatgttctgtaatgtattatattattaagatttcaacaattatttgaccttaaactgttatcttctttaatgaaaagtattctcttgagtctagttgccataaactttattaagctgtcaatcaactaattccaaatagtttataatttagcaattgctattccctagctggctagacagacactggaatatctattttttttttttttttgagacgaagtgtcacgctgtcggccaggctggtgtgcagtggggcaatcttggctcgctgcagcctccatcttctggattcaagcgattctctgcctcagcctcccgagtagcttggactacaggtgcgcgccaccatgcccggctaatttttgtatttttagtagagacggggtttcactatgttggccaggctggtctcgaactcctgacctcgtgatccacccaccttggcctcccaaagtgctgggattacaggtgtgagccactgtgcccggcctggaatatctattgttagtgaag

SEQ ID NO: 745 - DNA, 1122 bp, Homo sapiens
tgggaaggaaagattggagggaggttttgggattgattttgcacatttatttgtactgatgtttttcagttttgtttgcttttctccttccttccttccttccctccctccctccctctctccttccctccctccctctctccttccctccctccctctctccttccctccctccctccttcctgttctttctttttcttcttttcttttttttttaccaaatacccagacttggagaatttgttttattttctaattgtttgtaaatctgtatcctctaatactgaatttgtttttgaaaatgagctattttctaaatcagtgtgatacttagagttaagtttccagaatggaattattgtgcaataatttagttataaaatcatgatgggaatactgtgtcattcttgaatttttaaaattaagctttatttatatttgttgttttggcccaaatgaaattatgtcaatgtaacctaaatttatatttgaaaataaccaccattttacatgcattagttggaagaaatatttaaacctctcttttaaagattgtgaacattttgcttacataaacaaattatgactaaagcttataaccatgccaaattgctttctgtagcacccagaaaacttttttttttttttttgagagagggtctcactctgttgcccaggctgaagtacagtggtgtgacctcagctcactgcaacctccgcctcctgggttcaagagattctcctgcctcagcctcccaagtagctgggactacagacacatgccaccatgaatgccatgttggccaggctggtctcgaacttctgacctcaggtgatccacctgcctcagcttcctaaagtactgagattacaggcatgagcctttgcgcctggcctcacccaagaagcattttatcatctgtgtcaacttcctccagggcctgtgtgggtaactcttactttgcctggccatcctacttactgcacttagaaaaagttttggatgataattgactttaagcatatataaatcagaaacttgatttcatttatctttgtgtccccagtgttgaacattgtgcctgacacatagtaactgcttattaagcacttattgaatta

SEQ ID NO: 746 - DNA, 1080 bp, Homo sapiens
cagcctgggcaacagagtgagatttcatctcaaaaaagtaaataaataaaaataaaaagatgtcttttaattgggttatatatcttcttatcgagctgtaagagtttatatatttcaaagataagcccctaatccagatgtatgatttataaacattttctcccatcctgtgggctgtcttttattttcttggtagtggtatttctttaaagtaaaatgttttaaattttgaggagatcttacatcttgtacaatagaacatccagtatgctttctattgcctatggtgcagagattaaaaaggctgataagctagtccaaaactacaaaaataaagatgtaactggtatctatatagtgccacgagttgggagtgggaaagagacggggtagtggtaaatggaaaggaaggtggggagggatagggggtcacagattctcattacttctttgaccagttcaagggcataattgagttcaagttaattaaatcagattagtgggatgcccattaagcaaaaagtcacctattttgtaaatggttttcagtgctttttctattgtgtagtcatgacaggaaaaaaatatggaaaaattttccataagattaccacttcttaggtcattttccttgatgaagttaggctctaatcaagaaccaagaggcccatgtagtctgctgtacattatagaaatgggtacagttatttatggtcatcattaaatcccatgctgggctgtggtttgattgcgatattgtttaaaaatgtattatcactaaactgactttaattttagattgagcaaaatatacttatgaaggtaaattttataccaaaatttaaaaaaaattactacttttcaagccaaatgatgatttctctcacacttctattagcacaggttattggagtaacaatgaaggtgattctttgttatctaagcagtgattgatgtttttctaaaaagtcaattaagagaggttacttggcacaataaagttatgaaagtgctccaatgggttattttggagactaagagtagtatgcttatattgtctatgccatagaagtggcattt

SEQ ID NO: 747 - DNA, 1045 bp, Homo sapiens
aaaatggaatcacattgtcttttttttttgagatggaatctttgtcgctcaggttggagtgcaatggcatgatctcagctcactgcaacctctgcctgctgggttcaagcaattctcccgcctcagcctcccaagtagctgggattacagacacacactgtcatgcccagctaatttttgtatttttgtggagacagggtttcgctatgttggccaggctggtcttgaactcctgacctcaggtgatccgcctgccttggcctcccaaagtgctgagattacaagcatgagccaccatgcccagtcttttttttttttttttttttgagacagagtctcactctgtcacccaggctggagtcagtgatgtgatctctgctcacttctgcctcagcctcccaagcagctgggactacaggcatgcaccactatgcccagctaatttttgtatttttagtagagacggggttttagcatatcggccaggctggtctgaaactcctgacctcgtaatccacccgcttcagcttcccaaagtgctgggattacaggtgtgagccatcatgcccggcctttttttctggggggacagagtctcgctctgttgcccaggctggagtgcagtggtgcaatcttggctcactgcaatctctgcttcccgagttcaaatgattctcatgcctcagccccgcaagtagctgggactacaggcatgtaccaccacacctggctaatttttgtatttttagtagagacagggtttcactatgttggccaggctggtcttgaatttgacctcgggtgattagcccacctcagcctcccaaagtgctgggattacaggtgtgagccaccgcgcccagccagaatctctttatatgcaatatatagtatcccatcacctttgtatagtgaaaatattttcctccaggctgttacttattatctgattatacttatgatgcctttctttgttcaaaagtttttattattaatgtggtcaaacataaatcctagctgttttggttcttgtttagtgccaagc

SEQ ID NO: 748 - DNA, 1055 bp, Homo sapiens
gagacggatggaaaccgagccccctggaggacctgcccctgcagttctgcctcacacggctcaagtcaccaccgtgaacaagggtgggtgaatgccttttcttccccctgaatgtctttccttccgcggtattttctgccccgatctatagtcccttgagtctccacacacactcctcacagagatctgtagcgtaggtacgtgacagctctgcctacatctgacgtccggagtcattaaccaggaatgtatgtgtgtctgtgtgtctctctgtggagtcgtcagaattcttcataggggttaagctaaaaaagcgaggcgaggagcccctctccaatggctcagttttgctgaataatcacgtgtgaatcgaggggcgggcttttggcaggcagatcttactagtatttactaccaagctctactccagattaaccatcccagtccttctgtcagtctccgatgccatcatgcagcctggttaggagcaaaggaaaggggaaaaagaaaaacgactaattcatcttttcctgatcgtcaggaccctaaagaatggccgagccttgggggaacgagttggcgtccgcagctgccaggggggacctagagcaacttactagtttgttgcaaaataatgtaaacgtcaatgcacaaaatggatttggaaggactgcgctgcaggttggtattaagagaggtggggaaaacaagtcaataatgttgcctacgtgacccgggtttctagatttacagcttttaagctttcagggacataaaatttcactgtttttaaacctagttggttgccatattttatatctttaagtggatgcaacttctcaaaatgacgtactttgaacaaactcctcaaatccaataacatccttgatatcaagtggggtccagatttggtcttagtttttggaatgtttttgtgacggtggggattttaaagtagtcagtgtagggccgaggtttgtttgttttgttttgtttttaaagacagctctgtaaacacattattatgattattatttgaagtaaatacactgcta

SEQ ID NO: 749 - DNA, 1031 bp, Homo sapiens
ggcatgttaatgaaagtaatattttttcacaactaaattatatgtattttatatttgcatgctgttctacaagatactttataagagaccactgttagagtgaaatatattcaaacaatagtagataatctttgttatgtgaattatttgtatgttgatagcaagtgttaataccacattctgacttttaaaatgttggcagtttacaaatagctgttccttaaatgcttgataataactgaaaaaggaactaacacaggatcaccagttgattattaaatgagctcaaaccacaagacaaggctgtccgtgtcccaaaacacccattaaatatcttattttttcttcttttgctcatttgaaaatcaggaggcttgtcagaactttgagaaacagtatataatgtaatagggtgactatttcattattttcaagaacagttgtcctacaataatttcctactgtgatacaaggcatatcaggaacttagttttatataaattgatatcataagcaatttagaacactgtggcttatttaacaccttaataatcagtactgttttgtaacttaaaatgaaggattctaaacattgaatacacctagtagccaatattaaataacttgcaaataaaaaatatttttaagaaatgcttggaaatttggagctatatctatttggagggaacttgtaaaaattgatcatttaagaaaatatcaggcctggatttttaaaacatcatttttacactcactcatggagttggtttagagaaactcaacatccttatttgtttgcagtagctatttagaaaataaagtttaaccacatatgattttctagaattaataccacaggcacattttatgagcatgaacaatcaaacagaaggagactcttatttaaatcccaaattccatttctgttattttaataaattcgtgaaattacacaactcttcatggaacatagagaacagaattgttagcaaatgctatacatgttgcacaaattctatcttattgatcaa

SEQ ID NO: 750 - DNA, 1084 bp, Homo sapiens
accagctagcatcataatgacaggatcagattcacacataacaatattaaccttaaatgtaaacaggctaaatgccccaattaaaagatacagactggcaagttggataaagagtcaagacctatcagtgtgctgtattcaggagacccatctcacgtgcaaagacacacataggctcaaaataaagggatggaggaatatttacaaagcaaatggaaagcaaaaaaaaaaaaaaaaacgggttgcaatcctagtctctgataaaacagactttaaaccaacaaaaatcaaaaaagacaaagaagggcattacataatggtgaagggatcaatgcaataagaagagctaactatcctaaatatatatgcacccaatacaggagcacccagattcataaagcaagttcttagagacctacaaagagacttagactcccacacaataacagtgggagactttaacaccccactgtcaatattagacagatcaacaagagagaaaattaacaaggatattcaggacttcaactcagctctggaccaggtggacctaatagacatctacagatctctccaccccaaatcaacagaatatacattcttctcagcaccacatggcacttattctaaaattgaccacataattgtaagtaaaaaactcctcagcaaatgcaaaagaacagaaatcataacaaacagtctctcagaccaagtgcaatcaaattagaactcagaattaagaaactcactgaaaactacacaactacatggaaactgaataaacctgctcctgagtttattcaagactactgggtaaataatgaaattaaggcagaaataaataagttctttgaaacaaatgagaacaaagacacaacgtaccagaatctctgggacacagctaaagcagtgtctagagggaaatgtatagcactaaatgcccacaggaggaagcgggaaagatctaaaatcgagaccctaatatcataattaaaagaactagagaagcaagaacaaacaaattcaaaagctagcagaagacaagaaataactaagatcagagcagaactgaaggagatagaga

SEQ ID NO: 751 - DNA, 1022 bp, Homo sapiens
aactctatctctactaaaaatacaaaaattagccaggcatagtggcatgcccctgtaatcccagctacttgggaggctgaggcaggagaatcgcttgaacccaggaggtggaggttgcagtgagctgagattgtgccactgcacttcagcctgagagatagagtgagactctgtctcaaaggaaaaaaaaagaaaagaaaaagaaagaaagatcacaaaaatcatttttcaatacatcagtgttcatttagatgaattaaaatttcagcaggaagagtttttttgctagataagctggcaatgacttttcctttctcatactgtcttattctaggcacagactgaggaattgcgcttggcctaataagaatgattcccctgggggaaagaaacagaagagcatttgacaactacatgggctggcataatggattggaatttaaaggtgctacaaatgtgccaccagtttatcacatgggacattttctcaccgagtgaagcaggaagctggtgggcctaggccaggaaggcagagtgaaatttcatgacgcttagaagacaaagagccttgctaaaattaagtgaatggtcctgcaacaaatacacaacaggtctcccttcttaagaaatccaccagattgtgaaactgcatggggagagaagcacgaaaggattaagtttaaaactccaaagcacagaaaaatgctgaggagacagggactcacgaggctttcaatcagaagcctgaaatggtcacacttgagcatgttgctggctggaaaggcagagtaaaatgtcttgtgatttcatggtgttcaaatctctgaaggacagatgactctccattggtatttcaggctttccctacagtaggcaagtactttggacctaccagtctttcaacaaaaagctcagaagggtcacctctaaggaacaggtataaatcagaggtgaactaagtttcattaaaactatacctcagctccaacctagctcaattccagattggatgtggtgatttt

SEQ ID NO: 752 - DNA, 1065 bp, Homo sapiens
aacaaacaaaaaaccagcagtaagagagtgaaaaggaaggcaacaacgcagagaagagattcaaaatacatacatataacctttgtttgtatcctgagtttatacagaattcctacaaataagataaaagaaaacattttttaaacattaaaatggacaaaagaattgaacaggtcctcctaacagaagatattcaagtgaccaataagtagccacatcattatcatcggggaaatgcaatttacaactacaatgagatatcacaccccaccagaataactagtaatgaaaaaattaagaatcgaagaaaatgtagatcaattagaactcatacattgatggtgaaagtataaattggtacaaccattttagaaaactttttggcagtatctactaagcccagaaatccaattcactgcaaaagaacccactcaaaagaactgaatgcatatatgaattcaaacaacatatcaacatatgcaaagaacatttatagtacttttattgtagcaaacaaatgaaaacaatgcaaatgttagtgaatagtagaatgtacaaactgacaaaatcatacaactagagactacccagcagtaagaaaaaaacacctagtactgcgatgtattaacatggatgaatctcacaaatattatgatgagtgaaagaataatttttttaaatttagaaagagtatgagagaaggcaaaattaatccatggtaatataagttagaataattgttgtctggatgaaggatagttatagataagaaagaggcatgagagaatctggagtgctagaagtgttcaatattttaatctgagtggtagttacagaggtgtttacatatttccattcatagagttttagacttaatgcactttgctgtatgtatatctcatacaacctcagaaaatggtagtatggctactacaaaaccgtctaacaatgtgtcatattcagaataaaattttaaatcataggattttcttgaaaacacttcttgacctggactttgcctttccagaaatatttctgcactctaacaataagctcctgtttact

SEQ ID NO: 753 - DNA, 1051 bp, Homo sapiens
tcgcctgccctcgggcaccgtgtggggatgataccctctgcccttgagttctgggatcagagtatgtgatcacatccccttggccagtgtctggtggttcgcttgtggagtttgggagtgacattttcctgtctttatgtctgaatcgtatgatttcctcatcgcaccgccaactggattatgggttctggataggtggttgccaagcaccacccccccgccccatttatgttttcatgtgtggtcgtcctcttacccacctccctcgtctttttgttaattggatctggcaggttttccctctgcttgggagacggatctccaagtggtgattttaaccctagcgacatcgagttacttgtgtgtgtgtgtatatatatatatatgtgtatatatatatatatatatatgtatataaattttaatccctcctctttttgctccacccatatgacacaccttttaaacgtgctgacttaagaaaacttgattagcttgaactttggaaacctttaaacctggcttgggaaattccttcggttactcgtgttctccctttgtatcaaagactctcctaaatacgttgtactgctttttgtacaataatcagtagtcccagatgtgttgcagaattcgagtgaagacctcttaaactcaaaataggtatgtggatgttataatccacaatagatgtgtgaaaacctttcctgtactttttccattttagatgatattgaatacacccttttccagagggcttcaatagtagtagtgcttaatttcttcctgaagagtttagttttctgactgggtaggctcctttgttgtttcatgtgatgacatcattatctagtgttttcttttctcattcctgtgtaaaccaatgtctcatcacaccagaaaaacctgatcatatatatgctcgttttctgaataaaattcttctgggggcatttcatatataccagtaaggtccagtcttgattgtggtattacagaagcctccatgacttctccctcttacgttctatattccaggcctaccaaatac

SEQ ID NO: 754 - DNA, 1031 bp, Homo sapiens
tttaaaaataatacagaggaaatctgcccagcgaaggcaatcttggaaggacagtgagtgggaggataagccaggaaaggctgaagaagggaggtccatgagagggggaggccaggtaggcagcccagccctgaaaggcatatgtaaaacagcttgaggtacccctgtgtcactgtcaagagctttgttatgtgctaaattgagggaggcactttgttaaaagagtgtaatattcattgaacaacaaaccatgttacattttctaatctgaatatataaaaataaggataggtgtctctcaattttgcagtagttatatagtttgagattcgccagtcttcttccccgacctatactttttgattgatacatttgaaattttaaaatcctgagaaaataagtttgtatagcattgaatgcaagtatagctctgcttttagagtcagattgtcctgtgttcaaattctggctctgccgcttacatgtaaaatatgaaaaaggaaagaatttatcagattgttttggggagcttttttgacaaataagaaaatgtaacattttggatatttcaaattgtgtctgcataaagctttcttcaagatacctttttttttttttttttttggctgggcacagtggctcacacctgtcatcccagcacttaggtggcagaggcaggaggatcacttgaccccaggaattcgagaccagcctgggcaacaaagtgagacccccatctctattaaaataccaaacaaaaacaaaaaacaaacaaaaccaaaaaccctcttttgttgttaaaaggattggtttatcctgtagaatgcactaaaaataacccccttccttataaaaaatctagaatgtactgcttatttttaagcatgcaatgctataatgttttgtgggggatgggcttgttttttttagagatggagtctcactttgcccaggctagtttcgaactcctgggctcaagtgatcctcccaccatgtctcccagtgttgggattacggatgtgagtcactgt

SEQ ID NO: 755 - DNA, 1076 bp, Homo sapiens
aggtttgaccatgttggccaggctggtcttgaactcctgacctcaggtgatctgcctgcctcagcctctcgaagaaaatacttgtaaatcattggtctgctaagggacttgtgtccaggagataacaaaaagataatttgctatcagagagggcaaatcaaaatcacaatgagatatcacatcttatccacttgaatggttataataaaaagattaagtttaagcaatgctgtagagaaactggaacattctatttccctttttaaaatgcacacttcattgatttccagtgtgttcagagttacacaaccatcacttaccaatacagctctcgatgggattgtaagatggtgcaggtgctttggaaaagtttggcagttctacaaaaggttttgcagagttccattcattggtttatatacccaataaaatgaaaacatgtacaaaaacttatacatgtattttcataacactgttattcacagtagctaacaagtagaaacaacccatgtccatcagtgactaaacaaaatggtggtggactattcagtgataaaaaggaatgcaattctgataaatgctgcatcatgggtgaactttgaaaacatgctaagtgaaagtcgagccacaaaagaccacatattagtatgattccatacacaggcataccttgttttattgcacttcacagggttgtgtgtgtgtgtgtgtttacacaacttgaaggtttgtggcagctctgcatgaaacaattcttttggcaccattttcccagcagctcatttcatttctctgctacatttggtaattctcgtgctttcagactctttcattatatcttttacagtgatctgtgatcagttttattagggtggtctggaacgaaacccacacatctgaataatgcttatctatgaaatgcccagaataggcaaatctatagagacaaaaagcaaattagttagtagtagcctagggccggggagtttgggggagtgactgttaatgagtacactttcttttgggggtaatgaaaatgttctaaaattgataagtgatggttgcatagctctgaa

SEQ ID NO: 756 - DNA, 1104 bp, Homo sapiens
ttaggctttatcttttgaaaagaatttgtggacaaattttaaaccaccacaatcacaatttaagggattggcagaggaaaaaagcttgcacaggagagtgaaaagggatgccagagatgtaagagaaaaactagaagaatgtggcagtcatggatggcaaggtggaagtagtaaattggcttgaatactgctgaaaggattaaatagatgagatctaaagcatatccattggattgatgaacatcattgatgttcttaggcagagcagtttccatggagtggtaggtatggaatgcaggttggagtggcttgaagagtaaagaggaggcaggaaatatatgaagcgaatggaggttattcaagatgtttcattgtagaaagggcaaagaggacatggaatgtggaatggaggggaacagtttctaaaataggaatatgcttaaatggtgtagggatgggaagcaaggtcaatgttaaaaatgaggatacagtcaggacgcaaggagtatagtaaagatttaggacaatgacagtgggaactggaaaaaggaatagctaaggaatagctaaatatgatttgtttagtcattacccacaaatgtttaaccctctttcttgatttgtattgcttttggagagagggttagaaactgaattagtaagttacctgggctactcaagatattccttgtaaaaggagtcgttagagaaatcatatgttctttgctgttacacactgtctggaagagacttgtaatgactttgcattttaaaaccactgctagtcaaaacacatttaagtgttatttggcagtctttagcaatgtttagtagatgataaaaaaatctaccatctaattattagattttagatttttgaatagcttaaatgtatatatttctcttgcaaacatgtaaaagtagtctcagattctcctggaaaggtatcagcaccactcccatcaaacatttaaaagcaaatttattcttttctaagtaaaccattcttgaatatatcaaatatgatttttattgagcttatatatggtacttttttttttttgtcggagtctcgctctgtcacccaggttggagtgcagtggc

SEQ ID NO: 757 - DNA, 1032 bp, Homo sapiens
gaggccgaggtgggtggatcacctgaggtcaggagttcgagaccagcctggccaacatggtgaaaccccgtctctatcaaaaacacaaaaattagccgagcatggtggcgggtgcctgtaatcccagctactctggaggctgaggcaggagaatcgcttgaacccaggaggcggaggttgcagtgagccaagattgagacattgcactccagcctgggcgacaaagcgggactccatctcaaaacaaaacaaaaaaaaataattatctgggagtgattcttaaacctccaggtgattcttagccttctaggtggttctctgactctctaaagtatgagaaacattcgtacttaagggaatgaagaaggaatgaaaataatgatgtaatatatgttacattaaaggtatgtgtaaagttctatgattaggttaatttatatagactgtatgacattttcatttaaaatctgtttattttcctatccataagtaatttctttttggaagagaaattggcagaagggatgggtattactgtaaatcttgtccttttatccccagatgattctaaaaacaatttaccagtctgttaatgttttattcattgaatgctttgtttttcttttagtccaaggacaaaatgatgagaggctctcgcagaggatgtgttagactcagagtgagtatttattcatttttatgaaaatcaattttgacagaagaaaattgtattctgatagaattatggaagtctaaatttagtttagcttccttacataattgttggggcaggtatctaagtctcagagagaaaatgtgatttctccaagtaactgttagtcagtatcagaaccaggactagaactcagttattttggcccatgattcaatgttgtatttatgacttaatgcatgttctgattttcttaaacctctactttacagacaagagacaagggctggaaattaagtgagttatggtgttggtggtatatcaacagtagaaaaaatggaaaaatcccaactgttagc

SEQ ID NO: 758 - DNA, 1050 bp, Homo sapiens
aatggaagagaaagctgaaaaacagaaccatttggatttgggtcttggagaaagctggaaatttggtatatgatagagcgttacaaatcagacattatcacttagtaaatgaaactggatcaattgggtgtccatatgaaaaaaagaagattactctttaccccatgtgatacacaaaaacaaatttcagatgtataagaggtataaaatgaaattttaaacttagaaaaaaagcataggtgatatctttatgatgtcaagatagagcagaaagcataaaccacaatggcaaatatttgtggatttgacaacattcaaaatttaaaacctttgaacaaaaaaagataccacagtcaaagggaaaagacaactcatggatagaagagaaaatacttaaaatacatcagttggcaaaggattaatattctgtgtatatataaataactcctgcatattaataaagaagacaaaaagaaaatccccccaaatgcatacaaatctgtaaaaaagacaaaagaattctcaaaatgtagaaaagttacatactttcaattcatgtaagggggaataagaaggtaaaatattgaatgcaaaagcaaagcaaattgtttaccactctcttactggcatctaggccagtgcctagaaattcaataaatacttgttgaatcaatgaatgaatgatgctaaagtaggtcctccatgcagcgtcttctttagtgagcaggttgaactgcaagccattctgctcccttctatattattgattctgtcactcctctctagactgtatgttcctccagggcatagacatgttttgtatcccttggctgttactgttcttggcccagaataggtatttaataagtttgttgaagtaattagtgaatattgtttactgtcaccatgtcctgttaagaacaggctttggatcagggtttgcaagacctagtattcttctcccttttagttgttggacttttggcaaacttaaaaaaaattttttttaaacctgagtctcagtttcttaatctctaaagaagagtagtg

SEQ ID NO: 759 - DNA, 1444 bp, Homo sapiens
tttgcaccaagtcttcaaagtcatggatgttctttaagccacccagtctatggtattttgttatggcagcccaagcagattaatacaagtggtaagatgagcaaagtcctcaccaagattgtactctagggtagacggccaataaagagataaataaacaaatggtttatttcaatggtttttgttatatttacaaaattgtacagccatcaccataatctaattttagcatacttctatcaccgcaaaaagaaaccctatacctattaagcaaatattttctatatagattttctatatagatggtccctgacttaataatggttttacttaggattctttgacttcatgatggcagaaaagtaatatgcgttcaatagaaactgtactttgaattttgagttttggttttttcccaggctactggtaatgctatatgatcttctctcactatactgggcagtggcagcaagccacagctgccagttcgccacgcgatcacaagggtagccagctgaaactctgcactgtgtactgtgttgcgagatggtttttgcccaactgtaggctaatgtaagtgttctacaacacgtttaaggtaggttaggataagctatgctgtttggtaggttagatgaattaaatgcatctttgacttaacaatattttcaacttaagatgggtttattgggaggtaaactccattgtaagttgaggagcgtcagtgcctccctttctcttccaacagcctcctactcttcaccccatccagcccttggcaactattaatctactttctctctctagatttgtctattcttgactcttcatgtaagttgaatcttacaatatgtggtcttttgtgactagcttctttcacttaacatcatgttttcaaaggttcatccatgtagagatcacttttgcctggaattttgaatgtgactacagttctacaggatatttccacgatgaacttagttaaatccctatatagaaaaataattgccatgctgttggtgttgattgttgtgtagccagagttagaattgtgtttggctaagaatgtacacatggaattaaaatcttagtggaggcagataaatcatgttctaacattattacttacctagtaaataagctttcttgtaggagaaatacacaaggagttacttacatgtaagaatgaagttaatatttttaacatttttccttaaggaccagagtaatgcggagaagcacgcagatggaatgatagtaagtttaatgtaatctttttgtttccctttacttctgcagagcattataaccagtcatatcaggagaagcctgaattactactcatttttcaatgccaactactcactgctttttgttgttgactcttgcagtttcctttaagctcccttctttcagcaatcatttgcaggggaaatgacaatct

SEQ ID NO: 760 - DNA, 1583 bp, Homo sapiens
tatgtgcaatacattgtattacgtgggtttcattaatgtcaaaacagattagggctgagtagtattatttttgcttctcaagttctgcacatttatttttaaagcaagttgtagaatgtaatgtgacatatttgagcctgaagttggctgaccaaggactgtggataagtgtagcatagttattttttctatcaaaaacaataacaaaaagattgagtacttttaatatacatgttgtcaaaagacaaaattacaacaaatttaatcatagatctaattggcttttattcaagatgcatgaatcggatcagcctccattctacaaaatagaatgagaggtctcactgggcagtggcaaagcagtgggttttgtaaggtgagaactgtaacaggaaaaaatgctgattggttaacatcagattacttttcttttaagggttaaaacagtgagcatttccgtattacactgattcgggtagactggaatctcctattttcagaaaaaaaaaaaaaaacctggtctattttgggatccacttgcttccttagagtttaatgatacggcatttaacaagagtgactccattttggtttggtctaatctgttgggccctagtacaagagctcagtccaaaacagtggcctctcataatttttgtttaacagtgcacaaagtttttaagtgttttctttggttgaccagcctaattgtaagaacgtttcatctggaaaataaaagattacatccaaaagagaattctggtcccttgttccaaagttattttatttcttattcccttcagtgggaggggtaaggaggtgtgacatattctcactgctatatatcaaagcgttaatggtggaattttgtctttgtaaagcatttggagttattttcgagaaaagcgctgtgtaaacaaggaatttattttaagaacaactccatgtttgttgagatacttgtttagttattatggcttggtctagtatctgaaaatagaatcaaagtaataaccagaaaacccttagcacccatgtaaatacagactttttattttgcagaccgggaaactgaggcccatagaggataagagacttaaagattctaagctattaaaaactccaagtctctgtttctttgcttttctcagtgcttcaaaacattccccacttcagtttcttagttgtttttttttttaattattactgattgttttgggggtgttttctctaagtgtccttcatttttcagttaaagtatttgtggcagataaactattttagtgacaagaatcagaattcctgtgttcaagtcacttgatcgaaaagaccttatttaatgagttttagatattcatgcagaaagagggctgggtttttttggttttaaattttctttaacagtcctgaacacagtgtatgtttgtttttcacatggcctggaaaaaaatttttaacttagatattacgtgagaatgctacaaaaactttaccattacctcagtttctattattaggtgattttaagtttttacaactgcttttttgggcttatttattggcaaagtatttcccttatattt

SEQ ID NO: 761 - DNA, 1032 bp, Homo sapiens
gttaatccaagtggaataaatagcatcacctatagtaatgtgccagcgttattagttgaaccctggccgtttctacagtaccaacattaggagagggtccaatgagagtgaataagctatgaagcattatacaaataagaggtttctattacttttttctttttttaattagagtggaaatattcaacacctatcagccaggcactgtgctaggttgatatcaaggttacaaagatccaggccctgcccacagggaacttttgggggaataggcagacatttataatctaatgaaatacgtggtatggtatcttagtccctttaagctgccataacaaaatacagtaatctaggtagcttataaacaacagaaatttatttcctacagtgttatggagcaaaaggggcttgctgcccaatgtgctagaagccattactaagtcccaggtttttgaggaaagaaaagctttttattgcaagtctacttacagggaaatggaagtccacctcaaatctgtctctctgcactggctttaaggcactaattttatttaaaaacgtttagggaggccaagtgtggtggctcacgcctgtaatcccagcactttgggaggctgaggctggcagatcatgaggtcaggagttcgagaccagcctgaccaacatggtgaaaccatctctactaaaaataccaaaaaaaaaaaaaaattagccaggcatggtggtacatgcctataaattccagctactcaggaggctgaggcaggagaatcacttgaacctgggaggcggaggttgcagtgagctgagatcacaccactgcactctagcctgggcaacagagcaagactctgtttccaaacaaacaacaacaacaaaaacagtttagggagccaggtgtggtggcttatgcccctaatctcagcaatctgggaggctgaggtgggaggatcagttgagcccaggagtttgagaccagcttgggcaacatggtaaaaccctgtctctaaaaaaatacaaaaattagctgag

SEQ ID NO: 762 - DNA, 1049 bp, Homo sapiens
atatagtatccaaattatagatgatttataaattttaaatataaagcttgcaatattatatatgtgtatatgtatgagatagaagtaatgtaaaggtgaaattgatttacaaggaggtgagttcacattgcctttcgctggtagcaggaaatttttttgtaatggggaatgttgttagttcgtcttctctgcattccttagtctcagactgtggtttactgaagctagatacatatcactgaagtttcttgctgggtggatacattggctgacattgataaatatatattttttttttcttgatgaagatttaaaagaataaccaattccccaaaggcagaaatttaaataaatatggcagtgtttaaattaacagataatttaagaagtaaaatttaagcatttattagtaacgtgtaagcaaaaatggaacgtaccagttgttcattgggtatagatttgagatttaagggtagtttttatgtgtgagaatttaaactttgaggcccccagaactatttacaggccagttgcagtggctcatgcctgtaatcccagcactttgggaggccaaagtagaaggattgcttgaagccaggagtttgagaccagccagggcaacacagcacaaccctgtccctacaaaaaaaaatttttaataataagccaggcttggtggtgtgcacctgtagttccagctacttgggaggctaaggcaggagggtcatgcagtcccagcaatttgaggctgggactgtgagctataatcacaccactgcagcttgggtgacagagcaagaccctgtcttaaaaaaaataaaagtacagttcaaaagccagtagataagattaaacggaatcatacaaatactccattaattctaagaaaggagaaaaggagaaataatggcatgaacaaggaacaaagggggcatgtagaaaacctattaaaatggtagagttaatcccaactatatcaacagttaccactccatttaatgtcagactggattaaaaaagcaggatttatctatatgatattttcaaga

SEQ ID NO: 763 - DNA, 1118 bp, Homo sapiens
agtcaaattaaaaagtttctgcacagcaaaagaaataacagagtaaacagacaacccagagagtaggagaaaatattcgcaaactatgcatctggcaaaggactaatatccagaatctacaaggaactcaaacagatcaggaagaaaaaaaaacaaaaacaaaaacaaataatcccatcaaaaagtgggctaaggacatgaatagacaattatcaaaagaagataatgataataaaataaatggttggccgggcgcggtggctcacacctgtaatcccagcattttgggaggccaaggcaggtggatcacgaggtcaggagagtgagaccatcctggctaacacagtgaaaccccgtctctactaaaaatacaaaaaaattagctgggcgtggtggcaggtgcctgtagtcccagctactggggaggctgaggcaggagaatggcgtgaacccggcaggtggagcttgcagtgagccaagatcgcgccactgcactccagcctggacaacagagcgagactccatctcaaaaagaaaaaaaaaaaaaaggccaacaaacatgaaaaaatgctcaacatcactaattatcagggaaatgcaaatcaaaaccacaatgcaataataccaccttactcctgcaagaatggccatattaaaaaaaaaaaaaatagatgttgatgtggatatggtggaaagggaacacttttacactgctggtgggaatgtaaactagtacaaccactatggaaaacagaatagagatgccgtaaagaactgaaagtagatccaccatttgattcagcagtcccactcctgggtatttactcagaggaaaagaagtcattatatgaaaaagacacatgcacacacatgtttatagcagcacaatttgcaattgcaaaaatggaactagcccaaatgcccatcaatcaacaagcaaataaagaaaacgtggcatatatatactgtggaatgctactcagccataaaaaggaacgaaataatggcattcacagcaatctagatggagttggaaaccattatgctaaatgaagagactcaggaatgaaaaaccaagctggtggcaagcacctgtaatcccagctactcgggaggct

SEQ ID NO: 764 - DNA, 1046 bp, Homo sapiens
atcaggaaccttgaccagtttgagctgtcttactctgaaaaccatgttacctcgtgggcaaggcggtcaaagaggtactgctgtgtaaccacttcattccagttcctatccacctcctccccaaggtgggtatcctcacactccttcagcttgatgagagctgtgacctgttcccaccaaaaagaaagatgctcaggtgaggcaacataccacttcccacagaacacactgggccctgtccagcccggcttgtgatggacatgccagtataagaggcacggatgaagctagggagacactattgtaagaggaaggtggggctgcaaagctcaaaaactggccggcgaagccctgttaagatttgtatctgggggcttgtgtgggccaaaggccaaaagaccaggctggcacagtcacctgggtgttgaatgcctcttcagtgaggttctcaatcttctcctcaaagctagaaagaaactcttctatcttcttatcaacaacttcagaactgaaacaaaacatcttcaatcagaactaaaacaaaacatcttcaattaagtcatcagaaacccgatctcaggcagaaggcaaaagaaggaattaagactaagacatatatccaggaaaaaaagctaaagtgttttcccaggcctcagtattccacctgactttgaggacagaaagagaaagaaccctccccctcaccccacctccagcccagtttcctggtatcctcataatgaagcagtcacaaccatgtatgaccattccaaagctgaaaactaacaggtttcagcaatgcctgtcagatcaggcatcctttcccttcttgtcctcaggtctgcctgaagagaagaaacactggcaagccccacacaatgaccacaggacttgaatcaagtctgaaagggccactggaactattgatcagtcctggaacagaccatctataacaacccccatcttcccagcttccactgactaaatagagcaaacctgcttggtcagggttgcccaaggtttaaggaaacacatgtagcccctac

SEQ ID NO: 765 - DNA, 1401 bp, Homo sapiens
aagactccatctcaaaaaaaaaaaaaacaaaactaagggatgaggggtttcagagacagtttcatacaaaggtcaaataaataaccagctttttttttttttttttggtggggggatggtctcactgtgttactcaggctggagtgcagtggcacagtcttggctcactgcaacctactgcctcctgggttcaagcaattctcatgcctcagcctcctgagtggctgggattataggcgcaccaccacatctggctaatttttatatttttagtagagacggggtttcaccacattggccaggctcgtctcaaactcctgacctcagaagttccacctgccttggcctcccaaagtcctgggaggattacaggtgtgagccactgcgcctggccaataaccagctttttgaaaggaattcttaggcagacttacagagtatcatccagaaccaaatttctgaaaatgttttatgttctgtaacatttgaaaatatttgaatgtgcttgttatttggtaatctagttgaatgtagtgactgtgctgtcaccttttcttccccaattgcatgaatccattgacaaaaggatctgttttatttctcagaaacaacagattttttccagtttatttggtaagaagtgtaaccaaaaagcactttccgattcagatgccctaattgttccaagttgcttcatagagttttataataatattcagaggacagcttctgtcttaatcagggtataattcagcctccatgaaacccttcctgtctttccaggtatagtcaaccctttctctgtacttttactgctgttagcctaagttgctcttctataatatgtttttcgctatctcatatcgtggtgtataatggtaacttattaatccagtagtctgttttcagtagcttataaagagtcttgacggctgggaacatgtttattcgttgtttctagtttatagcatgctgattctctgtgatgagtttgcttagaacctattaaatttaagaggtactgattattccaggtgggattgttctgcagtaagttagctatagggagctagggcttagagaaagcttaaggctgggaatataaattttgtaattggacacataagttttactttttacattttcctcttcctggttcttgttttttctgaaccagttgtacagaaagaggacctaaagttaatggcgggctcttcctgcagttccttcttcctccagctagagcctcaggtgcccatagatagacagctctgagtacacgagagtaaaagggaagcaccatgtcctattcactttaccattccatagcatccttctttctctcttagggtcctgttcttttggctttttgttttgttttttactctgtgtgtgtgtgtg

SEQ ID NO: 766 - DNA, 1034 bp, Homo sapiens
tactgcaacctccgactcctgggttcaagccacttctgcctcagcctccgagtagctgggattacaggcacccaccaccatgcctggctatttttgtatttttagtagagatggggtttcaccatgttggccaagctgattctgaactcttgatctgcccaccttggcctcccaaagtgctaggattacaagtgtgagccaccgcacctggcctgaaatcctcttttaaaccacgtgatttggtcttgatttgaaaaatatagtcctaccatatcttttgttcttttcccattctaaaattatgtgattctaggctaaatgcagagcaacatcccatttcacatccactgtcatccttctcgagcccagatttcacccactttaacatttaactttttaacaaaactgtaattatcttcaaaactatataatttatcttttctgaagttaacataactcacagtgctgtgtttttagaacagctgggttgaatgcttgtgtgtgatataattaatagaaccctaagtgtaatagtgagagagggaagggtatagaatttaaatagtgatttttgtcagaaaaacctggggaaattatttgtgggtttagttacaattttccagggatttgcctttattttctctgtgttccaggtcttgcctgaaatttagaagcccctttcttgcccttcctttctggtgctatcaatggtggtaatcacctctgaggaagaaaagccctcttcccactgtccatggagaacactcagcatctatgcttgattttgacagggcagattttggatgaatcatgaaatgcttctaaagtagccaagagttaactcttcctaacctttttatatagtaagcatgttaccccacaaggtaacttacccaggggaatcaactacatagtggaatcacgttattcacacatttaacttacacaaattcaactctactgaaaaaaacatgaagtacatgagtgagagagaaaaataacaatcttaagtagcacatgttaaaccttccatt

SEQ ID NO: 767 - DNA, 1034 bp, Homo sapiens
tgggaggcagggagaattgcttgaacttgggaggtggagactgtagtgagccaagatcgcatcactacactccagcctggtcaacagagtgagaccctgtctcaaaaaatgaataaataaaaataaataaaataaatttcatctttgtcacacatggaaattgccagctgtgttatcagtgtattaactgattaaagttttatttttaatgttactcaagcaaaaaatatgaatggcattttagattgacaatatttagctatttctgagcaactctgtgtgatttatacaggaaaaaagggataaacattataagttttctttaaggtctttgttctcaatgactaatattaaaataaactttttgtagtcttggacagtaaagcaccaaaaccagaagacattgatgaggaagatgatgatgttccaggtaagtgacatttccttagacttaagattttaagcatcctgtttatctcctttcagtcattgcatagataacttttaggtttgtgttgattgtaagctcatgaatttaaattgattcacaataatgtggataggatctaatgaaaaacaacgtaagcacccaccttagaacctagaatcagaaattgtcacacaaagctctgctgcctggatttattaaattgaaatcactgtgattataaatttgcatagctattgttataacatttctgtatgaattataattgacatatgaaaatgctattcacctcagtaatttgcatagacaaaagatgaacatttccttaggattactgtcctaagcaaataattaaatcattgttagtaaaatgccaccagttcatttctgcctccttatgttttcaggctaattctggttgtactaattttattttttcgggggttagaagttaggagttccatttacctctttttccttttttgtattctttgattcatatactttgtttttctttttcagatcttgtagaaaattttgatgaggcatcaaagaatgaagctaactaaaagtttggtttttggaa

SEQ ID NO: 768 - DNA, 1046 bp, Homo sapiens
tcccaaagtgctggaattacaagtctaagccactgtgcctggtccactccgaacatcttattctttgtactttcaatatatattttgaaaaacctgtttaaatcaaaaattttttggtactctcaatgtcttgaagtatctctaagagttctcttacttatttacttagttattattattattattattttgagatggagtctcgctctgttgcccaggctggagtgcagtggtgcaatcttggctcacttcaacctctgcctccccgattcaagtgattctcctgcctcagcctcccaagtagctgggattacaggtgtctgccaccatgcccagctaatttttgtattttttgtagagatggggtttcgccatgttggccgggctggtcttgaactcctgacctcaaatgatccacccgcctcagcctcccaaagtgttgggattacaggtgtgagccactgcacctggccaaagagttcctttaatgtgaagttttttgctggtcttactgtctctaagacatcttcatccttttggttataaccattttcttcatttttttcaaaagtttgccttcactaagttcctctggttacatatctaaagtctttcaaatgggaacagtgtcaaaatttccatgctcaactacttcaagtttcacttccagccttatcacttttcatttctttacttcacttgatcttttttttctaattcccctttttgattattcatttttctaaaatgtcatgtgagttttattactggtagaaaaggaggcaacacaatatatcctttgctgtttgttaaagaactgaataacaaatatgcagtgatagaccaaagtctatcactgattgactttgaaagaagtggtgtgattgatgactgatcataatgtgcatctgttatttacatagtgatgcatggactgaagagccagcagcaaagtttgtaatgtgtgcaattacttatagttactatattgtgataaatgaaatttgaattgtgttgttaactatggtaactaaaattcatgcatt

SEQ ID NO: 769 - DNA, 1029 bp, Homo sapiens
gtcactactgggcagggagtattaagtggtatcctagggaatcatctgagtcccacacatattctttcttgttccctttgtgtaacggcagccctacttcctcctgaggatgagggttaattaatcttgccaagatgggcattcctcttactgctttctagtccttggacacaaggaatactcagtattcaggctgcagctgtaaattgtagttcactgtgacctttcatgtgtctcttggcaaaagtgtgcccgctttgggtgccaggacttctaactccgtagagccccacattgcagagatgggaagcacaaagtagatcattgggaatgatggcgagtaggggctatttccctttccacttcttggttctcagacccatgtattcttcttactgggaacctagctctaaatcagtgcatgtactgcatacaagaggatagcacaccatttttgtctctgagctagtacattagctgtgcctgcagcaggccattccaatactctctaagactggtccttttgtatggagctgttatggatataactactggagcttatggttatgggcctactgccacaaatctttcactgtgaagtgattcccttggctggattccatgtctgttgattaagtgctgtataagtctatatttagtggtactggctaggtctctatggacaggaaaggcaaacccatacctggaataaatgtctaatcctgtgaagatcaatcactggcccatccaagatggaagaggcccagtgtagtcagcttaccacttaatagtctgttggtctgcctgaggcataatgctatatgggggcttggtgttggtctttgttgctcataggttggatgttcagagttggccttggtaaatgggagtccatgtctccttctctgcttccatctctatttctgccacagtgacctctccatttatgtccccatcttgccacttctgggtgaccgatgtcagctagttgagtcattttgtctccttggctgttcattggctcttctg

SEQ ID NO: 770 - DNA, 1053 bp, Homo sapiens
gcctgcctcagcctcccaaagtgctaggattaccggtgtgagccactgtgcctagccaaagttttaagagatgtattttaaatacatctttcataggagtctgcaagctttttatctctaaaaaatgacttaatttttagggctcaaaaattccattcttcaaaagaaatgtccaagtattttcttttatagcttcaaactttctgcacctaactacttgactgttccatgccaccccaaacatgacatgactgaactaatttatgtgttactgtcttcctcaaaagaaagtttaaaaaggagttcttcataaatgcagatctctaatacaatatctaacacaaaagaagctttaaaaaggtaatttcttatttgattagctaggagtttatgttagtaaaagcaaaaaaaaaaaaagtttacggagtataacactagggttgcttttatactcaagatgtttactcaaaatgacaacaattacatctttaggagtataatgtagatactaaataaaccaaaaatttttttttcttaaagactaggaagaatcagaagcttagggacatccagaattaaaaaaaaaaaaggagaggaaaaagaaaataaagaggaaaaaaatgtccttcattgcaaccatttcattatcaatagtgtcttgggctgcaggaatgagatcttgattgtgatctgtatcgactataataaggagaaggtgatcatcttctgtaccggtaatcatagtcttcatatctgtcatatccacgatgatatcctctatcatagtaagaatctcgacgtctgtgaccacctccactgccgcctttgccaccacctccgccaccaccactatgagttctgcccatatagatgcctggtataggtgtgcgcattgtcttggtaatagaataatccacccgaatttcttctatcatccagctcctttctgtttgcccttaccatagcctcctttgagtcatctattccctaaaaatgcacaaaagcaaatccttgagatcgcccagtttgctggttgtaaaccacattggcacc

SEQ ID NO: 771 - DNA, 1016 bp, Homo sapiens
aattctaccctgatgattaaaaaaaaaagttttaggctgggtgcggtagcttatgcctgtaatcccagcgtgaggaggccaaggtaggagcattgcttgagcccaggagttcgagaccagcctagacaacatcttgtcccatctctacaaaaaacaaaaaagtcaggcatggtgacacgcacctgtagtcccagctggaggctgaggtgggaggatcacccgagcctggggaggtcaaggctgcagtagctgtgataatgccactgcactccagcctgggtgacaccagatcttaagaagaaaaaaaagttttaaggcttacatttcatgcttatttactctgaacaaatctttttaaaaaatgtatcaattgatctttataaaaaataattcccattagcagaataaagattatgtattgaatatgattccaatataatttaaaaagttttgcaaaaggagtcataaaaagaaatgtctgcttcattaaagttgcatattaatacaaacacatggtatcagtaagaactctgccattgtcaggattgctatagtttaggcctcttgtttctaagtcctcaggcagctgcagttgctctgtatatcacattacatagctcaccttctgtttctcattgaagaaaaatgaggcataggatgtgcagtgatccaatgttaggtacttccttgaccccatcaatcttggtggataaataagaaaaatacattttaagctttgaaacatgatttcaagcacttgatagtgtttcagcagtagtcttggtaagtggacgaagccagtgatttggcctgccttggatggataaatgaaattgcacgttgccatgaagacccatctcactcaacagcgcatgagatacatatgaatcctcgccttggtaatgttctagaggtgaatattagcatagatctaaaaataacctacccttttaccctgatatatgatgccaccgtcacttgtagagtacaaaaacgtatacaaatcttgccacact

SEQ ID NO: 772 - DNA, 1079 bp, Homo sapiens
gtgctcaagtattggttgagtgaatatttatataaatgtgaattatgtggagatttttattgtaattatgttgtaatgagatttgaccccaaaacttgctattatgaagtatttgtaccctaactccttgctatcctcttattttcaacttggtctaggactttagtaagctaatacatttgttgaatggatttgtcaatcagtaagcctcaattttttcctgcagaaatacattttcgttatgtgatgtaacagttacatacgttggaacagccaagaattcgttttgaccttttgcagattttacttaagaagattttgaaaaattttattgctcttttttaaaaattcttcctatcttcatttaatattcagttcaaagcttttcatgaagtcttgttagataattctaagctgtaataattgtttcctcttagtttctataacattaatttatgaacatactaatatttgtaaatccattgcatcatttattcatttgacgatacttattgacccatttactcttaatttgctggcatatagtttttcatagtagccactcatgatcctttgaatttcttggtatcagtaataatgtctcctttttcatctctgatttcgtttgagtcttctttttttcttagtctggctaaaggtttgtcaattttatttatcttttcaaagaaactgacatttgtttcattgatcttttgtattgttttcatttcaaattcatttcttttttccttttaattttcaaattcatttattctctgatctttattacttcttttcttctaattttgggtttggtttgctcttgcttttctagttctttaagatgcatcattaggttatttatttgaaggtttttcttttttgatgtaggcacttagagctataaattgtcctcttagtactgcttttgctgtatcccataggtttcggcatgttgtgtttccattattatttgtttcaataaaatgttcaatttccttactggccattcaggagtatattgtttaatttccatgtgtttgtatagtttccaaaattcctcattattgatttgtaat

SEQ ID NO: 773 - DNA, 1073 bp, Homo sapiens
actcttcagttcctgctttccttctaggtttatggcatctgtgtatttccctttcttgcttttgaatttgactgtttaaactcttttaaaatattttatttagaatttttttatttatttatttttgagacagggtctcactctgttgctgaggctagagtgcagtgccaccatcatggcccactgcaacctccgtctcctgagctgaagcaatcttcctgcctcagcctcatgagtagctgggattacaggcatgtgtcaccacacccagcgaatttttaaaattttctgtagatacggagtctcactatgttgtccaggctgatctcaaactcttggcctcaagcgatctcacaccttggcctcccaaagtgctaaactctttaaaataattagttttgtctagaatttttttatttagagtaggaaggaatgtttaccacccatcagctcagtgtgcccttttttcttttaagaaatcttaagcctgcagaaaaatggaaagactagaacaattaagacccatatatccttcagctagagttatcagtttttaccattttgtcccttttgcacacctttcttcccttcccacacatatactctcacatcatttaaaagttagttgcagacaacacaacacttcttccctaaacacttcagcaggcatctcctaagagaacaagtaagggcattcccctacaaaatcagaatgccattatcacatctaagaaaatgataattaattcaatgtgtcacccaatgtatcgtccatatccaaatttcttctgagattgttctcaaaatgttaatttatgctgtgtgtgtgtatatgtgtgttttcttgatccagaatcaagtcagtgcctgacacttggttatttaatattttgtctgttctagttgagaataatcttttttcctttttttttttttaaagacgaggtcttgctctgtcacctaggctagaatgcagtggtgcagtcatagctcactgtaacctcgaactcctgggcttaagcgattctcctacctcaacctcttgagtagctgcaccaccacacctggctaat

SEQ ID NO: 774 - DNA, 1027 bp, Homo sapiens
atcacataaatgatttgcagatattttctcttattcttgggtttttcattctgttgtcctttgatgcaccaaagtttttaattttgatgaactccaacttacattttcttttgttgcctgtgcttttggtgtcatatcaaagaaatcatctccaaatttgatgtcatgaagtctttcccttatgttgtcttctaagtgttttgcagttttagtgcttgcgtttaggtcttttatccattttgagttaattttttgtgtatagtattagcttagttttattcttttgaatgtggatatctggttttctcagtatcatttgttggaaagactgttctgttcctatggaatggttttggcactcttgtcaaaactaactggaccatataagtgagagtttatttctgggcttttttctattccattggtctttatgtctgtctttaatgtcagtaccacatggttttgattaccatagcttcatagtaagttttgaaaacatggaatgtgagtcctctggggttgtagtttgtcaggattattttggctattctggatcccttgagattcaatttgaatttgagaatggatttttctgtttctgcagaaaacatggttagggttttgatagagattgcgttgaatctgtagatcactatgggcattgttgacatcttaataataagccttctagtccatgaacatggaatgtttttccatttatttgtatgttctttaatttcttttagcaatcttttgtcttttgtagttttcactgtacagtattttacctccttggttaagttaatttctaggtattttattctttttgatgctattgtaaatggaattgtttccttgatttcatttttggataattcattattagtatgtagaaatgcaatggacttttttgttgatttttgtatcctgaaactttgccgcatttattagctctaacagtttttgtgtgtttgcggggaatctttaaggttttctaaatgtagcatatgttgtcagtatacagaga

SEQ ID NO: 775 - DNA, 1087 bp, Homo sapiens
acagggttttgctgtgttacccagacaggagtgcagtggccattcacaggtgcagtcatagtgtagtgtgtcttcaaactcctggcttcaagccatcttcctgcctcagcctcccatgtagctgggacaataggtgtactcctctatgcccagccttgtgttattatttgattttaggttataacctgaaacccttgcactaaattgcattgcatgaaggcaaggaccatgtccgttttgttttctgccacatccccattgggtagcttggtgcccagtacatagtaagagttcatatatttgtggaataaatgagtgaatgatggattcttggttttgtctctttattagaaaggttattgaaggattttaagaaatttaacattattagatttattttttagaaagttcagtctttgtttggaagattaattggaaaggcagatgtgaagattaggagaacagttaggttatcatcatgatcgtttagtcctcagataataacagcctgaacagaggcagcaatgttagagataggagaagatgtgattttggaagaacaatttcagaggaaaactaacaggacttaatgactgactggatgtggtcatggcgagggagaaggaaaagtcaagactcaaaatttaaatgaaatatgtaatttagtatgaagtagtattacagagtagttaactatagagccattgcagtcatacagattaatcatgtaatttactagctgtatgaccctggtaattttacttaatgtcttagtccattcgggctgctataacaaaataccatagactagatggcttataaataacagagatttgttacagtctggagcctggtaagtccaagatcaaggcaacggtagatttggtatctggcgagggcctgcttacttatagacagctgtgttctcactctaacttcacagggcagaagggtgaggagtctccctcaggcttcttttatagggcactaatcccatatgccccactacctaataccatctcttttggggttaagatttcaacataggagttttggaacattcatctgtttacctaactgctaattg

SEQ ID NO: 776 - DNA, 1109 bp, Homo sapiens
cttctgtactttttcttgtgctgtggaataatgggaaagaatggacttcagaattgaacaaacctgacttttaatgccagtaccgttccattctagctgtgtgatccagttggcaagtcattcatcctctctgaatttgtttcctagtctgttttatttaaaacaattatataactacacctacttaaaagtcattgtggttattaagttagatatcatacctgtaagtacataccaagaaagtatctggcataaagtaggcatgtaattaatattttccatttcttcctttcttctgcctagaatacccctctctactgtagacttcctgaagaactcctcaaccttttaaaatccagcttaatggttaattcttctctgaatccttacctgggctgcttagaaaatagtgatttgcttcattatctctgttctaatagtggttcctatagactgttggctacattaacactttttctcattgcaatttagatattatattttcagatcgtattctttcacttagactatgaaattcttcatcttattttatacttgcatttactgctccttgcatggtgctaggcctgtagtaggctctcagcaaatgctgtctatattgtactctcaaatgcagctatgtcccagatagttcagcagtgaactttcacatacagttaagcattcttttgactgcataatgcttttgcttctttaccaggaccctgtaaaaatatctactgttagtaaaattgctgcttagggttcagatttttattttaataaatcttagattaataaggaactaaattggcctactctgttgttaaaaagagtcagattgttggattctattgttagtaaaatacctattgttagtaaaattatctattgtaaaaatatctattgttagtaaaattgctgcttagggttcagatttttattttaataaatcttagattaacagggaactaaattggcctactctgttgttaaaaagagtcagattgttggattccattttcataaaaagttatgtccgttaaatctaattgtcaaaacttctcctaccaagaaagaacagtgaattatctatattacttaaacta

SEQ ID NO: 777 - DNA, 1072 bp, Homo sapiens
tttacttaaaaaattttaaactcaggatttctctttccaataaatatttttaataatggagtagatatttcccattgtatccaaaaaatccattttaaaatttccattagaaaatgggaaatgatgttactttgttctacctgactgtccctcaaatatgcattttatataagaccaaccaagcaacattcaacttttaggttttcagttcctttcccatatctctaggttctacagtgattattacgcatgatttgacttcaagctgaaaggaccactgtcattcaaaatgagatgctgaagcacatactgtgcttccagagattaaatgagaagagttacattcagtattaacttgttcatgttcagaatcttatgtgtgatttactgatgattttagtgacatatgtactaaactcttaaattatacttaaaggaattgttttatgaagccagtcacacacaatacttttattttctgggttcattttttaaagtttaagtttttaattgtcaaaaatgtcaaacagtacaaaaggtcatagagtaaaaggtagggctctcttctaccccaactatttgatatcctttccagaggtaactagtatattatcactttcttgtatatcatgagttattttaaatgctggtcttgaacatttattatgtgaaattcttgttataatagttggaaaatttttattaaatagaaaggtagtctttagattgtggcacaaaccactgtggggagaggtctatacacaggataaccacattatcatctaaggtggactgggtcacttttgagagtaaaagagggcactattaatttgatactgagccagcagatacaaaccatgctctgtatgcacctattgataaatcaaatgcatgtctcttttctgtgaataattagctcatttctccatctgatctctttcttgatttgttcctttaaccaatctattacattgttttctcccctttcagactatgctgtggaagagaaaccatcacagatttcagtaatgcagcagttggaggatggtggccctgacccacttgtatttgt

SEQ ID NO: 778 - DNA, 1064 bp, Homo sapiens
gggggatcacttgaggtcaggagtttgagaccaacctggccaacatggtgaaaccccacctctactaaaaatacaaaaaaattatccgggcatgatggtgcgtgtctgtaatcccaggaggtggaggttgcggtaactcgagatcacgccattgcactccagcctgggtgacagagcaagactctgtctcagaaaaaaaaaaaaaagaaagaaaaaaagacatctcaaatcaatgacctactcgtctaccttaagtaattagacaacaaagagtaaatgaaatacaaaatagaagaaataataaagataagcaatccataaaatagaagacaaaaacaataaagaaaattaatgaaaccaaaagccagttctttgagaagagcaataaaattgataaacctctagttagactgattagatagggaaagcacaaattacctttttaggatgtaaaagagggaaactatcattacaggtccgatagacagtatgaacatgttttggtcagtgtgcgttcaacttagataaaataggcaaattatttgaacagtaagttttcacagctctcaagattaaatagataacctaaatagccctgtatttattaaaagaattgactttattgtttaaaaccttctcacaaagaaaagtcctagttcagatggtttcactggtaacttaacaatgaaggaagaaataacaccatttctgtgcaaacacaccaagaaaatagaagagaaggaatcttactctatgaggtcagccttatactaataacaaaaccaaaaaaagacattacaaaaaatgaaaactatacatcatacctctcatgaagttatttgcataaatagttaacaaatttttagtaaatccactctaacaatacataaaataataatgtatattatgactaaacatggtttatttcaggaatgctaagttggtttaacattcaaaactcattccatagtttaggatacaggatcctttaacaggatgaaaaaggaaaaccatatgatacagcaaaagcagttgacgaaatcctacttccattcaagattaga

SEQ ID NO: 779 - DNA, 1026 bp, Homo sapiens
ttttggtttattttaatttgaaactacacatattcttcagagaagtgtgaaattacaaaagcataatttcataggttctttgtagcactggcgagaacagatggcgctaaaatctgtttgaggaatgtttgattctctggccttcaaggaatacatttcttttagggaattaggagctgatagtcctcttcttaaaggaatgaaaggagttggtcaaaggtcctctggagaatagtgcagaggagagagatgatgttccattgattattggtatagcttttcctagtttatacataaaagacagtatttaacaatagatatgttcaaataaaagaatcctcaagaagaagcccatgatactgtacctccactgactgcaagaggaggccactgctgaaccccacatgcccaggatagtactgtcttctctcttgtgtacatgcccattgacaggagtggttctactacactggacttctagtcaaactcctggctttccctgtctcccagaactcacaacctcgctgccatatttgtccttgagaccatcagctctaatctcattgtgtttatgtcaagcaccacaagaagttctggactcctagggcatccctcatttatcgtaatttaatttctatctctgtacaccctcctttctgaccccatttcgtattcattttggaaaacccaagatattagttcttgtaagtcttatttgcctctatacatttccttggtaatcttatccagttctatgggcttaaatactatttctaagctgacatcttccaaatgtttgttttagcctaaatctctctgctgttttgtagacttgactgtcttattgcccacttgacatctccacttgcatacacatttcaagcttagcaagttcacctttgacatggtcatcttacaggcttctccatctaaattaatgacagtgctgtcatctttccagttacccaagcccaaaactttagagtcatctttgaatcttcttttcctcattccttgatagacaaa

SEQ ID NO: 780 - DNA, 1093 bp, Homo sapiens
atttgtttgcttgtctactactgaataaagcaagcactaaaacagtgtctggcacgtattagatactcaatgcccattggctaaatgaataagtattttctaaatgaatgagtgaaggcagcctgggcacatagcgtgagacctcagctctacaaaataaaagtaggccagagggccaggcactttgcctcatgcctgtaatcccagcacattgggaggccaaggagggagggtcacttcaggtcaggtgtttgagagcagcctggctatcatggtgaaacccatctctaccaaaaaataacaaaaattaggcgggcatggcagcacatgcctataatcccagctattcgggaggctgaggcaggagaatcactcctgaggtccggagttcacaaccaccctgactaacgtggtgaaaccccgtctctactaaatacaaaaaaaaaaaaaaaaagccaggcgtgatggcgcatgcctgtaatttgagctacttgagaggctgagacaggagaattgcttgtacctggttggcggagattgcagtgaactgagattgtgccattgcactccagcctgggcaacaagagcaagactcagtctcaaaaaaaaaaaataaccacaaaaaaacaaatgaaaataaagatagctgggcatagtggtacatagctatagtctgtgtacctgggaggctgaggtgggaggctcacttgagcccaagagttggagactgcagtaagctatgattatgccactgcactccagccggggcaacagaacaagaccctgtctcaaaaacacacacacacacacacacaaaaacaaaaacaaaaacaaaacaaaacagattgaatgaagactcatagttgtcaatatgtagattcataggacttgaagatggggtctagcctctggacactagtgaatttcagctaactggaagggtacgtatttacatttttcttaaaattactccaagaaagtatattcttccaccttttccatcgttcttcagctcagtgtttctttctcacttctagttctgttcctcacttatgctgtttcctctgtccaaaatattctttttatatacctg

SEQ ID NO: 781 - DNA, 1049 bp, Homo sapiens
atagctggacatggtggcacatgcctgtgcctgtaatcccagctacttgagaggctgaggcaggagaatcacttgaacccaggacgtggaggctgcaatgagccaagactgcaccattgcactccagcctgggcaacaagagtgaaactccatctcaaaaacaaacaaggccgggcacagtggctcatgcctgtaacccagcactttgggaggctgaggtgggtggatcaccaggtcaggagatagagaccatcctggctaacatggtgaaaccccatctctactaaaaatacaaaaattagctgggcatggtggcatgcacctgtagtcccagctactcgggaggctgaggtaggagaatcgcttgaacccaggaggcgaagtttgcagtgagccgagattgcaccactacactccagcctggtgacagagtgagactctgtctcaaaaataaacaaacaaaaatactgttggtcttgcaattaagcattattcaaggttgaatgtgaatgatggcatataaaaagtacagagaatgtgctatggcatttcaaagaaggtaatggtcacattaatgtctcactgggggttaaagaagtcttcatgctggccaggcgcggtggctcacacctgtaatcctagcactttgggaggctgagtcgggcagatcacaaggtcaggagttcgaaaccagcttggccaatatggtgaaaccccatctgtattaaaaatacaaaaattagtggggcgtggtggcgtgtgcctgaagtcccagctactcgggaggctgaggcagaagaattgcttgaatccgggaggcaagaggttgcagtgagccgagatggtgccactgcactccagcctgagcgacagagggagacttgtctcagaaaaaaaaaaagtcttcatgctgaaattggcattttcaggggactactttttcaggtgcttggccatgggagaagaaaagggaaggtaggccgggcgcgatggctcacgcatgtgatcccatcactttgggaggccgaggtgggtgggtcacttaagct

SEQ ID NO: 782 - DNA, 1030 bp, Homo sapiens
gggcgcggtggcacatgcctataatcccagcactttgggaggccaaggctggcggatcatgaggtcaggagatcgagaccatcatggttaatacggtgaaatcccgtctctactaaaaatacaaaaaattagccgggcatggtggccagcacctgtaatcccagctactcgggaggctgaggcaggagaatggcgtgaacctgggaggtggagcttgcagtgagcctagatcgcgccactgcactccagcctgggtgacagagcgagactgtctcaaaaacaaaacaaaaaaaaattcttccgtgtcaacagcaaagacagcaaggcaaagtgggtatgtgcctgtagttccagctacttggaaggataaggtgggaggatcagtgtcaacctggataacataacataacataacataacatagcaccatagtctctaaaaaaaagacaacccagttaaaaaatgggcaggccaggtgcgatggctcacgcctataatcccagcactttggaagccaaggtgggcggaccacttgaggtcgggagttcgagaccagcctgacgaacatggagaaaccccatttctactaaaaatacaaaattagtgggtgtgctggcacatgccagtaatctcagctactcgggaggctgaggcaggagaatcacttgaacctgggagctggaggttgcggtgagctgagatagtgtcactgcactccagcctgggcaacaagagcgaaactccatctcaaaaaaagaatggctgctccataggcagagcagtgtcatgggctgcctgactgagtatagttacggtatttcctgattatatgctaaacaaagggttttctgggaaaggggtggggaattcctggaactgagggttccttcctttttagatcatatagggtaacttcctgacattgccatggcatttgtaaaactgtcatgcatgggtgggagcgtcatttagcatgctaatgcattataattagtgataatgagcagtgaggacctccagtggtcacttt

SEQ ID NO: 783 - DNA, 1514 bp, Homo sapiens
ccaggcagtcatagtaaggtgagagagatggagatgcaaacaaatgaatatgaccagaggatgataaatgcaggagtgaaaacaggaacaaaatattcagtgtgtccagaagaagaatgtgactgtgtttaagttttccccttaagtagtctcaggagaaattcttagttgtgtctgaagtgaaatcaacaagcatgtgttttaatcttggcattgcttctcacaacactttcagtaagaggttcagctcaaagagcaaaacctctgtatcagtcagctttggaaagcagagctaaggtttacatttaactcggaggaatttgctagatgccaggtgctgtgtttcatttgcctctcctttggctttgtactgattcttagatggtgttatggtccagattactgcagagaacatggattccttgaggcaggcactgcgagagatgaaggacttcaccatcacctgtgggaaggcggacgcggaggaaccccaggagcacatccacatccagtgggtggatgatgacaagaacgttagcaaggggtaaatgcagcacatgtccccctttgtggcttttagttataggttaggctctgggttttgtctgctgtctacattggtgttttatagttttactgaaagccctgcctaagagaaagactgctttgtatgcttaacgtagaattttaaatttctggttttgtaagttagtttctgaaggagtttctgtatgtatttttgagggaagtataagtagagggattgatgaaacaaaaaagtccctctatagttattgagataacagtaatacctgagccttttaagatttacaacacatttttgccaacattgttttgtttgatacaataacaggtgttaacatttccattctataaatgagtaaacaagtaccaaaaggctaagtgacttttcaggtctacaaagctaggaagtgataagactagctctgaaaaccaccttcttgggcttcaaactctgtattctttctcagtgttcggcaactctattctaatggttcaagccaaaaccttggagacatctttgacacttttctttccccctcacccctttcttcctctcatacccagacattcagggacaagctggaaaacattgcatttatacattacaaactgaactttgtatcctttctcaaaggattctacacaacaaagggtgctctttttttgttttgtttttaacattgctatttgatgaattagaaattaaacttaaattcaagtaattttgactaaatgaagtgaatgcctgatatggaagtttaagttagattcgacttttaatacatagagatttggccgggtgtggtggctcacgcctgtaatcccagcactttgggaggctgaggcaggtggatcgcctgaggttgggagttcaagaccagcctgaccaacatggaaaaaccccgtctctactaaaaatacaaaatcagctgggcgtggtggtacatgcctgtaatcccagctactca

SEQ ID NO: 784 - DNA, 1049 bp, Homo sapiens
tctcactctgtcacccatgctggagtgcagtggcacaatcttagctcactgcagcctcaaacttctgggctcaagcaaaccccccaccttggcctcccaaagtgctgggattacaggcatgagccaccaagcctggcctttttcagtggttccaattcattattttggtgcacaaatggtctcagctttagctagacaagagacccttcaagctggctcctacatcctggtgatatgctattttttttttttttttttttgagtacttcttttttatttctatcctaacaagatgcttcaggcttatcttgtgcttatcctgccctagccctggaatcagctatttctgcaaggagccctggcttcttttaatgggagtggtattagaaaccaaaatctggtttatccatgatatgtgtgatgcactctgacctttttctgtttcattaaaaatttattttgatcttagaccaaatggattccacaatgcacattttgaaaatactgctttagggcaatgtactccattgtcactggcatcttctgaaagccaaggctaaactagtttttctgcagtattagtacagctccaagaattccctggaagctagcgcaggcctgtgggacagcgacaggctgctccccagtggctagtgctgggtttagcacgaggcaacagcaggctgtggagctgtgtttgcggcagcagctgttttccagaggcctaaaggcctggcctgggaaacatctgggtaggttcatcctgctctctgaggtgggagcttatagtcgacatctgcctctccaaaggttttaccgacggtggttgcacagaactcttactgtgacctttcccacaggctcagaggtactcagagcttctaaggggaagcttggcccacagagcagcagcttgtcaggaccgagccctggtaaccactacctccaaacctgacaagaacaggaagcacttgttaacaggggcagcttatttttggtctaatagccagctttgtctgaacatacctcaaaagtctggaacttctaca

SEQ ID NO: 785 - DNA, 1046 bp, Homo sapiens
tctgcctgccttggcctcccaaagtgctgggattacaggcgtgagccaccactcctagccagttctcaaaagctatcactccatgtgccatataagatacatgttctaaattcagaaacattgaaggttcagatgagaaattatatttaagttatatgatctcttcaagatcatccctacataattcaggactgtttgtgcttgtttttgtgtttgtctcctgctaattgggacatcttcattcatcccttaatctcttctaaagaggcctagcacatagatgtcctgatatgaagtcttaacacttcttttactttttggcatctaaatcttttatttccaggttgtttgctctaatgactttttcttgcagagtttgaattgatgcatgttgatgagtttattgatgaactattgcacagtgagagagtctgtgatatcattctgccccgactacaggtaagaaataaaagtctgttaccagagtcacccttctcttcctagacgggcagacagacaaacacatacacacagcttaaacactgaagcctgtggatcttatgggtcctcttaatgaatagtcttcctgtctgggagtcccaagatagtggattgggagtgagaggaaaatagataaaatatttgaagggtagggctttaaaagtgaatggtttaaaacaaggaaactttgtttttctccatccttttgtagttcaggtgcatgtgtgagttgtgcctccctcaaaccttgttacaaagtcagcacattacctgtctatcatgaaaaaagaaatttattcaggatgttacatcaagggtattgtagctagagtaggtagggagtttttaacttcatgaacgttttttttaaactaatcttcatgtaaaaagccaggacataaaacagataaaaatagggccaggagtgggagactgagccattaattccttaaacttgccttcaccatcctgcttccctttcctagtgataaacgattatccatgaggcatcttttcaggaaatgagtgtgatacagctctcctgt

SEQ ID NO: 786 - DNA, 1087 bp, Homo sapiens
actgtaaggcattgctaccagcataattcacaaaggatattttttcttataattaaccaaaacataaacctcattgctcagagattctgaagtccacaagtgctcagaaggttgaaatgcttctttgccatggctctggcaatacagtaacagaatgaagcttttaatacacaaaacaaactaaccaacaaaacagataactgactgagtcttggggaaattactgagaatacctctagttgagtgttgtgtaaatgactaaatacttcaaggcaggagcatttaggaagaccaataaaaaccggagtgggggttgtgggaaggaagggtagagattaaaagaaagctatgagaaggtttaggaagagctaatggattgagattccttttttgccttgtcttcattgccccatgctctctggtatgccttgcttttataagaagctgtggttcaagagcagaggatctgcttataggtagttcatttattcatacttacttcttactcagtagacactgaaacatttactctgtaagcataggggatatggagatgtataaggcatggctctaacctggtggttttctttgtttttgtttgttatggagtctcactctgttgcccaggctggagtgcagtggcgcgatcttggctcactgcaacctctgcctcccggttcaagcaattctcctgcctcagcctcccgagcagctgagattacaggcatccaccaccatgcccagctaatttttgtatttttagtagagatggggtttcaccatgttggccaggctggtcttgaactcccgacctcaagcaatccacccatctcagcctcccaaagtgatgggattacaggtgtgagccactgcatccagctgttttttttgttttgttttgttttgacggaattttactcttgttgcccaggctggagtgcaatggtgcaaacaaggggagaatcgcttgaatatttaacttttttttttttttgagacggagtctcactctgtcgcctaggctggagtgcagtggcactcgatctcggctcactgcaacctccacctcctgggttcaagcaattct

SEQ ID NO: 787 - DNA, 1051 bp, Homo sapiens
aagatctctgctgttgctttccggaaagctttctgccaccacaagttagtggaacttgatgccacaggtgtgaatgctgatatcacgattacagacattatcagtgggcttggcagtaacaaatggatccagcagaatctccagtgcctggtgctgaattcattaactctctccctcgaggatccttacgagcgctgcttcagccggctttctggccttcgagctttaagcatcacgaatgttctcttttacaatgaagacctggctgaagttgcctcattgccaagattagagagcttggatatttctaacacctcaatcacagacatcactgctctactggcctgcaaagaccgactcaagtctctaaccatgcaccacttgaaatgtttaaaaatgacaactacccagatactggatgtagttcgggaactcaaacatctgaatcatcttgatatctcagatgataaacagtttacatcagacatagctcttcgcttactagaacaaaaagacatcctacctaaccttgtttctctggatgtttctgggagaaagcacgtgacagataaagccgttgaagcctttatacaacaacgtccaagcatgcaatttgtaggtttgctggctactgatgctggttactctgaattcctcacaggcgaaggacatttgaaggttagactttaaaaatgtattattttgtcaggctgaccaatatcttagttgcataagactctattaaagatgaatgtctgtaatatatggaacatgttcatgaaacagggctgcatatagttgaaaggcttagagtcctaattaaaatctcagcttcatgacccagaacaagctatgatgtcacttcgagtttttatttatttgtagaatagatattattcttaccttgcagaattctgaagattaataataatctatgtaaagggcaagtcacgtagtaggtcctggctaaacaataggttgtcttatgatgataatgtttagctattttgaaccatttacatatatggtttttttgtttttgtttttgttt

SEQ ID NO: 788 - DNA, 1034 bp, Homo sapiens
agatatttattctaatttaattatttatggtcagagaatatgctttgtttggtttgagtccttctgaatttattgagacttgtgaatggccaaggatatggtctattttggtaaatattccatgtacacttgagaggaatgtgtattgtcttattattgggtatagtgttctataaatgacaatcaggtcactgattgttaattagcttgattaattaacactaattaataattagattgtacagtgtcacagttgatactgtacaattctaccacatcctttctaattttctgcctacctgttctatcaattattgacaaaggagttttgaaatctctgactgtaattgtagatgtatgtttctccttacagttctatcagctttttcttcatgtattttgaaactgtattattagatgtataaacatttagaattatgtcctcctgtttaatggactcttttaccgttaccaaatgactttctttacccctgctaatatcctctactttgaagtctgctttgatactgatatagccatttgtactttcttttgactagtgttagcatagcatttcttgttttatccttttacttttaacctatatttgtctttatatttaaaatgtatttcttgtagatagcatataccttgcatcctgctttttcatctagtttgaaaatatctgttttttatttggggtatttggatcatttacatttcctgtgatttttaaatttttttaaataataaaaataataattgtgtatgtggagtacaatgtaattttttttttttgagacggagtcttgctctgttgcccaggctagagtgcagtggtgtgatctcagctcgctgcaacctccacctcccgggttcaagtgattctcctgcctcagcctccccagtagctgggattacaggcgcctgcctctgtgtccggcaaatttttgtatttttagtagagatggggttttgccatgttggccagggtggtctcaaactcctgacctcatgatctgcccgcctcagcc

SEQ ID NO: 789 - DNA, 1031 bp, Homo sapiens
cgcgcgtccgcccccgtccccgtcccgtccccagcctttgccgaatgcctgttactcttagctctggacaaaatgcaaacccaaagaatgtgtgtttagcgcctgctgtgtgttaagtgtcgcctttcttttctttctttctttttttttttttttttgagacggagtctcgctctgtcaccaggctggagtgcagtggcgcgatctgggcccactgcaacctccgcctccggggttcaagcgattcttctgcctcagcctcccgagtaggtgggactacaggcgcgtgccaccatgcccgactcattttttgtatttttagtagagacggggtttcaccatgttggccaggatggtttcgaactccagacctcgtgatctacccgcctcggcctcccagagtgctgggattacaggcgtcagccaccgtgcccggccaagtgtcgcctttctaaagcagtctggtaacccctagtcttttgtaggctttgctaggctccattttaccgatgtagggaagttgggagctctgaaatttagttgacttgctcgtgaacttgaatttcacctcaggtgttcagacctctggccccactttggaaaaaacccgccaagggccacccttggggaactcgagggattgagtggtgaaggctcgacccaaaatttatggagagaaggaaatgttctgattaaggttgtgctttacatattaacgccttgttggaagactttgtgccctgcagtgatctagcctgtaatcttttgaactcatttagaaaagttatataatttgtggatttgtaattaatggaaaacttggattttttacgtgtgtgctagcatcgtctcaagcacattttttcctgcttggaatcgaaacaagatttctttacaaaagtactcacacccattttctctgtctagttctgggtatatctcattttctttgttaaggattttatttatttttaattaattattttaattacacaaatattgcatgaatacttttttccctatgaaacata

SEQ ID NO: 790 - DNA, 1025 bp, Homo sapiens
gacctcccagttccagacatcataagtggactctgcagcaataggtggatccagcaaaacctccagtgtctcctgttagactcgacaagcatccctcaaaattcaagattactgttctttagtcagctcactggtcttcgcattttaagtgtttttaatgtttgttttcatactgaagacctggctaatgtttctcagttaccaagactggaaagcttagatatctctaatactctagtcactgatatttctgcactgcttacctgtaaggatcgattgaagtctctcacaatgcactatctgaaatgcctggccatgaccaaatcacaaattcttgcagtcattagagaacttaaatgtctgcttcaccttgatatttctgatcacaggcaactcaaatcagacctagcttttcatttgctacagcagaaggatatcctgcccaatgttgtgtcattggatatttctgggggcaattgcatcactgatgaagctgtagaactgtttatacgactgcggcctgccatgcaatttgtgggactattggccacggatgctggctcttctgacttctttactacaaagcaaggcttgagggtttgttcttatctgaataagttttgtttcatttgtttagaacattattaaactcgtgctatagaccagactttttactaggtattagggttacagagacagataaaaaaatccttaaagagcttttttaataattaatgattattatgtacctactatgtggaaggttgtgagaatattattattattttttgagatggagtagttttgtatttttaatagagattgggtttcttcatgttggtcaggctggtctcgaacgcctgacctcaggtgatctgcttgcctcggcttcccaaagtgctgggatcataggcatgagccactgtgcctggccacacgtgagaatataatattaagatacaggctgggcatggtggctcacacctgtaatcccagcactttgggaggccaaggcgggcagatca

SEQ ID NO: 791 - DNA, 1054 bp, Homo sapiens
tcaggctccagagtagctgggactataggcacccaccaccacgcctggctaattttttgtatttttagtagagatggtgtttcaccgtgttagccaggatagtctcgatctcctgacctcgtgatctgcctgcctcatccttccaaagtgctaggattacaggtgtgagccaccacgcccagctgggctctttatttttatctgtttgtgtattgccttttttttttttttttttttttttttttgagacagagtctcggtctgtcacccaggctggagtgcagtggtgtgatctcggctcactgcaacctctgcctcccgggttcaagtgattctcctggctcagcctccctagtagctgggactataggcgtgcaccaccacgcccatctaatttttgtacttttagtagagatgaggatttaccatgttggccaggctggtcttgaactcctgacctcaggtgatctgcccactttggcctcccaaagtattgggattacaggcctgagccattgtgccccggcctactgtcttgattactataactttatatgaagtcttgaaattgggtaatgtgacttcttcaactgttattctgtttcataattgttttggttattctaggttctttgtatttccatataaatcataaaagcaacttgtcaatatctacaaaaaggactactggtattttagttgggattgcattaaatctgtaggtcagtttgaggaaaattgccgtttaataacgttgagtctcatgttgttttaaaaaatagaggcgaggtctcactatgttgtccaggctggtctcgtagtcctgggctcaagcaacccttgagcctcagactcccaaagtgttgggattacaggcattagccaccacgcctggcgctagtctcctgattcttgaatcctgtatatctctgcatttatttagatctttactttctctcagcatattttgtcatgtagctgggactacaggcgcctgccaccacgcctggctaatttttgtaattttagtagagatggggtttcaccatattgt

SEQ ID NO: 792 - DNA, 1068 bp, Homo sapiens
tccccaacaaatttatatcatgattttaaataaatcattaatcagtatttatgttatgattgtgttaacatcgttcactaaaaaatttatatcactgggccgggtgctgtggctcacgcctgtaatcccagtactttgggaggctgaggcgggtggatcacgaggtcaggagattgagaccatcttggacaacgtggtgaaaccccgtctctactaaaaatacaaaaatatgaaaattagctgggtgtggtggtgcgtcctgtaatcccagctacttgggaggctgaggcacgaggattgtttgagcccaggaggtggaggttgcagtgagctaagatcgcacaggtgcactccagcctggtgacagagtaaaattgtgtctcaaaaaacaacaaaacaaaaaacaacattgttttattctgtacttatttttttattttcattttattatatgaattttttttttctcgttgctcatgctagcgtgcaatggtgcaatctcggctcactgtaatctctgcttcctgggttcaagcggttatcctgcctcagcctcacaaaaagctgggattacaggcatgtgccaccacgcctggctagttttgtatttttagtagagacagagtttcactatgttggtcaggctggtctcctgaccttgtgatccacctgccttggcctcccaaagtgctgggattacaggagtgagccaccacacccagctgagtcatttatattttttgtaaactgtctattcatagcctttataagttttcttttgggttactgacttttttctactttataggattttttttttttttttttttagctttagtgatgttctttttttttttctttattgatcattcttgggtgtttctcgcagagggggatttggcagggtcataggacaatagtggagggaaggtcagcagataaacaagtgaacaaaggtctctggttttcctaggcagaggaccctgcggccttccgcagtgtttgtgtccctgggtacttgagattagggagtggtgatgactcttaacgagcctgctgccttcaagc

SEQ ID NO: 793 - DNA, 1050 bp, Homo sapiens
tagacaggatggtggccgggcagagacgctcctcactttccagactgggcagccaggcagaggggctcctcacatcccagacgatgggcggccaggcagagacgcccctcacttcccagacagggcggcggccgggcagaggctgcaatctcggcactttgggaggccaaggcacgcggctgggaggtggaggttgtagtgagccgagatcacgccactgcaccccagcctgggcaccattgagcgctgagtgaacgagactccatctgccatcccggcaccttgggaggccgaggctggcggatcactcgcggttaggagctggagaccagcccggccaacacagtgaaaccccgtctccaccaaaaaaatacgaaaaacagtcaggcgtgacggcgcgcgcctgcagtcgcaggcactcggcaggctgaggcaggagagtcaggcagggaggctgcagtgagctgagatggcagcagtacagtccagctttggctcggcatcagagggagacagtagaaagagagggagagggagaccgtggggagggggagggggagagggagagggagaggggatttttttatacattaaggaaacaagcctttgactatgatattgggtgcatgtattttctcccattttactgtttatctatttttaattcatttatggcatggtttatgatgcaataattttttattttcacgtagttgaattcattctgttttactatgcatctgggatcgatggcacacctgcaaagtatttccctccatcatgaagtatttttaaaaaattctttgttttgttttgtttaagagacttgatctcatcctgtgctgaagctggtgtgtagtggcaagtggcatgatcatggttcattgcagcttcatcttcctgggctcaagcgaccctcttgagtagctatgtttgtagccaccacattcagcctcctcacgtttttaatcctgtgatttctgttcttttttttctttggaatttttttgagatgttgggtcgttcaagttttcttctctgtgtgtttct

SEQ ID NO: 794 - DNA, 1071 bp, Homo sapiens
attggatttgacaagaggaagtcattagtcaccttgattatgttatttcagtggggtggcaggccaaaacctgattggaataggatggaatagcaaatgggaggtgagaaatggatgtaactttttgatataatttaatgagaaggaaagcagaggtggggtcagtctttaaaaagatcgactacattaagacatattttgtgcccacgagaagagttctaaagagggagaagttgacaccacaagcaaaataaaaggaaataattttggtgctgaatctcagtatgtgcagaaattgagtttagagtagaataaagatgtttgctttagattggagcagaagggaaggcagagtatgttgatgcaaatgcaagtaggttggtagcttttgttaggaagagtgggtgtatttctcaatgaaaaagaagatgaaatcaaatgaggggagtgagaagatggtgattcaagtttgaagattcaagtttgaggtgattcaattttggtgctgaatctctgtatgtgcagaaattgagtttagagtagaataaagatgtttgctttagtttggagcagaagggaaggcagagtatgttgatgcaaatgcaagtaggttggtagcttttgttaggaagagtgggtgtatttctcaatgaaaaagatgaaatcaaatgaggggagtgacaagatggtgattcaagtttgaagattcaagtttgaggtgattcagttttggtgctgaatctctgtatgtgcagaaattgagtttagagtagaataaagttgtttgctttagattggagcagaagggaaggcagagtatgttgatgcaaatgcaagtagattggtagcttttgttaggaagagtgggtgtatttctcaatgaaaaagatgaaatcaaatgaggggagtgagaagatggtgattcaagtttgaggagagagaattaggaaatagtagtctttggagcaaattctttgggaaataaagtagtattgacaaatacggttaagtgtccttttgaaatttatgagcaggtattgaaattgagaccaggtgagctcagtcttcttc

SEQ ID NO: 795 - DNA, 1036 bp, Homo sapiens
tatatcctgtacaattctacatatcctaccagctgacctaaaagatcttccacttttcttatttatttatttatttatttatttatttatttatttttgtctcgctcttgtcacccaggctggagtgcaatggtgtgatctcggctcactgcaacctctgcctcccgggttcaagtgattctcccacttcagtctcccgagtagctgggattgcaagcatgcgccaccacgcccagctaatttttgtattttttttagtagagacagggtttcaccatgttagccaggatggtctcaatctcttgaccttgtgatccacctgcctcagcctcccaaagtgctgggattataggcatgagctaccgcacccagcccactttttttttttttttttttttgagagatccagaatgtgaggatttacaagaaaaatcttgggactcacctgtggtgcccctctcagttgtgctaagaatgtcttgttagggggtaacatatgatagacttaacactgaaatcatgcgtagatgagagatatagctggtcttgggaaaaacaggcgtgggggggacatctcaatttctgcttcaatctttagtgtcctatgtgcctcaatatactagtgtctagagtgtgctttcctgaatggttcatcagaagcagcagttaatgctaacacaaactgctgtgtttactttgactgtttcacctcattaaacctttggtttttcatttttgtagacagactctcccagtgattccagcctcctggcactgacatcccctacccttgagtgtggacaggacctgtttcttgattctagccaagggaatatggcaaagatgataaaatatcactcccatgattatgttactatatacttatatatatgtatctgtcttgctagcaggcccactgtagggactctttctctctggccctgaaggagcaaacagtcatgaagtaagtggttggaggagggagaagcccaccttttaaggaacttggggcagcttctaggagccgaacgtggcc

SEQ ID NO: 796 - DNA, 1420 bp, Homo sapiens
gcatatgacttacttcggtcctctttctcatcagctttttttttttaaaactatttactttattgatgtttctttttttttttttgagacagggtctgtctcccagggtggagcacagtggcacaattcacagcacactgcagcctcaacctcggaggcttaggtggtcctcccacctcaacctcccaagtagctgagactataggtgtgtgccaccacacccagctaatttttgtattttttgtagatggggttttgccatgttggccaggctgttctcaaactcctgagcttaagcgatctgcctaccttggcctcccaaagtgctgggaatacaggcatgagccatcgcgcctagccaacttccttatttctaaataacatattatgctgctgttcttgactttatcgctttaggaatctatcaattcattttcccactttgggaaactaagattctttttctcactgtttctatgcacagcctttctaagtgtatactcaaggtataaatcttcatacatattctgtacacttcaccttctcaggactttcttacctttgcattccttccatgtggtctgcttgttttgtacaccgtatatggtggactgctgtcatcctcggactccctttgcctctcttgtgttggattccgtgtttcctggcttatgtgcctccctgtatcttggtttactcccaccttttgttggaccatattctccagtagcttcctaagaaaagagtcttgaaatgagaccatacctgtttaaaaaggcctttattttaccctcacatttaattgatcaaatggctgggtatagaattctagctttgaaatatttttccttcataatttaaaaatgtttgcttcattgtcttttacttgtcaggatcactgttgagaactcccatgcaattttcttttaagctttaaggtttttgtcctttgtcctcagtgttcagaaatcacaatggcttaccctgtgggtttattttcatttttttgtttattttttgttaatttttttcttctttgtgggtttattttcatatattttgttgagtacttatcagtcaggaagctcatttcctccctgggacatttctttaatcatttttttctgggatgttggccttcccagactcatcttttcatatctagctcatttatcttttttgttctgaatcctcttctaaaaatataatatcctgtttttgtttcatagttctatatctatttttctctttgaacgtaataatgataattttaaattttattttattttattttatctttttgagataggctctcactctgttgtccaggctggagtgcagtggcaccatctcagctcactgcaacctccgcctcctgggttcaagtgatactcctgcctcagcttcccaagtagctggg

SEQ ID NO: 797 - DNA, 1035 bp, Homo sapiens
tggtgacctataggtaatttcatggtgttgtgcttttcttcttttttttttcttcttttttttatttttgagacagagtcttgctcagtcgcccaggctggagtgcagtggcacaatcttggctcactgcaagctccacctcccgggttcacgccattctcctgcctcagcctcccgagtagctgggactacaggcacccgccaccatgcccggctaattttttgtatttttagtggagacggggtttcaccatgttagccaggatggtctcgatctcctgacctcgtgatctgcccgcctcggcctcctaaagtgctgggattacaggcgtgagccaccgtgcctggcccagtgttgagcttttcttaaaggctgtactcagtgatacagtgataacgtgttagagtcagttagccttatgttcaaatcctatttctctgatattgggaaagtcatttctagaaggtcagctttccttgtctgtaaaatgaggctgacagtgtgcaagattgaggatgcaatgagatactgatcataataaagggtttaatacagaatgcaatttcttaaataatagcttcattgtatgctcggtcacagggagaagttgaccctgtggggaaaatgtttaaaatttgaaaattctttttttttcaaccttttgagtcagggtctctctctgttgcccaggctggagctggaatgcagtggcgggatcacatctcaatgcagccttgacttcccaggctcaagtgatcctcccacttgaggatcctcccacttggccctacaggcgtgtgccaccaggcccagctaattttttttttttttttttttttttttttgtagagacgggggctcaccttgttgcctaggctggtcccgaattcctaagctcaagcaatccacctaccttggcctcccaaagtgctgggattacaggcatgagccaccatgcccggctgtgaaaattatatacattattatattaattatatagtacaaattattatatccctgagcactggcctaac

SEQ ID NO: 798 - DNA, 1049 bp, Homo sapiens
gtatcccttaagctcaggatttcgagtctgcagtgatctatgttagtgccactgcactctgtcttaaaaaaataaaatcccctttgagaattttccgttgatatcctttgttgagacttgttatacaatttttcattgtattataggagatataagctattattttacaacaggaaacccaagagacaacttttagaattaaaagtttagcttgttgactagctgtaaagcaagtgtataaaaaccaatagttttataatgccagcaaaaatcagaaaatgtaattaagggaaaatataccaccactcactttattaacaaaaacataaagtattttaaaatgcctttaacaggtaatgagacatgcagtaaactatgagataatttaaaagcctgaaataattatgagaccattccattttctaagatggaatgacctattagatatatagatgtcatttcttttcagtttattaatgtaatataattcaactgaataggtaagagatggaggatctgaaaattattctaaagtttatctgacagaatcaacaggaaagaactaacaaaaatgtttgtttgtttttttctgagacggagtttcactcttgttgcccaggcgggagtgcaatggtgctatcttggctcactgcaacctctgcctcctgggttcaagcaattctcctgcctcagcctcccgagtagctgggattacaggtgcccaccaccacacctggctaatttttgtatttttgttagagacagagtttcaccatgttggccaggctggtctcgaacttgtgacctcaggtgatctgcccgcctcagcctcccaaagtgttggaattacaagcatgagacactgcatctggccagaaaaatgttttttatgggctcagcctggtggctcagacttgtattcccagcactttgggaggccaagataggaggatcacttgtgcaggaattcaaggccacagtgagccatgatcaggcaactgcctacttccagcctggggaacagagcaagactcctgtctctaagataa

SEQ ID NO: 799 - DNA, 1030 bp, Homo sapiens
agaccttgggcaaatcatttaccctttcttaacctcaatctcatcctctctccaagggagaaagatgaggatagaatgtaaacaataatactgtctggccaatttgcagatgtgtaaactgacgtagagcacgaggtcagagttcaagtctgttagaagagtccacttcctgagtttttcccagctgtgctgtctgagctctgaaagcactgtgtcccagccgcgaccaactttagtggacccaagtcccaacccaaaaccctctcacctccgttcctcggtcaatggctactttgcccagccgcacggcaatgggggcctagggaaaagcaaaaagtcttggttgaggagggcatcaaggctgatagttgcaggtctgaggtgcacagctttgttttaaaggagggaggcagatgtctgggtctggttccagccattctgctgacagtttctttagcgttagtcctataacctgttagctgaggttctttttctatcatgaaagaagccagactctgatccctgaacacctgggtttcttgttattcagcccatccttccaacatgcacaacataactagtttacaaagtgctttcctcccccacagactcatctaatggtgctacccacacttctaggctggtgtcatcactgatgacccagctgtgattttacagctgtgagattgcagtgcagggaggtgaagcacttggctgtgtttatccaatcattggtgagacttggattggactcccaaccacctttcccacttcctcgacctcatttcagcaaatgccagcctctgcggtaaggttttaccccagcagagtgaaacaaagtcagggttaggaacttgggctttcaagtcgacagggctgtgttgaaatcctggtctgtggggcagtgcagaggggcgggtgcattttaatacagccacatagaagcaacagtgtctgctttgtcactggccttggttccacaccagccctagcactccagtctcagccccacttccaggcaaggaggaat

SEQ ID NO: 800 - DNA, 1065 bp, Homo sapiens
cttttaatttacatcaccgttagggcttagaaaacaatacaccaaaataaaagcctcagaagcaaaaatttttctctggccttctcctggcctcctgtctctcagtcccattctccccaccaaggccagccgtagaaactagaatccctcttcctcaaggcagatcatgaaagccataaccccttttccccaaagccagtcataaaacctagaatactactataacttcccttcacctttctgtgtaaaaactagccataaagaaattatctgacctatcttgtttgactgggggtcataagacccccattccagaaagggacctgccccacgcccagaaggaaggaatgcgtgctcagagaggccaagaagaacctagatggacaggcctggctgggtttccccactcagtctattagcattagatcatatgctttttgtccaatcatatttctatagggctgttccatactttgttgaacttaagcataaaatggacaacttcccctgtatctttgggtctttattctgaatgctcctatgtatacatgttaaataaatttgtataccctttctctaattaatctgacttttacaagttgatttttcaggaaaccttcagagggccaaggagcatttgctccctttgcccctctctacgtaaccattccccagttacttcacttctagattatctagtttttcactgttataacagtatgatgaacagatagctttgtgtgtaaaactttccctacatttgattatttccatggaatggttttgaaggcattttaaagactcttcataactttgtacattgctttccaaaaaggttgtcctggtttaaactttgaccagttctgtatagaggtggctatcttgccatagtttcccctgcattgattattcccatttttacatattcttaccaatttgattggtgtaaaatggtatctatttgatttttatcaatggtgagattgagtattttctcaaatagttgtaaattgcatctgttcttttgtgaagacaactagcagcgtatctaagaccagtttgaat

SEQ ID NO: 801 - DNA, 1030 bp, Homo sapiens
ctcccaaagtgcagggactataggcattgagccatcgcgcccggccaagcttaattattttatatgcttactaaagatttcctttggataagatttgcaacatctctgttcttagggtttttgaaaattttgaaaattactattttataaatgttgaaaaacctagtacctatgtgactccatgaattgaaacagtttcttttccccagttcttttagaactcatcaaattgaagctgttccaaccagctctgcaagtgatggatttaaggcaaatcttgtttttaaggagattgagaagaaacttgaagaggtaagatttatgtaaaatattgccaggaaggaccttgaggctagaggaagcagacacaggtttcaggtgttgccacgaggtggtacaattgaaaatttatatcatgttgtcaagtattgagtgtagttagatttctgagtgtctattaaggcttccttgtaattctaaaaggaatgcatttcagaaatgtatgaatctccagatttgagctaaagaactataataaatactgttaaaattgtcactcttttctaggtcctctttgtcagagggtcattcagtcatgggcaaagttcaaatataaagggattctaatttattttgctgtaatttcctttgaattaaaacggtcttacttaaaatcatttcaaagaataatatttaaaatgagccttttttgtatatatatcaaaattctttgtaaaaagaaattgtgttttgatttcttaaagtagttaaaaaatttttttgttttaaaaatgatgttaatttaaaaaatactatacagaaatatatgtttatgaatagtataaattttatactatacttttgttttaaccttttaaacaaaagtttaaaatctccccaaattctgccactcagagtttactgaaatgttaacagtggttaacattctttcagacatctttctctgtgtatattaacttacagttttaacctagggtcaaaaaaacctattgttttttgttttgttttg

SEQ ID NO: 802 - DNA, 1132 bp, Homo sapiens
agaaagtcatgtgacctggataaataaatgatctcagggctagatagtgtagaaacatcagcaatcttaaaacaaaaaaacaccaagtaatgaattttctttcttcttcacaggccttctttcaaggcaaattgaaaatcactggcaacatgggtctcgctatgaagttacaaaatcttcagcttcagccaggcaacgctaagctctgaagaactccctttggctacttttgaaaatcaagatgagatatatagatatatatccatacattttattgtcagaatttagactgaaactacacattggcaaatagcgtgggatagatttgtttcttaatgggtgtgaccaatcctgtttttcctatgctctgggtgaatagagcctgatggtatactactgctttgcggaattgcatacaactgtgcattacaaagttaatatggtaattatggtctggggtaaaattgagtttcagaataaaattaggaacagtaaaatccaaagaactatgtaaacaaaaaagcttttgttttgcttacaaagtatatttaaggattattctgctgaagattcagtttaagagttttccttgggagaactaagtaagaaacacaatgccaacagctggccagtaattagtgttgtgcacttcatgtcattaatcaatttctcaatagttcttaaaattagtgagattaaaaatctaaaaattttgcatttcatgctatcagaaacagtattttcttcccaaatcaaaataaaagaaatatgatcagagcttgaacacaggcttatttttaaaataaaaatatttttaacatgggtttccttattgaaaaatcagtgtattagtcataaaacaccatcattaagaataattgaacaataaagtttgctttcagatgcagttttcaaattataatctcatttcaatttataacgttctcagtcctttgttataattttcctttttcatgtaagtttaattatctgcatttatcttttttcctagtttttctaatactaatgttatttcttaaaattcagtgagatataggataaaataatgctttgagaagaatgtttaatagaaaattaaaataactttttctggcctctcttgtttttactg

SEQ ID NO: 803 - DNA, 1051 bp, Homo sapiens
atgtttgatgccttagaaggcaaatccatcaaaagttaacttctgggcagatgaaaagctaccatcacttcctcatcatgaaaactgggaggccgggcatggtggctcatgcctgtaatcccagcattttgagaggctgaggcgggtggatcacttgaggtcaggagtttgagaccaacctggccaacatggtgaaaccttgtctctactaaaaatacaaaaattagctgggtgtggtggcatgtgcctataatcccagctacttgggaggttgaagcagaattgcttgaacccaggaggtggaggttgcagtgagctgagatcacaccactgcactccggcctgggcgacagagcgagactgtctcaaaaaaacaaaaaagaaaaaaaaactggggcctgtgtagccagtgggtgctattctgtgaaactaatcataagctgcctaggcagccagctacaggcttgagctttaaattcatggttttaaagctaaacgtaatttccacttgggactagatcacaactgaagataacaagagatttaagttttaagggcatttaatcaggaggaaaggtttggaaaactaactcaggtgtatttattgtttaagcagaaataaagtttaatttttgcttgaagatggttcttaatttcttttaacctaattcctaatcctcacaaagatctttccaacagcaagttcagtaagttcaggtaacagtacgtcaccattggcttctggctcattgagtgatggtgggatcgcggtttcatctctgtaaacttgcccttgactggggagataccatctccttaaaaatactcttcattttcctaaggagtgaactgctgctgcacgaattcttatttgtggagggagtagctgcctccttacttcaccttcatgcaccagtgcagcgtgaacaggggctttattgatggggcttgggaagctgtaataaagtccagcatgcagattgtgaaggtttcgtatagccaccaggagacaagggtcaaaggaacgagcctctgtgggctctgctgctta

SEQ ID NO: 804 - DNA, 1131 bp, Homo sapiens
agaatagaaagagcagtggtttgaggtctgaggacccttcttggtctaccacttttactaccagttatataccttcagaccagttatttaaccactttgagcattggttttggcctttgtaaaatgaggataataatgaatgtcctggctgggcgcggtggctcacgcctgtaatcccagcactttgggaggccgaggcgggcagatcacgaggtcaggagatcaagaccatcctggctaacacagtgaaaccccgtctctactaaaaagatacaaaaaatcagctgggcgtggtggccggcacctgtagtcccagctactcgggaggctgaggcaggagaatggcgtgaatccgggaggcggagcttgcaagtgagccaagattgcgtcactcactccagcctgggtgacagagcaagactctgtctcaaaaaaaaaaaagaaataatgaatgtcctccctacctcccagggaagtgtattcattcaacaaatattttttgagcatctacaatgtgccaggcactacgcttatggccttgaggactcaatgctaagtgtagtactctctgacgtgagaaagtaatatataagaaaggattctgaaaataatgcaagttggtaagagtggtgatagtatctgtgtctaagttcccttgaatatctttttaaaataaataaatgcttttactttggaggtgaaatggccatgaataaagtatgataaaccattgtaatacatgtttatgtatgttttcatatggttccaaattaaaccctttgggataactacctggttcatttatttttctgctcacccccaactcctagaaagtaagagctgtaaaggatctttagggatcattgagtgtggctcttttatattacaaatagtaaagatcagacctctgtatttaatttactttgaaaagtttgccaactcaaatgttttatagtttatcattgcccggacgtttttctgagcttatttttggttgtcattttaacagcatttatattgtgacagaatgctacgttgtttttgacatctaggtaaccctgagatcacagatgcaggcattggatacctcttttcttttaggaaactaaactgcttagatatctctgggac

SEQ ID NO: 805 - DNA, 1032 bp, Homo sapiens
ttccactcacctgtcctcattctcatctcacaagggtccacttacttccctatttctgtctcagaatttctccatttcttcaaccgtattacacttcccttctatccgagagaacaagtatgctcctttattccagtcacaagccctttttttcttttttaaaaaattctgttccctaagatctccaacttcccttgtgctatttactaataattattttcccctcctgcccaccccccccccatcttcattgtccccctttgttggctatctgctttctgtggataaacacaaggtgtccttattctagcttggtcctcattccccagtgcagctgtgcattgtttcctgtccagtctgtcccaccccctccttgcctactcagttcttactcccttgcgatttagttctggcctcccctgctctcctgacagtgtcctcttgaaggagatattcttcaccttccttggctttcctgcagcattcgatagaaacatgcatgacttatgtatttttctctgggcctctctcctggctctcccccaactttctcactcctctggctatgactgattcctctttcttcctctcctcttctcccacatctccacactccccaggtgctctttcactgttctcagagctccagctgtccttgcgaggatgactctgcattcctctctcagacactagactcattcccaagtatcctctgtaaatctccacctgccacctcaaattcagcttgtcccgaaccaaactcattttcttcttccccatccccgaccagctcttattgacattcttatttctgtttagcggaaggaagcaccattttccctattgcccactgagtcaacatgttctattaatccatcctggtgttccctgaaatctgttcccatttttataaccagaaaattatagaaaagatggcaactaatatttattaagtgccttttgtgtgccagacactgtgctaaactctttatgtgtattatctcatttaatccttaaaacagccctatggaa

SEQ ID NO: 806 - DNA, 1049 bp, Homo sapiens
ttttttgtagagatagggtctcactatgttgcccaggctgatctcaaactcctgcactcaagcgatcctcctgccttggcccccacaaagtgctgggattacaggcatgccaccatgcgcagcctgtcattattaatgttatcatgaaattccctttgtgatctgaaatttatgactctgctctgtttttgtctagtagagggtttcccagactccttctctttcttgccccagactgaattgcctttttgctgttagtcctctttggaaattcttccctcttgctgacaagtcgcatcccccactgggctcctttacagccctacctacgcttcctgggctggtttggctggtgttgacagaacactcctgaccagtctgggcatggctcttgtgggagtatctgagggatgtactgccccctgcaggccaaaagcagtgactccactgtccggacctgagagttgaagctttctgtccttcggccacctctcagggcctgtgctcttctgattttggaataccaagaatgtgaataacagtatctcaatagagccttattgaagacttcctgtgtgccagtccctaataacagagaagtataatgtattaggggttaagtgtgcaggttctggaggtggagtcaggctgcttgtgttctaatcctagcttccacacttattagctgtgagaccttgggcaaggtgccttactgagtttaggtttctcatttgtaaaaagagatataataatggtatttaagtcattgttataaaaattaaatgagataattcatacaaagcctggagtgataagcaggaaaaattctcagcagtggataagaattagaaacttttcattttctcagcacctttggattcatttctttacagtatagtttcattattttgtttgcagttgtgtgattttcctaatcacctctatccatattcaaatgtcagtacaaaaccaatttgaaagtcaaatgtaaatgttttttatttaactgattcaattcagcaaacatttatggattgtctcttctgtgc

SEQ ID NO: 807 - DNA, 1032 bp, Homo sapiens
aaaagatttaaaaaacaaaaacaaaaacagatattttaagaaaattttaaacattcaaaagaaacccaacaatttaaggcaaaggaaagaaacacttgagattcagtcaattagaggttttttttttttgacaaatgaagtttaaagttgcccaaacagatatcattagagaatcccaggtttgaaaaatggcaggagacccagataatgcatttactgtgttctgtggtgaaggaacaggtagctggcctttttcatttatagaatatcaggttcttaaacttgtgcctgtcaaccttggttttcttttgctgtagcctcaggcctcagaaccttactctgagattggtaatgtgttttgaatgtgtttatcacagccagatggggcaaaggctcagtttgttactgcccattattgcaagggaagggagtccatccagaaaacaaagctttgggagtttcagttagttgggtgacactaccctggtatcaaaggaaagatggtttgattggatgacattgtattttctttaaatcaatcaaaatgatacaattactgtcagggatggacttactcataacctggggaggttggtttcaagatccaagaagatcaagacatccaatcaaatgctggtttttaatgttgataaaatcattctttcaatacatatttgttgagttcttacgtgtcaggtattagggtcacagggatagagaagacataatctttggcctcaagaagcttacagtctagtgaagactgtaaacagacaataaacagacaatttttactatttatttttattttgggagggggtcagggtctcactctgtcgcccagggtgcagtacagtggtgcaattacagctcactgcagctttgacctcccaggttcaagcaagcctcctacctcaagcctcccaagtgtctgggaccataggtatgtgccatcatacctggctgattttttattagccagattgtcaccatgttgatcaggcttgtcttggactcctggcctcaagtgag

SEQ ID NO: 808 - DNA, 1027 bp, Homo sapiens
gccagccaccatgcccggctaattttttgtgtttttagtagagactgggtttcaccgcgttagccaggatggtcttgatatcctgacctcgtgatccacccgcctcagcctcccaaagtgctgggattacaggcgtgagcctaccatgcctggccaattttttgtattttttagtagagatggggctttgtcatgttgcccaggctgacctagaactcctggcttccaatgatccacctgccttggcctcccaaagtgctgggattataggcatgagctactgcgcctagctgcgaaagcctttagtaccaggttagagtaaccatttttctcccttttagagtctcttctccttcaagtccgtggttctggtggagcccgactgagcactaaggatcctctgcccaccatcgcctccagagaggagattgaagctactaagaatcatgttctagagaccttctaccccatatcacccatcatcgatcttcatgaatgcaatatttatgatgtgaaaaatgacacaggtaaggatcaatgtcttggacttttaggcagtgtggaggagaaggacatgctttttctggagggaaaggatatactaagaacttgctaggtgctaggcacctcgtgtgtattacctatctcctaggatccatgtggcagccccatgagacaagtactattatctccatttcataggcaaagaaactgcagctcagggaagttaagtgatttgctcaaagactaactttactttttaccttggagaagtaactctattacatcagagtggcttgagggacttttttttttcttcagcaaactgtatcattgggcgtttgaggggcttttcaccaaggctttttctttattcataggtcccatgaaaggcacccattttctgtttaccttgtaaactctggccaaccccctttaggaactgaggaagccccatagacattgaatggggccattaatccaaactccatcaagcaagggaccaccatgtactccgtcaggcaag

SEQ ID NO: 809 - DNA, 1046 bp, Homo sapiens
atttgtcactaatattaaagtagtaaattttgcaaatgacttgctttcttttgaataattaccacagatttcaagttctccttctcctaacatcactgtcatctgtgtgccagaatgagagagaaaggtgtggagttagaactagcttgcaggcagcacctataacaggttggcaggcattttctgtgaagagtcaaaacagtaaatattttaggtgttacaggccacatatggtctctgtcacagctacccaatagtcatacgtaaatgagtgaatgtggttgtgctccagagaaaatgttatttacaaaaataggtagcaggccagatttggccagcaagctgaagtttgccagcccccgagctatagtgatagtatccacctttgttgagtctctctgtagcacctgtccctgggctaaggcgaggtgactttcctgaggctttgtggcaggctgatgaatcctttccacccctccacataattgtgtctcttgcaggattccaggaaggctatccttacccctatccccataccctgtacttactggacaaagccaatttacgaccacaccgccttcaaccagatcagctgcgggccaagatgatcctgtttgcttttggcagtgccctggctcaggcccggctcctctatggggtatgtaggtggagaagaccactgagttgctttacgtggtgttggtctcctcccttaaggttactgctcagaggaagaaaagggatataggggaactgatttcttgactgaggagttttagggaggagtacttcagcccaccctgtggagatgagccaacatcactagggggtgactgcctgtgcttcacctaagtagctcacttgatcacagtagcccacatgtttttactgaagtccccactttctaagctatgccatagaattacagggaggccatgcagcttatcagcattacacagcactaagtggtggagataggactgcagctaggtctgccccactctgaagtcttcagttgtttgtgctgcagcatgctgcctctgttc

SEQ ID NO: 810 - DNA, 1027 bp, Homo sapiens
gaggccaaggtgggaggattacttgaggccaggagttcgagaccagcctggccaacatggcgaaaccccatctctactaaaaatacaaagattagctgggtgtggtggcatgcacgtgtaatcccagctactcgggaggctgaggcatgaatgttgctttaacccaggaggcggaggctgcagtgagctgaaagattgcaccactacactccagcctgggtgacagagtgagactgtgcctcaaaggaaaaaaaagaaaaaagaaaaggcaaccactgaactgaaatttcagaacatggcattatttaatccttgtagttttttaaccccatgtggcagatgctattagcttcattttatagatggtgaaactgaggctcagggaggctaaggaacttgcccaaggatacacagctaagaaattagtagctgtcagatctttatgtgaccttgtgtctttccaatcctaggacaattgtctttattcccattctctgactatatacttcctgaaggctccgaaagattaggtaacttgtccaagatcccacagctaatgagtggggaagcaaagcttggaacatgatctctccagttttgaaggatgtgctactcccaactcaggcaggagaaggaggcagagatagtcacaaccctggtcccaggcctgcagactcgctgtagcctctgtgccagctattgccatcagagtctgggtagcaacgatacaactaattaccacccagttgggtaggagtggaggcctccttcagcccctccaggcacaaattattcctggggatgtgaagttgagcaattatgggaagagcctccatgtaaaaggtaaaattgctgagaaatttatgtactacctgcagttttattgatctgtagagggagataagagtcaatacagaattctcggctaacacttacaggtacttttctttttatttatttttcatgcagctaagaacaggtatttctaaggccaacagccccagtgtggcccacactgaggtctgac

SEQ ID NO: 811 - DNA, 1127 bp, Homo sapiens
tctatcagcatttttggtgtctcccagtgatcaaaaagagagtggttgtggtaagttgagccatctcctgcctgacccaggagggccatgcctcctcctacctggtgtgagcctcaggtgggattgctggggtgctctgtgaggagagccctggccctggggacttcccacccgggatctctgcctggaggactccttcagtcccgcccctacctaaggccctgcccagtgctccactccagctcctgcttccctttgcaccctccagccaatccagctcctcgcagctcccagggtgctctgcggcttcattagctctggcctttgtaggtgctgctccttttgtctgggaggcttcttgccttctcccctccccattactgtttgtcaggctatcctccacttgtccttccaggtttagcataagtgtttcttattttgggaaacttctgaccaccaccgtccccatcccaaccctcacttaagtgcctcaggtgggctgccctggcctccgtattcccccatcagagcacgatcacattgctgtgcgtagaacctcttcacatgttttttttcctccaccaaacagaactccaagctcctagatccttgagggcagggtctggggatgcattcgtttcatcccacagatacggagttcctcctgcggcaccattgtgctgcaccccactgctcagctgacggggtccaggcctgctctctgtgtagtgggcagtagcagtatctaaataaattcctgatagagcatcaggcagtaatatgcaccctggagagacctacagcagggtcaggactgcgaaagcggagtaggggtactgcctgctctgggaccaaccaggccccacacaggcctgagtgtgggcttgctaaatggagtcgctgagcctttgaacattctcagcaggtccgttcttgaactggttctccagcagctctcagtgctgtttccacctgaaatgcctgctgggtctgtgccctttgctttggccccagacaccctcagttcacctgcatagtcacaccagccacctccgtgctctctgctcttagtcaggttttccctcctgactctgtgtcttcaggttctcttccctcagcctctccct

SEQ ID NO: 812 - DNA, 1135 bp, Homo sapiens
aacaacccctggcataaaaggggtgctcagcaaacacgagtggatggatggaaagaaggaagtctatggaggctcaaagtgagatggtctttgtggcactggagggctgacatgggaggcaggaaaccaagggcatggctgaattccagaaaccagatgccaggttctgcggctccgcaggcaccctgggaatagagagaacacaacctctgcctttcagcacccaccctcgttggtctgatcttttacatccaacccccagccccaactccaagcccccagtgcttgtacccagtgagcccagggctgggcagagcaacgctcatccgcctgtaaccccaccctgcccagccactctgctcaagtccaggggagccccatggcctgaaccccaagaggcccagctcccctcagttcagggtcagagccctctgagggaccccaggtatgttctgggctcaatctcctggagtctgtggaatctgggaacacagcccaccacttcatgggacagccgagactggggcgggggattcctcaggtcaccagggagccagactgagcagccttcttacccccgctagagccctgctctggcctagcgcgttagtggctatgctgctgctggtgtcagcgacttgccttaagtttctttcctggctctggggcagggggcagtggggatgcccagcagggaggcaggtgtggggtcctgtctcaggcctggtcctacctctggccccccaggccggccgacccctagaatcaagtgcctgtggacagcgatgactccagcaggaaagctgtggtctggcccccgactccggcacctctcagtgatgggccgaagccctattttgtggaaggactggcatgatgctcccttttctcctcctcatttcagtatctttccactggctcatgtagagctctggcctggccccaggcagtgatgaaaatgcttagtgaacaagaaccagttctttgctcagagatctgcccctgaggaaggccaaactaacctgcaccagggccatttgtgttgtgaaggcaactgccaggctgccgaggggccccaggctgaggggtagcacagcacacagcaggcgctcttcccaggctgggccccgtgacc

SEQ ID NO: 813 - DNA, 1008 bp, Homo sapiens
gttgacatgatgaaaagagaaacaggatggattgtgtaattcttactgtctcaacccaaaaagtgacttggtcactcaagtaaggtgtttgatgtatgaggcagtatgttctgagatttttgagcccaagggcttctactctctcaaaaaatgtgtttttctggccttttatcctcttttcaaggatgctagcaggagtaaggcagtagagatctttaggtgagataagctattttaatctaagggagaatatctcaaagcgttctgtgggacctttgagttaaaaatattttttggttgggtgcagtggctcatacctgtaatccaagcactttgggaggctgagacaggaggatcgcctgaggccaggagttcaagaccaacctgggcaatatagtgagaccctgtctctccaaaaatttagctgggcatggtggtgcctgcctgtagtcctagctacttgggaggctgaggcacgaggatcgctcaaggctacagggagccataatcacaccactgcactccagcctgggtgacaaagtgagaccctgtttctaaaaagttgcttggatgaggaattttaactcatttatttattcatattttttactttattacatttttttgtagagacagggttttgccatgttgcccgggctggtctcgaaattgggctcaagtgatccatccgcctcagcctcccaaagtattggaattacaggtgtgagccaccgcacccaggagattgaggaagtttggaaaatgctgcttcttagagatttacagtacatgttaacatgttaaagacactgagatagcctgcaagaaaataaatttaccctgggtttctcaaattttgtaagcctcctcttcaggtaacaccaacatcatgcaggttctgtagtcgtaaatttgggaaatgattatttaagtagtattgctggtgactagtcttggttatgttagacctgtgggttttttttaaaaataatttatttttttaattga

SEQ ID NO: 814 - DNA, 1008 bp, Homo sapiens; identical to SEQ ID NO: 813

SEQ ID NO: 815 - DNA, 1008 bp, Homo sapiens; identical to SEQ ID NO: 813

SEQ ID NO: 816 - DNA, 1008 bp, Homo sapiens; identical to SEQ ID NO: 813

SEQ ID NO: 817 - DNA, 1005 bp, Homo sapiens
cttgtgtgctagtgtggaagccctgaacaatttaactccctgggccttgttttcttcccctcctaaaggataacactggagtagcgaatctgtgaggtcctttacaatgctatcattaaaccgatttttaaaagatttaactccaaaaaaatgggtatatttaattattcatcctggttaatgaaaatttgagttcctgagtctgaaatgtagatgtaatgtagaacaggggaaaaggaaacatattttcaatacttcagtgataaaaggtacaatttgattaagttgttactatattctaatcactgtatgatatatgcacttgatttttttttattcccagagtaatcctctaagtttggtattatctccatttaacaaatgaagaaattgagaatcagatactttaagtaacttgtccaaagttccagtgctattaagtggtagagctagcaatcaaattcagggttctcagactgcaaagtctctgctctatggactgtaaagtcaaaatgcctagtatgttctgagtttcaaacctacaaggatataattttctatgtctgctcatatttatcagaattgagaaaataagatttaaatgtctttcagtccatatttagagataaataacgttttttgaaatgccatatatagatgattaaaatttatatttttacttttccaacatttacttggatgcctcaatctttcatttcttattataaaatgtgctgaattctaccagttttaacccatgtttattagaaatactagtgatttcagtgtgtttactgatatgaaagtaatcttttttttttttttgagactagtctggctctgtcgcccaggctggagtgcagtggtgctatctcagctcactgcaagctccgcctcctgggttcacgccattctcttgcctcagcctccccagtagctgagactacaggcgcctgccaccacgcctggctaattttttttttttttttttttttggagacagaa

SEQ ID NO: 818 - DNA, 1021 bp, Homo sapiens
agccaggatggtcttgctctcttgaccttgtgatccacctgcctcggcctcccaaagtgctgggattacaggctataaaggtaatcttgactagtgattgccagtaacctttagtaaccagactaaagagaacttgtacaaatgatttgatgttctagaagaaaacattggtataagaaggtattagctctggaattaattccatttctactaccagttgtctcacctttgggaaaaaccattagatgctgagcctttgtttcctccttcgtaatatggcaatgatcatacttgtcctgcctaccttctggaatagttatgaagatcaaatgagttgaggtatataaaatggctttggaaaagataaaatgctatacagatagatgacacttgtggagatggtgagatgcatggcaattgtaggtaaattctgcaccctgtgttagaaagtacttactttccattgaaatgccttcagttctcacaccaacattgagatagagctgtagtaatctgcccctattttgtggttgcctaggttgaagaaagctcttaatgactactttatctgtgctttatgatacttattaatgtttatattaaaaacaatatcctgtatgactaagtcatgtaatttgctttttcccaaatatggaagatgaatgaaacaagaatgaaatggaagtaatagttaaataaaagtgaatgtacacacattcacagtaaattgattttacttttgaaattatgcaaattctaaacaagtgttaaatattggttccaaataatgaaattatgtttcttctcaaatactagattagtgattgaattaaaatcagttgaattattctcacaattaggtaaatacgtgctatttaggtttctcttgctgatatatatagatatatataatatatatataatttatatgatttttgaattgtgtccttaatatctgaatggattttgttcatttggtgtagccagttgattgactttcaaagggtattttaaataggaa

SEQ ID NO: 819 - DNA, 1024 bp, Homo sapiens
agacatgagccaccatgcccagcttttttttttttttaatgtgtttgagtataagttggaactatatggtgttccataattgattccagtttttccagtcttaattaatggaataatacaatcaatataaagtatttgctgtgtttagtcatacgggattttaagcaaaatgttttttaccagtgttcatctgctcatgagggatcttctcctatgacccaaacacctcccattaggccccatctccaacattggagattaaatttcagtgtgagatttggataggacaaatatccagactatgtgaagtggctaaaaggcagaagaactaggaagagtttgagtcttgtgaggcaacagttggagttcgcagtttatcaaggagagtctgataaacagttgggtttttggctgcaaccctctgaagacggatatcctgcttagaataagcttaatctcagattgatctgcctcttacctttcttctctgggggaagataaaactgtcagagcctctacagattttcatacacaatgttcagcattctaagagacagggtgaagataatagaaacaggtttgtaggggatgcagatagtaaagatatcaaacacagaattttaaataactgatacttttgtttaaagtggagaatattagcagaggactggaatctataaaaataaaggaaattctaggactgaaaaaatacaataattgaattatcttttagatgattaatagcagattagattccattgaagagaggattagtgaattagatgatgggtcagaagaaaatacccagactgaaagatagacaaaaggatgaaaagaaagtataagacacatatgagaacacagtgaaaagtctaatacatgtattattggaagctatatagaaaaagttaattgcaaacctccatttttcttttctgtaaaatggtaaccccaggtttaccttcttttaatagagtttctctggacatagactaagataaatgtgatttatcagttctattgc

SEQ ID NO: 820 - DNA, 1011 bp, Homo sapiens
ttgtcccttcttaaaacaaattacctatttgtaaactgctgatttctttgagtcattgttcccataaacttttcataaggcctcaatgatttcaccatacttccattaatgcttcgatataaatttgatgtttgtttttgctttaacattagcagaattcatgttgctttaatagggactctttttaaactgttgcttatccttcttagtgcctcaaactagatcctgttcagacatgtaatagtttattttggtacaaaagttttttgatatccatgcatagttttttcataatatgcatttccatgaattttttgaattttttaaatatttttctttttagttcagatgttgtttctggtctaatatttacttgtttatatttaataagttatttttactttaaaaatattttgatctttttttacatgcatgtttgtgtgtgcagtttctggtgtatttttaacagtagcaataggactgttcaggactcttaggaaatgcaaagagagcaaatttttttccccttgagacttgctttggagatagcaaggtatagctttgaatcacagctccaaaattgattgcttatatgcaatttggttaagtgtcttaaactctgcgagcctgggttttctcttctacaggaactcttgtagaatttaaattaaaaaatatataaagtgcttaatgcatttatatacatagaaacacatgtatgcataagtatatgtgtacacacacacacacacacacacacacacacacacacatatatacatacatacaaacagcttgctaagtatgaggcacgcattaccattactattagctgcctttcagaattacctgttttctattgatatcataactacctttcctcaattgctttatcttttaggccccagaattgtctggtctttcctgccttggatatccgctctagctagttcctatcttttttttttttttttgagacagcgtccaaaaaaaatccaggccagagtacag

SEQ ID NO: 821 - DNA, 1080 bp, Homo sapiens
gttgttggaaaaataaaacgagaaattcaaaatctaaaactctttcgtcatcctcatattatcaaactgtaagtatttttgtatctaataataccaaagagacacctatcttaaaatgttttttaggaattttataataattgttaattgttaaccttttacaaagattttttttcatgttcatattcagcaagtgttaattcatttaacctttatcagtcctttttttgcatactcttggttagactgaacagacattgtttctaaattagtactcaatttatgtttctaaattagtactcaatttatgtttctaaattagtacatcaattctcaagtgatgaatgaagttgattcatcacatttagaagttgattcttatccaactttaaatgtcattcagggctttgacatttctagattcatttttataatttttatctagtcaattttcactaacattcagggtattttttcctttggaaagatagaaagtatatgtcaaagattatttcacatagtatattacttgtagaactgaaagtagtactataaccataaagcttttaggaaggcaaatgtgtttttttccccttggaataaattataaacttaaaagttaggtaaatattgagataaataagataagtaattgaaagataaatagattattttaaaattgactagaccctagaaaatttaaatattcattgtgcaataatgtgtttctttcagtcatttaaagttgcagtttaatatttgttgggaaaatgtaacgtgctagacactgaaaattgtcttatttatctttaagcttggatacagttttataaaataagtattgctcttacttattgagtacctgatagtggtcaggaactgtaccaagcattttttttttgtcaagtttctgctgaatgtgtggagcattttccttatttaatttaatattatcttcatgatcagtgtctaaagtaggcttactttatagacaaggaaactgcattatctaaaaagtaatagcagcttatccaaggccacacagctagtaagtcacagagctggtagttgaggtcaagc

SEQ ID NO: 822 - DNA, 1039 bp, Homo sapiens
tgatctcaccgagtacaatacaagtaggtactcaataaatgttgtgtcaccatttaatagcttagtgcctggcagacagtaagtgcttagtaacgttatgattttcattgctctagactggcctttagtgtaagacagtggctgctaaggatttagaggtttcatgaaataattaattccaagaatatctgttgaagacctgtgatatactcagaaatggcagctaaatttatttattagaatgtcatcacttcttttcttttgtgccccatctaggatgtacagagcacaaaagtgattgaaaattgttactaaatcagaccaacctacagtgaggtgctacagcagatgcacctgccctacagtattcagtttacgtgatcactttggtgcttgtaaagatagcttttataaaactatttcttctagagttctcagtataattacctttccaaagttcatttgaaatagtctcaattcttcttcagtcatattcgtttattttatataaattagaataccttgccatgtttcttcccaaagactaatgattgccattcaaaatatttcttctggccaggcttggtggctcatgcctgtaatcccagcattttgggaggccaaggcgggcagatcacttgaggtcaggagttcgagaccagcctggccaacatggtgaaacccccctctctactaaaaatacaaaaattagccgggcatggtggtgcatgcctgtagtcccagctactcgggaggttgaggcaggagaatttcttgaacccaggaggtggggtgcgcagtgagccgagagcatggccgctgcactccagcctgagtggcagagcaagactctgtctcaaacaaaagaaaaaaagtaactaattttaacgtctccaaaacttggtttggtaaaattgtgtataggggtgtaagttgtagtttttgggaaaaaaatttattttatcaaataaagctaattttttttcttagtttttaatgtgcccagctttggatgcctagaaacacagacacacagaca

SEQ ID NO: 823 - DNA, 1953 bp, Homo sapiens
tgctgggattacaggcgtgagccaccacgcccggcctatcacatcttaattaaaataattaacaacattatccaccactaatcagcatgtagactttcctgattgtttcataaatggtttttaaagttggtttatttgaatcagaatcaaaataagtctatacagcataattggtcaatatgtctcttaagttacttttaacgtatagtttatcctttccctttttttcttgcattttatttgttgaggaaatggtcatttttcacttcctggattttgctgaatgtatccctgtagtatcatgttacgtgtccaggaaaatatatgtatgttttacagaaatgaggtcttgctatgttgcccaggctggtaaaatactgactttagaagatatattccacttaattgccaacatgaagcctatgcttttcaaaatcggttccataaaatcatgttgaagatcagttattttcttttcttagcactttcatgtatgttctgttttagtttgttttgctgtcaattccccaaaacattgccctgagctcaagtgattctcccaccttggccttccaaagtgctgggattacaggcatgagccatagtgtctggcccaagtatattttctgtttatctttaaatatgtgatacctcatctccttttactgtaaacaaatttttgtttatatggaaaaattagttgttgaagagggaaagatttcaaaaattatgtaaacttgaaagggaggatctaaaggaacggccgtgagcctcaagaaatagaataattttgtaatggtccgtgtttattgctctgtgattattttgataacatgtaatttgttgccatcttaaagtattataaaacattgaaatataaaattgtagcaagagtagatataccagtttgattttggttaaagtaacatactttgttaactttttttaattaacaaaaaagataccaggtgatcagcactccaacagatttttttatggtaatggaatatgtgtctggaggtgaattatttgactacatctgtaagcatggacgggtgagtaacatactatctggtacactaaatctctaaactaataaaaaggaaagtattgggacatagaacaatgcaaagatatcttcaaggttgaagttgcttttatggtagtgctcaactaaacatgtagagtgttagataaattttctttcttaaaaagcattccttttgaaatactgattttagaaaatatgtttcacttaattgccaacatgatgcgtatgctttttaaaatctgttccataaaatcatgttgaagatcagttatttccttttcttagcactttcacatatgttctgttttagtttgttttactgtcaattccccaaaacattgtgcacatttaataatattaattgaaatttaaatatttctgcttagcgacaaagacaaacttgtcttttgacatgttgagctttgacaagcttttggttggtttattttgtctgatttgttgagaattccaacataattctagcttgcttaattatatttagcctaattatgaaattaaaactcttgtcaaatagatgtctcagattttttttttttttttttttttgagacagactcttgctctgttgcccaggctggagcgcagtggcatgatctcagctcactgcaacctctgcctcctggtacaagcaattctcgtgtcccactctcctgagtagctggaactacaggtgcatgtcaccatgcccggctaatttttgtatttttagtagagatggagtttcaccttattggtcaggctggtctcaaactcctgacctcaggtaatccacctgccttggctgggattacaggcatgagccactgtgcccagccccagatattcttaatgcagtttcttttgtgcttgataggttgaagagatggaagccaggcggctct

SEQ ID NO: 824 - DNA, 1060 bp, Homo sapiens
cataggcaatatctttaataggttaatatcaatgaagatttttaattacaataatgagttcactacagacgattaacacaccacactggcgaaccatctcaatgtaagggtggtttggcaacacctccttgctttgctgtttggtgtaggtaaatctagtttacttcctaaatttcagtaggctttatgctgtgtttatgcccccaatttattttaacaaaagaagattaaaaagtaaaagaaccacgagtaagatattatttaaatgttgaaatcttaaaaacctgcctccaagatttcagaagccaagtttttctaacagtatttgtacaaatactgcctagtgtattcaacagaaggactgtggtcatgtaacaggtaaccacaattttcaggtttcttaaaaacagctgtaactaactcaggatttttatcttgagatttccctgaataatatatttatcttaagagccttcaagtttcaaattaatattggaacatctggaattgcaacaacttttgtcttttacataaacttacgtcatttaaaaaatgtcttcaaaatctacctttctcaaattctttttgcctctatttatttttgcatttcaccaacagtgataaaatagttaaatgaaacaaagcaaagtatcaacagtcccttaaatgagaatccttatctttgatctttattttctgtgttaggtgttagggtcctggtgcagctcataatgctaattcttcattggaagccactcccttcacctcacctcacctagtcactattgtctttgttcattgtttgatcctgagtggttgattgatatagctttgaatcttttctagtccaagtttgaaaacactgttctggccctaagggctggctatgacctttactgttgaacctgatagggcagggaagctttgaacatcaagaaaaaatttttatcttaaataaataaatatatatattcacacaccagtgcttttaagcaaaaaccagtttttttgtttgtttgttttgctttgtgcaggttttctttaagattaaaaaaacaca

SEQ ID NO: 825 - DNA, 1037 bp, Homo sapiens
ttatatgagtgtgaatgtttctgttttgatttggtgaggcatgtcagaggtatatacttgaatatttttctaaatacagctgctggaggaatgcaaatggcaaaaatcatccagaaaaccaaacacggtgaaacatcacatccatttggcatgaagcaaagcattacaaatttggagtgatgaaagtgttccatatattttttatagtgatttttcgatctagagacccttcatattgtttacttactattacgataactttgagaggtaaccagagaaagcatttttgccatttccagatgaggaagcaggaccagaaagctcttcataaagctttaacaccatacaagtatccagcagtgatcaattgctctttataggaaaccacctttcctctggggaagaacagtctgaattaataaaacatcagagtggttgagtagtaaaaataaacacagatgtattgctttcaagtcttagagtgacataaagtagtcttaaataaatagttcttagtttattttaagcagttgattgtactaacgagatgtaattatctgaagtatttatgattagcatattggtttttataagtatttctgagttattgagggtgcttaaaaatgctgaagaaactttaaaacatgattcttcttataattttatgtgattcttatagcacaatcatttttgaaaaaggaaaactaggctgggtgtagtggctcatgcctataatcccagcactttgggaggccaaagtgggtggatcacccgagttcaggagttcgagaccagtctggccaacatggtgaaacctcgtctctactaaaaataccaaaattatccggtgtggtgacaggctgcttgtaatcccagctactcgggaggctgaggcacgggaatctcttgaacctgggaggcagagattgcaataagccaagatcatgccactgcatgccagcctgggtgacagcacaagactgtctcaaaaaaaaacaaaaaaaggaaaaagaaaactagccccagtccctgtctaa

SEQ ID NO: 826 - DNA, 1021 bp, Homo sapiens
atttctagcctttgtttttctatcaaatgatatgagtgaaattttaagttgcaaatgttgggttatctttaagttctttttctgatgttctgctaaatatagacaaaacacaagactagagttatatacctggttttgtattattccaaattatgtattacttatgcatggcatcaatatgttctaatgtcctaggcatgattttgtgaaatgtttagtttatttttataaagttacacagccatagagacatattagcatagttccatttgtttgtctgggtctacatttaaacaaaacaggaccatgttttttttttttgttttttttagctgttttcaatttatgtttgcattttgtaatgctaccttgtaggtataaagaagcagtaagatcatttgatttatgtcattttagctgcagacattcaatactgcctcaccttgtcaagatgtcaaacagctgactagtggagttgccatggcacaagttcttcatcaaatgtgagtagtggtcagactctccctgaaaagcattgtaaacccaatacataccaaggaagaaaacttggacttgaattccaaaggttgttgcaactttatcttacccagtgacatattcaggaatatggcaccaaggcattcttgcaggtagggaacaaaaagtttaccacctcattattcctggcttgttcatagagatacatcttaactggatatgtgatcaggattcttatttattcaagttaacttattttaaacttgttatgagcatgttcacactattttaaaactataaaagaaacaagttaatgatacaattgcttatggtgttttctttggttgtactgttgtcattttaaggtatccgtgcatggagattattatcttaaaaattattgaagcataaaatattggattttgaaaaaatttttaaagaattaaattttaaaatgtatttctgaattaatagtagtttatgagttcaccaataatgaaatgaggaatgaatgaaatttgaa

SEQ ID NO: 827 - DNA, 1059 bp, Homo sapiens
gaattaaatgtcctagtgattataaagtaaaaccacagaccaatttgcaaatgatcttcaatgttaagcacttgctctaagattaaaattccttttctttttaaggttaagggtgtgtacgtatggcagtgatgtctatgttgagattaacttatgtattgaggaaaatttgaagtttattttttcgatgaataaggctgtcaaatgatttagtatagattaatgacatcttttttagaaatattaaagtgagtattcctcattatgtcatcatttctgataattagagtgctaatttgaatgttagataatgtttccacatctatacctatttctttctagggcacttctgaccctggggcttggggatggcctttaggccacagtagtgtctgtgttaagttcactaaatgtgtatttaatgagaaacattcctatgtaaaaatgtgtgtatgtgaacgtatgcatacatttttattgtgcacctgtacattgtgaagaagtagtttggaaatttgtaaagcacaaaccataaaagagtgtggagttattaaatgatgtagcacaaatgtaatgtttagcttataaaaggtcctttctattttctatggcaaagactttgacacttgaaaaataaaaccaatatttgatttatttttgtaagtatttaggatattattttaaataaatgattgtccattatcaatataatagttgtgaaatgatttaagtaaataaactttatgcttctgtgtctgttgattttgatgggtttttagtgggcataaatgcatgtttatttgctgcattaaatagaggagtgaaaatatgtaggtttgtaaagaaaaagtaattgcattcttctaattttgtttttccttttaattttttggggaatgaaaagatatattaaatgatttgggaatatgtctttttatgtctccattttcacctctggaacctagacatcttgcattaacacggaatcaaaacatttctggggccgggcgtggtggctatgcctgtaattccagcactttgggaggccgaggcaggcag

SEQ ID NO: 828 - DNA, 1556 bp, Homo sapiens
tatacttaattataagaattgccttttgctttagccaattctgggtagcaagaatgaaaagtcagcacctctcaagtgacctctaagcaggaataagtagcccttttttaacccactcttaaccctgttgttgttcatttgttttgtttactgaaaaagtaaagttaaaatttttaaaaaatgtgtctgcatatgttaagcacagcaaaacgcaaaaaaagtataggtgttacaggtgctttcaagaagcactctttaaaatcttgtttttaccttttagatatttagaaaaatataacctataaattatcccgaatagatgaccaacatcgaaacttgaaagtgccaacaggtgatgcagatcatgatgtgtgcttccatataagataacatcaaaatgaaatacctgtgaagtttttgtcggtgtaagcagtgtccattctaagttttcgtcttaaacatttctctgttatttaaagaaatgcaatcttttcgctgttctcattacgtgccttctttttcgtcgttggtttgttactgtgctattgctcccaatccttgaactaacacagttgttggttgttgcaatgcctgaaggggttatgttggtaaaatgacatttagaaggttacttaggagagttagcatccttattgcttatgaaagatttattgacagcagcatagatcagactactcttcggtttggttttcctgatgtatcccagaatcccttgttatgcctgaatgccagccaaatgtttggccattggttttcacgggaccgcagtaatggctgcttctctgtgcgcgcaacaggaagactgtaaaagaaaatattaagggtcttttgtctgaaaatatttcaaatttgatttaagagattcagagacctgttatttgtggaagggaagctgccaatacaaatatgaggtagatcggtcaacttacatacaactgatttgacaagcatctgttataatactgaagatttgtaaacactaaacaatgtttttacctccttaaaagttttgagaacttgccagtattggcaggaggcagagactctgaaacgtgcttcaagatacatgccaaaaccattgtggccttttcacctataatgcgttttttctcgctctttcttttaaattgttatatttttttcctttccagaatgcctttttttccccctagatggtcatagaaattagatcttcttttccttctgaaatttgtgtgtaataattcttgctttatgtgtccacctttctttggtaggaagttgaaatctcagaacatacgtgagaatactagaagcaaatgcagaatcaatctttttttttttaaagcggaggtgatttattctaagacttattgacatgctaaaatataatacataaactacattccagttttttccctctaaatccagtggcattagaactgtgaattttgtggctgataagcagtaacaagtgtaatgaaattggagtgatttcataagcctgagaatttcatcttgttaaaagaacaaaaccattttatgcccttaatttg

SEQ ID NO: 829 - DNA, 1464 bp, Homo sapiens
agctttaagctcaaggtggattttttggctgatcaagctattgtaaattattgatatatggcatatttttagaaattttaatttatcttttaattcttcaaaaaagatagcagtagcagtcaacaaatttgagataaatattgattttacatccttgagtgttttctgtgtaacttgaggatagtaacaatatcctttacctagaatgtagtaacaaaatcctttatctggaatgtagtgcaaaagatggtagttctaaggcagagagtgtacaggaatagggagaaatagttgttctggagtaaacctttgaatggaagtcagttcatttatggctaagaggttgagtgtgttggtaagaaaatttcccaatgcttctggcttggattttccttgtcttcttttccaccctgtgatgaatagcattaatttaaacctatttaaggctagtgtgggagaaaccacagcctttgttgtggtcactgctgtacacagtaggactgggtgtttcatttggttaaggcctcaagctgcttccagaggacacgggacagcctgtcggcattttaaatcttgcacagaagcagcaacaattctaattgctcacaaatgtcaatatagatttttgaaaccaattttgaggattagactagaagaaaaaacataaaatgcagattgagttcagtgaatgtgctaaacactgatttattaccattttagtaataattttcccatggttatttaagggttagagcttgcttttgaattattataaattgtaaacccatgggggttgagtaagggaaggaagaagtcaggtggaggaggaagagaatgaatgaactcgtatgctttgttaaagagaaacataaaaccctgaacttaatcacaaatggagataccgtaaaagtattttggtttcagtaatgactgtaaagcagtcttgggcagtgagctatcaagtggagaattttataatttgtcttcccacaattttttgcatagcttttttcagactaagacactatttagagctttgggagtttttattcaagtttttaggaaaaggttttgcaaaaattctttttagaatttaggagtccagttagagacatcattgcacacttaagctcagaaaaggggccatggagatgtttattctttttactattttgctttctaaggtggcagttcagagtattgtcaaatttttggctctttcccagtaggcaacggtaagatactcattattgatccaaacttttgggtccctgaacttaacagaattatttagttgctgcttagacagaaatgacttttttccttagattttccccaaaatattagaaaacaattcctcatgttttgttttaactccacagcgtaaagcatattttatctaatggaattagtcctcccgttagtgttctagctaaataaacatggcttatgaagtgaagaaat

SEQ ID NO: 830 - DNA, 1031 bp, Homo sapiens
tagccacctaaattccctattttgctccttcttggaaaaaagttagcagtctcgagacttttacgctgaagtggattttaagttgtcagaagtgtcaagctgatttgcctttttttctctcttttattaaaagaaaagagatacatactacattcagacagaaagcatgtaaggggtcttataagtgtgagcatgtgttagtggattaatgggacaatgtgtgtggatggtgatagaaaatatgagagaactattgcttggctgataaatgaaataacaacaagaaaaatctggtggcccaatatatattggatttgttgttattctctgttatatctgctggttgttcaatctgaaagtgaaatctgtttctccattcattaatacgtgtgcttttctttgtatagagcacagaacaaattatttgttccataattatttttaaaaagcagaaaatgtgtttgtaacatttaagaaatggcatgggattgtcatagaaactcattctgaacactgtaaataaaaatggttggggattagtcacagtaacatgtaggacatcatgaaattcaagacagatttctttgtctaacagtcagtaagagacatgaagcgaacttgatatagttcatgagatattagcagttcagttccttcagagaaagagaaaaccatgttgcttcatattaaataagccatctgtatacaaatctcacaatttacttgatgattttagcaatatttgatgtttcctttcagagtcttatttccaaataatgaaagcttaaaaaatttgaaaatctctctgtttttgctactaaatctttagaaccatatccctccttttcttctttccctatcttattttttggtaatcttgaatagcattttaaaagttttagctttattctgtttcctttagttttcccttacttcatataatatgaataaaactgaacacattaatgataaatagccttcaataatactatatatttttaaatatttcaggttagaattatgagtctgca

SEQ ID NO: 831 - DNA, 1889 bp, Homo sapiens
attggttatttttaacttaatcacgtagttgatgctacagaaatgaattcatggcctttcttgtggtgctcgtctttttcttgtttgatgttgctagttgaacacatctcaggttgtgagaagtgcatatttagatgggaacatcttggagagatcttgattggtagagagtaactttatatcagtgagtataatgcttatcagtgaaattctaactcatttaattattacttaattttctgattatgtttttgtatttgagagaagattatttccattatggcaaagtatggatggatggacattgctattgccatttcttgacttagcacacctaggaaggcattttgaaacatactttttaaaaaaagaattgcatatctgtgcacctacaacagtgggtgtgctgaaattctgacttgggttttgatgaaagaattccccaattcagttaaattcatccttgactgtcgtgtgccactcatgttcacttggttaaaaaaaaattgttttttggagattatttgtagaatctcggttctgtaaccagatattgaatattaccactggagggaagctttgaactcatttatcacccttctgccaaaccacaaaaatcctctctctctctctcatgcatctatctatctatctatctatctatctatctatatcttactgatttattcatatatatatttcttcatatatatgatatatgacactgtatatttacagcatatatattacagcacagctatttacagcaacctggatcattcattcttagccccttctcaagaatggaagtttattttaaaccagacataaacaggacataaaatgaaatattaaaagactggataatgcattttaagtcagacatacatttggatagctgttgtttgagtttgtccatgctggagttacctcctcctcactgcaccctccctgtttgcatggggagctgagattagattttaactacaaattattcacattagtcaaataaaaaagaatgacatttcccccaaatttgattattattgtattttcttggagaaaaagatcgtgttagtaaaataattcaaaatggaaatccaaatgtatttcttttaaaatttttcaaatctgttgctaaaaagctgtagaatatcgtggaaaattcttttattgtaacaaacattcctggtttaatttcttattttcactttatttttaatataaatatatatgtaacttataacacatagtatgaactgaaaatctgtgaaccaagaaagataacaaccaatacctttcatttacctgtgtgttcttttcctctcccattaccctgaaattcctcctattatcctgaattttgtgtttgtaattcccctcctataaaataaatggtttatcactcataggtactaaatatattgttcagttttgcttgtttttttaagttttataaaaaatcatatatacacacatacatatacatacatatatatatataaatacatatacacacacacttctgggaattgctttttttcactctacaatatgttcataatgtcatatatactgtaatttattattgtttcttgtgtaatattctgtgatggatctatagaaggtttccagtttcttggtcttagcaagtgctatgaactgtaacatgtcttctagagcaagtgtgtaaaagtttctttatggtatgtgcctaggacttaaattgttgaattacagggtgtgtaaatgttaagtttttttttttaagaaaagatagtgatattttatcttactaacaagttatgcctgtttatacgatcactcgctgtagcagtatacaaaaaattctgttgatctgcattctctccagaatttggcactgccag

SEQ ID NO: 832 - DNA, 1339 bp, Homo sapiens
cacaggtatgcaatttggctaaatggccatttccaaaccatagcacacatttgtctacttgttcacttttttttttttttacatgagagtttttactcttagaaaagtcaaagagtaacccagtgcttgtcgaggggtaaaggtatcatttttatgcagcatattgtgaagtgattaattttttaggtgaaaaatatatagttcacatagagattatttgggagaaaatgattttttaaaaaatatgcagtatctgcgggcaagcatacgaacaaatatatatacacacacacgtatcagtatagaaaaatgtgtacttttaaaattcagttgtcttaatctgaagctatttgagtcatattctctggattttttaaagcatcctacaatctgtatatataattaggggaagttgtaataattgcaggagttataaaagcgaaatttaggtggtgggtaagtgtatctacattttggcataaatcactacttttagaggatttatatgtcagactgataagtttcttaccatggtgaaatgacaagaataccactcaggcattggctgagacataattttgacagccagcaagcttgcagtgttgctgagtgcacagatttccacttcctgccaagattaaaattggcaaaaaccaaaaaggatattagggattgtcactttaagaagaaataacatgttaatgttctgcatttgcttaagaaatgtaagagtgatctcttgaactgtagtctgttgaaacttacaagtttgcaatcaatagaagagtttgattaatatgagcatcaaaaattaaaataagtagaggctctctgacacttgttagaattaagactcattataggtttacttaataggacataattactttccttctatataagatgaattcttcacaaaagctatgaaatagttttcctcacagtccctgaagaacaaaggcctactttaagtttgtagatttgaagactgaatgcttgctttacttcctgaattttcttattttttcctgtgtgagcagatggtttttctttttataagttgccagatctttcctataacaataactgccattattgagaacctactgtgcgcttattctgtactgagcactcagatcttcagagttttttcttacttaggactttttgtttaactctaggtgtaaaaatgaagaaaaaattatatctcatgttgtgaaagagtcagactctgaaatctgcttatactttgctatttacagtaagtacttttgaaacagctgtagacgttcaaatgaaagtagcaatgtggagtggggaatgtgggaacattcatttg

SEQ ID NO: 833 - DNA, 1022 bp, Homo sapiens
acattctagcctggacaacatagcaagaccccatcttaaaaaaattttttttttttagtcagccaggtgtggtggcctttgcctgtagtcccagctactcaggagactgaggtgggaggatcacttgagcagggagattgaggcttcagtgagcctcagttgtaccactgcactccagcctgggcaacagagcaagatcctttctcaaaacataaagcaaaaaacattatttcctttctcctttcagaggaaaattatttccagattattttttcttatatttttttaaaagttggctttaagggagcacgtttctctttgagggtggcctgtttcattgtcaatatttgctcttcattggaagctgaggtcatgtcagagttactcaggagaaagacctggacttttcttcttatcttttaatggtttatcattgataagtttggacatggtatgcatggtgacttttttcactcttgtcacttttctatatttaccttgttcatagtatgtaatctgagtgccttcaagacactagaaaagatttgatctcaaacaccacattttgggtattttaatataatcaggagaaaagtggatataatattcagacaggaagctggaatacactggcataggtagaagtattcatttcaacattaagtgaatatatatatatttgttgttgtttgttttgttttgtttttgtttattttggttagaatctcactctgtcacccaggctggagtgcagtggtgcgatcttggcccactgcaacctacacctcccgggttcaaactattctctttgctcagcttcctgagtagctgggattacaggcaaaggccaccacgcccagctaactttttgtatttttagcagagacggggtttcaccatgttggccaggctgatcttgaattcctgacctcaggtgatccacccacttcagcctcccaaagtcctgggattacaggtgtgagctactgcacccagccgcaaatatatattgataacttact

SEQ ID NO: 834 - DNA, 1025 bp, Homo sapiens
ttgtgttggcttgtaaattccttatttcctgcatgtgtgagtgtattttgttagaacattccattttaaagcatgccttttttatgacaagaaatacttttaaaatactatttgcttttgaaattacagtagggaatcaaaggatagtctcttgttgagaggaaggtattagaagcatgtagctttatgaactatattttctgtgaatatagcagaattagtttaattgttcaatttcaccctctccagcatgattgcacccatcagggcagttaacagagacaccgctatttgtgttatactaggaattctttataaacttaataaatgaaagctttttctcttataggcccgattctctagtggacttctggtgaaattatgtggctaccttccattaatgttaatggaggttatggatataaatccctccatagtgatggaagaatgagccccagagagaagaatgtttctaatgaatcactggattgtgatataggattaacttggtgtccctaataccatttttttttcctcctgaaagtttaaggtcttatgtttaggaactagtttctctccaccttaatcctttattgtcaagtctgcaataatgttaagaacaggaaaaaaaaatgtagattcctggataggcacagtttttatattaatgtaactatataggcatagtttttatattaatgtaactatacagcacctatttttgtgttttactattacttggcagacatcttgagtgttttacaaggttatcgtatatttcactaataatcgttgcttgataatttggtgtcctgacagactgcagtttattatttagtattaaagctctcaaatgtatttattgagcacctgctgggtacaaggctttgagcttagtgatgaaagcatatgacatagtctgtagcctcaaattttctataatctcgtgataaaagtaggtaccagttcattagttgctttccagtggggcacaaattatggaacatcgtctggctggccgggcg

SEQ ID NO: 835 - DNA, 2639 bp, Homo sapiens
tccctttgaaaggtataatgtattcaaacctttttaattagctaatcttttcctgtgaaatcttaaatatttgcacgtataattggtaattttagcttttatgtaggtatgtttccccctggtgttacttacaaaacctggcttactcaaggcccaaagtccaccccactagtaaactctctcgtctctgttcctgtgccaagtgctcttcctttgttaccaggtccacataattaatagctttatcatatgaggtaattcagttactcagcaaaacaaatgatatacacttttagaaatagctctagaaagtaaacttgaacgtaaaattgtttagtaagaggaaatttctgtttgtctttaattaagagaaactgtatggaaatgtaagctaaggatgcattaatcagagaagttggcattgcactgttcttcatttttatttggcatagattgcatgggtgctcattaaataatttgtatgactgaaataacttgtgatagttcttgctaaagttttgcatggactcagactaaagaaactttaaaatttgaattaaaaaacattcaattcttaggtttgaaggtttgagttacttattataactgaaaatctttattatcaaaatgtgtgttcattatagtgtttgcttgccttcttgggtgaagaaatacttattatgagagtatgtagattttccgtgaagaattagtaatcatgcatcaggttgatacctggtgagtagatatttgtatttaatgctcttaaattttaacagccttgcctctgtatgccctgctcatctgtgtcttaccaactttgatattgtttgaaaaataaacatttgaaggaagaagtttgcatatttagagggttggtagttcattacctgcatgtaggttatgcccacatcgcaaagaaatctgatctatatgggtaacatatttggataatcaaggccaaggtaaagggattcattcccccttcttgaattttatggtttctgtatgtcaaaccagatttcattggtttaaatcttgtggtgtacacttggccattgatttggtttgagctctgtaatatttgtaattatgtgagatgacaagattgaattaacttaattgtagagttttacatagtgtctgtatcaacatcctaataaaataatatgaaattcaataagtaatgccaagtgggacagtgagccactcacataagcttactaaacttgatatattcttatggcactcctccagaatgtagaagaaacacatttatctaggtgattagtattctttctgtctgccagatttaaggattgtttggaaatattgttagaatcaaaatcaacgtttgttactacacagggttgagcattccaggcacactctggtcgttttgttattctaatgtccacttatttcatgtctgccgtgaccgtgacagttttcagtcacacagagctgccatcaaaagagtgataagcttgtaagtgaagcctttggggaagcaataaagtcatttttctggtcccatctcaaaagacattattggaaatttatttaaaagtgatcaaggtagcacatacgaggccttctacagtttgcattttggaagttattaacaatctgcagttaagtccatttaaaactgaaagtggctcttccacaaactactttttaaatagcttgctggttctaaatttaaggagaatggaaatattggaaattaaaagtcaaaagaaatttctggggcataagatcctttcaagtttacaatttctcactttagatttaaaacttgaacacggccatactttgcattttatgatatctaattagtgccttgtaatatattttgtgaacagtatctgttagccataatatcagggacagtttaaaaaatcttcagtacatttatgataaaagtattagcattgtaaggtcttaaattgacatctaggacattaggaaatcaaatttaaagcattgcattgtctgttactcaatggagtggactgaggacagcgtgtgacttgtgtactgcaaatgatgcaatagctaaatatcctagtgtgagttaaggttgattaagtgatcatctttaactctgcttttcccagggctctttgaactcttgttttattaggtaatatgctatgctgttattttattgctgtttaaaaaaccttctcttttgggaaagaaaacatgtgaattctttggtttctagatagaaattagcaatcttttgctcggaatgtaaaagtatgctgtattatcacaaactgaccctcctcctccccaagaattctagggagtaaaatgcgtgcacaggaaatcagaaatggatcaacagagttataggttttaaaaaaactgccttgcatttttgccctggaattaattttcagtgaaaattaaaatattttttctgttcatctggaatcagtttttacttcattagcaggaaatggtaaatatacattcagcacaaatagagttttctttatgggacacaggatttgtactccataggtagatgtgtaacataaaagaatctttctgctctccttgtaattttctccctcttaccctcaataagttaaaagaaaggaaaattttttaacctaacctgt

SEQ ID NO: 836 - DNA, 1022 bp, Homo sapiens
aggaggctgaggcaggagaatcgcttgaatccaggaggcagaggttacagtgagcactccagcctgggtgacggtgcaagactctgtctcaaaaacaaaaaacaaaaagaggaataatagtatctgctctccttgccttttgtgggtttttttgatgattaaatgatatctgagggatacaaaaatgctttggaaactacagggtgctttacagactgtgtgtgtgagtgtgtgtgtgtgtgtgtgtgtgtgtgtgtgtgtgtgtgtgtacagaaaatcctttatctctttgcttctcaatttcttttcttaggaaaatcagattatttaaatcccattatgcacagctctcctctgttcttactaagcctctgtattccattacctccagtaaatcagtaaaaggtggtgagtcaggctgtagtggaaagcggggtctgctgttttctcatgtccatgttactctgtgggactcagaaatcttgcttacatgtctcatgaactttcttacctgtttgaactatacaggctataacatatgacttagagtcttttagttatgaccactcttaagattgatgactaagttgaagtatttattagttgttattatggtggattgataatcatgcattttaacatagtaaactaaagtctgtgtcgtagaattagctataatttactttttaggctggatgaggttactgatgcttgtaatcccagcacatcgaaaggctgaggtgggaggattgtttgagtccaggagttcaagacaggcctgggcaacatagggagaccctgtctctattatcataaataaaaacaaatttttttaaacaagtgtatatatgcatatgcttatgtgttgtaataataatatgtcccagagttgcacatctggaagagaagaagatagcaactgaaaagaaaatagaatggtattgacaaagagaaaagatggcgtcattaggacaattactttttatttttggaacaactcgaggctttacacccattctttt

SEQ ID NO: 837 - DNA, 1415 bp, Homo sapiens
tcattttatttgtttgtttgtttatttatttatttatttatttatttattattgagacaagatcttactctgtttcccaggctggagtgcggtggtacaatctcagctcactgcaacctccgcttcctgggttccagaaatctccctcctcagcctcccaagtagctgggattacaggcatgtgctactgcactcagactaattttttgtatctttagtagagacatggtttcaccatgttggccatgctggtctcgaactcctggcctcaagtcgtccgcccacctcggcctcccaaagtgctactattacgggtgtgagccaccgtgcctggctagaattagtcattttaaattcactggggctgggcgcagtggctcatgcctgtaaccccagcactttgggaggccgaggtaggcagatcacttgaagccaggagatcgagaccagcctggccaacatggtgaaacctcatctctgctaaaaatacaaaaattaactgggtgcctgtaatcccagctacttgggagactgaagcacaagaactgcttgaacccgggaggcggaggttgcagtgagctaagatcacgtcactgcactccagcctgggcaacagagcaagactgtctcaaacaaaacaaaagaacaaaactctctgggcttgatttcttaatctgtaaaacagaaataattcttaacacatttggttactctgaggataaaagtggaggaaaaaacatgcagaggatagtccggaactccccatgtagatcccattattaggtaactgaggtacaagtatcttaggctactggtccgggcaggctttgctgaggggctccgtgcagcttgctggtgcagccgagcaaatgggcctgtagccgactcttaatccaggttggtgctattcaaagagatcatctttcacccgagggatttctgggcatctattttgcggatcagaaagtagagaaagaaggtaactttgccgaaagctagtctggggagttagtagctgatacagatcagcatttcctaactatgagatttcataatattctctcttgtctcgattctgagtcactggtgcctgctgtggtggcattgttcatgaacatgtacagttattgggaagtgatcttgtctttcctcctgccttcaggcactgctacctaaattacaccccgacagatgtattcccattcttctttaaaagactatgtcatgagctgaactattaagttttaaagttgataagcatcaggctaagcatatttttcctgccatctcccacggaggtataacattgttttctatacttagggaatttaccaaaaaaaaaaaaaaaaaaaaaaaagttggtatctgctaatgggtcaaattagcaggatgttttgaaaactcagtggaagaat

SEQ ID NO: 838 - DNA, 1076 bp, Homo sapiens
gccagttattggtaccagtaccaactaattcctcagagctatagggcagtattaaattactaagccagtgtggaaacagcatgatctaatggaaagctaattagcctttgtgtcagatgggtgtgattcaaatcttgtctgtactgctgatgggctgtgtgactttgggcaagtagcttaacttctctgagttcccctgtctctgttttttcatttgtaaaatggagtggaggggacaatattaacttgcaggatggcttgatgatgagaaatgataaatgtcttagtctatattagatcttcagtaaatggtagttgttttgaccactgttactgcaatgagccaaggtggctataagcccttcagtgtttcagtaaggacaagcttacaggtaaccaccaagatcagggcagaacagctgatttaggtctaaacaggttccatcgtgtgtcttcaaaaaggttttcctttttttcctctggagaaaattcagactggtttaagaaggaaactgagagcctcttccctccctatgttctgagtgtttcagagatggccagaaatggatactagttactaagcaagacctttaaaaaatacacgttacaaggcaggttggtatgaaggaaagagcactgacccgtgagttattctcgcggggccaggctctgctccactcagctctgtgttctctgccaagtccctttagatcaatgtgtcgcatgtccccccattgtgagttgagtacattggaccaaaggattatagtttgttttcttcccaggcaagtgcctcctcctgatggggagttagtatgatgtgggtggccccagtaggactgggctggtcttactgttctaagaagtgttagcagaaaaatggctaggcattggagtaaccctgtgatttgacattttggggcatcctttcatggtacgatacacctggccaaaagtctcccagctcagaaattctataactagaaatgctttgaataaatatatactgagaaggtattttggggggaaattttaaaattcttatctgacttggctagagcaactgcttacgacac

SEQ ID NO: 839 - DNA, 1037 bp, Homo sapiens
tgctttactgaacttaatagttgaagaatgtgggaaagaaatggtgtactttctgggtaaagtattttagccaccctggagtagttgcattgcatcttgatcttttttcatcttggtagaattatactgtaactaattgaatccattgatcactgtcttgttttttttccatcttcttctccgaggattcatttcataggggtctatacatcagtcaagaaaatagctaccgaggaattaccgagactagtaataaaggtaatttaacctagtttaatattttttttaaaggcaaaacactgtaaacattttttacctggtgagagttaacttcttaattaggccatgttggaaaacaaatcaaaaagacacttactggtagttttcagagagtgagagaaaaaaagaggcaagagaaagcattgatcttggaattagatgacctggtttctaggcctatctaccccaatgcttttcaaacttcaatgtgcatacgaatcaactggggatcttgttaaactgcagagtctgaatcagtatggttgcagtgggcctgagatgctgcatttctgacaagctcgctgagacatccctgctgtagaacctctgaccacaccctgagtagcaagggtctgctttaccacttagctaactttgtggctttgggtatactgtttaacaactctgcatctcagtttcctaatctataaaattgggatattaatctttgttctgcctacctcattgggttgttatgagaataaaattagataatgtagatgctttttttttttttttttttgagatggagtcttgctctgttgcccgggctggagtgcagtggctcgatctcggctcattgcaacctctgcctcccgggctcaagcagttctcctgattcagcctcccaagtaattggaattacaggcgcctgccaccatgcccgactaatttttatatttttagtagagacggggtttcaccatgttggccaggctggtctcaaactcctgacctcaggtgatcctcctgcctcg

SEQ ID NO: 840 - DNA, 1073 bp, Homo sapiens
ccaaagtgctgggattacaggcgtgagccaccgcgcccggcctgtagatgtaattttaaagtgtcaaataagcataaggcagcaaggacatttgtttatagatacagacattctttggatacctttcatcaaatcagtgtgggctgttctttaataggaggggcctggaactgtgaggcaggagaagggaactggaatccctgcctccctagtacccattctgtgcctttggccaaatcatctcccctggtcccctgttgcgtcatctttaaaataagggcttgacctaggttagtgctcttaaagggtagttgcaagactagcagcatcagcatcactgggaaacttgctagaaatgcaggttagattcctagccccttccgagacctggtgaatcagaaactctgggaatgcagtccagcaatctgatttctaatgagctcttcaggtgattctgatgcagctaaattttgagaaactttctgaagtgtcatccaactttgaaatgagatatttaagccttctctttataggttcagccaacagagagcctatctgtgtgatctctagacactttcccatctcccaggtagaggaagattggggaattgaaccttctgtgattgtattgcattgagcatgtggtaaggaggactgaacttggacggttaaaacctcacctctctggaactcggaatagattataattgcattgacttacactggtctagcttatccagttttggggctgctttagtagcccacaaacgctgactaatgcagatgactgtacacactgagaaagttctcttccattttagtttcctccttactctcttcctgttccccgaatggttgtcatcatgatatagcaccaagtcacattttatagacttttcaataactttctaaagttgatcacaatctagattatttgcattgttgtgagatgagggaaactgagaaagtaaaatacatgttttgttttgttttgagacagagcctcactctgttgtccaggctggagtgcagtggcacaatctcagctcactgcaacctctgcctcccaggtt

SEQ ID NO: 841 - DNA, 1043 bp, Homo sapiens
gaacaatgaagaaagacatggagacactgtccaagaggtcgagatggatagtagcttgagatcctctctttctctctagacatgcgccatgtgcaacacacacacacacacacacacacacacacacacgcagacagtctctgactttcaacggtttgactttatgatgagtttatcaggatgtaactctgtcacaagttgaggagcatgtgtttatgtgtgtatgtgtatccgtatacatttacatttatatatacacacacacacacccctctataatcctgtatacttaaattcctaaatagttgtttgggtgttcactatattggaacgctttaacttgtgttcttaataatatctttaggaaaagattaaagcatgtttctgcatataataatattagtaacaaatgatggaagattttgctccaaaatgagttaatgtagaaaacaggtagtgattaaagtggtgaatgtaagcaattttgtaaatttataaagtcatagacatctgtagttatgaaggacctcatagataattttctccagtggtttcaaatattatttaaataggaatgtttccttcaggaccaaatctgtggagaagctatgtacatgtatttatttttttaagttgaaaagtatgcgagtactggatccatattattaataactttggcccacctgttctttctcccagaagcagccccagttggaatcagcccctagagcgaggagtcacctgggaagcttgttacatgcagattctgattctgtgtgtctgggaaggcacctgagactctgcatttcagataaactcctaatgtgttaaacatgcattggccacattttgagaagcaaggccctgggggaaactgtgcacgtagttcgaaaacctttgatgggttaacttcttcatgtttcaaatgtgaaaagacagagttataaatgatctgccaaaagccacatgcttacctggggtcttgagtcttgggaaggctgtgttcttttacccaaggcctgggtgggatggctgtgtcctta

SEQ ID NO: 842 - DNA, 1090 bp, Homo sapiens
gtcttatcataattttgttggtgagaagatgcagctatataaaacaaagaacaaacctgtgaaacttctgctcctcctatcaggctctgtttgtgggaagcctaaatgcataaaatagcaacttgttaaacttagccttgactctgtttaaggggatcttttatttgcaaaatttagtcaattcctccctaaaggaaaaaaagtcattttagtggatcttgaaagcttttagataaatattccaagttttttttcccctgctgctgcaagcttaaaaggcaacatagaaggtctgaagcctggtttttccagctgtgtaacaagcacagaagagaggattctaaatatttactcctttttccttcccactattctgtgttccagtcaaacttgatttcttgctgtttgtttccaggacacttctcaccctgcattctcttagtttgtccccccaaggaatgctcttctttccatcctcacatctctgtccagtagaatcctatttgtcattcaatctgcatttaaaatgctatcagctcttcctgaagactttatggacacccccaaccaaatgtggaaaggggtccacaatttccagtgcaattaccttacctactttttggctggactcagtactctcattctaccttgtgtgttaggtgttcgtgtactcagtaatgttcggtggtcaaccgatatttactaaatgccccttattgtcaaacactgtgttacttactggggaaagcgaacggtttaaaacatggcccatgatgtcagtaacctctttcttgttttttttctccccaacttggttctgaattcccagttggtagaaatggccttataattctttggtgttctctgtgaatcctggcttcttgcacatagtagctgctcaagaaatggtcattgagccatattagttgagtaaaccagttttcttctgattgaatttgaacagcaaagatttttagctttcttctttggtatttaaataaaagtaatgttatttgttctatttgccattatattgtgatttttggtggtacagaaaggaagatttttcccattacccctaccatgtagt

SEQ ID NO: 843 - DNA, 1031 bp, Homo sapiens
atagtaggaagcatttctttaccttggaactttagaagagggtctgaactgagcaaaaattagtgtccctgcctttttaacggctggacacttatcacaaagctgtgccaacatcagtgatggtgcacccacaaaggtgtttggtcttgataagcttctaaagaagcagactttgttgttgttttaaacagtaatgaactgtttcagtttcataaaaaaaaaagagacattctttcttaaatagaaaagggcagaaagtttatagagaataatgtctaacttgctaatgcagtgtttgcctttgctctgtggcatgtgtgtgtgtgtgtgtttatgtaggcatgcctacacggctgcttgtgttaatacttagtataaagccttaaaatggataccagattggctatgtaaccttggaagatttatttacactctcagtttcttttattcccaatcttttatcaaatggtgtttattatattctctgaaaccattaaataaaaaggactgtggaaaaattctaaaatgctaaaattattccaggctaaaaaaagtattacaataggatgatgatgtttaacccatctacttgaaataaaaagccgagcaaatcgaaatgtgatatattttagaaggtatttcttagagaaaaaaatgtttaatgttccttctagactgccattattcattgtatttttattttaaacataattatgaaatattttgaaagtaatcaagtaaatgtggtgacatttttttctctggttgagccaagtgataataacagataactgttatctataatgcatactacgttgactcattaaagcctcatctttgttaaaacattgaatataggatttgagaagaggagaagtttccttatttaggaaaggtttttggtaggtctttcttgaagaaatggagaaaatggcctgctgatctaatctgaggacgaataagagaatcctcctccctgtggctatcattcctatggtgctatacctgtgtgggtgtggatgtgatggtgt

SEQ ID NO: 844 - DNA, 1054 bp, Homo sapiens
tcctatgccttctgtacacatcttcaacaggatttggtgaattcacagtgagagtcataataataatcgtgattttgaaaagtaatagttgtctaacactttcccatttatctagtgatgctatatgcattatcacatttaatgcttaaaacttgagctattgttatccctattctaacaagataatcaaagcatggagaaattaactctgtcttgctaagatcctcagatatgttctgaatcataaaaggttatgttatatttagcacagtgtttatagtaagaatgttttctctattgtgtgtgtgtgtgtgtgtgtgtgtgtgtgtgttggaataccattataatctataagtctctcttgattttcagctagtgtgactcccctttccataactcccacctcaaatttgaaccatcctgaatagagaggagctttaataaaccaactctattattggttctgtaagaccttgacatttgcaaactttattttttgccttttctcccacacagtagccactcttgcaaatcaaccttgggaagttagcattcttaatgaagatctataggagactttatccttagacagtaaatcagctctttcaaggcaccattcatctcccttcgagcgcatgaattggtatatggcaccttacaagagctcatttatcttatgtgggtccctagttattacttttgcccacttcccctagatcgccagagatcaaggcagaaatgaagtagaggatggctttgcactttgaaaatttgccaaggtcagctgaggtacctgtggcattgacttagagctggtgttgagtattacccataacttttagggtgatatcacccacactggcaaataattagtttagtttgtcaaagcatttgaattgtgcttggttaaataaaaatggctagaaggtaaagtaataggggaaaaagtttgttaccttgagaatttttttcctctttaacatttgtccaaatcatattgacatacttttggcttccatattagtgataaggatgaatttttactaagtgccta

SEQ ID NO: 845 - DNA, 1058 bp, Homo sapiens
agggattcaaaccctatgtaggcccctttctctcatctggtttctggcctactgagagttgctaaccctgctttgcaccaggtgagactgtatttccaatagccccctatcgagtgcagagatgttttggggggtgaaagttgattttgattggatttacaaccccatatatcaagcactagactaaaggtccatcagcctttagaagaagccacagtggttttcatttctttcactctgtttatcttctgaccaaaggctgactcttccacaggcggctgatatcgagtcaatcaggactctttatgcattatgtgaatttggccctcacacagctgagaatggcctgaatagctaagagagcatcctctctgcagcacctcttgactcctcaggacgagtcacactgaaagaggcaggtggatgcccctgattgtgtcccctcccatccagcatcatggccagcactgccattccttcaccccacccaccccagttagcccctggcttgaactccgtcactcaagagggaacattaaaaaccccacacctctgactcatactttgattttgtggcctaaagaggcaaagacgccgtaaggagcttttaggggccatcactatggagcctctttattgcccagcaaaagccttaaatgataatgggaaacctcactattgattggctgactcttaattcttcctctttgggttttgaagtagaagtgatggtccagaatatttatattactcattggatatattaaattaaacatacaaaagtcctacagccatttaagatggggttgcagcactggtgaatacgactttattaccaagagagaagagtagcttttagttgtggcttagctggaatatattgatgataagaatggctcagcagacagaagtcttgggactctcaaaaaggctccaagtgtgctttcttttaaaaaagttatttaggcccatcctttataaacacccaagtagatggtctgatggggtcatggtaacaaagattcagcttctatctaggtggatggtaagacccgcta

SEQ ID NO: 846 - DNA, 1033 bp, Homo sapiens
cacgtgacatgccacgagggcacgcacagccatttccttgtttctaaaaaacttgctacctccacagagtactttaccttgttttgcatgccaaatgttcttgctgaatgtgtctagcagactggcatttgtccataaagttattttagtaggtaaaaagtctctgagcacttgagctttgtgcattctttatgtaaaatggatttcccttcttggccagaggccaagggtacagcacactcgctgggtgagaagagagcttctctgctgagaaactggtggaccgacacactctaattttttggcttctgaccaaacaagctagaaggatgccaaaattcaacaaaataacacattattgtgtgataggagccgtgctccaagagagcaggaactcagaggaacttcatactggccccttttaaaaaagcattgtcactttggggagctttcttagagaaacgagaggaaaatggtaaaatgcaacctggagagtaaggtataatttgcacatgaacacgaaggaaggaactgaaagaaaacagaggagtttaaagttacttctatgaacttttcccagacataacacacagttctctgacttgacttacattcttttaaccctgaaagttccatctctgtgtctgagcagaatgctggactgcttaacgttaatatgagaactaatgtgagatttaaacacttttaaaaggttttaatgtctaaggatagctgcaaattccaaatatgaaaatttggcaggcttttggggggtaacagaaaactttttaaacttacatgctttatctttgcaccctgacatgtgttaagtgagtcaaatcttcctgttaattactcttgtgacattagcaagttatgtaagcccactatacctgtttccacatatgtataatgaagacgttaaagaagataggtagtagtcttctgagccctaaagaaattgaatttgaataaacaactggaataagtataaaatgcatttctagtttttatgtggaaatttgtcaatcaa

SEQ ID NO: 847 - DNA, 1045 bp, Homo sapiens
tttcagtgctccattgagagtcggtggagcacactggttgggagaagacagagctgtgagccatccgtctgcctgtgcttgagtcttggctctgccattgactagttgtatgaactgccgcaggtggttcagccactcagaacctctgtaaaagtgagatgtaaaaacactttctacatcataggattattgtgaagattaaatgtgatatgttgtaaaattctggtcacacaagtattaacttactgttatttttgctgccactgctattaattaatggcagtgtggcggctcagtactaggcaatgggcgtgcaactgtgatgagaaacgcttctgtccattaaatcgttcagtcagtggaagagacatgtatgtaaataggtaagttacctaccatacattgtgccaagacctctcacattatgtgaacagaatattaaagaattataaaagagggagcaattgcctctgttaagtagacagcaaagatgccttataggaagtagcatttgagacagattaagtttctttttaggtaaaaatatgtcccctagagataataataaaataatagcaacggatacctatgtacttcttttactaatgcaccagagtctgttttacatatattctctcatttaatccttacagcaaccttatgaaacagtactgttatcaccttgattttacagagaaggaaagtgagccaaagagaggttatgtggcatgcccaaggtcatataactattaaatgtcagtgctgggatctcgtacattttcactcttaggacatctgtgctatccctgcttagtcactttggcatcccagtggtgctgtacttttgctttcataatacatggaagccctggaaggattcagtaaagagccagtttcaccctgttagcccttgttgctttatttgtaaaatgtcaactgtaaaagtatgcacctaccttatagggtgattatgagaattaaatgagataattcaggtaaagtgcttagcatattgcttggcatatggtaagcatttaacaaatgt

SEQ ID NO: 848 - DNA, 1023 bp, Homo sapiens
atgtttaatttttttaaggttaactgtgtgcaaatgcatatttgctgtccaaactagttaatgggcttacaactgaagggtgtaaattctagtatctgtattctccagcttgaagcagtgttgtctgaagcctgaaacggctgatgttaatcttcagcttattttgttgatatccaaaaattaacttgaagtagaataaaatgtgatgtaaatcgacttctctgcatactcataacagtgtcaatagttaaaaaataaagtctatataggtcacactgtttaaaaccttaaaggagtgtgtgtgtgtgtgtgtgtgtgtgtgtgtgtgtgtgtgtgtgcgcgcgcgcgctgtgtgtgtgtgatgcatatgtatttgtgtttaattaaacagagggaattgctggcttttaatcaagttgatgaattttgaatttccacttcagtgatggctctaccttaaattcatttggctgatgtgatagcagtattcggaatgcaacgaagagataagagtttggaccccatatttataatattccagaagaatttcattatgtaatggctagaaactcagatttcccacagagttgtagagtgtgcagtttggcatgcttatttactactctggttcttttttttttttttttttttttgagacggagtctctctgtgtcacgcaggctggtgtgcagtggcgtgatctcggctcactgcaacctttgcctcctgggttcaagcgattcttctgcctcagcctcctgagtagctgggattacaggcgcctgccaccacatccagcttatttttctatttttagtagagatgggatttcactgagttggccaggctggtttcgaactcctgaccttgcgatccacttacctctgcctcccaaagtgctgggattacaagcgtgagccaccgcacccggccactactctggttcttaatagtgaaagatttatacctcaaaaacactctgtagataaagaaggattcaaatatgattctcttaatattgca

SEQ ID NO: 849 - DNA, 1001 bp, Homo sapiens
acctcccattttgaaataggaatagtccttattttaagggagaaggagtggtgtgaagaaacgtggctggtacccttcagtagaattctaaagaccagaaatgtggttctcgtgtttccagtggttcatacagatcactcttcaatgctgtcctctctttgtgaatatgtttagctctttttatgtttacatttgaaattttaaaataggattagatggagcattcttggaaaacagtaacaacaaaatttaatgaagtaggtcccttcgtgcaaagcaaaaaagacatactgctggttgaggatatctgttaatagctaccatttattgatcatttacaaaatgctaaggaaaaatgcaagtcgatttacctgtgttgcctcatttgattctcacaccacttctattctgtggcaactgctaacactctcattttagagatgagcataccatggcttatgtagcatttccaatcttatgtaccgtatctcgtgagtagtagacatgaaatttgaactcagatccgtttgacttgagattgtatatactacattgcttccttcctgggaagaaaatggaagttttttctggttccttctaatcgtagcttcatagatatgtggtgtgcttccaagtgtgtatacttttccatgtatgctaagttttggtgatgtattaaaaaaaggttgaatggccaagtacagtggctcatgcctgcaatcccagcactttgggaggccgaggtaggtgggtcacttgaggtcaggagttcgagaccagcctgggcaacacggtgaaatcccatctctactaaaaatacaaaaattagccgggcgtggttgtgcgtgcctgtaatcgcagctactctggaggctgaggcaggagaatcacttgaaaccaggaggcggaggctgcagttagctgaaattgcatcactgcactccagcctgcacgacagagcgagactccaactcacaaaatatatatatgtatatatatat

SEQ ID NO: 850 - DNA, 1023 bp, Homo sapiens
ctccctcctcagcctcccgagtagctgggaccacaggtgtgcatcaattaacttttttatgcccaactaatgtttttaaaattattttttgtctccctttattgctcaggcttattttgcagacatttttaagacaaaatttttgttatgtaagactttttgttataaaaattgttatataagactttataagacataaaattttgtaatatgaggcttttcctggttgaaaagtgtttcatttttcaatgttttgtatttgtatgaaatcagtctttttgccagcacactgaatcttgtcagattggatgcagagtttctttctgcaacacttttactgtttggtaacaaccttttcttaggaggagaagctacagatactaccttggctgctaacaagttttcagattagaccaatttcacagtgttgactagggaagaaaactgattgaacttccatgggctttagactgaaaccaatgactagcattttatctcttttggatgtgagcatgattagaagtcagtctgaagattttctttcaccagcattgataattcttgtcagtgcgacctcagacacatattgccttcttttctgtgcatcctctgaccagatagaatttcttctattttggatgacatgctgcattttaaagatgcaaggtgtaatctagataaatataaattcattggatgctacctttggaaaagagctgaggattatcttagagctgttcttttcctctttttctttcagaattgttattttctgctcaagattgccctcccaagcctacctcatggcagcacacacacacatacagtcacattcaaacacaccattgtactgttacttgcaaaattttgcatatttgggaccaacatacctgttattctgaagtgctgtcgtatgaaagaataagtaaaggtactgtttatatctttcgatgtatgtctagcactaatgggagttaggggacagatagatgtcaactccatgcaaagaaagtcattatgaca

SEQ ID NO: 851 - DNA, 1023 bp, Homo sapiens
tcagttcatggtgctgggtagttcacatttctggaagggctgtaaggtttgcataatcgtccagtgctatcatcatatcatctttgcctggaagatgcatctgcatagcttcagtagtttttaatgtcttgggatgcccaacccagtactgtgggtttcaatttttatctgtcatcgccacaaacccctaaattaaaaaaaaaacatgaagaatattcaggtgactataaacatttcaaagaaggcctctacttcttgctctgggtaaaaggtagatgcagtctcatggtggaacatgagagttatctcagttggctcttgaaatgagaatgtttcactgtttcagctgaactgaatagtcactttagtttttaaaaacctgctcaattcaacaaaacatgattgattgctcaggtaaattaattgcctctgagacacatgtttgaaatagatatctatactctctctgatactagtgtgtagcaataacttttactgtcctattttgtttaactgtctgtgtatgtatgctctaaaaaggggattgaggctggaagcagtggcttacgcctgtaatcccagcactttgggaggccgaggcaggcagatcacttaaagtcaggagttcgagaccagtctgaccaaaatggtggaaccccgtctatactaaaactacaaaaattggctgggcgtggtggtgggtgcctgtaatcccagctacccgggaggctgaggcaggagaatcgcttgaacctgggaggcaaaggttacagtgaaccaagatcacgccattgcactccagcctgggtgacagaatgagacttcatctctaaattaattaattaattaattaataaaaaggacattgattaaacttttttttttcttttttcttttttttttttgagatggagtttcactctgtcacccaggctagagtgcagtggcgcagtcttggctcactgcaacctccgcctcctgggttcaagcgattcttctgcctcagccttctgagtagctggg

SEQ ID NO: 852 - DNA, 1052 bp, Homo sapiens
tgagctctgccacttaagaattctgggactttgggcaggctgcttattatccactaacctcaatttcttcagctcctaaaagggcagttgtcatacctatattatggcactgttttgaagaagaaatgaggtaatgcctaaaagtgtttaacatagtcactggcacagagaagatacttaataaatgttgatttccttcttgttcagcaaaaccttaaggcagaaagctcctaaggcatgattatatatttcattctttcagtagcatttgccaaacatttttaccatattgttgctaagtaggtaaaacagaaagacacatatctaaatatgcagagacatattttgtaatggaggtaccactctgtttttgtaaggcgttgctgattctcacttcgcttctgcatctctgaatatgttacaattgtaagagatgtttgaagctttggggatcttctaatggaaatgggggttcttcaccgaatgttcatgtaccgacttcaagaggtcaaagaatcacgaattgatatacaaagtggtgtatgttggagtatagtcgtcgcttggtatctgcaggggattcgttcccagacattcccacagatgataaaatccacggatgctcaagttcctcacagtcagtccttcatgccagtgggttctgtatccatggattcaatcaaccacgaattgaaaataccgtcatcacgtaaaacttgtaacatacattctaggaaaaagaagaaaataaaatcaccttgggaaaataatccttaaaattttactatgtagggatttattcttccaaacatatatatgtatttttgaaatcctttaaaaaataatgctgtatcacaagcacctttccctattatgtattcttctacagaatcatttcagtgggcgtatagtatttcatgttattgatggatcatttgtgaaaccaattctgtgatggtcactgagtttgtttgcaagtttttattattataattaatgtggcaattaagatctatattgctcaaacatgactgtgtacttatagatcatct

SEQ ID NO: 853 - DNA, 1034 bp, Homo sapiens
cctgttcatattgcctccctatccatcagagaatatcttaaatgccactgggatacttgatgccatcccctccatttgtgggtttgtgggctagtccagcaacaggctttggagaagttactcgctactttattataacatacttaaactcaatagcaattcaggccttactgggtatttacctaatttattgtggcaatgcggtatttagaccactgattaagtgaagtttgtcagtatagttaaaagaaattagagacactatcattgctaaatcactttacaattcaaagaagaattgtaaacatatgaatccatttaattataatagtgccaattataagagaaattgtaacgctgggaacagtggcttttatgtaatcataataatggcatgtatttatcttggtttggcaagttaggcctttctttaatacttggctttgcctaaatagaatgtggtttgctgaaacccacaataacccccacaccctccaatttgttattgcagaaaatactgaacaataatcatgcggtatgaatgattaatgtatgcatgggttagtaagtatatttgaggtttaaaaagtgtttttatttacattcttctgttggctgaaggtataaaacaaataaatataaatccacatgttaaatattctcatccctttccatacagatacttgcagtgtgaatacaatcatagctttaattcattgtttctgtgcttttttggtttactcaacacgtgtcttttaaatatatttcaactgtagtatttgatagtaatccattttttaatttactaagtactttgaatatagcttccccaaaacatagaaataatcaatttaataatatctgaagattggcaaacttcatttataatgttgtgttcaaataatactatcagaataacagttgtttgaagagtgtatgtataaaaattacattctctatttaataagattactattattattgaggaagaggtgctatctagtggtataaacaaaattattatggaattgaaa

SEQ ID NO: 854 - DNA, 2055 bp, Homo sapiens
tattaaaccaaagtttgcctcatgctgtcgacgttaagcagccacttggtaaagcctgggaagtaacatgtgcctcaacagttagcacttaaagactgtgttttaacgagtctccagatatgtatttacatgatagaccatactaacaccttttagtgttatctgtcaatcaagatttcataatattcctttacaaaatgtatctgctgtccacatccattatcctactctacttactttgtatttttatgtatttattaggaattcatagtcacctgacctcttggcagccatccctaaacttcacattaaccctgcttctcagggattgcaggggtcattttaacccccatgaacctgaaaggtccaaataattcagtccaaagatggttgaaaagggatctgcaaagtctcctcccacaaagaaatgctttatttcatgcatttggcaaccaacccctcccatctttttatttttatttttatttttggtaaagggattttacatcagacagatattattaaaaaattttatttaacactcagacacattttattctaaaacgaatgcttgctcaagagtctaagaaggcttcatgggaagagcaaagcaatctaagccatatgtattgggcaggttgccagttgtttgccaatatgcccaagccacctggctgtgcattcagccaagtatgccattccgaccagccagctttaacctcccggctgcttttcagcacttaggaaactccaaaggcctgggagctgcacttcatttctcccatgccaatagttttcacttatacaaactgcacagctacactgaccggtaactctcaaacgcccattttgaatgagctctccttttgtttaaagcaccattcactggtgttgaaccagtgccataagatgagtctggagatagcagactgaaacctttacccatatgccatagacagacactttgactgacaagcagcatttttttcccaagcctgtagcgacagggttttgtgattctggtttgctgagatttggattggctttatttgccgctggtttcaattttattttgggtggttctaacttttaaatgtttggaaacgtttgttcatttgattttccctttttgtttagtttagaaattggttgagctgtttcataatttatcaagcttgatttcataatctttggcaatctaggtcaggaatcatgcagaacaggcacgatttgatgatgggatcttgaagactgattcgttctttttaaaagtcacgatagagaaagctttactcctgaaaggcggtattctttctttcatcagggcgtaaaaattatataatgccttgtttccctttttgccttggctcccaagaaactcagagataagtttaattcttaaccttggtgaatatttcagcctaagtttttgcccccactacttctctaacccctgcagtttttgttcatgtttttcttcttttatggacttaaatgtgtatgtgtgctaatttactatatgtttatgaaccatctcaaattatttttggaaggtagatgaagtaaccagtaagtaaataaaacttcagattagaaactttagtctattcctaattaaaatctttaagtggccttgtctggtatcataagcaggtgtttcagattcattatctcaggttttaaatgaggaaagctgtgaatatttaagcctagaagtttcattattataaatttttgtgctagcctttggactgaccaatttattattttctatcactattgtggtctgtacattctcaagttgatgccatttccctcttcccggctcaatgaccactatctctcagatcttgaagatctgttttggcttggttccaatttaatcagtctgaatggatcctattgagtaacttgactcattcaccctgctaaagagagtctgaatacactatttctgaaggtttttttaaacctattataatgttcttttttattagaattgtcagtcatttcaggaaaaacatgtgatctgtatgtaagtgtgttttgagagtc

SEQ ID NO: 855 - DNA, 1052 bp, Homo sapiens
cattaataaaaaagaatgcaaatatattgcccaaaaaaatacacaaattattgtctttcatataggggaggaaataaatatgtttcatctgaattgtctgaagtaagtcatgaatggagtcagggtaaaagaaaaaaaaaaagcaacgtaattttttcctttattggaaccaaatttcttaattcctctgtacaaatcaacttgaccattttattgaactaaaaagcataaaatataagatcacgttaaagatattcttagaaagataaattactatgtcatttttctcaatataacccgcaaattactcagtcatatattctgaaaataaatatcttttgtatttatgcttgaaattttgtgatatatttatagtgcagtgaatttttcatcccatctctcaaatattttctcatgtacataggcctccaaaacatcattgttgctctaggtaagatcttaggaaatgttttattaaaatttcttgtatttgattttgtttgataagctcaaacaaaaatggaatgtgaaactagatgtcatctcaaagagaaatcaatattggttcatttattgaatgcctactatgctaggtgctataagaatcccatccttgctctgtgatcaaagtctgattgaatcaggagctgtgtgtctttccttcctccccaacatgcatttattgccttttcattcaaattttaaatattttaaatgttgacttttctacaaaaatctgggatacaggtgtgaaaaccttactaaaaatcatgtggaacaaaaagaatttgatacaatttagcattgattccaaattttttaaaaccagtaacaaaggagaatagtatccttaacaggataaaattatctatgtcatgtcaacagaaggaatcatactgaattgtgaaatattggaatcatctcccctaagatcaggaagaaaacaaagatggctgctatcaccattattatttaatgttcttctagaagttttggacaatgtcatattatatgacttagaaataagaattataactatctgaaaggaagaa

SEQ ID NO: 856 - DNA, 1035 bp, Homo sapiens
gtccattgggggtgtgctgtaattgctcttgatgccacacttaatgggtgggggaagaaagtagcattatgtgtgaggggaggtgagagggatgccctcgggccgttgctgacatctggtcaccactcctgttttgctggcttgtctgtttggtgcctacaaatattgggcctttgagttgagtttgctgccaccattgggttccttgcagccatcattatttcacagctgggccatggttttaacttggaaaaagggcattcatctcagggccagaaatggtctactgccaacatgatcctgagaactttcttagtttaataaatgagagaataagtattctcatgagctcctgtatcaagtgtttcctggttttgagcttttttgttttttggtgagaatgttatctttcattgttatttctgaacccttaaaggactaaatttccttttcaagagtttcaagtagttcttgtacatgtgtgcggtgataagcaaacattagtctgagaaagttctgaaaaatctaattgagccagcatttaccaagcccttctatgtcagctactgaactaggtgcagggaaaaaaataaaggtcctcaactagctcaccctcaactagctgtccctccagctagagaaccaaacctctgcataattaaccataataatgggcagatagattcaagggagaatgcagtaaaatatgtaatatcatgagtgcagtttttatctgtgtgcacaattacgcaagccttttaactaaaaggcttcggtgagatggatttcgtaaaaatgcacagaacttcctgaagcacaaattagacagttccctaatattaaaacacagccctgagaggtagggtttcaggctttctggaacccccaaacttgaattggtccacagaactaaattagaagtaacaacctttccttatgatgtgtgatttctcaaatggtggcatcttcccagagctgtgtgttcttttgtttggagcacagctgcttcctattgttaagttgcaccggagagct

SEQ ID NO: 857 - DNA, 1104 bp, Homo sapiens
taaaaccatgagaaattatcaagtacagatatcatatgatttgcttgaaatacttttgcattatgcgttactttctcctgaccttctaaaatggggcataagtccgaatttagaaagaggaaaccacatgtgtaataagggaaacagactaaggagacatgccatgtgtatttcagatcttattgtgatgggtaaactgtttgaaatgtggtcacattaaaagtatgttactttgtgggagactcaaaatcttttacgagtagatttttattgtgttccatagtggaaatagaactagggtttggttttggtgggaagttttggtcttcaagtcaccttggcacctgactggcagttgtgaaactaagtagaaaagatacctcttttttcttggcacctcacacgggatcataggattcttactatcatacaatttatatatcacagaaatgaaaacttcggtactttgttgtataatacagatcttgtgcttgttgatttttaatttggggctcaagcttcccatgtcaactaatgtggccgctgctaggctgccctcgggtagaccaaatgtaagctcactaggaagtatttctagctctgtaaatacctagcatatcgtttagtccaggcatgtccaatcttttggcttccctcgaccacattggaagaagaagaattgccttgggtcacacataaagtacactaacattaacgatagctgatgagcttaaaacaaaaatcgcaaaaaaatcttagcatgttggccaggcatggtggctcacgcctgtaatcccagcacttggggaggccaaggcgggtggatcatttgaggtgaggtcaggagttcaagaccagcctggccaacatggtgaaaccccatctctactaaaaatacaaaaaaaattatctgggtgtggtggtgcgtgcctgtaatcccagctactcaggaggctgaggcaggagaatcgcttgaaccgaggagacagaggttgcagtgagccaagatcgcacctctgcactccagcctgggtgagaaagtgagactccatctaaaaaaaaaaaaaaaaaaaaaaaatctcataatgttgtaagaaagtttac

SEQ ID NO: 858 - DNA, 1149 bp, Homo sapiens
tgatcagctattgaaatagcacgtatgttagagacagtcctcccagcaaacatgattttctattaaaatacatccaggtgacaaaaaagaagcttttagaaaaaaagaatttgactgagcgtggtgactcacgcctataatcccagcgcttcaggaggctgaggcgggtggattgcttgagctcaggagttcaggaccagcctagccaacatggtgaaaccctgtctctactaaaaaatacaaaaaagaaaaagagctgggcatggaggtgggcgcctgtaatcccagctactcaggaggctgagacgggagaattgccagaacccggaaggcgaaggttgcagtgagccgagatcgcaccattgcactccagcctgggcgataagagcaaaactccaccttacaaaaaaaaaaaaaaaaaaaaaaaaaaaggatttcccgaaggtagtttatttggcaaatcccacacaaactattagtagtccttatacgaagacaatttaattttgggattattactaagcaaattactcacaaatactgagttactgaaatggaaaatatttttatctccccccagtgtaactacagacaagaatgtagatagtgtacttaggtgtaaatgacagatggaatgaactttgggtgaaggcgagagcacagaagctcagtggtactgagctgggtttgagtgggtgggaccccatgactggttactgatctttgaaagcgtttcaggatttcaaagctacataagcgaattcacgtgttttagttatctaggtttgttttttccttgttatataggatgtttgcagttttcccatttgtatcaactcatacatctttgaagttttgtaattcagtatagctttggttatagattaaagttcactggaaaatcactgactaatccttttagcatgttccactgttccatagtataaagatacacagaacttgatggcttccaagtgtggttcaaacatccaaagcactcgagattagcaccatgtgaagaaattttaaaatattgtactgcaattaattttaaataacttagcactgcatatgtcagggagaaagccatggtagaattcaaacagaagctcctataagtgaaatgattcacttacatcatttaaataa

SEQ ID NO: 859 - DNA, 1099 bp, Homo sapiens
tcagtcctggtactctctagagtcaggtatttggaatgagtcagttgaggttcagggaggtaaaggggcttgcccaattcctcaaagctaatataaatagccaagaagggactcaaacccaggttttcttttatcatgccttttgccttttttcactataccatagctacttctggtagaactgtcatttctattaaagggaggataccaggcctaattcagaataacattctgtactatgtatgcaattgtttctaaggagaaaagtctgatttaaaaaaaaatatttttatacttttaggctgggtgccgtggctcatgcctgtaatcccagcactttgggaagctgaggtgggtggatcacctgaggtcagtagttcgagagcagcctggccaacatggtgaaaccctgtctctaccaaaaaacacaaaaattagctgggcgtggtggcagcacctgtaatcccagctacttgggaggctgaggcaggagaatcacttgaactcaggaggcggaggttgcagtgagccgagattgcaccattgcactccagcctgggcaacaaagggagacttcgtctcaagaaaaaaaaaaattggatactttacaccatttccagcaatgctagttatgcagtaatagcttaatatttcacttaaaaaaagattctgcctaaacctctctttatctcactagaagagctaaccctaaccactaccaccgccagttagtatcagggctgctgtaaattgttccaagggtacatttagtggtattgattgctgctaatagtaaaagaataaaagcaattatgaatgtacacaacaacttgttgctctaccccagtttcaccaggagataggatttagtcaagaggggatgtcacagaatctttatcctgattaggagctttttgaggggagggaccttgccttttttcattttgtatctccaggtatacagggtgaaaggcaccatagtagatgccaagcgaatgaatgaatgaacgagatggataggcccaaagacaactaaatcaaaaaacctgtgttgtttcagaggagaatgatccagtatcatttcccctttgggtaggag

SEQ ID NO: 860 - DNA, 1030 bp, Homo sapiens
agactgtattttcccttttcctgggagctctgggctcaagattttgcaggtgtgtcatctgatccatggcttgcatcgatcaaaactgtgccaatgcatatttaattagcaaggggaccctggatgcattatagccatcatccctatattgaatggactgtcagactctccgcacacttctccacccccaccgtcccctgaacccgtgctccctcccttgcctcgttgtttgggaagcttctgcattttgtctgagcagctaaaaagtttctttgtttttagctgctgatgcatacagcgccactgaggagaatacaaacaagtagagtcctaaagtgtttattttgtctaggaagacaagctaaaccaatttgattccttcggtaagattttcaaaccctgtagaaaaccgacaagaaaagcaaaaagaaaatgaatacactgttcaactcttcacgtatagaatttaaaaaaaaaaaaaagaattggttatattaggaataaagaagacttcggacaaatattttaataatagaattaaagaatactttctattatgatagaaggtattttattttaaaagctctgttttgatacttaaataagacatttgttgttggcaaatattttattgatcagtctaatttgcttgatgcaattcaccattctgacatgaatctgtcattaccattaggaaatccaatgcctgtacaaaagttatttatgatagaaggtgacaaagagttagagctggatgtatttttttttaaagtttctaaggttttgtgggtgtttctgttggtgagaattcttaaagtgcaggaggtttggagttttgccacagacaggttatttcatgggattatggtcactgttcattttcacacaggttccaaagcttgaatatccagacagtgttgtctgataaacagatgtaatgcaccaagtctgcttagaataaagagcaacagactgtgagcacatgtttaggactcatttaaactcatcagcatagtctagctcatagttc

SEQ ID NO: 861 - DNA, 1029 bp, Homo sapiens
cttgtgacctatcttgtaatcagcacaaattagttttagggcaggaaaatccagctgcatattagttttattagatgttcccaaacattttattgcaatattttggaaaaaacatccacaaacaaacctaagttttcaatgtgtttcctattcaatatgtattttgttttgaaggataattagattgtatgtttataattcctttgttcttaattcatcaaattgctgccttttgggaaaataatttcagcataggaaaattactctttttttcaccaacctgttctcagaaagggaaatgtatctttagtacacccccaactcccaaaaatgttctccacattctaaaaatgcttttaaaagttcaaaccattattcctcatttggttctaatgatattgaaatggttttttcctattttgagggtcacaattgctactgttaatctaatggctaaatgatctgtgcactgtgtctgcttttcatcttcattctctttttattggtgaggaaactgaggctcaaagcgattaagtaccttgcacaggtcaaatggcttctaagaggcagaatgtaatcattccttctctcaacattcaggaaatatttaatgagcccatactttattccagataccttggtagttgcacaggatacatcactgaataataaaatccctgcccctcaaggagcttaccttctagttgatggagacagataattaaaatatcaatgagaaaagtatctagtgcatgagatgataataagtgctatggagaaaaattaagaaagaaagaggaatagggagtccagagtagttttggtttgaaaggcaatgatggccacaaacacattgctaagaagttgacatttgaacaagacctagaaaaggtgagggagtgcgacacacagatttccttggggaagactagtgtggatggaatgaagacagcaaggtgagcaggagaaaaggaactcaggtaaaagcctggggcagttcatgcaggacagtggctgtttgacttcagc

SEQ ID NO: 862 - DNA, 1083 bp, Homo sapiens
gcacagccaggcattgtctgtcttgacatatcagggtacggaaaactcttatgctgtaagaagagtcacactaagccaaagtttaggaaccagcctgctccagtatgccttttggaggacttttcttttctaattcaccttgccttcctctgtcacatctaacccaatactgtccatataggaaaaattcagaaagtattgggttggtgaatgcagcacagattacctatttaaattaaagctgtgtctttagggaaaaaaacttctgggggatgggagcagtggcatgagcttggaaggatttttgcattctacagcaaaccacagctgctatggccttaatgtttgtgtccccccaaaattcatatgttgaaatcctgactccatggtgatggtattcagaagtggggccttttgggagactaggtcatgaggctagaaccctcttgaatggaactagtgctcttataaagagaacacagagagctagctagcccttctgccacgtgaggatgtggacggtgtgatctatgaggaagagtgctcccactgggtaataaatccgttggtgccttgatcttgcactttctagcccccagaagtgtgagaaatagatttctgttgtttataagctactttgtttatggtgtttcgttacagcagcccaaaaggactaagagaacaccaccacccaacaccagaaaatgggatttgcttaaaccaatctgagaatcagtcacctggataagtgtgtcgagtgatccattgaatcagccagcaatgcataaagaatcatttccagtacccacatatgactgtgcttctgttttgtgttttattaagttgctctggagtaatgccactatcagtgcttccccagcacaaggaggttggcaattgagttacctgtttgtgacagctaaactttcatgaatctttaggagatccatttgctagcatcttttaaagactctggatttttctgagcattttgtgatgataactgatgcatctgaagtagaggtgggagcccttctttgtcaagagttagaaaatacaggctgtcttgtcttcctataaatg

SEQ ID NO: 863 - DNA, 1062 bp, Homo sapiens
agggtttacagaccagaaatctgcttggcaaaggagttgctgaagactgtggcgtagaagctgcagagaaagtacctttatgattgatttccattcaagtcagactgactgcagtgtggtcatttttctaacccataactgctcacactgcagcagtctgctatctgcagggtgtctgaattatagcagtctatgttcgtgttacctcttatacaaattacttacactggtttctttttccatgcaaattcatcagttttacagcctctcacagccacagtcaggaaactctggcagagagcacaaattgataaaatgagttaatttttactatacttattttttttctttctaaaagccctttctcataggcagtgttcaggaagcatattacggtaaaagggagataacaaaggagttgaattttcttgccataaattactttccaagttaattccctttaacgatgattccagatttgcttgagttttcatagcattgtgcgttttacaactgtgcctttgatagaaagaagaacaagtattttcccatgttcagtccctttgtgccagtgacatgaactttcttacaagatctttgccactggaatgcaaaacaacactaaattgtgctgggtccatagaactctgtgctgctattggacttttcccctcccccggtcttcaaatacaagttcccaaagtctcactgagtgttttagatcatgtaatcagaagaaaaatatctctccattttttcatatttgtaagttggaaattgagttgggttacttattgccattctttcatattcctcggtggccatacagatttgaagaagggacaataatggtcagtctctgaaatgtaagccccacaagggcaggggttttctatatcttgtccactgatgtttctcaagcatctggaatgatgcctggctcactaaaagtgctccataaatattgttgaattccattgaatacagcctctctgaggatatgtactattaaccataggctggacaaactagtcatttcgttaatgctccctgctgacttcc

SEQ ID NO: 864 - DNA, 1024 bp, Homo sapiens
catccagtgactcaccagactgaacagaagtttaaaaggagtcctagaactacattaagttgcccaattgcttcctcccttggctttctttcaaccagaggtgcagtgtccaagagaaaggtggttgcgattgcttttaaacatgcacccatttgttatttcagctccacaaagcgcctcaagtctgtggaggatgaaatggacagtcctggtgaggagccattttatacaggccaagggcgctccccaggaagtggcagtcagtcaagtggatggcatgaagtggagccaggtaagcagagtggcggcacgggcatgtggctaacactgtgaaactgaaaatacgtgtggggtcccatgccacgcataaaagtgaagaaagaaagctcaaggtagttcactttttcaggatgagcacttgtttgtattgtaatctgattgccacattcataaaaggatggctgtgcaaagcagtagtaattcaactgaaatgcaagactggtgagatggtgtatgattttctgctcttacatattttcccctacaccacaatccagcatttgatttgcttttggtttttttgtttgttttgttttgtttgtttgtttgcttttttgagacagagtcttgccctgtcgcccgggctggagtacagtggcatgatcttggctcactgcaacctccttctccctggttcctccttcttctgcctcagcctcccgagtagctgggattacaggcacctgccaccacgcctggctaattttttgtatttttagtagagacggggtttcaccatgttggccaagctggtcaatttttgtatttttaaaagagacggggtttcaccatgttggccaggctggtctcaaactcctgaccttgtgattcacccacctcggcctcccaattgtttttgtttttatactatcttttggtttagtttttgaaattatcttttaatcctaataaaaatctatcaactttttcagcaggatcgataacattcgaaagaagaatgggt

SEQ ID NO: 865 - DNA, 1031 bp, Homo sapiens
actgtgattaattagaataaattgaaatcaaatacagaccgacttatcaggggactattctgtcacctctttgtttctgtgacaaatgcaaagcaattcacaacatctttttcattcacaggtggatttctctttttgtttgtttttaattctttaaatgttatcttttaggttgcacaaatcattgttccatgaattaaagtgtacttaccagttgatccttcttgccaggaatgccatctccaaccacactgaagaagtcggagaagtctggtttcagcagcccctccccttcacagacctcctccctgggaacggcgttcacacagcatcaccgacctgtcattacaggacccagaggtgagctgctccacaggcacccttggttgtgcttatatcatggcctttggacccaagtagcaaaatgagaaacaatgaggactccccctgaacactcgtgaggcagtgagtgttccaatttcttacccttgggggcagccttggaattttagagaccaaagagatttggcatcacattttttgtcctttcctaaggcaaaaagagaccaaatctgttttttgttggccagtgagatttttgcagaaagatgggaagtaacttgaattgaaccaaaatcaaatctgttctacaagttgtgtgtgtgtgtgtgtgagagagagagacagaatgtgtgtgtgtgtgcgcacatgcgcgtgcacacatgcatgcattgggtgagtatatttccatgtggtcaattacctgttttcaagtagtagctttttctcatccctgctgactctctttccataaaacctgatttcaatatgtggcattttgtgttgaggttgtttgcatcagggtgttgacgagcagtcttcattcactccttttgaagtggtagatagtttgtctggttttcattgcaatgttttcattatttttgtctcatatgcttttaagtttattattaaaatgtgtccacgagaaatatgatttgtatttcgcattaaagacaagccttaagcct

SEQ ID NO: 866 - DNA, 1050 bp, Homo sapiens
cttcttggtgctaggattcagcagggaatccctggccttatggaactttgattctagagagggaagaaagacagtgaacaaaatagtgagtacgaaaggtacgtaggatataagatggtgatatgtaagtgctacatagggaaatcaagccgagaggggagggatgcagctctaagcagggtgatcagaggagggctacttgcgaagggcaaatttgaacaaagtctggacaaagacgagagggtgagcaaggatgcagtaggaggagaggtttccaagcagaagaaccagccagtagaaaggcagaccaatgtggtgagatcagggaatgaaagcaagggggtgaggtcagagtggagtgaggatgcatttgggaccttggggatgtaaattacaccggttcttataggctcttataaggacttcagcatttaccctgagtgagatggggcagagaggtaatgccacctagattttaatagatacatcctgaaggttttgttgaaaatagattgtcaggagcaagaattaaagaattaaagcagggagttaaaaagctggatttttccaataaataaaatgagcgtcttctacatgccagccagcattctaggtataagggatataaaagtgaacaaaacagacaaaaatcccttgccctggtggagattacattttagtggaaggggataaacaataattaaaatataagtaaattagcgagttaaggaccagtaagtacaatggagaaaactaaaacaagcagggttgatagggaggggcacttattgcaatcttccaggcaagagttgctaatgacctgcaccaacgtgggagcaataggggtgatgagaagtaagcgggttccaggtatatttgaaaggtagagctggcaagatttgctgacacattagatgtgggttgagaagaattggtgatgatgcctgtgtttatgacctgagcaactaggatagagttgccagcagctgagatgggaagaccacaggaggggcatctctgggtgaggggtggagatcagaagttcggttt

SEQ ID NO: 867 - DNA, 1436 bp, Homo sapiens
caagtatgtgatgcacctaatctttatagtcacctaataggatagagctctactttatagatgtggaagctgagactaaggagattgttgattttcccaaggccatacaatatagtcaggagtggagcaagaatttgcacccagttctgtctgacagcaaggcctgtgctctctaaccactgtattatgttactgccttatgagctggtgagctcttttccctggggatattccaacagcaactgatgctcacttctcagggatactactggtggagtccctgcttttgtccctaagactgcattaaaatataatctttagcgtatacccccaaaaatggcaagcaaagtttcaaagagatatttgttcacttgtggttgtagcagcattctccacaatagccaaaaggtggaagcaacccaagtgtccattgacagatgaattggttaaacaaaatgtggtctatacatagaatggaatattactcagcctttaaaaggaaggaaattctgacatatgccacaacgtggatgaatcttgaagacattctgctcagtgaaataagccagtcacaacaaaataaatactgtatgattctacggatgtgaggtacctagagtagtcaaattcatagaaatgcaaagtagagtagtggctgccaggggttaggggcagggcagaatggtgagttagtgttaaaggggtacagagtttcagctttgcgagatgaaaagagttctggagatggatgttggtgatgtttgcacaacaatgtgaacataccaaatcccactgaactgtacactcaaaaatggttaagatggtaaatgttacattgtgtgtatttcaccacaatttttaaaacgtgatcattaaaaaagttctaaagtccttttcacctcttaggagtaaaaaattctgtaaaacagtcagagcaagtggactgttgatcagagtaattgtgtgctgactgctcagaaaagcactaattatcatgcccagcacatagtgggtactctgcatacattggctgagtctaaatggttcagaaagaactttaaaaatatgactttttcttattatattcataatacatgttaattgtggaaaatacagttgagaaaaataataaaaatcacttgtagtcctactgttaacatttctgtataaatccatccagagtgtttctgtgcatacaaatatattgcaaaaagtgagatcatattatatacgctgtttggtagcctgctgtttcttccccttaacaatatattatggccttctttccatgtaaattggaaaaattgaatattggcttttattgcatctattcatcatctgtaatgattggtggggaaagataacgtggataattgaaagccatttttcctcctctttcccttgtagtctgtttttttctccagagaattcctccc

SEQ ID NO: 868 - DNA, 1038 bp, Homo sapiens
agaacatctattttgccagattcctttttccacaaatttttagagctctggatactgtctactttggatttttatgaagagggaagaaaggatatttaaatgtctttatatgatgactcagacacatgtgccctgtaccattttcaaatccattttaagatgccagtatttttcaaaagttttagaaatttccttaaagctggtaatttccttaaagattatctactccagactcccatcatttttcagatacaactttaagaatattttggaataaagttcatatcattttaataaagtagcacctccaaataagaggggccaaagcctggggaactgaaacaacttgcaaggccccaaagctaatcagagacagagcaggactgaaatgcagggacctgttatgagtgaaggaagggactaatggtttaatatgtggcttagaaaatgggtgcatggtttccattttacaaaggtgttttataaaagcccaatatcattagactgactcaaacgcattgcaattccaaggaacaaatgcatgtaattcagaagttcactttgcaggatttactttcatagactgccgtgcaggggtgtgtgtgtgtgtgtgtgtgtgtgtgtgtgtgtgtgtgtgtctgtctgtctgtctgtctgtgtaacctgtgcttccgtctatgctcctggacagcttttttttgcatattttcctatcttctgatcttcacagtgcagacaaaggtcaaaattcccatctaccttcacaggcaaacactttaaagtgcttctacatgaggcaggttgtagggaggacctttgatttaaagttcagcatttacatttgtaattttgactaatttctgtgctagcattaattaaattgaaattatttaattagaataaaactgaaattgatcattaggattaatttaacctgatagactttgtgtgcctttctagacaaatattatgaaatatagtgataatgaagtagtgagaggtataatttcacatcttataatgattttagtatccagt

SEQ ID NO: 869 - DNA, 1044 bp, Homo sapiens
aggggagctatttttgctttttatgttttttattgttaaacttgtatccctttaaaaactgaaggaaattaaaaaaaaaaaacaaaaaaacaaatctaatggtgcttttaccacaatatgttaactacattaaatgctaattaattattttctgttatcaaagcacatgactaaaatgaaatcatggtatctgttaattttataagctagaagtcactataatggattacgccaattctaaaaaattttacacctatctggcatcataggatttatcagttatcagacacctcattgtaccagagattgtccagaagttttaaagacctttgcatccctgaactgggctatgggaaataataatagtaataataataataataataatgatgaaaccaatactgacacaaatgctggtgcccattcagatcaagggtacttgttagggaaaaaaaaaaaagtttgcacccccaaacgtcctgtatcttatgaaaaaaaaaacaaaaaacaaaaacaaaaaaaaaacacaaaaaaccacagaaacaaaaacaaaaaaaagtgcaagtgatttttctaccagacagcgaagcacccctttgcttcccatgcgacttcaagaaggtttcctatactatacatatatatacgttctggttggcaagccctgctgatcagagaaagtctctgcatgttctagtgttagtaactaatttttatatagttaatgtaggataaagtagagtgcattaagacacaatattgtaatccctactctaggcacttgcctttaaactatgtttttcagcccttcagaagggttctactactgtcctatacaatcaagtaactgaaattcttgggaagacactttgctcctcatctttctccccgaaacaatgttgttttgttttgttttttttccttaatttgcacgaaaacaaaaattccatatcaatgtgccttgccctggatagcgattatttgtggaattgttgcacatgctcctctattgaaaggggtttttccctagtcaagcatttggag

SEQ ID NO: 870 - DNA, 1093 bp, Homo sapiens
tgcatgaccattgctatgttttcttccttagggttttgtgtagatttggatgccttttttaaagcccttattttaggttccggtgcaaatggggagaaatttagtgcctgtcaatacccttccttttaagtcagtgggatagatcgatgctgaagatgtagagctcacttattttttgtgttcgtacagctgtccagccagtaaagtttggagacaaggaattgggtccacctaccatataacgcttgacaagtcatttaattctggtcctccagaatctggtcccatttgcaaatggtctgccttacagagatttggcgaggttgaaagaaaagaatgttcaagaatgtgtcttgtaatctgtaagctgttattctcctgctttttgttcctcccttatgtttaattccggtaaaattatggagttgtgatctttttattgggaagaactcaagtttgtgagtgctcttactcagatagttactttaagaaaaggcatagagaccatatgagctgaactgatgaagtctttcctaaaaacacggtggaggaagaaaaaacaaaaccaaacagggatctttctggaaaggcatagattaaaactttactacagtaagccactctcacacgtgggcatgggccactttatattgggttagttaggattgaaatgtgctgtaaatgcacaatacacacaagattttgaacagatttcatgtaaaaaggaatctaaaatatcttattaatttttattttttgagacacagtttcactctgttgcgaaggctggagccgcctcctgggttcaagtgattctcgtgcctcagtctcccaagtagctgggattacaggcgtgcgccaccacaccctgctaatttttgcatttttagtagagacggggtttcaccatgttgctcaggctggtctctaacttctgacctcgtgatccacccgcctcggcctcccaaagtgctggaattacaagtgtgagccactgatctgaatatgtttattcttaagagggtttagtttaccaaagcacttacactgctatgtgtatactgccttaatgccttttttttttttttttttt

SEQ ID NO: 871 - DNA, 1059 bp, Homo sapiens
aatttggaagtaatctctatgaattttcaaggagggtttggcctctattgataaatattggacaagtagacagtgaagatggggtgagaggaggttattggtgtagttgagaatattgttaccccagtgtggtatgggtagagatcagattggaaggggttcgggaggtttgggttcatgcagtaatggaggcagtgtccatacttgcaaaaccttggcggtggggtcctatagattgtttttgtttatttttctaggcagatagcttttaaagtgtgtctgtgtgtttaaggatgcactaccaaattaggtaattagttaataacttctgtgaaaaacactctgaagagctctgttatataattaaataatttatttgataaatgtactaagtaaagtagtaccataggcaacaaactgcttaactttaatagatttttaaaaatcaggttattagatcacttaaaaaatttcttttcttacatgattaagggatcaaagattaaaggaaaatgatcaaatattggccattaatcacacgccattggatcagaacatttcccatcagcaagcaattgcattattacaacaaaccactggatctttgagactgattgtggccagggaaccagtccacacaaaaagcagtacttctagcagcctaaatgatacaactctgcctgaaacagtgagttgcaaatttgaaaaaatacttaattttgaataatgccattgatcgtaagaagtgtaaagacatttagaaggtgtcattttacctttctttccttttttttttttgagatggagtttcgctcttgttgcccaggctggagtgcagtggccagatcttggctcactgcaacctccacctcctggaatcaagtgattctcctgcctcagcctcccgagtagctgggactacaggcgcccaccatcacacttggctatttcttttgtatttttagtagagacggggtttcatcattttggccaggctggtctcgaactcctgccctcaggtgatccacctgccttggcctctcaaagtgctaggattac

SEQ ID NO: 872 - DNA, 1061 bp, Homo sapiens
tatccagacttgggtatttggaagatgttttcttgagaatggatgatgtgaacctgttatttcaaggaaaacaactgacactgtttgttagcaacaataaaatttgagcttaagcaaaaaattagaattttggaaaatttgtattttaccataagcatgacatttccctaatacttaaaagcttttctaaggctgggcgtggtggctcatgcctgtaatcccagcactttgggaagccaaggtgggaggctctcttgagcccaggagttcgataccagcctgtgcaatatggcaaaaccctgtctctacaaaagacacaaaagttagctgggcatggtgctacttgggaggctgaggtgggaggaggtagaggctgctttgagccgagattgtggcactgaactccatccagcctgggcgacagagtaagaccctgtctcaagaaaaaaaataaaaacaaaagaaaagaaaggcatttctgattagattgttgattgatattaaccaatatgattgtcttgatattatatgatgaaatatgtcggtatttggaaggtctgcataactgtgaatggatattctattttcttccttttttctttctttctttcttttttttttttttttttttttttagcatagtcttgctcttttgcctaggctagagtgcagtggcgtgatcctatctcactgcagcctcgacctcccaggctcaagcagtcctcctacctcagtctcccgagtagttggtactacaggcatgtaccaccatgctaggctaatttatttttatttttatttttttgagacagggtctcactctgtcacccaggctggagtgcagtggtgctatcttggctgactgcagcctctgcctctggggctcaagtgatccccccacctcagcttctgggggagctgagactacagacccaggccaccatgcctagctagtttttctattttttgtagaggtggggtttcaccatgttgcccaggctgatttcaaattcctgagctcaagtgatcctcccgccttggcctcccaaagtgctggaatt

SEQ ID NO: 873 - DNA, 1043 bp, Homo sapiens
taacagttttattttttttaagagatagggtctcactatgttgtccaggttggtctcaaactcataggctaaagtgatcctcccgtgtttccctcccaaagtgttaggattacaggtggagccactgaactcggcccatttttttatcgtttgaagaactttctttaaattcttgctgaagaaactaaattagtgctgtgacctaaagtttccagaatttagtcttgcatgtttcctagaaatgtgatgggtctcactgttatgaaagatgatgcctgggaagaacacaggatccctatgtcatgttcagaagccaaaacccaggtttgactcctttgcccacattagaggtagtatgcagagtaacattgtgcagtgtgcgttagttttttagatattataaggagtcctttaatgaatgtttcctaaaaatcaagacccgggaatacaggctttaaaaaaggcttcaggttcagatgttcaaggaaagaaaagtggtttatcttctgagtgtaggcagtagttgttcttgaacttaaaacgtttttggtaagctttatttctgttggcaaggtgccagaagacaacttcgacagttttttttccaacattttttagcatcctgtcactaaacattcccattctggataagcagaggccagggcaattgaaacttagagaagccttgtaggcggcctcctcaacaattgataagaaaggaaagatgttcttgcctgagtggtttcagaagtcatagtgtaattctgcatgggatataagtgctgagcctaccttaaactcttctgtcacatgcagttttaagaatgtattttctttttttttttttttttgagacagagtttcgcccttgttgcccaggctggagtgcagtggcacaatcttggctcaccgcaacctctgcctcccgggttcaagcgattctcctgcctcagcctctctagtagctaggattacaggcatgcaccaccatgcccggctaattttgtattttcagtagagacgaggtttctccctgttggtca

SEQ ID NO: 874 - DNA, 1034 bp, Homo sapiens
agacatcagcaaagctggaacagtggggcagtgctttgattgtcatatgggaatggaggccctcaaggatgggagcaaaggggagtatggggatgggggaaaggtaactgagacttccgttaatcccacctgagcatgacagtattttcaccccatatctgcaacattgccaactgattggaccctgattccaaagtttctagatgaaataaaaagcagaagtggtagtgagtttaccagaaaatttgttcaagatgaatgcatggaaagagtttcagtgatgattataggaaaagttttaggctgggtgtggtggctcacacctgcaattctagcactttgggaggccaaggcaggaggatcacttgagtccaggagttcgagaccagcctgggcaacatagggagaccccatctctatttaaaaaaaaaaaaaaagttttaaaagagtatctacattgcttagtcagaggtcatttatgattttctactaaggcaagtaccccaaatatactatgaacttatggattttttttttttttgagacggagtctcactgtgtcacccatgctggagtgcagtggcacaatctcggctcactacaacttcctcctcccaggttcaagtgattctcctgcctcagcctcctgagtagctgggattacaggcgtgtgccaccacacccggctaatttttttgtatttttagtagagatggggtttcaccatgttggccaggctggtcttgaactcctgacctcatgatccgcccaccttggcctcccaaagtgttgggattacaggcgtgagccaccgcacctggccaaatttatggacttaaggaagacatttgatgcacaattcatcatattcttataaacatgataaaaacaattggctgataatttataatgaattactggggtatatcctatgagtgattaatgggtttatgcctgcataagtacaggtctctaacataggccataggactctatgcacaagttgccttggttattctttttctcgggaaatg

SEQ ID NO: 875 - DNA, 1074 bp, Homo sapiens
tctaattgaaataacttgcttctgtgtttcaggtgtctggagtagatttgcagaatgcctcacacagcgaagcagttgaggccattaagaatgcaggaaaccctgtggtgttcattgttcagagtttgtcatccactccacgagtaagttttagttcatattttcaaaaagtttaacaacactctgtatacctgcagaccaagctttggcctctaagtattttccacatattttcattgtagttcccaaactatatttaaagtatgagcttcataaaaatttagtcataaggttcccttttttcccctccagttttgatcttctggtcaaattggagtcattacagtgtgcattggtttaagttactgcttctggaatcaaacagacctgttttcaatttcttgattccttatttaccagctttgctaacttgcaggttacttttctgagccagttactttgtttatgaaatactttgaacagagggtcaggtgtaaaaacattgtagagatactatcacatgttgtgtatatttattaaaggatgtaaaaataaaaacgtgttgacatgttgtactgttgtgtgttctaatgttggagattccaaatgtaaaaacagcaatatttaatcataaaatttttctttttcttctttttttgagatggagtcttgctctgttgcccagtctggagtgcagtggcacgatctcagctcactgcaatctctgcctcccaggttcaagtgattcctgtgcctcagcctcccgagtagctgggattacaagcatgtgccaccatgctccactaatttttgtatttttagtagagacgaggtttcaccttgttggctaggctggtctcaaactcctgacctcaagtgatctgcgcaccttggcctcccaaagtgctgttattacaggtgtgagccactgcgcctgacctacaatttttcttctgtaattaattactcctttggtatggaattggaactctgatatgaaatgtcagtggcaggatgtggattttatactacaatgtgcaacagaaacatcacccttaaaactggaagcaatat

SEQ ID NO: 876 - DNA, 1046 bp, Homo sapiens
tacactctgaaaaccgaaaccactgatcgaaatggtctttaaagtcatgggagcccataagtttacttaggagtagtgtgtagacagcaacaagaagcaaacccagcacctgctccatgagccagcaaggagcacttccaggagattaggggattgtgttgtttatgagagaaaggtgtttcaagaaggctgtcactgaccttcaatggtcaagggtggaatgctgctaagaagttgaggaggctggagacatgaaaataaccattgaatttaacaagaaattgatgaggaagaagagaaagaggacgcttgataaaataactgtagtgtgcgggacgcaggggctcacccctgtaatcccagcactttgggaggccgaggtgggtggatcacctgaggtcaggagttcaagaccagcctggccaacatggtgaaaccccgtctctactaaaaatacaaaaattagctgggtgtggtgttgcacacctgtagtcccaactagtcgggaggctgaggcacaagtatcacttgaacctggaggcagaggttgcagtgagccgagattgcgccactgcactccagcctaggcaacagaggaaggctctgtccgaccccctcaaaaaataataagcatagtaattattgttcagattattatgaaacttaaatgtaacaaccaatatagagagtttggtatgtaatgggcatttctattttagctcacttatcttgcatagttgcacatattttatgacatcctggtgtctaattatcgtaagaagtcttataattgaactctggttcaattagtgaaattaattgagaattatgaaaaaattaagaaacaatgtactgcatcaatgcgtagctcttggcaaaactaccattatcaaaggttgcaggatttgtcaaaggtatgtattgatggtgcaggaacttttgacttaactttgtggaaatggcctttcatacctggaattaaaatcagacgcctgtaatcccagcactttgggaggctgaggcaggcgaattacaaggtcaggagt

SEQ ID NO: 877 - DNA, 1095 bp, Homo sapiens
tccatagagtaaagtgaaagcaaattaggccaaatgcggtgtctcacacctgtaatcccagcactttgggtggccaacccgggtgggtcacctgaagtcaggagttcaagaccagcctggccaatgtggtgaaactccatctctaccaaaaatacaaaaattagcctggcatggtggtgggcccctgtaaccccagctactcaggaggctgaggcaggagaattgcttaaacctgggaggcagaggttgcagtgagtcgagattgcatcattgcactccagcctgggcgacaagagcgagacttcatctcaaaaaaaaaaaaaaaaagcaagtttattaggaaagtaaaggaataaagaatggctactccatagagcagctggttgcccatttttatggttatttcttgattatatgctaaacaagaggtggatgccttccctttttagaccatatagggtaacttcctgatgttaccgtggcatttgtaaactgtcatggcgctggtgggagtgtagcagtgaggacaaccagaggtcactctcgtggccatcttggttctggcgggttttggccggcttctttactgcaagctgttgtatcagcaagatctttatgacctgtatcttgtgctgacctgtctcatcctgtgacttagaatgccttcaacatctgggaatgcagctcagtaggtttcagccttattttacccagctcctatttaagatggagttgctctggttcaaacacctctgacaatagaattctattgcagagttgaattgcatggagaggattaaaaatattcagtttctcattctttgtaagattaatacttgcaaatcaagcattagtcagttaactaaatgcttactattagccattttatttttatttagatatactaagaactgcctttttattcctaaaatcttgaattttctaaacttgcttttgatagttaaactatagttttactaatttaaccttaaactatctctaagagttgaactttctattcaaggaaagatacctttcagaagcattcaatgtctgcttttcataagattgacttgattagatgttagaaaaaaa

SEQ ID NO: 878 - DNA, 1031 bp, Homo sapiens
gtcatccataattttacttgcctaataataactactgccacagctggccaggtgcaacaggaagaccatcgccatcaactctttcttccaaaccttggttgcttctccccacttaaaacctgtttctgcaaagaagtcacttccaggattacttttcttttcttgttcttttataatatagcaccacgaatgggacccacattgggtcgtaacactgactagcataatcattacataaataaagtcaaagatgaccttatgtaaccaatattattcattgcctcagtttgtttcctttggcttatgtttagagacttcctcagagatgagacaaaagtgatgctggtagtaaaaatgatgaaagttagagccagtgtactcagttattgctagcactgtgcatatgcattgtacatatttgtattcggtattcttaaaaatcctttatggtaacaactattattatctccattttatggattagaaactgggtaaatagtatacctaatattgcagaactaagtgaataagtgtggataagaactcaggcttgccagactccaagacccgtgttacagccactaaagtatactatgttccctgtgggattctttttttttttttttttgagacggagtttcactcttgttgcccaggctggagtgcaatagcacgatctcggttcactgcaacctctgcctcccaagttcaagagattttcctgcctcagcctcccgagtagccaggattacaggcaagtgccaccatgcccagctaatatttgtatttttagtagagatggggtttctccatgttggtcagggtggtctcgaactcccgacctcgggtaatccacccgcctcagcctcctaaagtgctgggattacaggcgtgagtcaccaggcctggtccccatgggacttctttaaccaacccaatttgtttagattcaggagattcctgatttttgatgctttagtcttcagggaatcatgtacattaagtcactctgttatgttatacatatctag

SEQ ID NO: 879 - DNA, 1090 bp, Homo sapiens
gctgctctcagctcctagaggtcccccacagtccttgtcaggaagccccctccatcctgaagcaaacaatggtgcttccaatctctgacttcctaggcattccacaaagaatttaattggtttagaattcatttaagtcaacctactaatttaaggatttaggatatgaggttctaagtgaaatctccagatttgaagggcttgtatgattaggtcaggtccaaactgataatctccctttatcttacagtcagctgtgacttatcatatagtttaattatggaagtgaaatttgtctgtaaactgggggcaggaattttgggagacttgttagcattttgtctaacacaagttatatgatttttaccaatgtgagtttcatttttataacaaagcagaattcaaatcaggatccagaatgtgtgttttccacaaacataaatatattctacaaacaagaagctgaattagaggtattcttagcatgcttttggagaaaaactaaattgagatcccttgagtagtgtattagtctgttctcacactgctatgaaaatactgagactgggtaatttataaaggaaagagatttaactgacagttcagcgtgtctgggggggcctcaagaaacttataatcacggcgcaaggggaagcaaagcaccttcttcacaaggcagcaggaaggagaatgaatgcatgaggaactaccacacacttataaaaccatcagctctcctgagaactcactcactgtcacaagaacagcatgggggaaactgcccccatgattcagttacctccacctggtctctcctttgacacgtggggattatggggactacgattcaagatgagattttgggtgaggacacagccaaaccatatcaggtattaatgccacaattgtagttgttcatttacttagctgcattcttcactaattgctaatatcatcaaaggcaagaatggtcttttatccatttttgtgtacatagtataaatatttgttaaataaagaaatgtatatattcaaaataaaatcaaagctatgtagttgagtttcaaccaatcaaagtaaccaccagcca

SEQ ID NO: 880 - DNA, 1103 bp, Homo sapiens
gcttagagaactcatcctactctgtcaaatgaaagaccaaggcctcttaccttttctgatgtttgcatcgtattccttaaactcctccctgatgtccttcaatgtccacttctcagagatgtatactcgttgattagaagttttatcagcaataccctcagaagaagtaaaagatagctctccagactcactcactggggttattatcaggcttgggaattatagagaagaaaaacttcagaactaaatcctttatcttggattattggcagacttgaactgtttttggaattgaacaaatgaagtggagaaagaatgagaatgcagtctctaggaccctctttctatgcattttccttccctgagatccattgccagagatcccaggctatgaatgagatcccaggctgtgaatcccaggatatgaatgagaatgaggtctctaggaccctctttctatgcattttccttccctgataccattgccagagatcccaggctatagacaatgtgttctaccaaacctaaaaggcaccatagcagagtaatgatgctggttctttggcattagaattttagatatttaactgtgggactctggacaaatgacagcctttctaagttaaatctgcttcttcatttgtgccactgtggtgataacaaaaatctacctcttaagattgtcatgtgaattaattaagataatgaatatgaagaactttacccagtgcctatttaaactgagttcagttattattaattataaacatttgtattaaagtagatccttaactttgtctgtgtgtctttggtatattacctggacagtgaaatgtggctttgttcctagacaattgcatatttgtttttcaacatcaaactttaaaaaagtgatttggctgggcaaggtggctcacacctgtaatcccagctctttgggaggctgaggcacgtggatcacttgagcctaggagtttgagaccagcctcggcaacatagtgagaccccatctcttattttaaaaaaaaataaaataggctggacagggtggctcatgcctgtaatcccagcactttgggaggccgaggtgggcggatcaccag

SEQ ID NO: 881 - DNA, 1051 bp, Homo sapiens
tgtaaccttaactgtgctgtcatgagcctcgggcctgatcacaagatagatgttgttgtttagaatatccacaggcagatgaagttctgagtgggtatgaaaagcaccctcaactaaaatgcaccttcattcttatttcttgccctctctgctcaggagaaatggctgaggtttcatgtgaatttcccaaatcaacaatcatctcctaatgtttcccagttcctgtcacctgttggcgaggttgatttctaaaacttaaatgagtctacctgttttgcatttaatttcagtgttccgatttctttttttttttttttttttttttttgagacggagtctcactctgtcacccaggctggagtgcaatggcgcaatcttggctcactgcaacctcggcctcccaggttggagcgattctcctgcctcagcctcccgagtagctgggattacaggcatgcatcaccacactgggtttatttttgtttttttagtagagatggagcttccccatgtgggccaggctggtcttgaacttctgacctcaggtgatctgcctgccttggcctcccaaagtgctgggattccaggcgtgagccactgcgcccagcccagtattctgattttaaccaactggttctgattatatttaccaaaactggagttaacttctctttccttatactcttctctccctatcccctactcacaccgaggcttaacagcaacctcagatctcatccaatggacagaaacaaatgttaagcaacttgtcatctcactcatgatttacttatgctaattgtctcttcaagtaagcaagaaaacattagcagtgtaattaatttaccagtgatccccaagatgaaataccagattctcctatgggaaattactgtgctgtcttctgtatgacttatggtcaaataagtctcaaattcatttctctggatagatctttatatgctagtcattggtgattttgatgagtcaatttacagactgtaatcttctaaaaattctgaaagactaattgttttctgtgccatataaa

SEQ ID NO: 882 - DNA, 1118 bp, Homo sapiens
ttacaggcgtgagctatcgcttccggcccttgaaataataagtttttactacttatactattttactgtaggtctactaaataggatattttgtaatgcgacccttaatccatagcaggctgattttaaaaattcagtagcttctgttttttgttctttaagaacagtgtggtatgcttcttcatttaagcaataaatattgagtgcttattggcaggcattaggttttcaaatgttaatttctaatttgtaccattcccttggtaaatttgttttcaaaattgatgattttgttgccaaaactgataaccaaaaactaatgaaactttctctgtgattaacagatataattggtgattacaactttcctctataaattaactcttgacactccttgggatttgaagaaaaaaatgcctggtgtcatacctagtgaaagtaatggactttcaagaggtagcccttcaaagaaaaacagactttccttaaagttttttcagaaaaaggaaactaagagagctttggatttcacagattctcaagaaaatgaagaaaaagcttctgaatatagagcatctgaaatgtatgtatcttacatttctgtactttaaaaattctacagtaaagcagcagtgaacttggttgacaactccagtctgacttgatagtctgtagcggcacaaaaaagtacgcttcagtgtacttcttagtcaaatctagcagtttatagtaggaacagcaaaactggtggttccccgtaggaatcacatcgataatgtttaactcatgttaacactgtgctcagccatttagactaacttggagaaatatttgttgactaaaattgtctttctgagtttaaatttgattatttgtagtgcaaaacatctgtgtaggggtaaaaggttttatatatatatatatatatatttgtttggttcagaagacttgacagttataagacattttaaactctagtcatgtaactagtcatacctgttggaggcatatgattgcaaattataaaaataaactttaagtaatgcttttgatgcaaataaattatttagctacagaaaataaatcagaacaaagtggaatactttattccaccacca

SEQ ID NO: 883 - DNA, 1055 bp, Homo sapiens
cattttgactaaaacctggtgtatggtaagcattatctaagtattagttattaatatatttagaagaggatcaaagtattataatgaaaatagggtacaatttactcttacttttagttacagataagaaattccaaattagtgctgaataaatgtcttgacatttaaaaaatgaaataatttatgattttccttacatgaattaatttctatataggctttatgtactgtatcttcaaaactagaatagatgaaatggaaatttttatttatagggaactcaaccctatgtatgaaggatatctacagcatgatgcacaggaagtattacaatgtattttgggaaacattcaagaaacatgccaactcctaaaaaaagaagaagtaaaaaatgtggcagaattacctactaaggtagaagaaatacctcatccgaaagaggaaatgaatggtattaacagcatagagatggacagtatgaggcattctgaagactttaaagagaaactcccaaaaggaaatgggaaaagaaaaagtgacactgaatttggtaacatgaagaaaaaagttaaattatccaaggaacaccagtcattggaagagaaccagagacaaactagatcaaaaagaaaagctacaagtgatacattagagagtcctcctaaaataattcccaagtatatttctgaaaatgagagtccaagaccctcacaaaagaaatcaagagttaaaataaattggttaaagtctgcaactaagcaacccagcattctttctaaattttgtagtctgggaaaaataacaacaaaccaaggagtcaaaggacaatctaaagaaaatgaatgtgatcctgaagaggacttggggaagtgtgaaagtgataacacaactaatggttgtggacttgaatctccaggaaatactgttacacctgtaaatgttaatgaagttaaacccataaacaaaggttagtataattcttagactttgataggtagaagcattagcagctacagaattagaattttctcttcctagatacatgtacaatataa

SEQ ID NO: 884 - DNA, 1040 bp, Homo sapiens
ggtttacctatcacatattgaaagttggcaattaaatgtaaacagactaggcttattttgtttttgctgtctatcatattttttggccgatcaaatatatttaaaaggtatgtatactgttgaggatgcacttatgaaagtagtttctgaaagtaaaaatctctttagttatttaggaatgggtcggtcaattgaaattaaatgctaattttgaacctgaaactttgtggtttattttttgaatgcctgagagaagtatttgagtgaaaggattctcttttttagtttctccagagccaaaaacagaaatgaagaccctgagatgggcaatttcacaatttgcttcagtagaaaggattgtaggagaagataaatatttctgtgaaaactgccatcattatactgaagctgaacgaagtcttttgtttgacaaaatgcctgaagttataactattcatttgaagtgctttgctgctagtggtttggagtaagtattgtaaataagaactatatgaagaaaatgagctgctgtagaagataagtcttgttcaaaatgctgtaatagtaggaatataaagtactgaaatgaagtagattgtaaagattgcttcagtaaagttttgttcttattaacagtttccctgtaaaaatgaaacaacttaaatccttttgatatgaatacatattctattaagtatgatttcttctccttttttttttgaaacagggtctcattccagttgtccaggctggagtgtagtggcacagcctcagctcactgcagtcttgacctcccaggctcaggtggttctcccacctcagccttctgagtagctgggactacaggtgcatgccaccatgcccagctaattttttgtatttttagtagagacaggatttcaccatgttgcccagtctgatcttgaacttctggactcaagcaatccacctgccttagcctcacaaagtgctgggattacaggcgtgagccaccatgcccggccagtttctttattcatcttttcatattcattccctct

SEQ ID NO: 885 - DNA, 2063 bp, Homo sapiens
attcaaagttggggtcttgttttgattctgcttttctgatatatgaacactggatattaagggttcattcagatttttacttggtttcagattggggtataacattttgaatttaaaatagaactgcaggaaaccttttctttttttcctcccaaaggtttgattgttatggtggtggactttccaagatcaacactcctttattgacacctcttaaattgtcactagaagaatggagcacaaagccaactaacgacagctatggattatttgcggttgtgatgcatagtggcattacaattagtagtgggcattacactgcttctgttaaagtcactgaccttaacagtttagaactagataaaggaaattttgtggttgaccaaatgtgtgaaataggtaagccagaaccattgaatgaggaggaagcaaggggtgtggttgagaattataatgatgaagaagtgtcaattagagttggtggaaatacacagccaagtaaagttttgaacaaaaaaaatgtagaagctattggacttcttggaggacaaaagagcaaagcagattatgagctatacaacaaagcctctaatcctgataaggttgctagtacagcgtttgctgaaaatagaaattctgagactagtgatactactgggacccatgaatctgatagaaacaaggaatccagtgaccaaacaggcattaatattagtggatttgagaacaaaatttcatacgtagtgcaaagcttaaaggagtatgaggggaagtggttgctttttgatgattctgaagtcaaagttactgaagagaaggactttctgaattctctttccccttctacatctcctacttctactccttacttgctattttataagaaattatagagtgagtgtattttccttgtgtatatattaaacacacccatacaaacattggtaaagttgattacatcaaagaatctttagcttatcttttgaagctactggatattattggtctctctaggtttttatataaatagtgaaatttgaattactgaaaaccatgttaatttttagaactcattttcctcagtagagactagtgatgcattagcttctgggaacaaacttgtatcggttcttaattaaattatccaaaacggaggcatttaaacacttggatttacaccagtcttttgtgtttgctttttaaaataaagtgctcgtatttgtattctccatattttggagtaattatctacatgatgtttatagttcctgtggtttttcacccaagaagcagaatctcattcagtacatttagttttataagagtcatgaagctaaatccttgggctatgtcagaggcacaaagtctagaatgtgtgtattcacaatggtgtatgtacattttgtgccttgattcacttagaagtgtctcagaaaacctggacagttcgcttctacacaagaattttatatgtatttatgaagatgattctgtaccctagtatatctttttgggcatggactaatttgtatctgtttaactcatattctgcacgatctgtatatagtacatcaaacttagaggtgtgaccttaaatttaactttttttaaaaactgggaggtcaataaaatttaaactgcttaactatgtatatgaatatttgaattttttacttgtatatttttataaatacagctgagttttcttaaagcgaataagtgtgtgtatatatatatgtatatatatgagagaataagcatgcataattacctttattactgaatactttctgacagtgcaggagtttttcaaagaggagaaattgtgcttagtccagccaagctgtcatacttaaaagaggtttataatgaaatctgttgcatctaattgtcctttaaagtagacatgatttaatggaatccaaaactggaaaagttaagatgatgctttgggcacacataaaaacttggttaaaatttcattttaaactagtatactgaagtggtaagtgatgaatgatttcatgacttgttaatggacattcttggtactaagtttttcc

SEQ ID NO: 886 - DNA, 1104 bp, Homo sapiens
cattaatttggggctatctatgatttttattctgctaggtttggaactagttcttgagtcaaccctttaattgttctctgccattgtcaataataaaaattttgaagtcccactcggtaaaattagtgtaaacattcacatatttaatagtacctttaaaataagcattactacatttaaaatggttccaaaatgaatctataaatggtaatataaattaaaaaatacgaacttaaagtgaataaatttttaaccttagctatggtataaataatggtaaatgtatagtgtacctttgagtcattaaaatgtcttaaaagataacagcttgttaccagaacattagaaaccatagccatgattctcaagcgttaacaatctacatttgatattttcttggccactgcattcttcaatgaataataatttccagaattccattccatgttgttttccaatagatcttttcacactcgatgttgaatacatggctctttgcagatgaataaaacaagtgcattcagtttagagatccattttgcgaaggctcattcgactgaaggaatctctgggaaaaaaatgagaggacatagttagttaaagagaacaatttttgcatatacctttaaatgtcttacatggttttttctgccagttaccttaaagttttgccaccatttcttactaacttccaagttggatgctcatcctacctactctgccttatattttggcttatagatttagctatagaagtgtattacagtcaccacttactggtcttttgtattcgtttgtctgactgatgctgcagatattgtaataaacaagacaaggacttaagggataatgggagagattttaggaaaagatttggggttttttacacggcaaaaggcaggtgtttattaaattttaagtcttaaaccagttctcaaactttgtctcaggtcccttttacactcttaaaaattattgagaaccccaggaatcttttatgtgggctatatatggatgtttatcatatcagaaattaaaactaagaacatcttaagttactataaaataacccattacatgttactataaatagcattgcttatt

SEQ ID NO: 887 - DNA, 1315 bp, Homo sapiens
tccttccaattcctgtttatatctctgttttcccaaagagagaattctgattctcaattatatcactatttttactcatctaacctatcctacaacacacataaaatagttttggaattactagactgactgataccgcttccagcaacagatttaccaagtaaagatttctttgccattttatgttcttagaatatatcccactaaaggtatatatagtcaaaataggtgttcaaagttatttgaattattttttctgtgtgattatgttatgaatgtaaaatatagttaggttcctactaaattactttttaatatactctttgtaaaatcagttatctgtaaaactactaaagtgacataatttaaaactttgtaatatatagttatagagaactctagaacagttatatcagctggagaatattaagttttaagacttgtaagctctaaacttgtagctctattttttcagttataatgatatttaaaattaggagtgcaagaaaagtgacatcaagtgattccatttgtaaaccaaaacaattgtgtttgtgaacattttaaacaatgctcttcttttaactgatgatacaattcaagcattaatctttaacaatagacataattgttgggggtactttaactaattcccaagtaataggtctaatgttttcctgtatttataaccagaatggaaagatttatgttttttgttaagtccttctttgtatttgaagaatacttgttgtgactgtattttaccctgtgatattattcatgtgtgaatattctcattggaaagggggaaaatatgtctcttaatagttatgatactttatatctctattgtgagatataaccacattcagccttatggttagttataaccattttgcttattagaatgtaagattaatgagggcagatactgggtttcatggctcattgtatctccctcagtgccttgtaggagtaaccactcaaatacttgatgaataaatgtgatattttgtgtttaaattacatgtagtactagcttcagtaatatggatgcacctttttcttggcaagagtaactaatataatgggtcttggaaatggtcttatccattgtcgtagtctgtctttcattgcttataacagaataactgaaactgggtaatttatgtaaaaaaggaatttattccttatagttaacaaaagctgaaaagtccaaggttgaggagctacatttggtgagggccttcttgctggtggggattctgcagagtcctgaggtggtgcagggcatcacatggtgaaggagctaaac

SEQ ID NO: 888 - DNA, 1101 bp, Homo sapiens
taggtgtatatatttatggggtacatgagatgttttgatatagacatgaaatgtgtcatacttacatcatgaaaaatggggtatccattccctcaagcatatatcctttgtattacaaacaatccagttatgctcttttagttatttttaaatgttcaattaaattattattgactataatcccccgttgtgctatcaaatactgggtcatattcattctttctatttttttttttttgtacccattaaccattcccacctctccccaaccttctcattacccttcctagccgctggtaaccatccttccactctctgcctccatggatttgtcacagcatcttatcttgcttttgtatttacttaggcatcattatctaagatatagacttccccatataacatgtctaattgctcactgtcttcattttttccccatccagattaaggcatcttggttttcacacttgctgaggactgtccagagtattctggatggctggtgatgagaactgtctgaaccaaaaagtcttccctgtggccttctttctttcagacttagaaagaagatacctgcatgcacatactctcattaaaaaattttggatctagaagaccaagcttggtggctttttaaaaataatttttttaaattctaaaaataataaatgtttttgtataagatttggaaaatgtgggcaactgtggtataaaaataaccacagagaaactacttttaacattttgctgtacttctttcttactttctaactcccttcattcccccttcgctgtccctgcgcttgcctgtgtcatatgacacataagtttcagattctgcatagtgtttccccattttaggagacatttttaatggatgcataatccatcatgtggatgcactatatataattcacacattttataaactcttttccttttcttgcttttccagattttgctaaattatgtatgcagttttcttgaggaaaattcgtctttccttttctttattctagtgtcagttaaaaaaaaattctaattctggtgagagtgctgctagtgatatacctatatttcatatcagttcactgattcctt

SEQ ID NO: 889 - DNA, 1897 bp, Homo sapiens
acacacacattctgtttagttatctatcatctgtttattccactggaatgtcatctcaacaagggaaggattttgttgattttgtttctttttgtatccccagtgcttagcactggctatcacattgtagaaggtcagtaaatcatatttgttgaatgaagaaatgaattaaaaagactttgttataaagttgtcttataagttagtaaagaggtcagtgattgagttatagaaaatctacagtgtgtttttacctacttcttctattttccttaaattgctgtggatttatcttaaaacttgggatagtccttttattcagtgcacaactcaaaatatgttttgttcaaaaaattagttttcatatttattaaagtagtacatacactaactttaaaaatggaaattgcgataaaaggcttatgctgaaaatcaggagtcccttgccattttacttcccactccaaagaatacctcctcaggtatattcacttttaactcttttagctatttatttagaattttaactctgcatttctaagaacaataagtcttcccttaacatcattgataggttcttggaaactgtaactttaagtgaaatgatataaaatgaaactggttttaccataggataattgatataaacaagagttaagttcctaagacatagttcttgtcacagaagcatcaccaaacttacaataaagacttaaatacttctactattaaacattgaaataaatgtgagctgtacttgtatttaagaaagattgagatatttcacagagatgaccgaacatttaaaaaaaataaatagctacaaagagaactaaggaaatgaaaaaggagtgggaatactaactccaagaaaaacaaagcttagaaaaaaaggaatgtaagataattgtttatgtaagataattgtttatcttacaattgttggtggatcagtgagcaacagcagtcgtggtggtgggttaaatcaaggaatagtttgcaaagcgaaaattgtaagaagcacctcctaccaccacacagttccagaacaatcacaaatctggcaggcttactgagtgccttgttaccgtgtgtttattgtcaagcatttgtgtgattgttgtataccttacacatttttatttggcaataatttgtattcattcattcattcattcattcgttcattctccagctggcctattcagttcaggttgtaggtggccagaggctattctggaggctcaggacgcaaggtgggaagctacccggagtaaggtatactcatacacacaccattattctcccagaccggatcagtgcagacacaccagctcacctcatgtgcacatgtttgggatgtgaaaggaaactggagaacttggagtaacctccttacacaggcatgaggagaatatgcaaacttcacacagatagtggctctggctgggaattgattttttttcttcatgaacattataatcacacaatgttgaacaaaatgacattatttgggaacctgctgtaatgtgcttattctgcagtttcttgattagtccactgtagacattctttgttattttttagttatagtacttgaggatttaactctcttcccataccctttcacctggtttctcttctcctagccatactcccactacagttataacatagattttggttagtcactattcagtgttcacattatgcctccataatattgtttactaatcacataatgtgctatgattacatttcttttttcctatcctttgtatttcttagagttagtactcctttccccttttttcatttccttagttctgtttttacctattttttttttttctaaatgttcagttatatctgtcaactacctagcggtaagtttttc

SEQ ID NO: 890 - DNA, 1032 bp, Homo sapiens
tattttattttatttttttgatacggagcctcgctgtgtcgcccaggctggagttcagtggcgcaatcttggctcactgtgacctctgcctcccgggttcaagcaattcttctacctcaaccttccgagtagctgggattacagatgcacgcgaccatgcccagctaatttttgcatttttagtagagacggggtttcaccatgctggccaggctggtgtcgaactcctgacctcgtgatccacttgcctcggcctcccaaagtgctgggattacaggcgtgagccaccgcacccagctagagggcccacattttaatagttaaatggtcacaacagagggtgataattataatgtaggagtatgtgtgaggtacagagttaatagagaggtaaatgatcaagatgcattagagaaaacttcaggaaagatgtttgcattcaagatttgaaggatgagtcagaattttctaggcaaatgaagtggagaaggtattatagagtgcaggaacttgtgcaacagacatggtgtcacagagcatggttattataagtattgtatttgagttgcatgaaacataggaacaaaaaggatgaggagagagtgaccagagaataggttatacaattagctgggcaaattatttcgttgtagaaaaataacttatgttagtgaaaaagggtcataggaaaaagagataggtaaagagaaaaatgagacaataatattaatagttgtaagagctatgatatatacacagacacatatatatacacagacacacatttactctctacttacacatttactatatacgaagatacatatatggaaatttatatatatgtgtgtctatatagtaaatgtgtatatacacagacacacacatatataggtattttatgcatacctatatatgtgtgtgtctgtatatagtaaatgtatatatacacagacatatatatggatatacacagacacacatatatataaatatctgtatatatgtgtgtatatagcaaatgtgtatgta

SEQ ID NO: 891 - DNA, 1022 bp, Homo sapiens
ttgaattttatatgaaagggacagcatagtaagtattcttttgtgtttgatgttttgggctgaacattttgtttatgagatgtattcatgtagttgtgtgtagctgcagtttgttaaaaaactatgaaagtgaattcagtgttcactttcattgctttacgatattccattgcatgaatacatgtaattctatcactgagagagtaatttgggttgtttcccagtttgggccatgacgaataatgctgccatgaacatcttataaatatctccttgtacatatataaacattcttcttataagtggaattgttgagttatagagtgtgcacatgtcgatttttagataatcccaagttgtttttagcagcatgtaccaattaagactctcataacaatggtgtaagagttccagatgctctacatcttgaccaactgtcaatggttttcgatttagccattctggaaaatttgtagtagtatgtcccctgtgatttgagttaaactctgaaggctttcaggcatatgttatcttgtaaggatacatttttttcttttgagacggagtttcggagtttcgctcttgtccgccatgctggaatgcaatggcgtgattttggctcgctgcaacctctgcctcctgggttcaaacgatactcctgcctcagcctcctaagtagctgggattataggcatgtgccaccacaccctgttaatttttgtatttttagtagagacagggtttcactgtgttggccagactggtctcaaactcctgacctcaagtgatccacccaccttggcctcccagagtgctgggattataggtgtgagccactgtgcctagctctaaggacacattttttaaccattatgtacttttctcatttgcaaaatgtggataatagaaaccctgactttgtaagcttagtttgataattaaatgaattaatatttgtaaagcacttaagacagttcctgggagacactaagcattatataggcatttgttgctattattac

SEQ ID NO: 892 - DNA, 1020 bp, Homo sapiens
acttagcttctgtgttagacactaagctaagcaatcaatactctttcagttaattcaactatttaatttgtttcgtattagttaatgagggactacaaagtagaaaacagtggcaatgaacttaagtagcttaaatagttatgctataaaacagatggtattaagttctatcaggtacaaatgaagtcctatgatggtgtgggaaagggagatattatctcggggggagattttagaatgctgtttagggcaagtgggatttgagcccaaatttgaaagtggggcaaggttagaacagcaggttatatagcagaagagaagttcaaaacagaaggaagaagttgaaggtccagaggtgggaaaggacacaggatattctgggaatagctattaaacaatataacttgtgtgagttttgtgtgtatgtgttgagagtaggagaggatatagtgaaagataagggtaaaaattgaccaaattattgaagaccttgaaaatcttggttgaaaaggtttggagtttgatttgtgtgcaagagaaactaaaaaatatttttgagaaggagagggggcagatctctgttttaggaggatgacttgtgtcagtttgaagatggactaggtgcattttctacagtttagggtttttctgagtagctttacaaagtcttcttggttgtgtttctatggcatttaaaattttgttcctgtgtgccatggtctataaaatgacatttaaaaaataaccttttaaactatcaagaacatttagtttctgaaaacagtaagtcctactggacttatgtgaggcaacatttagaaattagggttccaagtctgggactgccatgtaagtacgttggataaaaacaagccagaaaagaacataacagcgaaatacttcaaaagtgcatctcattaccacaatgcaaaaaggatagctttatgttcctcttttctttttcattatctttttattgatgatttgtgttgtttgattctgtgaatgaactctgagcat

SEQ ID NO: 893 - DNA, 1036 bp, Homo sapiens
attttttttaaactctaaatagcacattattaatttataaaacattaatatattttattgaagtgcatgttttaaaacaccaaaatagatttgttttgccggttttagattctgaccttcttgtctttcatggttttaaatttaagttgtctgagattccaggggaggatgaatgtatgattgttgtgtctgaggtatttactagttctgtttattaataactgagttatgatgaacttagatggttaaataaagctttataatcattgttttttgaaaaaatatgtcaattttttaatttgattaaaatatgcatactagtgttgtttgtattttacttctaaatagagctttaataaactttcaactttcatttgaaatgatttttatttagattctataattaacttgatatgctatttcacaagttgttatatctcatttcccccccttttttcttaaaggttagctgtgcgctatcattctttttattttctttccaagtacatgaaaaatccattctcttggtgtcactgtaagtagaaacatttgaaatatgtgtttatttgtttataatataactttataatttacatacaaatatacatttgaatgcaaaacaaaactacacaaatgttatatctttgcataaaatgatttcatagtcaggtttttttccagaatttttgattttctttataaagtgtattttaaactgaaaaattttggtagaatgttattgacataatagtaatttcttcctgttccttcacttatattttctacatgctaataaaaaatatatccttcaaagaggttttcatcagattggagcctgtttgtcatctttgctttttcatttcattcatttccacatctattcggtagccttcttctttccatttacttccatggggtcttttgtatgttgccttctttctctttttttgccacaagcttagtttaggccctattggcaatctgtaaccagactactttgttttagaagcattaaatttttttcctgatgttcata

SEQ ID NO: 894 - DNA, 1024 bp, Homo sapiens
accctatgttcactaggatcctgtggaagatacatgtacagaatgaccaatgacaaatggcaggcagtattgcttttattaggtggagctttggactaaaaccttcgtgcagagctgggctggcctgtgtggaaggcttcttggctctaaataaaacagtctcatatcattgtagactgggaagactgcttaatgccatcctctgaggcccaaacctgagttagagcttaccactattgtatgaggctaggctgaccctacacaaatcactggtaccaggggatgaaactgtggagaggcattactttcaaacatgtattaatatatttccccagaatttatactcatagaaaggcagctcattcaggacctataatctgaccagattagttctcagacactgaacttctaggggttcattttttacaaatgcacctagattatttgtaacagtgcatggctttaatctatttttggtaaatggttttacagtttgcattaaaagttccttttgggctggacctggtggctcaagcctgtaatcccagcactttgggaggctgaggcaggcagatcatgaggtcaggagatcgacaccatcctgactaacacggtgaaaccctgtctctactaaaaatacaaaaaaattagccgggcatggtggcgggcacctgtaatcccagctacttgggaggctgaggcaggagaattgcttgaacccaggaggtggaggttgcagtgagctgagactgcaccactgcactccagcctgggcgacagactgagactctgtctcaaaaaaaaaaaaaaaattaaataaaagttccttttgacctggtcccagctaatcatatcattaaacaaatatttcattcagtaaatatttattgagtgccttctatttatcaggcactgttttgtgcacatgggatatattccagacaaaaatccctgccttcttagctatcattcttaaagatagacacttattaaaaaaaaaaaagaagtgagtgtgttagaaggt

SEQ ID NO: 895 - DNA, 1017 bp, Homo sapiens
ttgtaggagatgaaaccagggagaaacaaggacaaaatcaggaagaggtttctttttgccataattaggacttgggcttttgatcagagaaatgaggtttccccctcgttttttgtgagttttattctccatatataaggtcaagattttatcttaatctttcattttcagcagtttgactgtgtgtctaggtagtttttgtttttgttgttgatgctgttgcctgggtttttttgttttttggtattaatcctgcttggggttctctgagcttcttggatatgtggcttgttgcctttcattatttttagaaaatcctctgccttatttcttcaaatatttcttctgccctctttcttcttcttccacttgtatggtacctgacatctcttcctgttctgctccaccacaggtaagccagtgcttgcatctcgtctctcctgggaaagatctgtctttccttggattttaagcttatagttgtcctgtaaccccagctctgatgggatcaagaaaagttatgattttgtagttcattaactttttcttattgttaggaaaggagcaatattctcccaactctgctccattagagggttttgagtagaaggcaggacataatctgatttatattttaacaagagcagttaggttactgtattgaaagtaggtagaaggcagggttggctctaacgaatttgaatgaggagcctcagcacttttcggcgccattttcgagtgatacctgatctcatcaatctagcggaagagacaggataacctatccaagagtatagcgccactatgactccgccggaaaaattactttaaaaatcgccaaaaattacttggagcaaagggcagtaggcggagcttcgccaaggctggcgcagtcggttttgacctgtagcagagaaccaattctggagaacagcctcacttctttgattgaatactcacataatgctttggaacaggacatgagattaaggtttaataatgatagaatgaagacca

SEQ ID NO: 896 - DNA, 1045 bp, Homo sapiens
caggctgggtgaccaagtgagactccgtcttgaaaaaaaaaaacatggaatatgtatttctaaagaaaatatccaagaagaaactagtaacttattttttatataggaaagaatagatagtgattgcttattttaaggtgtttgggcttttttttttgtttgtaggaaaaccatccccttggttatccgttgatactgccttgtatattctcaaggaaaatgagagtcaagcaaatctacagcttgtgtgttttaccgaactacgaaatagagaagtatacatatttattttctaatgtttaatttttaaatatagtatgaactgcagtttggggaaagtatgtttctgtattttattttttaagctttcatataccttccaattaaggtataaacagcacttaaacactatagatattatatgtttttaatttaatcatattaaattaaattaaataattataaggattttttcttgtttgctgcgatttcttaagaattaaggatgggaggagctgggcatggtggcatgcacctgaagtccctgctacttgggaaactgaagcaggaggattacttgagcccaggagttcaaagccatattattctatgatcttacctgtgaatagccactgtacttcagcctgggcaacataaccagaccctgtctctaaaaaaaaatttaaataaagaattgaggattggttggcagtcttgagtcttggcttataccttttaagttgtataatattgtaccttactttcatcttttctaaatgccctgatgcctcatgtgtgaacatttgatatactcaataaaaaaggttgatgccagtacattttttttccctaaatgcaagcaattcaagactttggaaaagctgctgtagacgtttgtcttacttatactactactgcaaaacagaaaaacttaagattactatcctcaggcttgacttattttatagggttcaaaaatagattgatatgaaaaaatgcttttaaatgtttttatatgttgcccatggggttgttctgatctttt

SEQ ID NO: 897 - DNA, 1054 bp, Homo sapiens
gatcacttttgacttcttttgcaacatggaaactaaagcaaacagtggaagatggattgtactgtatagaaacatttttagagaaatgagaaagcaaaaaagtcagacaaaaattacagtgtagccgggtgtggtggctcatgcctatatctcagcactttgggaggctgaggtggaaggattgcttgaggacaggagttcaagatcagcctgggcaacatggtaagacattgtctctacaaaaaataaaattagctgggcatggtggcacacacctgtagtcccggctactcatgaggctgaggccagaggatcacttgagcccaggagttcgaggctgcagtgagctatgattgcaccaccacaatccagcctgggcaatggagcaagatcttgtcttgaaaaaagaaaaaaattacagtgtatttccaagttacaccaagtgtgcctgcctcttctgcttctgctactcttgagacagcaagaccaacttctcttcttccaccttctattcaacatggagataatgaggatgaagacttatgatgatccactttcacttaatgaacagtaaatatatgttctcttatggtaacaaataacattttcctttctctagctaactttattgtttatgttccataaggcttctggtcaacataggctattagtagttaagtttggggggagtcaaaagttatggatagattttccacttgtgggggtggttggcattcataacccccatattatttcagggtcaactgtacattgttgagcatttttgtgactgcataaaatggatgttggtctgtagttttcttaattggaaatgtctttgtcttgtttgggtatcagagtaattctggcctcataagatgagttgggaatgctttctcgttttctggaaaagactgtaaaattggtgttatttctttaaatgttcacttgaatttctcattagaaacatctaggcatgaagatttattttggaagaggtttttttttttttaatacaaattcaatttctttaacagctacaggatattcagtt

SEQ ID NO: 898 - DNA, 1041 bp, Homo sapiens
attaactttggacggattcattgatctctttctctctcacgttactgttttgtggaaggaataagtaataactacctgacaccacacagtagccctgggaaccaaggcaaaaaaatccctactttataacagacagaaaaacctggtcattcagaacagcagtcatgaactgtctagaacctagagtatcataaaaacaaggccatgtctgtttttgtgccctaagcacccaactcatagtagagactgcataaatacgttttgaaccgataaatgaatgagttaacaggtgaacaatagccagagtagaataaggttaggaggggttgttcagagaaagggtcacacccttgaattagtcacaatcctccatataaaaactattttaacatgattttattaattatcaaatataattgctaaccaagtattacaaatcaaatccttagtacctgcatttatgattagttaaaactccattataccttccacttactgaacaaaagcgctaggcacttttgcatgcattgtctcactttagcctcaaaacagttattgataaggtagctgagattctgagagatagggcagctggccctgtagtcacacaattaatagccaatagaggctggattcatagctcatctgtctgattgcaaaacccagactcttctattccacccctctgtgcctagggtttagaaaacatttctctggagtacccagaggtcaaaaatgtaaagcacaaacacctggttgtaatttcttgttgtttatcatgttaactaggggaaagagctgactttaagattaaggggactgtttggcccttgattcatagaatcctggagccagaataggctggccttaattcctcagcatttctcatgtctcagaggtgtcatcttgcatatatgatatctatttcacgattacaaataaatatagactctgctatcttgagcttctaaaaaataactctctcaagagggtgtatgccactaggtcaagaaaagccacctgtacaagtctttaacatca

SEQ ID NO: 899 - DNA, 1059 bp, Homo sapiens
agcagaggaatcttttgattccaagagcaggtccagctgtggagcttccagagcaggtttcgtctgctgttctttctcagacccctgtggttccttttctccatgtggccacagcattctcaaacttgattttaatacattctggggttttgtcacattagaacaatgggatacaacccctttgagcatgagaactgtttcttaacgtaaaagacttcacccccacgtcacggttctggtgcttttagtatctgttaattgagaaaataactaaggaacaaaagcctccaggagatggaggcacacttgagaattacccacgtctatatgggagccaggatttaaccagtctgttgacatggctgttgtaacgtatgcatctgtggagccatctgaaagaactctgcaccccccacccccaaggggttgggaaccgttgcgctggaacatgtgtgttaagaagccacatagacatctgtccccagagtgcagtgcatggctgccttctctgtaaaccgtggggtgcataaactcagctggttctaattgcacagggcatgccatattgttgcccgatgtaatgtcaatttttatttatttgtgtttgtgaaaagcagggctgattagaccacttaaaactgcacaggctggttagagccaggctggcgttagtgatttcagctgccctccccaaagtcatcagcgctcccagctctcagcctccctctgagaatataaaataggggccttgtgctatcatgatttctatttcatcctgactcttataaactaccatataaaaagcagccgctgatggtttttttacatttcaatttcattttgaggcttggaaaatcacaaaataaaaatagccctgagagtggaaagtttgggggagtttgtttagctttctttgaaatatactttgtgaagaaatgtcagtcatgagatctctcttggtggagtgctttactgttggtgtaatttttttacatcgctttctcctgtgtaatcctaagggagaccctgtgaggtgtgaatgattactatcctcattct

SEQ ID NO: 900 - DNA, 1055 bp, Homo sapiens
gtgattggggagacaccaatgagcagatgtggtaccacaggcaactatctctcccacaagtgaattataggaaagagttgtggaaaaaatgctgtgggaacatggggaagaatacattaattctcaggggattagagggtcagaggaagaacatgagtgcctccttcataggcttattgtgaagagtcaatgaaataattcatggaacacactcagactgtgcatagtgagcgctcagtgagtgttctgctatagttatgtagccagtgagaggcctgatcaggatttatctgcctctaaaacccatgtactcttgctcccctgtgcactttttaaacagacatgtgattgttggaagagtaagtaactgtgcagtcaccaaatgaaagggaagacaccaatacagttgctctggtatattcaccacctgccctaatcctggcttttaggactggactgctttgggtatgggaggggatttggatagatgtggggttggaaagaatcaagatgtctcatcatgaactatagcgctcctagaactctggccaggatttaccacctgccctcattcattcattgatcatacattttctatgcacttacagtgaaccaaatattctgatagtctcactggagatgtaaagatgaataaggttagatcattgccttggagggtttttcaaatgacagatttatggcagagattgctagctgatcaccaaatatgtttccatctcttccggtcatatgactagacaacatttctcagctttctcacagttaagtgaagccatgtgactaaatactagccaattaaatgaaattggaggtaatttttgtcgcttgtaggcttgacccataaaaaactccccaggcagaatcggtatgatccttcttcggtggcttgacaaccttagaagtcatgtgttgaaagtgtcacaacgtggaaagagcctgagactctcccttaatcactgtgtggtggaagccacacttgtttaggttttatgtgaaccaaaaacaagtgtccattgttaaggctgagattttga

SEQ ID NO: 901 - DNA, 1025 bp, Homo sapiens
ttctactaatgtctgtgggagtgaattaactagagtatccagttgaattaagtattttgctgaaagatgaagggactgtgagataaagttggtgccgaggattctcacatttctaaaggaatcacttgaggtgctaggactcccagtccactcttccacaataccagacaacctgtaatcctcagacccagaatcttatgacagctttctctgatttcacattgtgtagattagctacccaaaaaagtaagtggcctcaaatagtgctgccctttaaaattattctatgcatttgtcccagagtcttgtgggatgaatggctaaatcctactggattaggcgagatgggtattattatctggggctacagaatggaaaaactcaggtgaaggaagttatcccaaacttcataattgatggtgagcctggatactcattctcaaatctggtgaggcatcgttggcttctaccatgatggcgatggtaagctcatttgtcaatcaaatgatcgattggcagtagggtgatgacagttaataataatctattatatatttcaaaatagctagaagagaataattagaatgttcctagcataacattatggctatcccagttaccctgatttgatctttacgcattctatgaatgtaccaaaatatcacatgtgctctgaaaatatgtacatctattatgtgtcaataaaaaaagttaaccaaatgatcgatgaacacctactatgtgccaggcacagtgctgggtgctggcaatgcagtggtgaatgagacagggacctgggtgcttgctctagggaatgcccttaggagaagctcagggtatgtttttttatttggaatgcttgctgattcccctcccaggacctccagaaagaagtggtggttgcttcagcggtcacttggtgatgactggcaggtatatacctgtgtagctggcacatctggtgcctgtgatcagagccgagccatccagtctgagctttgtttttcccagtgcagcagtggttt

SEQ ID NO: 902 - DNA, 1052 bp, Homo sapiens
tcactttccaaagaattgggcttaattttcacagaagcaacaactcgtcttatactcttgttttattaatttaaattctgtaaagtacacaatttccaaaaaattatatagctgaaactgtataacaagctttgggatcaaaccctactgaatcttgtcagaatagaactcaagaggtgggaatagtgcatggcttgtccaggagcatccacggagcatccttggacactaggtggggtgctctatagagggaatggagagccctgcccgatctagtgagttagttatgtggaggttggttaaaaaaacttctatatttgtttatttgcatgctactttacagttcttgaagtactttcaaattgattttctcatttaatttttacaatgctcatgaaataagcaaggcaagaatttagaggtgggaaaatggaggttcatagaagttgaattgtgtgactatgaataagtaatttccttgaaggtgcgttggaagcagagttcagatttttcagtcttaagccagatctctaccctctcttctcgattgcctcttttcttgctgttttgaaagcagtgatgagactttgattttatttagatatttataattttcttatagcattatgttaccatcatagggcatatcagtaatagtaacatactacatatgtcaatgttagacatttaatcacctctagcaacctacaagcaaataaagagacaaaactcctctggaccagcactgtccaataaaattataatttgagccacatatgtagtttgaaattttcctttgggcacattacaaaacaaaaaagaaacaaataaaattaattgtatattttctttaacccagtaaatccaaaatatcatcatttcaacatgcaatctttataaaaattcttcttgtgatattttgcactcttctttttgtactaagtctttcaaatcaggtgtgtaaattgctttacagcacagcttatctcagactagccatatttcaggtgctcacttgccacatatgttgaacaacacacctctgaacttta

SEQ ID NO: 903 - DNA, 1047 bp, Homo sapiens
agggcccaaatggagccaaaaaagagtcagcagcattgccacccacctgcagacacacaataggataaaagcagcacctgatcagggaggggaaggaacgaggagggagagggacaggcttggccgtgggtgtagcccggagttgggaagcccgtggcccaggatcaggtcagccactggctcagtgtgaccttggagctcagcctctgtgggatttgttttctcatccttttaaaatggagatggtagtatagatccttcctacctccagaaacatgtagacagcagaaagaagatgggggcaaatctatgaaagtataaaatgcactataaaaaagtataatgcagtttataaatgattgctcctaatgcatcaactggagtgaaactagccagagtgtaagagaggaaagaggggaagatgcagaactctgttcttgtatcttttttaaaaagcacaaaaaggtgatgtcttggtaaagagtagaagtttgacatgttttgtcgtgataagaatagaattactgtggtgactgtccatttatccacttgggatccgagcattccaaagtataagatgcttcattacaggccgggtacagtggctcatgcctgtaagcccagccactttggaaggtggaagcaggaggatcttttaaggacaggagttcatgaccagcctgggcaacatagcaagatcctgtctctataaaatatatttaaaaaattagcctggtgcagtggaatgcacctgtagtcccaaatactaggaaggctgaggtgggaagactgcttgagcccaggagttcaaggctgcagcccaatatgattgcatgactgcactcaaggctgggcaacaaagcgagacgctgtctcaaaaaataaataaaaatgctccttggctgtataagacatattttattgcccttttggagatttataatgagcacattaaagttttggaaaaatcctgcaacaaagaaatccgttttactttgtttagttcagtaactccttagtttattatccatggacccctctcctgtg

SEQ ID NO: 904 - DNA, 1050 bp, Homo sapiens
cctaaagctttgcagctgagtgaatggcccattgaaaactagcacgatgatcagatggacttctctctgtctaagggcattgattgagacccacatttatattgagggtggaaatgtccaacaaagacaaagaaaagcatatttattgctttagatagaagtcatatttgtttctttcactctggaagatatagtcacataaggtcatgagctattttttcttcctacttaattgctagtctgtgggttggtgaaagctcacatgcttagcttttcagtgaaactttcacagtccatgtggctctgactcagaattttttcccctatctgcttcttctgttgccaattcattgtttatctcctttgtgttttacatctgacctattattttgcatgctgttttggattactgaggtagcaacatccaaatagtttctgtgtacattttagcttttgggagtcaggcagctgctctggggcctgtttgagtcaggtcagggtcagaaatgcccttctgcttttgtttccgtggaagaagttggcctggaactctctctgggcaccttctgcgccctctggcaaccagaaaagcaaagtcgttcatcaaaatctcagactggagcaactccttaaaacagcttccacagttcttgcacatactcctttcttgatttgttgcatatcatttcaggcacctcttttaatgcagctattcaggctgcctaaggcagtggtccccaacctttttagcaccagggaccagttttgtggaagatagttcttccaccgatggggtgggggtggtggtttggagatgattcaagcacattacatttattgtgcactttatttctgttattattatattgtaatatataatgaaataattatataactcacaataatgtagaatcagtgggagccctgagcttgttttcctgcaactagatggtcccatctgggggtgatgggagacagtgccagatcatcaggcattagactctcataaggagcacgcaacttagatacctcgcatatgcagttcacaac

SEQ ID NO: 905 - DNA, 1089 bp, Homo sapiens
acaagctgtgcttgttaatgctctataaggagcctctgggagcaaggaaaagggaaagattttttgtgttcactttgcatccacacagccctttttattctcaagattatgctggggggaggaagcactagaactaccgtgaattaagtgttcacattgtacctagattaaagcaaggtgctctgcataattctcacatttaaccatgctgtccttatccttatttcattgatgagcttcagaaagtcaggttccttgaccccagtttcacccacagaggaagttctgatggtgaaatttgaacacagaatgagtccaccaccttgccttcctcttcggttttcaatgacttctccctgacagtcctgcgatggcatttgtggttttaatttcaaagacccttacaattgttgatggttgatagcatttggtatccattggaaactgccaacacttttcactgctgcatttggaagaaaatcatagtgagttgatgtgttagtgattcaggacttctgggaaactgagagcacccgtgtgtacttatttggagtcaatactttatgaacaactttggcccaaaaggagaaaaatctgtcttctgaaattgagtgcaggtctcttagtggcttacctcagcagggagccagttattacataagctgaataccaggtccgtgggtttccctaacctgaaaaagaagcagcgtttgcagttatgaggaaaacagaaagacccatttctctgtggcatgatactgaacaggcagcttcagccgtgaggatattttggccggaggaaaatgtagcttaagaaaagtcccagctggttcaagtgacttaagcccagctattcatgaaatattatctgacagctcccccttctcctcaagtggctggggagtgagtcacaattgccccagaaacctgtgttctcatatgggattttggtattccaggtttgctctactttgcacactggacagcttcatgaaaagccatatttggtgcagacattttcttgtgatgataaaagcatttagtaaatgtactgggaagcttgccgtgatgaatccttttgttaagaaa

SEQ ID NO: 906 - DNA, 1247 bp, Homo sapiens
gcaaatgtattcacttatttattcatttaatcaaccagatgcagttcctgccttcacagagcttaataattggacaaataagtaatttcaccaaagtgggaatgcgggtgatagggatagtgtgatagggaatgtgcagcgtgctatgggagcaccgtcacgagggattcctaattcagatgtggggacaggaccctggaaggcttccaggaggaaggaacatagaagctgagatctggggatggaatgggcattcaacaggcgaagggagtgtgatgtaattgatggcatggagagtattgcaggtaggaggaataatgtacagagtctggaagtgcagaaccatagagtactggtggaactgaaagtaattcaatctttctggaatatccagtgtggggacagataagtggatagggatgtggctcgtgatatagtctggggacagatcaaggagcgctttgcaggccatgctggggagcttggacttgatcctaaggacagtgtggagccatggaagtcttccaagaaaggagtgacttggtctgactttcattttcaacagtcattttatggagtaagacagcttatttcctcgccaaggaacttgaacacaagctcccaggaagggaggttgtgaaaacagtgaaagggccttccagaaagtaaatccttaagctccatgaaattagcttaaattctgtttgaatctgactggtgaatatcatagcaatgaggccaaaaaaaaaaaccttcataaaaacttaattatctttgaggccgtagctcatacttgagggaagggacatgggtaacgctagagacatatatgtttgcattaacttttacgccactgtggggcagacaattaaagcaggagtggaggagtcagagcagttttgaatctgcttttaagtcccagagagtgtcacagtacctcctacccagcactggttgccaaagtaaaagaaagtggtaacaatagggcataaggtggtggagaagaggctgggtagaccttggccatattcttgctttgcaccttacactgctataaagaactacccgagactgggtaatttataaacacaaaagaggtttaattgactcagacttctgcatggctggggggtctcaggaaacttaaaatcatggcagaaggtgaaggggaagcgaggcatgtcttacatggcagaggaggagagagagagtgctaagagagaagtgccacttttaaaccatcagat

SEQ ID NO: 907 - DNA, 1014 bp, Homo sapiens
ttcaatgagataaagcacagtcagtgctgctataacagttgttttgaaaacacacacattttttcaaagctgattgatgtattcagaaaaatttgagaataatgcaaattttatgtttacttacatagtcagttttatccacgaaaagtactaggtggactcagaagacggcactcagctaaagtgagatgcatggcaatatacaaacacacacacctgaaacatctaccagctcctcagttcaccaggtgtgttgagttacactcgagttacactcatccacatctgccattacaactttctgtccattttctgataaccagccccccacccaccacttcacaataacccataagctgtaacccttacaatgcccatttccacaagaaagtagtagtgtgttccaatcttgttttcccataaactctgctgtttttactgcacaattttgcatagtgtggtgatttctcagaactcatatgttgtgttatagcagaactgactctgtctaacacaattcctggcagacagcagacactcagtaacaggtagctgttttattattaatattaatccacttaagtacaattgtgggttggggcagggatccctagttacaatgtttagctgctttgattagtagtgttaagtgaaatggactgcctgagtggaagggttttggtgcttttatcttttctaagtgtgtgctggtcagaccacccttggggtattaacagtgacaaaccaggtatgtccagaaaagagcaagccagaaaaggagaagacatgagaatgatctttaaatagttagagggccatcttggaagaaggattgctttgttttgtgggtcttcagggtgacaaggggaagctcccagggcccagggttctggctagctcggggacgagcctcagaatagtccctgggggtgatgtgttctccaagctctgattggctgctctgggaggggagaggacagagaagagtcaagcacgggtttggaggttctatct

SEQ ID NO: 908 - DNA, 1050 bp, Homo sapiens
tcctctccatctaagcaggctgttaagctcttgtagtaagaaagatgttaccctgggcttagaccctctcggtggagctgagatggagaagcctccggaagcatggggcatttgagctgagggatggcaggatctgcttcagatatttaaagtgggttactctgagcctgcaaactagagagtctagtgtggtgtctctagaagaattacttttgtacccttagatgaattaaaaagtaattatactgagtgttttatcttgcctgtatacggatgtataagattccaggtttctagttgatgttactgttaaaaacagaagatgttcaaacatatttgattttattaaattagttttccctgtagtcataggaggggtactgctgtttacatgctgaatcttagcaaaactataaaatagcatttttaaaaaatggcagctcttctgttctgatgctttgacaattaatgttatctctttttgtttctatgatgagcacatgggacttaggcttactcttaaaatggatttttccaaaaccaagagttattacatttcttcctctgagacaaagtattcaggcctcctcctcttctagcactcagtctggaaaatgtggttagtctttccatgtgggagctcttgtgctttgtgcattggttccaagatggcaagtggactactgttccaagatctgggcccaaggcatgtcgttgggctcgcctgaacttgtatataatgaccagaaggaattggtctgcactgccattaccgccagccactacctgatcaattctgcttgggaaatggctctaatcaacattcttctagacctgctgttcatggctgcaggtggcaggctcatggatcaataattggctggggcggttggccccactggtcaacctcactccttgagccctatttacctgttgctgcctcctccatcctcccctaaagtcacacagcttcaaataaggtggtcccatctattttggtgctttcccttctttcttaacctcccataatggaaaaagcacaggttccag

SEQ ID NO: 909 - DNA, 1046 bp, Homo sapiens
tttgtggctgtcaaaagaaagtgtgtatctttgcttgaggccaggagttccagaccagcttggccaacatagtgagacgttgtttctacaaacaatacaacaattagctggacacggtggcgtgttcctgtagtcccagctacttgggaggctggagtaggaggatcagttgagcccaggaggttgaggctgcagtgaaccgtgattgtgccactgcactttagcctgggtgacagaaacgagattccgtctcttaaaaaataagtatgtatgtaattgtgtatgagctaagttactcttcctgtcacatttgtatggtagctacagtcaggcactgcataatcatctttcagtcagcgttagaactgcatataaatggtggtccaatagggttataatggagctgaaaaactcctagagaggctgtagttattgtaatgttgtagtacagtgtattactcatgtgtttgtggtgatgctggtgtaaacaaacctgccctgccagtcctgtaaaactatggcacctccagttatatgcagtatacctaattgtataatgataatagtaagtatatttgtgataatagtaagtatacttgataatagtaataaacaactatgttagtggtctacgtatttactatactttttattattattattttagagtgtactgcttttgcttctaaaataaaacattatctgtaaaacagcctcctgaaggacctgaaggcaggtccttcaggaggtatttcagaagaaggcattgttatcatagcagatgacagctccatgcctgttattgccccttgaagagcttccaggggacaagatgtggaggtggaagacagtgatattgatgatcctgaccctgtgtaggcctaggctaatgtgtgtgtttgtgtcttaatttttaacttaaaaatgtttaaatagaaaaaagcttatggaataaggatataaagaaaatatttttgtacagctatacaatgtgtttatgttttaagctaagcattattacaaaagagtccagagttaaaaaaata

SEQ ID NO: 910 - DNA, 1034 bp, Homo sapiens
ctccattcatgataagtgctctctacaggtgtaacatttttaatcttttatactgtatttttactgcatcttttatatgtttaggtatgtttagctatacagataccattgtgtgacagtcgcctacagtattcagtatggtaacatgctgtacaagtttgtagcctaggagcaataggccatatcataaagcctaggtgtgtagtaggctataccatctaagtttgtgtaagtacgctctgtgatgttcacatgacaacaagcatatcaactaagaatgcttttctcagaacatatctgttgttaagtgacgcatggctgtaattcatgcattaattggttacttgtaccctctgtttagggcttcaaaagtcagatctgtccatctaagatgcttttaagtaacatttaccttaaagaaatagatggttgattggtttaaagaaagagacagctgaattggacggggaagccagattttgaccatatttctaagaggagctgttctgtaatgttttggtaaaagaatgtctgtctccatatcatctatctatctatctatctatctatctatctatctatctatctatctatctatctaatttggcatctatttatccattaatctgtctgtaatacaaatattccaaacatttaaaaagtataagaaggctctgtagtgcaatggatagcacattgaactttttttttgtttttatattggcttattgcaattaaaaaaggtgcaaataatatatgtaccaaagaaaattcagaaaataaagaaacactgagaaagtgaaagactagggctcatattataaacacacaaaaaatcacttttaatattttgggtacatttccttgcaggcttttttgccctatgcatacatttttatccataaatgtaatcatcttgtctatgttattttgtagcaagcttttttttcacttaatacataatactattttttccaagtctttatagatattgtttttcttttcttttatttcttttatttagccatcactca

SEQ ID NO: 911 - DNA, 1088 bp, Homo sapiens
aatttctgacttggtgtggccaccttattaataaaaaagaactgatggaagcaaaaaggcgtcttcatttttaactccagaagcataacacaaatgctttccagtctttctttgtgtggagagcagaccaagtgactgcaataagatcctgttacacatttgaaaaaaagacttttgcagagtggaggtaactcagtttgaatccttcttttgttaaactttaaaagaacactataaatatatgcccctttccttgaagaaggtatttcgaaggaagcttcaggattatattttaaagtaaattaatattttaataacataaggaaactaaaaaacacctaatttatttcagatagtggaggcctgtggtactttctaaaattattctttttgcttaaactactataaactgcttttttggatttaattactaggcttagatgaatgtgccatgcatcttattttggttctttttaaattcacttggaattaaaaaaaatcaataatggcaaaaacgtctggtagtggatttctgcttgatttcatcaagcctgtatattcccctataatggtaaggagtttgaaatcgtggttatcatcctggaaattttttgtccccaaagggacaaacctacatttgtgaagacagaatgatttagaatcttaatgtactcagtaaaccgagtgaacagagcagaaaaatgctgggaattcttcacataggctcagaagagctctttaattcacttagataccaaagacttattgatatgtcaggctgtgggcggcatcctggggtctgttatggcaatgaattcctggtccttaggtgacaagaatgggatgagtgtgctatgcctggctctgagataaagaaaaaacatggaatgttaaggatcttaaagtctttacgggtttctttgcccactagttttcaatgttttttaattaatgatgcctttcaggctgtccatgggcccacgtttagaagtgttttgaatttcaaattattaatggtaattgttgttttctgttttcattaaccaaaggcatgtataacaacccattcagttcatttgtttattgat

SEQ ID NO: 912 - DNA, 1051 bp, Homo sapiens
atcctgttgtttaaagacatctccatccttccctatcctttccctttcaaatctatggcccagactgggggtggctttaactaacaacagcactttgcattagttaagtagagtggaatttctcattctacctctcagctattgatgaaacctttccctgatgcacaaattaagactgggtgtattttgcatattttcctagaatgacacagtgattctgtggctaaaccaagattagaccctaccactttaaaaaatctgactttttgcttaaagtgtaaactgtgttgcttctaaaactactagttgaatttaactttcaagtgtactttgtatttaaatctgatgatagtgttgtttttccttttgtcttgtttagatgagggtattttcttcacttccctgacccctagtgcctcagtgacctaggcagcaagttttttgatgctgtccagaatgctaattaagatatttattctctttggccctattgtttatgatacttgtaattatgtctattagatggtaatctctgttatctcccactatactaagtgtactactcggcacataaagaaatgtgtgagtatgtgaatgtatactcacatgtttgaataaatgtgaataaatcaatatatttatatagttactgatttaaatgtgttccgtcttgggatgtgagatgggataattgaataagaaattagcctgtgtgtgttaaggtagtcaaagtttttatggtacctttgtacaaactgccccttctgttgtgtgtgtgctgacccatgtcatgatgctcagcatgactggaggagtcctggtgtgtttctgtcctcacttgctccctgggttgggcgcccctctgcagggtacaaccaacacagttgtatgaagaccctctgactttcattttctggctggctgggggttttggtgttgagcgcttttaagtaagacagtcaccttatcctactcaatgttttcttgaagtgcaggccctgtgaagatgaagatcccctcttctattttggggacacttttgtgatgcttt

SEQ ID NO: 913 - DNA, 1035 bp, Homo sapiens
cttattactattattgttctaaaattcaggcctttcttcaccacactgacactgagtaatatatattgtagctgttcaataaaactttattggatttaattggttatgaattttatgtgtgggaaggtggttaactttcctatctgtaaggagaaatgctcaatagaatatcttaaaatgggggaagttatgaaaatataaaataacaaccagagaggcaaaccagtttatgagattctgtattagaaagctggaaagaagtttttaataagaagaatggaggctgggcgcagtggctcacacctgtaatcccagcactttgggaggccgaggtgggcagatcacgaggtcaagagttcgagaccagcctggccaacacggtaaaaccccatctctactaaaaatacacacacacacacacacacacacacacacacacacacacacatacacacacacaaaatagccaggtgtggtggcacgagcctgtaatcccagctactcaagagggtgaggtaggagaatcgcttggacctgggaggtggaggttgcagtgagcagagatcgcaccactgcactccagcctgggcaacagagcaagagtctgtctcggggaaaaaaaaaaaaaaaaaagaagaagaagaatggaagggtacaatctggtggtagacaccatttgaaaatattctgtctagcaaatagtgtttttgagtaaaagaaatagacatgacaaatcagttatgtggccatcccttataacaatgatgaacagataggagggtgtgcaatctttaaagtttagaaacaaatttgtccttctgacatccttcccttctcttgacacacggttggtaatggccaagattctgttttgcctgatggagttttgagtgagttaaattaggttgtcttgaaaatagctgggccagaaaataaaaaggttttctctctttggaaaggggctttactccagggaagaacacagctgtccaggaggaatccgggactgttgagtccagaaacttcgatccttct

SEQ ID NO: 914 - DNA, 1060 bp, Homo sapiens
gacagtgagagggtgggagatgatttgagagggtatttacattcccaggattttcagatatatttatgattttatttttttggagacagtgttccaatagagaggtattctgtcttctcttttcttttttctcttctctctcctccccccaaatcgaggttgtaagtgatgtgagagacctgctgtgaactgctgtcaccagatcctgctatgatttctctttgttcttagttctggagtcatcaaggctacatggagacacgtaccttccactgatatgtttgctccttgattcagggctgagtgcctgtttgagtgattctggctacagctaaatgatatttctgtttccaatagtattgtaaactatagagtaagaattttcttgttgttgttgggagagtttgtttttcttcttagtgtgtattatctcccaccccactcctccaacccgttctttaaaaaacaaaacaaaaccaacaaacaaaaacttgcattgaagcaacacccagaaggagtgagcaggcctaggctggagtcttatcctgacatggtagaatcctgttactgtctcttcgtagattcatttaaattgttttgactgattcatgcaatctctcagtccattgatcaagtcaaaagaaaaagtatcactaaaaactcacaggactggtgcaggtagaatattctttatctatggaaaattcattatcctatctagaaggatgtcttgaaatagcagaatatttttattatgttttttttccaagtaatacatggttcaagaaaaaagaaattttaaaaagccacactaatagcaaaactaaaataagcatgaatcttaattttaacaaagattacagtagtccatgggaaggattgtctgcccattgcagtgggtttgattggtttttttacttggaagtgctcatattctggaatgtgtttatagatcttgaccttagatacttctcctgactcagaaattgtaaaatgttttgctagagtagccagtggtgagagaccgctactgctgtatgttgctcagggctaacctgtt

SEQ ID NO: 915 - DNA, 1399 bp, Homo sapiens
aacttttgaattattgcagttacctggatatatgatgtttttctgctgtgtataaagtgggctagaaggatcctcactcttccacactctgtcctcctcccaaaagaatttcctatttgttcaaggtgcaggattgacagcccaggagaccttgtgtctccacctgggcaggtcagaccatggcctatgtgggtggcttgcagcatgtctgtggaaagtgggcacagaccacctttgagggacaaaggggcggttgtctgagggcccctttaggagctcaccttcctttgccctactatttcctgttttgttttgcgttttgggatgggggggtttggggatgtataggccatgcttgttcaccctgagttgctgtcctttcttcccataacaatgtctgaagaaagaagaggagggtgggcttgaaattgtgatggggctaatgcttattttgaatacatgaggtaattttttgggtttttgtttactttattcttgctgttgaggtataattaatatagatgaattatgtgtttggttccatcagtcttaatagtcatgtccactcatgaaactacctaaagcaagctatagaacatttgcgttatttcagaaagttcccttgtgctcctttctagtcaattgtactaccctgcctcccatccctactcccacacctctacccagaggcaatcactttctggcttctatcaccatagtttatacacagggtaattttaaaaagcgtgtattcactgcaacctgtgtaaatccaaaaagggttacagttctttggggactgtttttaaaaaaatcagaaggctggagctagaagcagctttctcccataccttgaacaaatctttgacaatgatgggcctaggtgacctgatctctaaaacaattataataataattcctaccacatagcagaaaatgataataatagctgcatactgttattgaccacttcactcttctgaacattttacttcattatcttatttaatcttcagaatgacaccttgagatgtgtaccattttttctattttaacacatggcgaaaccagagctttcagaggggaagtaacttgcttagggccacagagcagtcagtcataattcaaatcaggagcctttgtgtccagggctttaacctagagcaggcctatgagagacggactcttgtgaactgaagtagcagctaagcagaggtcattattattttaaaagcagtatctattggtcagagaggacagtcttcctttttttctattttattaccttttaaatatttacatagaaaaaaatctagttttcagaatgcttgacatcagtgggtatctgcaaattagaactgtgggtactaagtttaagccttgtgctaccaacaggaaa

SEQ ID NO: 916 - DNA, 1025 bp, Homo sapiens
ctaaaatgctttgaaacatctttgaaatgatggttcaatgcacagggtcaaagggtaggactggttctcttcaagcattttaaaaaaatgcctcatttttatttaacattgttttgggaaggagtgcattatattgacacattgagaaaaaaattcctttttgtttttctaaaactaataggagcttaggcattatgattaaggaccaaaaagagccaatgccgatgaatgccctctttcttcagctgtaaaatttaatggccgctaccgagaggtttttcttttaatcagcaaaaaatttattttgtccttgacattttatgccaaaaatcagcccagagaatgtgttttatagcctgggctgaattcccctaaaggtagagttttcctatgagcagtgttcattgaattggctttttttttttttttttgcactagataactatattaatttattagataatctttttattgtttcagcaagatagaggaaacttacacagagacagcagagcataatgggtaagcatctgggttcttttggaagacgagatattggtttccattggccttgctacttcctgtctttctgaccttgagtaaattactcttccagagcctgtttctttgttcaattggggatcataatagtgccgccgtcatcatgctgtcatgattaatgcacctaaagcatttagcacagctgtcagcacttattgagtattgactaattattagcgatgcacagtgatctataacttaaagcttcgtctcagaatatgccttcttatgatctgatagtaataggaatcagcagaaaataaggtggttcaactatccgggaaaactaccaaatatccgcttagcagaggcaaaataaatgtagcttaaatgcagctgaaaatgctgaaagctgcttttgtttctcatgttatagaaatgcagttatttttattaaaagtgatgggaaatccatctgtaatctcctgtctttcttttatctgtttgtaaaaatagctcagtaa

SEQ ID NO: 917 - DNA, 1036 bp, Homo sapiens
gaacaggatcccaggccatgtggaatcttgaaaaggtgattgacactggagacgcaaggtcctgttggtttgggctggttactcaatgtctttgagtctcagtttttcacctgcaagtgggaataaggatagtactccgttctctgagttgtgagggttaattgagccagtggtgccagatcacagtaggtacccaggcaaagaggattgttgtagcttactttcttctggattacatcatccttaatttttctctttccctctcctctcagaagtcatcacaaattctgacacttctaaattatgccttaagcctatctatattgtgtctagctaccaccttagtctaaatcagcttcacctctagcctagattactatactagcttcttacctggtcttctgcttgtactcccacttgacagagcatctagagtgattttattaaaatataaaccagatcattcattcgcttttgtaaaactcttcagcggtttccaattgcactttgaatcaatctgtaccccttaccctgcaaactgccacctgctgtggtccctgcccacttacccacctccactggatgcccctcgatacccagctcactgtgcctcggtcatgacggccttctttttcttccttggatgcaccaaaaccagggggcctgaggacctttgcatgtgctgtttgtcccctttgcctggaatgctattctccaagatctttgcatagctggaaattttgtagctctaaacacggggttcttccatttcataagactataaagctagcaacctctggtatctggttaacagttcactttgtgcaggttattccagatgcagatagcatgggtttaggttttcatttagagaaccacctgacctctccgtagaaactcaccacattctctcccccagtgactttctaacacattacagtgttttaattttcttcatgtactcagcactacttgaagttttctcatgtatttgttgacagtttatctccacccactagaaggtaactctggccag

SEQ ID NO: 918 - DNA, 1033 bp, Homo sapiens
gcttaggaaaaaaaccaacttgttaaacctgtcttagcaaactgaccacaatttgtaatattttctttaaaggaagaaaaattaaaccctgagtttccaaaatcccataaagacagtggaagggctctttccaccagggacttgcgtagttgcatgttgttgcctccgagaattgaaagtgtttaaagcattattttattctattgtgctgttatcacctcaatcagtataattctacacttttatttcctggtctagggactcagttttgatgagatttattgctttaaagaggatagcccttttttggagactatttagtttcagattagttgacaaagtaacgaacaagcttggggtgatcttgaactaaataaacgtcatgggaggcagtggtgctatcaatgaataccgcaaggactgtggagtcaggtaaacctggctcctctattcactaactgtgtgatcttatacaagtcactaaacctctctaagcctcagtttattcccctttaaagtggggataggactgttactgatagtaaccccttgtaggattgttatgaggattaaatccgatgttagagcttgggtgtagtgcctgacacagggcaaatgctgaacacctgccactcatggttcgttatcattcttatctttatgttctatcatgtaatttcgccaatgtggttaaaaccagttagttccctcggaagttgtcaaacaaggagacaggcataatatgctcagcaattggagatgccgctctcttggttcagttactcagagctgtcaaagcgacagtcggaatccccttcctggagtgttggctgtgcctcctgggtctcccgcgtggattcctcacagatggcagggcacatcccagctcggcatgtcgacatagtcaccaccatggcttttaatgagaaccattcattgtagatggacgcttttgagttttgtacagagataaacagatggcaaggtttgtataatttcctgctgggtaatctggtactagaagtatgatcta

SEQ ID NO: 919 - DNA, 1042 bp, Homo sapiens
aagataaaaataaatcatctgcaaaaccccacttgaaaggttttcataaatcttgtaaaagttgggccaagtttaaagattgctgcccagattggtttaaagcccttcattgtctacaatctaatggggatgcttataaagggaggatctggaatggtctgtctggcagtgtgtgtggtcaccggaatcacggccttttatctacctgatgggtatgagtaggaggagttggctcaggctccaggaaagtcagcagatgataaagcccttgtcctcggtcttgctcatgccagcagttggagagcagtatattgtgtgttatcaggttctcagaccctagcctggcattcatgggctattctccagccttgatcaaacccacctttccactgtataccgttccacacttaccctttcttttgcttagaattttctcaccctatctgagtaagacctaatcctaaagaggcccagattaaaagccatttcattcctgaagttttttcttagcactctactggctgtgttcttttcctttgcactatgcctacgtctcatgcctgttttccctttctatatttgttgtgcttataggaatttgccatctaacctgggctctcaaatacttaaagttttcacatccatccttttatttagaccttaaaacagccccatgaggaatgtagcattttcatcctcacttttccgatgaggaacccagggctcagagaggttacgtgatttgcctaaaacacaaagttttaggcaaagttaagtcagactccaactttggtgcattttttctctgccccaggctccctccttgaagtcttatgtcatgtcttgctcaagtttgtatctccctgcagtgcctagcacagctttaggctcagtaaggtttttttatttatttattcaacttacatttattgtatctatgaggtgttagttaggtcttgggtactagcattaagcaaacatagatatttgtggaagaaaagaaggaaagaagggatgtggacatttttgttttacttagtaa

SEQ ID NO: 920 - DNA, 1046 bp, Homo sapiens
gtactatttagtgttgggagtgccttagggaccatcaacaacaggcccctccttttatccatgagactactgaggccttggaggttatttgtccatccatggcgggtgcacactagaggttatctggttagtagcccaactaagattagaacccaggaattttgatttaatctcaaatgacctcttttatttctgcatccgggaaggagaagaggaaagtaaacgggaaattcatgttatctatggaaaagttatcagtttgatgtttattaaatgatttgtttcaggagattgtttacaacttttatcttcctagacaataattttctgtaagagtaaagtcatggtcattaaggtagtcatattaatgtattcagtaagctgtgtggtgtggataattttggttttgacaataattatacttttattgaacacttcctgtgtgacagatcatttatgttcttttctgctgaaaattcagtatgggctgggatcacatttattttgtagattattctgtctgcaattcccaaatatagtgggcagcacatggtaaacactttgtaaataattgtaacatgttgtagttttgttatagcgttatgctttgtaaaattaaaagtagctatatccttctatgatccagaaatttcacttctggttatataaatcaaagaaatcctcatatggttctataagagaacatgtataagcatgttcatcacagcattgttggtgatagctgggaattggagacaatctgaacacacatctgtattagtcaaggttctccagagaaacagaaccaatatatataaagagatttattaccaggaattggctcatgcacttatggagcctggaaaatctgaagtctgtggggtgcgctggcaggttggagaccaggaaagggccgatgctgtagtttcaagtccaaaggctgtcaggccgaagacctgggaaagagtgaatgttgtagttcaagtctgaaggccatctgctggagtaattccctcttgcgctggggaggtcagccttttgttcta

SEQ ID NO: 921 - DNA, 1033 bp, Homo sapiens
taataataataacagaaaataatagcagtaattttaaccagtggagtagtgtgaagaacactggctatccaaccagactcctggtctactagatatataacctggaaaataatttaatctgtctgtgctttagttttcttgttggtaaaatgggagtagtaatagcaccgaccttgtaaaggctgttgtgatgattaaatgagcaattggaactgcacctgccatatatagtatgtactctgtaaatgttacctcatgctattattatgctttcttaagcacacaaaatatttgcaaacaacataagaataaaatggtaaagaaactgacttcagctgtaataactaaggtcctccaatgtgccaggtatgatgctccatactttatatacattatctctttaatcatcataacaactctcagggagagattttctcactctccccctccgcattttacagatatggaaacggaagtccggaagactcagtgtgatcatctgaattgctctttaagacttttttattctttactactttcccaagttgccaaagcctggcagctagcagcaagtcctctgccctggatctgattggtcttgagaatggggaggactgtctagtgtttcagctgtgcctatgctgctgagagatgggcaataggggaagcgggacccctctagaagtgatggctgagaaacttcaggctggactttccacaccttttcagggttctggagtgagtcagtgttactcagcccacttagggctattcttgaagctgctttgaaccagattttaaggttttagaaacattcggtaaggcaggagtgtggctggtaccctgcaatccctccagaatggtctggtttctaactgggttgatttaggatgacatcacatcagttcacagcattaaaactgcctttagcgcctcattgtccaaaaggacaatgtcctcattctttaatattgcggttgagtggagtaagttttgacttcagaacctaacaggcacagatctgaatcttggc

SEQ ID NO: 922 - DNA, 1008 bp, Homo sapiens
taaatgtgctttgcaaactctcatggatagatagcatgttattagtatgattgctctgctaatgagtgtagactttgctgaagttctcctcctcctcttcttcctgcctcttcttcctgctcattactgtcacaactaccccttatgaatttgtgagccattagggtagattctgcatctcttaacccatgtctttttctgcctgccagtcagagtcagcaaatattagatacctaataagtgtccaacacgaaggatttaaagatcagtactcaaaatatacaaatatggacatgcagcgatacctaagtgactgtttacagttccccaaattagtatggctccctggggcagaaaaatcttttgtctacatttctaatgtctactcatccttaaaactcaactcaaaagtcagtatcccttggcaacctgagatgttcatttctgttgccctcctactcgctcttatgaggtgctctttctatggagtcccgtaaaactccgggcatacctcagaagaaacacttgtcatttgacagaggaatctttgagaattgaactctttttaataaaaattctcccattttgcacatggtatagaattttaagagtgcaaaaagatgtacagtaaaacatcctgcttgcccctgacttgaaaccaccagttccccttctctggtgtagacactgttcccaattttggggcatctcttttatagatattttataaagatgtatatttatacatgtaagagtatgcatacataatgcatattatacattccatatgtatctgtgtataagaacacacaagcacatttttgtttttgcataaattatattgttgtatacacactatgagtactttgcttttatttttaaacctaatgatttattttggtgattgttccaaatacagtgcatacagtttccttgtttttttataacagctgcattgtatttcattgtgaattttggatagccataatttatttaggtagtctgcta

SEQ ID NO: 923 - DNA, 1564 bp, Homo sapiens
ataagcttaaataaaacttattttgttattaaaattcatagtgcaataaatcttaagaggagccaaagcaaaatatacatgcagcatgattccatttatatgaagttctgaaacaggcaaaattaacctatggtaatagaaattagaaccttagttgcttcaaggtggggtgggagggagtggttgggagcagggaccaactacaaaagattgtgggggtactttctgggttgttgatgttctatcaagatagggacatttgttacatgagtatatgcatttgcctgtactcatagaactgtataactaagatctgtatattgcacagtattgtatatgaattaatctatatatatgtgatcaaaataattacatattgtaacatgttatggttgatatcagtaatattatggaaatgtccattgctttattactctgtctgcctctgacctggccttcataaccttatattgtcagtaacatgaaagtttcaggcatcctttctgatcttgtgccatgtggatatgaatgtgttgctcctacttttccaatttttgatgctttctttcttatcaaaagtgagcaaactggaaggatgtttgccaggatgttaaaaatggtgttatttttgggtggggagatttgaggtgaactttattttctctcttttgctatgctggaatttggaacaaggagtgtatatgattttttgatctgaagcacaaaagcttatccatgtagtcttttggagactttgggttctatactctgattagtgacaaattttcttccaagcagcaggctctatgggtggttatttagcagtcctctggtcttaatcaatgtgattgtttctttccttgtctgtctcacctgcctctcctgctcagcctctctgtgatcccaagggtacactggaggggatttggctgcttggaagccctctcaagctgtctgcccctctcacctgcctcctctctgtgctcacagattcttacctgaccctcgatgaaccaatgaataacatcaccacgtctctgggccagacagcagaactgcactgcaaagtctctgggaatccacctcccaccatccgctggttcaaaaatgatgctcctgtggtccaggagccccggaggctctcctttcggtccaccatctatggctctcggctgcggattagaaacctcgacaccacagacacaggctacttccagtgcgtggcaacaaacggcaaggaggtggtttcttccactggagtcttgtttgtcaagtttggtaagcagacccctactggggatggactttggccctcagcccaatgtggtaggatggctagagtccacagggacaggaaggaaggaatgcacacttagtgagaatgtactctgtgcccacaaccctaaacctggtatggttgtacccattttacaaataagtaaactaaggcccagcagttagttaccatgttacccagctagtaaacagcagagcaggaatgaggtccggatctttctgacctcagagcccctaattgaaaccatcgtgccgttgagctcttttc

SEQ ID NO: 924 - DNA, 1026 bp, Homo sapiens
gttgaggatttttgagtccatgtttataaaatatattggtctgtgctttgcatttcttgtgatagctttgtctagttctgatataagggtaatattggcctcagaatatattgggaagtattcctttttcttccattttttaagaagagtttgtaaaggatttttatttaaatgtttggtataatcaccagaaaagtaatctgggcctgaattttcatcatgggaagttttaaaattactaattcaactttcttacttgttataggtctatttaaattttctgtttcttcttgagtcagttttggtagtttatgtctttctagaaatttttccatttcattgagattatctaagttattttattcctttatcattcttttaatttctgtaacatcattaatgatagtcccttttttattcctaattttaataatttgtgtctttttttttcctttgtcagactagctagtctaactaaagatttgccaattttgttggcaaagaactaactttcgttgaaaactggatattgaaatagagtattgtgacaactgtggaaatcagattgcctctcctctgatgttgctgtgtgttgtttttgccgtttgtttggtgaatttcctgaattaattctgtatagtctgtattttctgtcatgtactccctttaaagagagaagtctcagccaggtgcggtggctcatgcctataatcccagcactttgggaagccagggcagctggatcatgaagtcaggagttcgaggccagcctgaccaacatggtgaaaccctgtctctactaaaaatacaaaaattagccaggcatggtggcatgcgcctgtaatcccagctactcaggaggctgaggcaggagaatatcttgaacctgggagccagaggttgcagtgaaccgagatcattccactacattccagcctgggtgacacagcgagactccatcttaaaaaaaaaaaaaaaaaagagatgtctctactcagttagcctagtaactagttaatgattgga

SEQ ID NO: 925 - DNA, 1022 bp, Homo sapiens
cttggcagctgggccagcacacagagggccattgctccagtaaagcagctaacctccatctcttcatcaaaccatcctagactcagcactctgcagagaaggagcagatggagggaatgtgtggagagattagataagaaggatttctaatctagtgggggagcgagtaaaatgtacagaagtttgagaagccaagctcttatgtaccaatccacccccatcactcaacaatccccactgtatgaataaagcctggaaagtttccaattaaaacagtgcttgtgaatattggcaaggggtatctttgtgtgcagggtacatttaaagggagaagggtgaagatacacccttgccttctaggagtacactttctgagagcttgttcaccaggctgtgagtttctcagtctatctgtttctcagtctgttagtaatgaatgtatctcccacttagcacagcagctagcacatagtagatgcctaacaaatgtgtgttaaattgaatgttggaagtctgtgtcctgaaagcttttcttcacatattacaaggctttttatttgttcaacacatttttaccaagtttttttctgtgttccaggtcttttgattagctgtttttaagtcacagaaatgggtgtcgggaacaaaaccagtcaaaagtcctcattctacatcatttacactttcccttcctatatttataagttttaatatcagcttctacaataggttccagaacaagtggtgctcaaggaatggagaaaatgactattccaaccctagctgtaggtgaaccaaaaaccccagagaaatcaaagtgtagtttaaagcagtgcttctcaagttgtaatgtgcatatagatcacctggggttgttattaaaatgcaaattctaaaagagcaggtctgggagtgggcctgggactgcatttcttacactttcccagggggtgctggtgctgctggttcacacacttagagaagcaggggtttagagaagaggtgcctggccagatgctagt

SEQ ID NO: 926 - DNA, 1066 bp, Homo sapiens
cttcacggatatagtggtgaacaataccaggcaaactctttgtgctcatagaacttggttctatcaggagaaatggacgataaacatggagaccaataaataagataggaagaagaaagtctaatgtgtcagagagtaatgtctgggggtaggaaatgggcaactttaacagcttggtgagtaaaggttttctgccaaggggctgacatttgagctgacctctgaggaacagagtgagccaggcttgcagagagcaagggaaagaaagattattctaggcaaaataacagcaagaacaaagaccatgacatggaaaatggttttgtcacgatcatggaacagaaagaaggccagcgtggccaaattggatgagcgagttgtgggaagtatgacttcaggttagaaaggcgagcaggagctacgcgttacttagctgtgcaagccagtgtttgggcttcattccaagagccatggaagccatgggagggtttcagctaaagaggtgatgtgtcctcatttacaatgggaagagcactctggcatctgtgcggagggtggacgagagtatgagcaggagctggaagagcaataaggaagtttttgcactagtctagatgtgaaaataggtggtttgatgacttggaccaggtcggggtaggtgagttgtaaagaagtaagaggatttgagatggcttgaagaggaggcaggtgtgaaggtttaaattatataaataaacaggataaatggaatctgcatccaaaatgcctaactgcttagaacagaggcggtgatcaactcatgtcccgttctggtccactcccccccgccccaccacccacacagacacacacacacacacagacacacacacacacacaaaccttggtggcttttgaagaagtatttatgggtttcatcctcatctggattttcccatcatcaggaatgagtggcaactgcggggagaaggatgtggatgtgtctctgattttcacagcatgaagacagaataagtctaccattttctattcctctataatcttggtctcttagaatagctatagc

SEQ ID NO: 927 - DNA, 1075 bp, Homo sapiens
catgcgagcctcctctagtaagtaggcagtccttgcacgtgggctccccactaggctgacccagattctgagggctgaccttggtttaagctcttcccattcaatctcccttcttcccactcttctttctcagatatcaagtctgtatcatggtctgaatgctctccctgcctgctcttctctctctccctctttctcttccacaaacactgcccccagtaaatctcttgcactttgaattccatcttggtatctgctttccagaggaccagaaccaacacaagtgatggttacatatccaaaagaaattattgtggaaggaaaatagtacagttcttgaaagcaatcaggattgagggataactgaatctcaagagtctccctaatagcataattagagggaggagtggaggacaaggtttgaatcttatgttacagtcataattgggaaagagtacagttagtcttgtaattgggaagagaattcaggatggtggggggaagttattgaaaaagtagaaggaaactctgggaagtgtaggatcatagaacatgaaatagagagagagcgttttaggaacaggtgataatcagcgcagatgtcatcaaagaaaatctgagtagggactgaggtcttgtatttagagactgacagtgtggctggctggccatcaagtgattatttcagggaaagaatgagaataggtgccaagtttacaggaatgaagaagaaacatagtgggaaatagctagaggtaatgacagtagacctcacattgaaaatgtttgtccatgaatgagaggagggaaattgagctaattagagtaataatttccaagattgagtgtgtgtgttttaggaacacctaaccatttccagaagagggctttaaaggtgctagagagagagagaaaaaaaaaaaaaaaacaaccattgtagaattaaaatgctgaaagcagtgggaagagaaaagctactgaggccagagggaggggttagattttaaacagaagagagaaacctcttttctggaacgtggcaacaagaagatggcagaaatgacagagatataag

SEQ ID NO: 928 - DNA, 1038 bp, Homo sapiens
ccacttcacctttgaaccctggaaaagggcaggaagaaaaaattatgtaccagtgtgctcaattcttgtacatctgtctttaattctcaaagcaactttacaaggtgggcattattattatgcccattttacagaaaggttaaatcacttatccagtgaaactcagccagaagtggcagaacttacattgaaagctaggcctatcaaatttcaaagctgttctttctactataccacaggattaaacaatgccaactattgcttgtcataaatgaaaccctctcttaacataagtttgactcaaaaagtctgactcataattcatgaaatactaagtaactcttcttaaataactaccatagactgtccctctccaaagttttctatgtctattgcaagcatgttttgcctttaacaaacaacacccctttctctgggaatcattctctgtcattcctctaccctatctcatccagaaactggggctctagaaaccatgattttgatgtttaattcaagtctggtcttgagtgggccaagctaggaatgaggagcaggagagagttaagacgtaaaattttactcactgtatggattgagcagtggaaagagaaccaagaagagagatcttgtgacaacttacatctccggtttacttttgcatttcagttcaatgaaacagcctacttaccatataatttagtctgccttttttttcctgaagctttggtgtttgtgtgtgtgtgttttgttgtttttgttttgttttgttttgttttgttttgttttgtttgagacagagtcttgctctgtcacccaggctggagtatagtggcacaatcttggctcactgcaacctccacctcttgggttcaagcgattcttatgcctcagcctcctgagtagatgggattataagcatgtgccaccatgcccagctgatttttgtatttttagtagagacggcgtttcaccatattggccaggctggtctagaactgctggcctcaaatgatccactcgccttggcctcccaaa

SEQ ID NO: 929 - DNA, 1050 bp, Homo sapiens
tcagctttgcagcaacagcctcaccttcttggggaggcacatgatgtgagtcacacaattttcatgccagcccagagcgttgggtgccattacaaagccatgggtgtcttacatgaatgggagcctcgcggggggttgaagaggctgatctgatctgtggttcctcaattcagaggacatgagcttttgaaaataggcctttctaggtgaattggcctgcatgtcatagtttacacatactgagagctgatcatatatcaataattgttctaagttccattgtgggtgagtgctattgtgatgtgctattgtgtgtgtactattgggtaagtgctattgtgatgtttatcagatcctcatcataaccacatgaagcagtaaaggtattatctccaactggggcacagaaaaaaaaagttaacttgtccaagtcacatagctagtaagtggcaggcctagaattccaacccaggcattctatcatgattactagtggccacgaatcagatgattgtagtaacttgtcctggacttgggagatctgtatgctgactcatagagccctaacagtgtcttaattgatacgcccagtggtttcttctcagtcaccagtgaactttgtagaataggatgcagctggttaccctttcatagcatctttcacccttttttcccacctctttgagactctttttagtgtgctttgttgacttctcttcctctttcaacctcatatttgtggattcccccacaagtttctgtccctgcccttcctccttccctcaccatctaatctcacctgcatacccagtgtgctcatcaattcttataggttcaactggcagttctataaggatgactgaaatttatcagccaaccctgactcttttcccgaatgcaagacctgcatttccagcctcccattggacatttccctatggacagcctgccagcattccctatttcacctctccacattgccgcactaatttgcacagtagccagtacataataagcatgtgataaattggtaatagatgaaagaatgca

SEQ ID NO: 930 - DNA, 1032 bp, Homo sapiens
ttctgccattataaaaatttgtaagattctacctgtgacatgggcatctctgtattgcctttgggtgggtgctggagttgagggtacagagaggcattaaactcaccattgctttttacggaggccagtagtctttttttaaccaccatcagcagaaggaatgggaaacaaagctgagatgagacagaaaagcaagaattggggattgggtttcaccccacttctgagtagtaagatgaaattaaaacccttctaagatgtccctgaattccatttaccactctttccacaaaccttctctttttcaatccatgcccaaaggcataaaaggaaagaaaaaaaaaatcaaagcaattccagtaacacttgtggtagaaaatctgcctagattggtatgtgtgaatttcatattattctaaagtcccattattcttaataggcaattttagggggtggtttgaatgcctgatatttggagaactttcaaagcacatccaaggggtctctaataagaacttgggggcgctgaactcggggactccaagtgtcacctatgcatttccagcttcagcctaaccttgggggcaaagcaggcccttaacagaggaaaagtaaaaacaaccaaagcattcttagaggtgcaaggccgccctatcatgaaaacctcagtaaattgaagacagtaaaaaatcactcattcttttgattagcagtcttctgtattcttgcaaatactgtactagtgcagtcctatcatttcaaatgtgtgtttaaataggaataaaatatattacacacataattttccctcaaattacgtttgtgagatacaagcctgggtaattctgctcctgttccaagtgaaatgcaaacccttgtgtttccaaacatcactatgaagcaaagccaataccttcccttttctgagttggacacaagtaactcttccgtgctgctctggaaactatgacagaacgttattcatctgtttgttttaatagccaagggaaaaaaacttcaaaattttgattt

SEQ ID NO: 931 - DNA, 1061 bp, Homo sapiens
gtgaatgcctgggcccagcctgccaactgaaggcctaattacctctctctctcgccttccaggcatatgcctaaatcactggtgcaggcccctatgtgctaccaacctgcttattttatagttttcaagtaataaattggtagtgattcctgtttgttttctatggtttttaaatttttttcagtcaaggttataatttaaacttgtttaatttcccttgaattctaaggttctgtaagatttcttcccacctttgccatatttaaaaccagagccttttcttgttttaactcaaagtaatatcccagatgatgtttcactttattaaaagtacctctttaataagaaatcatgattactttgctttaagcttcagggaaagaaaggagtattttctccattatatttaattactaatcaaagtattgaatatcattgtaaaaataaaataggaatgtcagatgtgaactgtgataccaaattgtttgatttttaaaaggaaattaatcatgtgatctggactaagtggttggtttcaaaaatctcaagtatttaacttgatgtaactaatatgtgcatttcacttttaaacagttattccaaagtattaaaaatcttcaacattctaatttccagccgattttctctgtaatgcattggaggtgtccattaccctttaaaatgactagtaagaataatgtccattgttccaaagtgattttcttaaaatagtatgattcccaccagatattagtcttcattgaaagagaacttcggactcttaaggagaatgatgaaaaacaattatatatataatgttttagggtaattttgattagtaatataatttactagaagcactgaaggtagacaggcttgcattccaacccagactttgctactttgtagctttgacaagttatttttcctttctcggtcttaatttctctgtgtgtaaagtcaagataacaccaatgtgccttccgggttaaaatgaggaatacaaatgctcggacttcaaaaagaacctaggcagatattagttttctaatttttcattt

SEQ ID NO: 932 - DNA, 1079 bp, Homo sapiens
attgcttccacattttttgccaacagttatttagacagagctgaacatattaaacactggttgagttccccattgtcctgtctggcactctgtttccatccataatgtacactggtgtacattagatcactgaggggctcattattactgaattccagccacgacttcattcctaaaaaacacatgtgcctgcttggtattgcttgtaagctttaagctctacttttccctctctctgtgtgtgtatgtgtatgtgcatgcatctatgtgtgtgtgtgtgcatgtgtgttgttttcagataataggtacagcataaaatctttttagattataatttttgtttctattgcacattctcttatggtgggggaatttcaggttaaaaaggaaaataccaactctgtctaattaatgtcaaaatttaggtgaagtaggtgaggagaggttgaaaatttgtggtaagtagaagagtatgaataaagttaactgcaattaaaaccacttaacctgtagttacatttcccaaacccaagtggcagccttaaaactgaccactgaattatggaaactgaacggaaaaaggctttgtttcattgcatcgaagtatttttcttttcccattttgggtgcattgatctccctgtattccctggggttgctggaaaaacttggtcaaaaaggataattactttttttatttagttgcatgctcttcaaaaggcaacagcaagtattcattaatttccatctgatagagccgaacttttttttgtggttaaacaattgaaacaggaaatgacccaagatacagtttccatgacaccctgtcacttggatccagttttccagaagatgaaagaccaaagccggcttttgatagtgagtaactaattggactggctgatagtgggagttttttaatgtgaaaaataaaggagaaaaaactggaacagctgtgttttggtacagttgtctaatccccagataaaacactccaaggacattgaaattgaataatgcctttagttaaggggaaaaatctaaaatctgtcaaagcactggtttactttagagaaaat

SEQ ID NO: 933 - DNA, 1048 bp, Homo sapiens
ggggttgcaatgaaataaagtagtcactggaggcctcattgagaaaatgataattgagcaagaactcaaggggagacaaaggagtatgccatgtggattctctgggcagagcttggcccagtgggatgaagagcaaggaggctgatggggcaggaagacagtaagagcatcactagggctttaaaggccattgtaagggtaaggggaacctgtggggaatcttgagctgaggaatgacgtgattgactttagattaaaattgtgatcattatcaccatgagcttctcctcaggaggagggacctggacagtgtagcacctttacccgattactcttctttctcctattagcttaaccttttacacttgaaaagtatattccaccaccccagggtagctgccctgcctactctatgtcattgattgaacttggcagtcctgtggctgtaatggttgtattccttgggaaacaaaggaaatgattagatcttaagagggaaagaaagtagaatcctgtggtagcacagcttgtgatcctctttgaacatgacttgatctcttccaggcttcccttactgaaccaggaaacctttgtagaggatcctgggaggtgttggtttggtttagtgttttctaaatgtttgtatctccttacggtgagagggatccattatggagcagggggaagagcttaagtgtagtaatttgtcagctcatgacctgtgcttaacttctttcctctaagataatagcagcggacatactctcagcacacatggggatggaaaacatttctgtgctacttctccagtgaaaatcaatgacttttttttttttcactttaagttccgggatacatgtgcagaatgtacaggttcattacataggtatacatgtgccatggtggtttgctgcacctatcaacccatcatctagattttaagccctggctttcaacattcaagatggtcttccattatctcatttatgtcctattattctcaatcaagttaattggaaatctgtttttttagtgcatgtacaggaat

SEQ ID NO: 934 - DNA, 1044 bp, Homo sapiens
aagaaaagcattaccagtgactgcccattaactatcaatcagatcctctgagcagttctagttcaccagagttaaccagagttactaagctggtgtaattcctggctcaagccaaaaaacttgatgttttagttagtcttatgacgagcacattttgagtttttttcttttaaaaaataaaatattgcaaacagctctcggtcattaccacctgttgtaagctgatctaagccagttcggttatacacaactcctaggtgcttttttctggtgaattttgatagctgccagattatttgaggtgagaggttttgctactatcccacaaccttgccacctacttatagctagtgcaagtctgagacattctgctgcacatacagacgttgattaacagccgtatatcagccagtaggcacaaaatatttctgcaacattactctctatgcttgataaagtcccagctgtcttcttttagttgttctgctcaccactttgcatgaaagctgtacttgtagacattacaacattccagaggagagttctgttatctttaatagtcagcatcaagcaactggaagtcctccaactgtgccggactcatgtccacttaggggacaagcctatcaaggctacactcttattcatacaagggtagaggtatttctagaatattttggccaattctcataatttgaatatatgtttaagtttaccagggatggcccatttctcacatttatattgctagcaaagaagccattcgtctcacacacccacacaaatccacctctgacattcactttgctaattggcaaagggcctggtgttaatgaacatggatggtggaaatatttgcagtgtgtctttctggagtatgggcttcatgcttagaacacgacctgcctacccctagagtgcattcctgaatataatgccaaccacatttgagttgtagtttaaactaattaactcacatgcaatatctcattacctatactgaattattgttaagttaattaggcatcctaacattgcctttgg

SEQ ID NO: 935 - DNA, 1030 bp, Homo sapiens
agttctataatacagcacaagtctgttcattacatggaatgcttctctgctggcttcattccttaaacttgaaattaatgtattgtggatagaatgaaaagcattcttatttcctgcctgcccaaaaccctttaaaggaaacactctagagtctgtaagttggacagtttcagggagtccaattcattgtgtttggatgcagtcctcctctccagtgctgacaatgagcaaactgatttcacctgcctgtatttgcatagtgtttgtggattcttccaggtttcttgattattaattaggcttgaagagattgagaagggagaaatcccagcaaacatctaatttaagtcaagagtttaatctgaggatgaataactctgctttctgtacctttgcttttcattagttaatgatttagaatgaatgtggttgtgtgtgtgtgtgtgtgtgtgtgtgtgtgtgtgtctgtgtaggggtgggaggagaaggagaaccagaacaatgacaaaaaagactgtcttgaagaacttattctgggaaagtaaacaaggtcaacaagaccataaactctgaaagaaccaatatctacctacagatgtgtttagactgattctcagcttattaacttgcacattaccccctggtgtctctttgttgctcaaacatggagaagcgtttgctataccagcacaggctgtgtgtgtttatacactgacgggtttggttggtgatactgctctttgtggtgggaaaatcttccatgttacagtttaatgccagactcattccgttacctgaatactggaagcttctgtaggacgtattagaaggtatcactacaccgtatattaaaatatggcaagccactatatactgtgaattgaaagatgagaaagaatgagtccctgtgttctagaaactcacaggatagggataagggtggggaggactagatatgtaaacaaatgattgcaatgccttttgtaaagtgttagaatagcgtgaggcccccaatgcataaagatcagaa

SEQ ID NO: 936 - DNA, 1031 bp, Homo sapiens
gtgattctcctgcctcagcttcccaagtagctgagattacatgcatgtgccaccacacctggttaattttgtatttttagtagaggcagagtttcaccatgttggccagggtggtctcgtactcctgacctcaggtgatccacccacctcagcctcccaaagtgttgggattacaggcatgagccaccacagccagctctgggaatttggatttgtacagaaattcaatatagggagaccattactgacatttcaagaaattgacagtagaaatgtctccatttgaaacgtcccctagtaaaggacttttaaagcaatgtttagtaggccacctccctcagggccacctccatgagtcttacacatgctgacctcccctggcttcctctgggcctctggactcatctgtggtggtggggggcctaggaatctgccttttataacaagcaatccaagatgtgttttgtacccttaagtttgataaccaccacctttgcgtcagaaatccaatttatgcaactgttattgagcccctacattgtgctccccatcgtattcctcacgtaggtaataactaattaagtcctcaaagctgtgaccataaggttgatgttattgagatggtttacattccataaagtctcctatataaagtgtacaattcagtggtttttagtaagtttctagttatgcaatgatcacatgatctaattttagaacatttttcatcattccataaagaaatgttgtattcctcccttagtagtccctccccaaacatagatttattatacccatttttggagataggaaaatggagtctccaggcatttaaacaatatgccttcaactctagagtaaatgtggagccagcagccagagtccaacttccttgcttccagaacccatgctctttccactacacaatgcttcccatccaggaactcaagccaaattaaatatttacttggtggggagaataatttgatgttctggttttgtccttgttcagtagtttgggataataaatt

SEQ ID NO: 937 - DNA, 1029 bp, Homo sapiens
atgcctgtagtcccagctattcaggaggctgaggtgggacgattggttgagccaaggaggttgaggctacagtgaactgtgatgatgccgctgcactccagtctggggaacagagcaagacactgtctccaaaaaaaaaaaaaaaaagtttctattttgccttttttcttaaaagatatttttgctttagatagaattctgaattgacagtttgttttttgaacactttaaaaatgttccactgtctgctggactctgtagtttctgatgataaatcagtgaaagtttttgttaccctgtatgcaatgttttttgtttattcatttaattattctggctgcgctcaagatttttctctgcttccgttttcagcaatttgactatgattatgcctccctagacataatggtttaaatattgattctgcttggtgtttgttgagcttttggaatctgtaaatttgtgtctttcatcaaatttggggactttgggaccatgattttttcaaatatattttctgtctcattatttgctctccttgtaggtctctgattacaggtatgctagatcttttgatattttactacaaatccctgagacagtgtctttttcttctctttttaaattttttttctcttggataaagataaagatggtttattcttatgctgcagaatttcctttttttttttttttttttgagacagagtcttgctctgccaccaggctggagtgcagtggcatgatctcagctcactgcaacctccgcctcccaggttcaagcaatttccctgcctcagcctcccaagtagctgggattacaggcatgtgccaccacacctggctaatttttttttttttttttttgtattttagtagagatggggtttcaccatgttgaccaagatggtgtcgatctcctgaccttgtgatctgcctgccttggcctcccaaagtgctgggattacaggagtgagccactgtgcctggccctatttgtttctttttaataattctgtttctgtactg

SEQ ID NO: 938 - DNA, 1026 bp, Homo sapiens
agatctggcttcattgttagaagtagtgttactttttcttagtgaatactcaggccattcttccaggttatggactttagcttttgctctgaatgagttagaaggccattgggagactttacacaggggaatctggggagtggcctctctagtatatggccataacctggaagaatggtctcctacctgttaagtggaaggaataagtacaactagaagtcatttgacaaatatttattaaatgccttctgcatagtaagtactcttttgttctaggtcaggagctgtaaacacacacacacacacacacacacgcacacacacgcacacagcttataatctggaggccaggggccaggagacatagaaacaagtgatatgttagaagatgatgaatgctatcaaggaaaagtaaagcagagatgagacatagggaatacggttggctgtcggggggaggagcagatgacttactatttcatctaagggtttgtgggtgagatctgagtaagtgggattgtagactatgggtttatctgggggcagcatatctggggcaaagaccttgaattgagtgactgtttggtgtgcttggaaactgcaagaaggccactgtaactgtggtggtgtgaaagagctgggagtagattaggccagagaggcagtcgggggccaggtcaccaagagccttattttactggccattataaggactttagcttttgctctgaatgagatagaaagccatcatgtggtggggtagttacatagagaagtgacatgatttgacttcggttaaaaggtttactgagccaagactagactggacaaggcaaaggtagaagtaggggaagacaacttagaaagttactccaaaatccaggcagcagatgatgatagcattaatagtgcagtgacagtggaggtgatgagaagcagttgaattctgaatatgttttgaaggtagaatcagtaggatttgctggtccattggatggtgggcagggtaggggaccaggtatgtga

SEQ ID NO: 939 - DNA, 1104 bp, Homo sapiens
ctttactgctgaggtgacactgagatgaagaggaagctggaaagggagctgagaagggcagtcaggcaggtagaaagaggaccaagaggactgtctccctgaagccaagtgaagaaagtgttgcaagaaagagggagagatcaactttgtcacctagtccctgtatgctgagggtccagaaaaccagccatatgatttagcaatgtagaggctatgggtgagcttgtcaagggttgtttggtagaatagtagcataggctgatcctagagggttcaagctctggagaacggaggagaggagtcagaggaaataaggacttgaactcctgagatttgctcaaaggaaagttagaaggccagatgagatcaagaagatattttttaattgagagaaattatactcagtttatgtgccaaagggaataatccagtagagattgacacaagagcaaggggagaagattgctagagctttttccctgattaggtaagagatactgcatcaccagtagaggacctagaagcacagagcattcattcatagcaagaagaggaaaggaagagtacatggatggagatgctcatatgatgatgggtatgaacgtggggacactcccttcttagtgattctgttttttcagagaattagaaagcaagatcatcagctgagagtgaggaccagggaataagcattaaagacctgttagtggtactaagattacctcctgttactgaggtttagactgaaactcagtgcacaaataatcccaacaaaatgctgatgtatttcagtgtttatttgtgaaggaagagagttcagatagtttgaaaattcagagggtggggaagaagagtgtggagagggcagaggtaagtagaatataaagaccagatcttgaatttttatatttctgtgagcatgtctcaagtataacctactacataacaagagttgttctcagcacagttgacacagctagatttacaagcagattttggcaatattcaggtatttaagaactgacttgcttgcatttgaagttttgcaacattctactaggcagtggctacatcccaaagtccacatacttgagcagttatttg

SEQ ID NO: 940 - DNA, 1030 bp, Homo sapiens
catgccactggtttataagagcccgaggacagttttacttatgtctcagcactcctctgggcacacagattgctttcaagtttttctccatacagaaggattcatattgtttaaatggagcctgcttgccatcccacttgcttttccataaaatcagcatcctcttaggtcccgctctccagtgttggctggcaaacagcaggatctttaagggctttttcagtcatgtccccttggggcatgacaagaatctgtgctgtcctccagcattctcttgccctgacctctggcatggtctggggagctcagagaaggcttcaccaaagaagcaagaagcaacatttgcactgagccttgagggggtgattaaagaaaaggtaggggcaaagaatattagaggccaaaggaccagtgtttacaaagtcatggagttgtgtaagtgcctgtaagatgctcaggaagggtcaaggccaaatcatgaagaggcgccgagtgctaggtaacttatgaaatccacctactctgccaaagacttggccatcccacatggcttctctccttctcagagtccatatcgctcattgttgcaaagaacagcagatgtatcccagtctataagcatcactgccacagttccacaaaaatataacagatgtgggtagtgtttttcctgccattgtaaaatctttttttttttttaagatagctgtttaattttccagaaatctgtattttcctcctagaatcaagtccttttttaaatacataaatagtgtatttaagcctttttgacttagctttttccacacctatcctggaaaaaaaaagtcctcaaaccttgtattccctgtatctacactaaaaaatgcaaaaatagatactcctcagagcaaccaacgtcaccatttacactacagccaggtcttcaaactccctttggcaaataagagcagctaaagctctgttttataaattggagactgttaatttgggctttgaatgacattattcccaccaactaaatagaaac

SEQ ID NO: 941 - DNA, 1260 bp, Homo sapiens
agtgaaaatcctccatgcaacaatgaccccttgtcagccggggtcgatgtgggaaaccatgatgaggacttagacctggataccccccctcagactgctgccctactaagtcacaagttccaccactaccggtcacaccaccctacacttcatcatagccaccacttacaggcggccgtcacggtacacactgtcgatgcagaatgctaacaatctcctcacctccacgccaagatgagatctgggagctacagaatgttctggaaagaaaaagaaccggcttaaaacccacagcaagagacctcccttgtgtttgtgctttgtgcagagttgtttgagtcatttcctgcctgtcgacatggttaaaaacgagagaaacaacaacacagtcacatttgtgaagatgtgaggctggttctgaaatggaggggaaataagcctgatgaacagacctgccataacactaatggaaggtaacagaaggcgaacctccaaacacagagacggaacctgcaagtgaagctgagccagaggaatgttccaaagagccagaagcattcagctctccttaactggaagagagaaaaatctgctcacccagagactggaatgtggcacatgcagatacaaatgtgtgcattgaagatttcgctttgtttcttagcggtacctggataccacagttgctgtatggaactcatgttatgctctaaacgatgcatctcagaatttctaagtaaaggattatttttctactatttattgaactttcaaacattctcaaactttggggaaaaggaaaggaaacacaggagaagttttcagcagttgccccgagctgttttgtgtgtaatgaagtggttctttgattaaggagctctatttcttatttaactgatatcccactgccccactccacaaaataggaaaatgaagaaatctttctctctgacttgtttacatcatttcacggaaacacatctttgtttgtaatgcagtattctttctctgtgtttgacagagatggggaggggcagaggaatttaagaggttttaaaagaaatgttatgtttcttatgacttgtttccactcctcgtacaatgctattcttaggtttctacgaaacctaatgttagaaccgcatcctttcagctaagggagggttggatttattttccttgttttagagactacaaatttttaaatatcccattttgactgagaatattgacatataagggaagaagttttctaaattg

SEQ ID NO: 942 - DNA, 1050 bp, Homo sapiens
ttagtgtatgctgtgcaaaaattatctattaaattttcttttctaatgcaattaaacagaattgaattatgggttctacttctttttcatgtgttttgttatcctattctcaatgtaacaagaacactgaaagctgctagggaaatgtacttctagatttctgggacaccactgtctccttaagtttctagttttggaagaaattcttgaaaagtgtttgagaaatgcagttctctgctatgaaaacacattcaagaagaggaggaatactttgtggttagcatcaaaatgctgtgttaacagccattccaaagaaatctcatgtaatctatagcccatttcccagttaatgactgggttatgcttagaaattcttttttgaacttgtgacatgttttcacatagaaagaatatagtagatggtatttagttttcaggttagcattttagcctctatttaagttatgattgtttattaagtgtaagattacactaagtagtacgacaacatctaacaaagctccagctttgtgcaggagcagaaactctcccagcttcaaatcatcagtaggtactcctgcatcttatggcaaaagctcaggaagaagggaatttaaggaaattgctccttgaattaacaagactcagatcagggaagcattaaatgaagtcaactctgatcaaaggctgttactgcaaaaggggttcctattactaactacctgagttttgtctcttgattcttctatttgcacttattcttctttccttatggacaaaaagtttttgtttttcatttttagatacgggatgttgctatgttgcccaggctggagtgcagtggctattcacacattcacaggcataatcatagtgcactgcactgtggcctcaagctcctggcctcagatcctgtgctaccaagcccagccttgatttttttaaaatctttactttattttgtaaatttatttttaatttttaatttaatttttttaaaaaaagctttatgcttaactttcctcgctcagctaaaacaggcaaaccaag

SEQ ID NO: 943 - DNA, 1459 bp, Homo sapiens
gaatggggaaaagtaactcaagaccaatgatgctcttgtcctacctaacaaaacttaaaaacaagaccagaacggatcaaagtgcttcctcataacttaaccacatcctggaacaaaactcaagaatatttgtatgcatccaaaacatctgacacccaacaaagtgaaatttatgatgtcagacatccaataaaaaagtagcagacatgatgaagaagcaggaaaacctaatgtataacgaggacaaaaatcaatcacaactggcctagaattgacacagatgaattaataaaaatggacattaaaccagtttttataatagtgttccatatatatagtaagttatagtaaagattgaacatggtaaatagagacttggaagatataaaatatccaaatcaaacatctggagatgaaaattacaacatctgacatgaaatacactggataggattaatggcagaatagacactgtggaagaaaaaattagtgaacttgaaaacaatgatgtaagtgatccaaaatgaaacacagagagaaaaaagactgtaaaacatgaacagagtatcagtgaactgtgggacagcttcaagagcaattagagtccctgggggtaggaatagttaaaaaaaaattaaagaattagtagctgaaaagttttaaaattttgatgaaaattctaatcccagaaatccacagagctcaaccaacttcaagtacaaaagcatgaggaaaactacagtgtacgttgtaatcaaattgcttacagttagtgatagaatgtcttaaaagcagccagaaaaaaagtatacatcattaatacatttagcgggacaaagattaagatgaccatagatcttggaaacaacacaattgaaaagactgtagggtaacatcttttcattctttaccaaaataaacaaaaacacaacaggtccacatagaattcttaacctattgaaaatatctttcaaaaacagtgatgaaatagagatgtttttcagtcatacaaaagttaaaagaatcatcaccattagacttgcactataagaaatacttaaggaagtcctacaagcaggaagaaaattatagatggaaatctggacctacccaacaaaatgatgaatacgtgatatggtcattacgtgggtaaagacttttttcttaatattgaaatcttttaaaagtataattgactgttaaaagcaaaaataatgacattacattgtgagatttgtaacacatgtagaaataaaatgtgtaacagcaataatacaaaggctgggagaggagaaatgggattgcactgtttgaagtctcttatacagtacatgaagtggtgtgataccgtttgacaattgactgtgataagttaaagatgtatactgtaaaccttaaatcacctgttaaaatcacacaacacagaaatcattaattgtattaaatgattttgccttgg

SEQ ID NO: 944 - DNA, 1064 bp, Homo sapiens
ctccgtctcaaaaaaaaaaaaaaaagaagattttgaattgtaaggcaacccacattgttaaacttcgttttattttatttttatttgaagtttttatttgtaaaaatatagaaacagggtttcaatatgtcacccaggctgatcttgacctcctgagctcaagtgatcctcctgcctcagcctcccaaagtgtcacgattacaggtgtgaggcactttgcctggccaattaaactttaaatcaacattataagaaggctcttctgtagtatcaaagtatccatattgtgtcaacaagttattaataacttcagattcccttgtcatccttctatttgtatgatatgatgagactcattgtgctaaattgtcagtcctcttaaagccagttggtatttacctgagacgttctatgaggattttatgccatatgtataattgagaactgcagtagagagtataaaatagatatataatataaatcaaattatgtttatcataaaatagatcttgtcagatgaatgaggatttctagaagaaagcctttgaaattgtgtctttgtacttatgctgttctaatgtttcttatttctatattcattgcagatgcacagtaatcaaaagggcttacttccagagccaaatccagtacaaattatgaaaagtttaaacaaccctgccatgttgcaagttcttctacagccccagttatgtggacgagctgttaaaccaggtatggaccatgtatgtatactgattaattaaagaatgctagcatgaagttaattttttcacatgtgaaatatggaaaaatacattgatttgtgaaaaatatatttaaattagtataaaatatttaatttttctaggacctgttaatgaattttaacaataatctgaggtgatatattttgactatttttgacatatacaacctgcttatgtggtattttttactattaataaatgctaaatatcaaaccttctgtttagctcttagttgacatgaatttatagaccaaggtaaaggttaacacactacattgttataacctatattaacaa

SEQ ID NO: 945 - DNA, 1050 bp, Homo sapiens
ttagcattatgaggaaatgaatgcctatacagtggtctccccttatctatgttcttgtgttccacagtttagttacctgcagtctgaaaatattaagtggaaaattccaaaaataaactacttataggttttaaactgcatgctatcctgagtagtgtgatgaaatgttttgccattctgcttctcctgccttggctatgaattacccctctgtccagtgtacctactctgtatacattacccacccattaatcacttagtagccttcttggttatcacatcacctgtcatggtattgtagtgcttatgttcgagtaacccttattttccttaataatggccccaaagcgcaagagtagtgatgctggcagtttggatatgccaaagagaagctgcaaagtgcatcctttcagtgaaaaggttaaaacatttccaacttaatagggaaaaacaaactgtgtgctgaaattgctaagatctacagtaagaatgtattttctatccatgaaattatgaagaaggaaaatgaagtttgaacatagcgtatataaattttggtactatttatggtttcaggcatccactggggttcttggaacatatcgctcgctgataagggggaactaatgtattcaacatttaagtttacagcaaatatgtatagagcaaatatattaaatacatttattatgtttcagtcccaactggtctaacaccagctcacctactgcaattcaattctagcactaactacctggagttagcacagaccccacaagttaagagctcaatcttccatatggctgcccccactttagacctagacacaagttcgggggattctccaggccatgtgcacttctgaccaactaactacaaatttgggagttcccacagtgccctcaggttcaatagttcaatagaatgactcacagaacttaggaaagcactatgcttatgaatacagttttattataaagagcacaggcaagggaagatacacttagggaaaagtcttggagggtcttgaatgcagagcttctgtgtcct

SEQ ID NO: 946 - DNA, 1001 bp, Homo sapiens
attatttcatgactgcatggccccctcttgtgtattattaaaataattaattagctttgtctgataagttggagagtgaaatatgtttagaagcagttacttttactcagatcgactggagaattgaacttcaaaatgaattgggttatacaacatgtagcttttcaaaattaaactgacaacgttttgtcattttcacagagctcagttatgggtaatacttctaatttattccttcagaatctttctcatataccactggcacaacaacaattaatgaagtttgagaatattcatactaataatgtaagtatggtatcattttttcttttaaaatcagttcatttcttttctagaatcaggctgtggatcaggttgtttatgaattttcacgtgtgtagctttttttaggttatatcttatggccatgggtcttacctttttttcttcttttgtagaaacccggcttacttggagagcccccagctgtggtacttcagactgcactagggatagggtcagtgcttccattgaaaaaggagttgggacatcatcatggagaagcacataaaagtaaatgatgtgtatttactgagaagtcagtaaacagtcaggtttgagatttaaagatagtttacctatgttctaattttatttacagggaggtcaaatttgagttttatttagtcatttaaaattttgagaaccctcttggcttttcgattttcaatattggtaagttactgatggacttgcttccatgccaagataagacttcccctattggatatgctttaatattttatgcaggttcacagcagtacaaggtaaagacacagatccatttgagactgacatgctgcccactgggctgacagcacatatggatccatgtaattattgctgggataagaaaccattcacttttattttttaaaatctagtatttataaatttaaagtttgattatttatttgtattatttaaaaaaatttaacctc

SEQ ID NO: 947 - DNA, 1101 bp, Homo sapiens
aaatatatatttggtagctaattaaagtattttaatatttaaaggcagaaccaattttatccggaaaatatcaaaaccagctattaaactctggtctgttcaaactaatctggtctctcttttaattctggaagattttaccgaatcattttattggctaaaataccactgatatttataaatgttgtaataagtaggtagactaaagtacatctaatttttattatatttgtaccctaaaatacactgtggtttgtaagtggtataaaacttaggcttaagcagtttgtaaggaaaaaaaatctatgtagtttcttgtattcaagtgtcaaaataataatactgaatttgtaagaggttttagtgttacctagccatagcaagaggtatgactagaatgccctgcaattgtatattgagaaagctaatgcagtcctttttttttttttttttttttttgagaccaagtcttgctctgttgcccaggctggaatgcagcgacacaacctcggctcactgcaacctctgcctcctgggttcaagtggctcccctgcctcagccttccaagtagctgggattacatgcacacaccgccatacctggctgatttttgtatttttagtagagatggggtttcaccatgttggccagactggtctcgaactcctgagctcaggtgatcttcccgcctcggcttcccaatgtgctggtattacaggtgtgagccactgcacctggccgtcaattctttatagaatgaattttaaaaatttatctgcagtgttcattgcttgggttattgagggaaattacacaaataaaacttgtatatgaatacttcatgtctctttgcaatctttaattcactgaaagcctcagagtctttagaagaactgtggattttaggtgattcacataatgggcaaatgagtctatctacaagaggacagccaaaatgggggcaggttctggaaaataagtcctgtgaagaagaattcaggagaaatggatatatggaacctggaaagggacaaccaaacatatacattgttaaagctatttaaagagtagtcatacagtattgtgtgtacctccagtgg

SEQ ID NO: 948 - DNA, 1063 bp, Homo sapiens
tttgagaattttattcagggagacagggatgataaccagtttctgtttattgtggtaaaatatacataacatacaatttaccattttaaccattttaagtgatgtggcattaagtacattcacattgttgtgcagcatcattactctccatctccaaaactttttcatcatctcatactgaaacctgtacctgttaaataataactctccattttcttctcccactagcccaggtaaccaccgtttctacttttgtctttatgaatttgactattctaggtacctaggtgacacaatatttgtccttctgtgtgtagcttagttcacttagcataatgttttctagattcatccatgttgtagcatgtatccaaatttccttcttttctaaggccgaataatattccattgtacgtatataccatgttttaattcagccatccatggacatgtgggttgtttctaccttttgtttattgtaaataatgctgctgtgaacattggtatctgagtccctgctttcaattctttggggtatgtacccagaaatggaattgctggatcataccataatgcatgtttaatttttgttggaactgtcatccttttttccacagcagctgcaccattttacattcctgctagcagtgcacagggattctaattttccaacatccttgccaacgcttgttttctgttttagctgtctgtaacaaaaataccatagactgggtggtttaaacaacaaacatttatttctcacagtttgagaggctgggaattctaagagaaggtgcaaggtgccagcaaatccagtgtgtgatgaggatactgttcctgctttacagatgaccatctttccattccattttcacatggtaaaaggctggagcaagacctttcatgtctcttcttataagagcactaatcccactcttgagggctctactttaatgacctcattacctcccaaaggccccaccttctaagaccatcatattgaggcttagcatttcaacatatgaattctggggagacttaaacattcagttcgtagtgatag

SEQ ID NO: 949 - DNA, 1050 bp, Homo sapiens
aaagtatgataacaaatgaaaaatttactacagcacagcagtagatttgtgcaggcagaagaatcaacaaacttagaatgtaggtcaattgaaattatccagtctgagaaactgaaagaaaagagaatgaagaaaaatgaaccatagcaatgtaggcaaggatgtggagaaatgggaatcctcatacagtgctgggggttggtgggatgtaaaagggtgcagctgctttggaagagtgtggcagttcatcaaatgttaaacatagaattaccagatggccccaggatttgactcctaggtgtatccaagagaattgaaaacttgtgtctgtacacaaatgtgtacatgcattggcacagcagcattattcataatagccaaaaaggaaaacaacccaaatgtccatctagtgatgaatgaataaacaaaatgtggtaatatccacgtgatggaatattattcactagaaaggaatggagtactgatccatgctacaacattggtgaaccttgtgaacattatgctaaatgaaataagccagacaaaaagtccacatatgatattccatttatatgaaatatccagaataggcaaatccatagagaatgtaagtagatagtggttattgggggctggaggaaggaggagttggggagtatgattaacaggatttttttggggaggggagagtgataaaaatactctagaattcaattgtggtgatagttgttcgtaagttggtgaaccttgtgaatcaacaaattttggactctttagaaattaagcttcaactgtactaaacagagaatagcattttcatttagtgttttagagatcctaaaagtagttagttatgagcaaacagatcagatcagtttttcaagatctaggtctaattagaaatcagttttaaatggactaccccttccatttctctagtcagttgtaataattaattagaattgccattgagctgtgaattttctcaaaaactgcatgtcttgaatatttgaactatgattgggaaaacttaaatcagaaataaattat

SEQ ID NO: 950 - DNA, 1028 bp, Homo sapiens
cagaagaagagggagcaaagtggagaataggagatgatgtcacagtggggtcggggaggcagagggcacagacaatttaggaccttttaggcccttgtaaggactttggcttttactctaagatagaaagccactgggatgctttgagtagagggataattgactgtatttatagtttaacatgcctagctgctgtgttaaataatgaatgtagaacatagcagggtcagttagggagctgctgtggtacaatccaagtaaaaatgctgacttggacaagcctggaagcaacagaggcagtgacatgtggctggactggagacatttttggaagctggagtcagtggggtatacgagggtaagagaggagccaagtccccaagagttttggcctagaaaaatgaatttgttattgattgagatgggtaagactgtgtgggtggagcaagttttatgggtacgttttagacataagatccctaagtgaagatgttcctttattggtgttcattatacaagtctggaggtgaggggagagttatgggcctctagaggtacatatttgagaaccatcgcattcctgtaaatcgctataattgtgaattgcatgaaattggatgagatcaccaaggaagtgagggtaagtaaagacaccaggggttagtcactgtgcgtcttaagatttctctttcgattttgttttcttggtgaaatagaaagcaaagcatcagctgagagtgaagatgagggtgtactgttggagcttcgagaaaagagaaggcttgcaatagtcacttaggggagtggagatcagtgggcagggtagggtggggatatagtaggattgcccaggggcatgagggtgaggggcctccgttgaagttatgcccattctgataaggaagtattagacttggattgtagttccaaagtacagaatggaaccactgggtgcaaactattcatagagtggtttcagccaaccctaaaaaagaccctgctaaagatgaagtcctctaaaatgacta

SEQ ID NO: 951 - DNA, 1050 bp, Homo sapiens
gcttaaccgcgcctggggaggaggccgaggctccaggggcggccggtgggaggtgcccacggctcctctccaccgctcctcctgtcgcgaggaatagcccgagccacccggccgagggaacgagaactaggcagggaaaacccggagcttccgtctcacgctgccctccttaaggcagagccgtccccgtaccccttagccctggccccctcccccgagtccctagagagccgcgcgccccctcccgcgggagcccagaggcggagcgccgcccacctgtggcagtcgggcggggccgcgcgccggggaacctgtggcgccggggggctcgcagcctcgcgcctctccagcccctccacgcagcctcgggcctcggggcagagccctgggtggctttgaaaggcctgtctgttcgttgtcgccttctaaggtaaactctccccagcaactcccccccctcccgaagccgccgggcctggccgtcaggagactcggaggagactcgttctgataaattacattttgtaatgcagctttcctggaaatggcttcttgagctgcctcccttggcatgagatgcctcctttggctggcgtggtgaacttggggatatatagatcgcctgatttcttagtctgacggggttgagtgcgtccctttccccctctcctcccactccacgttcacaccagttccgaaagaattggcgttaaaaggcgagaggtagcggttgtgctgctgcgaggctcttaacccttctgggatggagatgctggtaattagcaactcctttatgaaaagttgttcttcccagcaggggtcctttactgtcgatgtacttctcaaggatgtccgggctggttattgcccatcatggactaattatccggagatctgcatttcagaagcacagactggcttgaaaaggaaggtggaggacagtaccagaaaacaaaaggaaagcttaaaagcaaggaattaagaagtatctccagaattgtattccttatctcttaagcagattgaaaaagcggacttttacaggaaact

SEQ ID NO: 952 - DNA, 1036 bp, Homo sapiens
gggagagcggcctgagggggaaggctggctctcatcctaatggttttgtgtttaggttgggcttcttcatggtaggggcatggagtcagtgaaggaagacagtgagaagagatgagcccattccataattctctgtacctgactaggagacttgtttccttctatgagcccattccataattctctgtaccttacttggtgacttgtttccttctggaatgaagggcttcacactgtccatcctgggactggactcatagccctttccatgtttaaagagagtgtgatgggaagtagcttatttctgcactttcttaggggctttgaaaattttccatttgctcttttcccttgttctctctttctctctctctctcttttttttttttaactttcctgtgttctaaattttagttttcattctctttcaaatgccttcatttcctccccagtgatcctccctggagtgagaaatgactatgaaatgtttagattttcttttttctgttgggaatcaagcagctttttgcatgagccaattaaaaaaaaaactttatcaaagaaagaagaaaaataaaggacagcaatttgttttgaaagtggcttgtttctagtgaactttcgggttatcggattatttttccctctcagaaggtctgagaatcttataggcttactgcctggtaaataaaacattcctttccacggtatttatttttctgtctgttacctgctgtttgcttttagctgatttcctggtgggaaacacaaccacccttctgtatgtaccctttataatggaaggtttgaaggagacgatgaagcacaacaaaaacccaggaaatagaaccgtgtaggaatttgaattggaaagtagctccggccatctgctccagcctggatttgggcacactcttgtctacatggctttcctcctcctgcagcctggtgaaaagctgctctttcaggaaagggccattctgatgtcattgcttcttggaagtcttccctcacctgctctggcagaattcatctc

SEQ ID NO: 953 - DNA, 1030 bp, Homo sapiens
accactatctaatttcagaacattttcatttctccagaaagaaaccctatacccattagcagtcactccccatttcccccttgccccagccctaggcagttactactctagttctgtttgtatggatttgcctattctggatagttgtatgttaatatatgtgactttttgtgtctggctgcttagcatgttttcaaggtttatctatattgtagtgtgtatcagtactttattcatttttattgccaaataatttattgaatgggtataccacattttgtttacccattcattccttaatggacacttgggctgtttcctgctatgggacatttgtatgtaagtttttgtatggatgtaaatgttcatttctcttgggtatatacctaaggatagcaatacaggttcatttggtaactcgacgtttaatagtttgtggaagtgcctgttatccaaagcagctgcatcattttaccttcccactagcaatgaatgaaggttcgtttcttctcatcgtcaacttttaccttctgataaaagaaaaacttcagccaagtttaattgagcaatgaatgattcacgaatcgggcagccctcagaatcacagcaaattcacagagactccagtacagccacatggtggaagaagatttatagacaaaaaaagagaaatgactacagaaatcggaagtgagatacagaatggctggattggttacagctcggcatttgccttatttgaacacagtttgaacactcagcagtgtatgagtggttgaagtatggccactggtattggccaagactcagctattgttatagtcacatactcctaaattaggtttttagtcttatctacctaagccaggttgcagtttgtccacaagtgtaacctcccgatgggctcaccttgcctgctgcctagacagagcggatttatcaagacaggaattgcaatggagaaagagtaatccacgtagagctggctgtacgggagactggcgttttattattactcaaatcaatctcc

SEQ ID NO: 954 - DNA, 1057 bp, Homo sapiens
atcagttttggccaggcgtggtggctcacgcctgtaatcccagcactttgggaggcggaggcgggcggatcacgaggtcaggagattgagaccacggtgaaaccccgtctactaaaaatacaaaaaaagaaaattacccaggtgcggtggcgggcgcctgtagtcccagctactcgggaggctgaggcaggagaatggcgtgaacccgggagacggagcttgcagtgagccgagatcgcgccactgcaccccagtctgggtgacagagcgagactccgtctcacacacacacacacacacacaaaaaaaatcagttttaaggtattagaggatgtcgttctttcttgtcttctgttaaatggtgctttgaatgtcatgtttcaaacactgctggagctcagatcccagaaaatgaaaaatgtgtgcacttagcttatgcgtagaggagcctagccaaaccaaacagcacgtttgaaactttgcttttcctttatggctgagattgtgaaagacagccacagatggtggctgagctctagctggaactgctgttagtcggcgcgagatgttctaagtgacgggagccaggaactcactgtggtgtttctagaagttaaattatgatgataggatcttcctgtaatactggttctgttccttgcctttagttatatcttggaaatctgtcacatggttagtgactagtgaaaggccaaaaaaatttgcagaatcagctatttaaagctttgttcttgatagttcaagtgttacgcaaggcaaagcagccctctgttaagggtttcaggctaggtgtctccttgttagggtgtcattcctgttgtaattattggtttgtcttgtcttcttcctttttttttttttttttttttgagacaaggtcttgctttgccatccaggctggagtgcagtggcacgatcatggcttactgctgcctccacctgtcactcaagagatcttccaacctcagcctcccgagtagctcggactacaggcacatgccaccatgcttggctaatttttttttttttttttttg

SEQ ID NO: 955 - DNA, 1032 bp, Homo sapiens
acatatgtctatagaaaaaagccaacagtatcttctgaatcacatcttttaggaaatgccaagggtaattttttttcttctgttgcccttgtgagtctagggtatctttcaagaataaagtgtataatagatttgtttagaaggttactgaagaattctgctttcataattaaaaaaacagctttttcttcctgtgtgtatgtgtttatgtgtaggagggcagtagtttatcttagtcatttatctttaaatatttagccgtgaaaaatcatagccacataacccttctatctcaggttgttactaaggcagtgatgtatattctggtatcttgaatggaaagtttaaagcaattgtggtgatttctaaagaatgaagaatagttgtaaaatttgtggagctctactagggtgctgtggccatctatgcctgccaaatgtggattgcacaattaaaatgtttggttcctcactgggattgttcttcttgacataaccatgatttgcccctctcattgtagctctgttcattcagtaagcattattatatctaatgggtcctgaatatttctaaagtgaataaagtgcaagtatgactaactttgcactaggctggtgacagtgaagaagaatgtgtggaaaagaaggattagaggtagactaagcttgtcagggagctcctgacataggagggttcagagacatatattcagccacacatggtacaggtgaggtgttccaagaggtaagtggaatgatttttgcaagtaaggagtggcatttttggtcaaaatgattgcatgaaaaaagatgggtgtgtgtttagattagtcttagcgctacatttttggaaactctatccatgccccaagacaatgtaaatatgcctgacagttttttttttttcatcatccaaaattctgatttgaggagacagttgggtgtggtagcttatgcttgtaatcccagcagtttgggagacagaggcaggaggatcacttgagcccaggagtttgagaccagcctgggcaac

SEQ ID NO: 956 - DNA, 1028 bp, Homo sapiens
atttatggaggtagatattcttggttaaagctcatttttaaaaaataatttcaacttttagattcagaggatacatgtgcaggtttgtgacatggatttattatgtggtgctaaggtttgggatgcaaatgatcccatcacccagatagtgtaaagctccttttagaatggtatatgcagatttaattctgtcactgaaaatgtttcaagaactaattggaactgggcaatagcttgcatttcacttgttttgttctttgcatttaggttttcctaggacattaggacaagccgaagccctggacaaaatctgtgaagtggatctagtgatcagtttgaatattccatttgaaacacttaaagatcgtctcagccgccgttggattcaccctcctagcggaagggtatataacctggacttcaatccacctcatgtacatgtaagaatatacaaagtgctttcacaacctgacaagaaaaagacaaacaatttccattgaaaagtggagaaaaggatatgagtagaccattcaaaaaagaacaaatctacatgaccaaaaaacattttttaaatgttcaaatgtagttgtcagggaagggacatttaagtatttaaataggatatcactttggatctattggactggcaaaatcaaaatataaaaatttttaattttatatttattactgataaatatatgtatacaatgtatataattatatttattttatttaaaaaataaaactaaaagtctattgctggtgggatctggggaaaataatactccctttttttgttagctgaagtattactagcctctttttaaagcaacataacaatgtacattcagaattttaagtaaataatttaattcaggctacttttaagagaatagctgtggaaatggaagcattagcaggttaggtcatgtataggttgatgcttgtttcaatgttgctgtagtgggcaaaaaacaaaaccaaaaaaatctcaaaaaagcaaatgaatgtccatctgtagtggaatg

SEQ ID NO: 957 - DNA, 1636 bp, Homo sapiens
gtcttaaaataaataaataaataaaataaaacctgtattaatcagaactagcagttaaggtatattttttgttttacattgagaaagaagcaacacataggaaaagctaaaataaaggatttaacaaatccaacaccagcttaccttttgagtaatataatttaggtgaggacacagtcacttcagttttttttcccttctgtatgttcctacagtgtatgtcattatttgatctagtaaaataacctgaataagagaaatttcatagaagctccagaatagaattggaaagctggcagagatggtactgaaccgtattctcctagattagtatttttcctaagtaagccaagttgtttttttgagattttgttttccgcattaagaactcaggctttattttagaagacaaggtagttttagggatatttagagaaccaagatgacaaggtttgttgttaggagaggttgcatgcaattttaggctgaattgaaagtaccatttatcaacagcactggaacatgtttgaaaagatctgaactgttaataaagatttaatgtcagctcccaggaaataaggttaacatactgttaagtgtgctatttctttttctactactcttaaaattaccactgtcaccaaggcctaattcatcatgtggtaggagttaaagatgaatacatggttttgcacagaaaagtttttaacctatgaaatggcccaactgttgtctatattaattggtttatttggtatttgtagggtattgatgacgtcactggtgaaccgttagtccagcaggaggatgataaacccgaagcagttgctgccaggctaagacagtacaaagacgtggcaaagccagtcattgaattatacaagtgagtgtgcttcaatattttcatgacaaaggacagactggaaaggtgtggagcctgctgggaggaacacggggctgaggcagagtagtgtttctttaagacagataaacactagcgatccaaaaccttcccagaagtcagatgaaatgctggagctgtacatgaaagataaggttcaatacttttatcctgaaactgttagaacataaggacccaaacctgatcatctctgtctgctttggatgtaaaacaacattgagatttattttcattttcttaaaaatttaagtgactgagatagtggtcccacatatgttgatactcccacatataaatatatggtttggatagaagattagaagacacttggtgtgtcccttcttgaagtgtctgtaaggagtttaacaaaaaaaggctaaaaccgtaaaccagagattaaaaattcaaatggctgcaggggctagggcaggtattggaaatgagtctcaaacatggtgggggatgtgtcaagctagacagttgagtgacaggtcttgggctgttccggccagttatcattctagggcacgcaggccaatgattcccatttttcaggaatagcagaaatctggttttctgtgtgtatgtgtgtgagggggaatctcagttttcatattggcaacatatttaaattttttaaataacatgcaagtcaaacaaaactttatgctgagtgcattcaaaacagcagtttatactctgttacaatcactt

SEQ ID NO: 958 - DNA, 1039 bp, Homo sapiens
cctgtttaaagcttttcaaaggagcagaccaccttgaagattccccctagggttgatatgtgtctaattcattttataaaaattattcttgtcttcattttaaagctttggctatatagtcagaaatgtcctaaataacaaactattttgtatttaatttagggaagactaaagggaagaaaaatgaaaactcagtctttatgtaagctccaaggatattagggcttaaagggcttttctagttttatgagaatttgtactactgatttttatatattcctgtttttgagatgaacagatctctggggaaattgttgagttacaatggcatttcactgtgatccctctcaagctcagatcagttctataacccaatgacaacctgtctctttggtttactgtcctgtgaaatgtcagctcaagtttcccagaagtcgtgtgtttatgatgagtcagagtgcttttcctcggtgggacagttgctggccctcttaattttggtgtatgtgcttccaagtatctaaacctccagtctgatctgtatatgctatcctaactgttaattgtattattgattatgttgattatcttgcttgaaggttcatacttttcaatttgatagaaataaagtttttttctgcttatagctagcgaattcatttgtttgtatagctttttatacttgataatataaagtttcacaaatactttcattgatgcgtctctgcaaccactacattaccaacaatgttgtctccaatttgcagaaaagcaagatcttgaaccaagaattattatccccagtcctgttttcttttctgctacaccatattgccttattcgtatacccttaaattccttatttgtccagcactttattgtttacaattttaatgtacattctttgtttttttccccctaaccactagacaaccagggatttttctttttcttgaaatagataatgtgagcagattctctccctgttttacacattaggaaactggatcagattatatgactcttaaggttgtagcat

SEQ ID NO: 959 - DNA, 1095 bp, Homo sapiens
attctcatccatttcatctttgcatcccccacgaggctaagtgcagggcttggtactgtgtagatactgcttatgaatgtgtcttgtcttgtcctttttgtctgtttccatcatctgaggatccttcctctggggggttgacatgccttatttctaaaatggccgaccggatgcagggcagagccagattgcaccaggaccctgccatcgatatagtccccctcacccacccccggtgttttgaggattaaataaattaatgaattaaacgagttagtagttataaagtgttagcacctattaagcattataaaaataaatttgaaaatgaccagcaataattatctttcaaatatttatttattgcattggaaacaagcttttctattggtggttgttagggagactctgcagcttgtcattgtcatcttgccggcttttaagtatgtgttcctactttttaaaagtcagtgcaccaacaaaattctttccatactgtcatcaagaactattgctgaggccgggcgcagtggctcacccctgtaatcccagcactttgggaggccaggcggacggatcacttaaggtcaggagttcgagcccagcctggccaaggtggtgaaaccccgtctctactaaaaatacaaaaattagctgggcgtggtggcatacacctgtagttccagctacctgggaggctgaggcaggagaatcgcttgaacccaagaggcagaggctgcagtgagctgagattgcaccactgcactccagcctgggccacagagtgagattctgtctcagacaaacaaacaaaaagaactattgctgaaacttaatagggccgaaggctgaccactttttatcatgagcttgaatgagatcgatgattgcaacaagtattccttgagtgataattacatgcatagtgttattccagatgttgtgtgaatgcttacaaaagaggaatagatgaatattgccactgtagtaacttggattagaataagtgttctagttttataatttttattttaatttttaaaatctttaaagttccgggatacacatgtaggatgttcaggtttgttacatagg

SEQ ID NO: 960 - DNA, 1049 bp, Homo sapiens
tttggtctagggagccttcttgattaaaaagggcctggaatagttagaaagaatgaataagacctagtacttgatagcacaacaaggtgactagagtcaataataatttaattgtacatgttaaaataactgaaagagtataattggattgtttgtaacacaaaggataaatgcttgaggggatggatactccatattccatgatgtgattattatacattgcatgcctgtatcaacatttctcatatacctcataaatatatacacctactatgtacccacaaaaattaaaaataaaaaaattttaaaaagggccggagtgagggtggttggtgattggctattcctttatgccaaagacttcatattcttcttcatatgtaattctcacaataatcctacaaactagttattaatttctgtattttatgaggaaactgaagcttaggggaataaacttgacccagttacaaggtaatactactcatcttacagcatttatggagcccttacttgatgtgtcaggctttgtgttatgaaccttaaacctattaacttgtttgagcctcaccaagctgtggaaggtgggtaccattattacctccatcctgcagatcaggaaatggaaacttaagagaggcgcagcaacttgtctcagcttatattccaggggctggtacatggcagggcccatgtttgaatccattctctttatttattttttgaggcagggtcttggtctgtcacccagggtctttcttgctctattgcccatggctcactgcagccttgacctaccagactcaagcatcctcccatctcagcctcccaagtagctggaccacaggctcatgccaccatgcccagctaactaaaaaaaaaaattttcatagagacagggtctcactatgttgaccaggctggttttgaactcctggcctcaagcgatcctaccaccttggcctcctaaagtgctgggattacaggcgtcagccacctctcccagtcctcttctgctttagagctcttgccctactattcaaatccac

SEQ ID NO: 961 - DNA, 1044 bp, Homo sapiens
tatgccttttcagtcctaaactccactttttgtctctgcagcccttgaaactgtctaaaattctgcaggcttctctgtgtcttaacagctgccccttgcctggcttttcagcttcttaccccatgctaagaattggcatataccctaaataggaaaatgggcttgcagaaagtcaggctcacctcagtgagcctcccctctctccaagatctggttcctcaaatcgtggctgattagtagctttcctattacttcacacagatgtttaaaaattttatctggcttttctaatttccctcatcagaaccagtctgctacaacctactctattaaagctggaagttaaacacgtctgtttttttttgtttgttttaagtggattatgttaaaaaataaaaatcacaggccaaaaaccaaggtaacaatgtcattttaaacatgtaaatttaataaaggatatatgttgatttttagttactctttcttgccttattaaaagcttgtcagtaccttttttcatatgtactctgaaattcttacaaatatatgttgctttgttccagagaatatgtgtactaaaagactataatttttctgagtctggttctccattcaaatgttttaatacttttgtgattttatgatttgtaattgtcgactctcacctcccaattcaacatgatcctaaaatgtacaaaataatttgaatgattgagtttcaaaaagttttagaaaacttgatcttgtaacttttattccaaagctttgttgagggggagaagtacaggcttctgcctttaagggtactgcttcacttttggggcaaaaaagcaagggttttcaaagggggacttgacatgaatggcatgcaggggagggggtgagccagtgggggtctcaatgacttgctttggtgctttatctaccaggtggttgagctggtgccctcgcgggcagaactaggtggtaaggtggccagagtcttgagatactctccaagtgggagtgagtttcatcatgggcatactttaggttataatttgt

SEQ ID NO: 962 - DNA, 1977 bp, Homo sapiens
tgccttttttttactcagcataatttccctgagttgcatccaagtcgttggatgtacaacatgcaccaacagtccattcctttttactgctgagtagtattccctaaaatggatatagcataatttgttaaaatatttatccattgaaagacatttgggtggtttccaattcttagctactaggaatagagctgctgtgaacatctgtgtacaagttcctgtgtgaaagtaagtcttcatttctttgggataaatgcccaatagtgcgattgctggattgtatggtaagtccattttcaattttgaaagcactgccaaactattttccagaggggatataccattttaaattccaaccattattgtatgagtgatccagtttctccatatccttgccagcaattggtatagtcactatttttctttttagcatttgtggtgggtgtgtagtgatacattgactttttgccccttctcctaccaaacaaatatgttaagttttgaactcagcttcccaactctcagtggcctggtctgtgatttccataggcctctatacttctgacctcctcctacctccatgaccttgacctgacttctctttcttctctccccagcctgggtcccggggtcccctttttacctcagaatcgctttatctcaatcctgccatcttcccaatgcctggagaaagtcacaaaagtgctctccactgctgccaggcctctgatgttacagctcctgggcagtcctttcctttacctcagtgatgtcaccctcccacttctgacaggctctgctccatacagtgaggtcttctctcagagaggaccttaccacctctcaacaagagtgagactgttcagtctgaagcccctcagcatctcctttctccatctctgcctttctgtttcttgcagaagccaactcctcatgtgtgcttatgttcccagagagcctccagctccccagggtagggatttatcagaggagtctattttcagacttcccttcgtctgttctccttttcctcagagtgtccttaatggaacacccacacctctcctctagtactgagtctgttgaatcaggatctctggaggtttgcagggcggagagtctctgtttttatcagtctcctcaaggcctccagtggggagtcagattcagagacggctgcctcagggaccctctgggcccctcttcttcacactacccctcagtagtgttttccccaaattttggagaaccaaattattttgttctggactcactgttttttgtttttttttttgagacggagtttcactttttttgcccaggctggagtgcaatggtgcgatctcggctcactgcaacctctgcctcccaggttcaagcaattctcctgcctcagcctcccaagtagctggaattacaggcacccaccaccacgcctggctcattttgtattttcagtagagatggggtttcaccacgttggccaggctggtctcgaactcctgacctcaggtgatccgcccacctcagcctcccaaagtgctgagattacaggcatgagccactgcgcctggctgactcactggttttaactctgtggttttccatctggttcctgcatttctgcccagctcctttaaatttatattaataattgtaattatcaggttgctttggttttgtagtcttattggctcctgctttgcagtgtcatcagtttcatctttacaaactctgatgctctaactttcttgcataaacagcagcaattgctcttctttccttgcacagaggtaggagtgttctcaatatgaccaccatctggtttcccagcctaggttttcacaaatctcctatacatgatttatgtggcccctgaaatgcctggcgtacaattgctcagaccatgttctttttggattttgttattgggcctcatcttattgcccctgccttagaagtacacctcccaattca

SEQ ID NO: 963 - DNA, 1054 bp, Homo sapiens
agaagatgcttggtatgatttctattttatttatttatttattttatttatttatttttttgagacgaagtcttgcactgttgcctgggctagagtgcaatggtgtgatctcagttcactgcaacctccacctcccaggttcaagtgattctcctgcctcagcctcctgagtagctgggattactggtgcctggcaccatgcccagctaattttttgtgtttttagtagagtttcactgtgttggccaggctggtcttgaactcctgacctcgtgatctgcctgcctaggcctcccaaagtgttgggattacaggcgtgagccaccacacctggccaatttctgtgtttttgaatttgtacagactcgttttgtggactatggtctattctagaaaatgttccatgtgctaatgaaaagaatataaattctgcagcagttgggtaaaatattcagtaaatgtcaataaggcctattagatcttgaacctgggttttaaaagatgaattggagtttaccaagagaagaaaatacattgcagacagaaaggagcttgtacaaatgtacattttatgattcctctgacagcaaaatgtatcttcccagttattctgtatttttagtcagtaagtcatttccgttccttgaaaacaaacacgtcaatggggaatatatatgtgggtaaagactagaccagaaacagtcctgaatcatgttgggtaaaaggggcaaggcatcataaagtttaaattgacagaggccaatgctagatcaccctggactgtttgggagctatgccaaacatttcaaatactttgtttaataaaccatacttgtctctcctaaaggtatatgaaagtgggtaacctggaaggtctcctgacatttgccccacagtcatcttgtagaaaaaagttacaaattaacaaaaaagaatgggctttcttggcagccccagacagagaaactcaatgtgtttgcttttagacgtcagctctaccaagagcacagataatttcctagtcgtattttgattatttattatctgattacca

SEQ ID NO: 964 - DNA, 1050 bp, Homo sapiens
gcactcacctgcagacccagtcagatggcttgtcagtatctgctctgaggaaccaggtcccacctccccacaaggcaaatctagacccattaaattattacagtgggcttttttgttttaaaagtggttggggatccacaggaacgacattcatacagggacatttgtgaaagcaaagcaagaatgaatgctttcccgatctcagactggctggattcagatcagtgtgttggctggttctcattttaaggggtaagcagtttgctattctgtgactttagtagatctcttttgtgtgcacatatacaatgtgcattatacatatatattaaatatatccacaaagcagatgggcaaaaagattttcatgctaatcttcaaaggttcatgctcaatattgtgaaaagcttttaaaagttgttttgaaaagacaatcattttttgtttttgttttaactttcttgtggcaagctataccggaaaagcggcatgtcaaaaatactttaggttctacatagatctctttctctcttttgttttgtttgtttgtttgttaaagttcattatttattttaccttttactgacaatgtgaaactcgaagaaaatgttctctttttaaatatacagtcataaactgttcaaggtaaccataacaaactaggtgttatttattaacgtattataaaataatgtttgatccagtatgtgcttgtcttatttaaaattggaatgtgagacatgttgctgtgacctgtttttctttctcattcacatttgtagatattgtgtgaactacagtatataatgataacaattaaaaggatattctgtggatgtcacgtattttgaaatgatagaactacattagctttgtatcatgtttggataattcatcaatgttcacagtttaaaacatcattaaacattatgtaattacaatgagaaagaatcttacttaaatttggagattttcccccacatctcttttccggatacattataattctggacccctatttatctcaaaactcttaatatatgcagacca

SEQ ID NO: 965 - DNA, 1014 bp, Homo sapiens
aggcaaggaagggtgcttccctacagccttcagagggagtgtggtggcgctgctgacaccttgatttcagaagtccagcctccagaactgtcagaagataaatttctgttgttctcagccatccagtttgtggtactttgtaacggcagccctaggaagctgatgcaggtgggattgattcccctgctccagagaaaggactgttttcacagaagaggcgatgcttgaactgaatctgaagggatcaatgtggcttcccttggcaaggcatggagtgaaggtggagtatatcccaagtggggaggacagcacgtgacatggcgcagggcttatgaaacaacatgccttcttctcttcaggtacttaagctacattagtaagaccagaacttagtggtgagggttgaagctggctggacaggcagttaggagtgagtcaggcgatggtgagcctccgtgccagaacaacttgtaggctgtggaagcaaccgcaaagggatggcagcggtgatatatatagttgaaagatcactgtctgctgtgtagaggatggattggaagagtcacagaggcaggaataagaggttaagggcctgcaccagggctgtagcagagagtttaagaagtctgggagattgagtcaccttgacctactgattcattggaaggtggaatgcaatcatggtgtcagtcctctaagataggacctttaaagtgtagggatagtggtttggttttacacgtgttacacatgttgaatttgaggttcttgttggcggtcaaggcagagaagtccagactggaggtggaagtacaggcctagttctttaggacctactctgggctggagcatcagttgcggccgggcccttgtggtagtaggagctttgggttgaacataagttttcagcaggagtgcgtggagtgaaaagagagatggggttggatttttggtcaactccaactttaagagattcagaggatgtgattcctgaaaaaagaggaaaaaaaagac

SEQ ID NO: 966 - DNA, 1091 bp, Homo sapiens
cccttgctgatataaaagtttttatgtattcttggtttgatcactcctaatttgtctgcatgcaaggagaaccagacttaaggtaggatccactcatttactgactgattgcttattgaatgccttctctgtgctggacagtaggagtaagatgaggagcactgtggactttgtccctgccctcatacatttatgataaggggttgtggggtcagggcatggaaaaaacaaaaggcaaatctttaagacaaactgattggaaacgactgctattggttaaatacacccacatgttgagataatttgtactttcccaaaacattatcttgataacattatagtcccagaaagcgttagggaatgtagtaatgaaactttggcaggtcttgtgcctctacaatgtttgtgttgctcatgacctttgtacatgaatgcttttgcccatgtggccagtcaaaaaatgacctggttgacctgtttttccaaaagacctttgaccaaatctttgatggacaaacagagaatcatgttttcaagaaggatctacttgcaagcaaagttctatagtgtagtcagggaaggctctatgaagtaatgaactcttctggcaaagatctgaaggatgagtagaaaatagtctggtcatgagctaggggaagtgatttacaggcaggagtaacatgtggaatacagaataatttgactttaataaatttcaaatggtaaaaattttccaaagttcaaaatagaaacataacatcccgtgatattagaaaatctcattactttactttagtctggccagaaatgtgtcaagaggaagacttcaaagaggtagatttcatctctctggcctgtaaacaaaatgcccaaaacacttccccaaggcttaaagtcagtttgtaattactcttttcatcacctcagaagaatttccaaactttagtaacgtagtaaaattttttttggcctttgtgaataaatactatgaaatttggttcaaaagataaagcaaagagcaactgaggtcttcaaaacatcatgtatctagaaggtattaccaaacatccgttttttttaaaaaagcataa

SEQ ID NO: 967 - DNA, 1111 bp, Homo sapiens
agcatcacacctagtgtctagccatccctactttgtccctacactttttgaattgcttaccaacaacttagagagggagctagagattgttgctggccattgctccttgttttttctcttatttcaggtacttttttgtattttgtcgattcttcccggacgctgccagttttttgcccatctctgttctatttttactgcaactccacaccagttctggttctttggttttcctacttgttctcttagcatttgataattgattctccacaatagattttgaaataacttcttggatttttttctaaattaggtattacagggtaaggtcttgcttttgctccatattccagaatccaatcttgcctggggccaaacccatgccaggctttccctcttttttctcccaaggggatggggtggtcagtcaattatctttatagatatttttttcattaaaattaaaaaattcttaattgtggcaaaagacccataacataaaatttaccatcttaaccatatagttcaatagtgttaagtatattcacattgttgtacaaccaatctgcagaacttttttcatcttgagatctttctttacatttttaagcagtcatttatttacttgttttctcttgtatatcggaccaaaattttcttgaggacaaggctgtgttactgacttgtgtatcttttagtcaaactacctggtataatcaattaataattgtttcatgaatttgaattgaccctggcttccctgatgttctaatctaatgtgcactccacaggaaccctattctgtcaacagacctggattctgatatcaatgaaatagtgcacatcttgaaaacatttccactaatgtaaacaagaaagatgaaagtcaacagagtaagaagttggcacaaggagttgattccgtctgctttggaggttttgctttttggcttaactgttacatggtgctattgtttttgttctgggaggtgggacagtgctgctttatttattttaagaaggcagcaagccaggaacacataattgaaaggaaatttctgtactggcgtattattttttcaactaagatggcaataaataacttgcaact

SEQ ID NO: 968 - DNA, 1027 bp, Homo sapiens
acacaaaagtgtctacagtgagtatgtactgtgaagggttagtgtacttcatactttctttttgattagaagaaaatgtcgggttgttttagcagacagagaatgttacagtagcttttgttgctacttctaatgttttatcagtagcattttcaagattatttgaaacttagttatcactagtaaggacaggtttaagaatatttctgcctcttttcggtggcttggattcaaaataataaaacaatcttttctcacccacatgtactttgtatgcagtttgggagagtgaaatggatttgaagtactcttttatgagtacattttaacttattttcagtgactttttgcctttgggctggaaatgtcgtaagttactcaggcatttatcttccctcatattctctggtgaagtagagatagtcatctccgttgaaacagatgctcagagatgtaagtaaattgcttgttgagtgaacagggaatcgtagaactcaaatataccctggttgctaagtcatttggaaaacaactgaaactggatggatccaacagctcacggtccacagccaactcattcatggcttgggagtgtcatcatgggtggcagaggctctgttcctcctttgtaatgtggggacttactctctcagcaatttactgagaaaaaagtaatctcttcacacttagatcactattataggaacaaatggtgtgtatttgtgaagtgcaatatttctgggaggtcttggaaataaatactaaaagtatccagaaaaaaaaaaaaaagaactctcttggcagatattgtactgcatttttcatactgagagccaaacacacccacttaaagagtatgtcctgtggagttaaaaatgaagaaaaaggcttatagtctgctctaattcttaagactttatgtgatttacaaattccagttttaattaaattagaaagttgcaaatgttcacctactggccacactcagtatgtacaaccttttggagttgctcttcaaatacgatct

SEQ ID NO: 969 - DNA, 1084 bp, Homo sapiens
cttcactactggtagcattgtcacggttattactctgctccttgaaacagtcccttactgacttccaggacaccatgcattcttgattttcctccttcttcactggctgctcctttctgtctcctgtgctagcctctcctcttttcttagaggttttaaccttggaataccttaaggtttagctcttttttctccatgctttttgatgatttcatgcaatctctctatgtgtgtgtgttgatgattccgaaagtgatagctcaagccttgactgctccctctggacttcagatctttatattccagctgtctactgagcatttccatttggatgtctagtaggcatctccagttcaaattctccacatggaatcttcatctttcccaaacctgcactatctgcagtcttcctcatctccatctttcaagttagttaggccccaaaccttggagtcatcttcgattcctcctattctctcatacctcgtttgtaatgtgttggggaattctctgtgctctatcttcaaaacaaatccagaatataatgacttctcattacttccatggctctgttacaggaaaggggtcccaatccagaccccaagagagggttcttggatctcatgcaagaaagaattcagggcaattaggtagagtaaagtgaaaacaagtttatttggaaagtgaaggaataaaagaatggctactccatagagcagccccaaggtctgctggttgcccatttttatggctatttcttgatgatatgctgaacacggggtggattattcatgcctcccctttttagaccatattgggtaacttcctgacattgccatggcatttgtaaactttcatggcgctggtgggagtgtagtagtggggacaaccagacgtcactctcgtcatcatcttgattttggtgggttttggccatcttttttactgcaacctgttttatcagcaagatctttatgacctgtatcttgtcctgacctcctatctcatcctgtgacttagaatgtcttaactgtttgggaatgcagcccagtaggtctcagcctcattttacccagcccctact

SEQ ID NO: 970 - DNA, 2710 bp, Homo sapiens
tgcttcggctcgcacacggtgcgtgcacccactggcctgcgcccactgtctggcactccctagtgagatgaacccggtacctcagatggaaatgcagaaatcacccgtcttctgcgttgctcatgctgggagctgtagaccggagctgttcctattcggccatcttggctcctccgtgaatccgtttcttaatgttttacactattctttgtggtaaagtgtggtttccattttaaattacatctctcagaataataggcagctctgaaaggggttgtagagaccatctaacagtctgatttgtagatgaggaacctgaggtctagagtgttgaaaacccaagtcccacagctgattaccggaagagcttagcctggcacccaacactcctgatgcctaattcaggtaggttttcatccaaagtccaagccacatatattaaaattatactactatttggatttatgacatagtagtacaaataatcatatttgtgatactccaacttgagtagaactcataggaaatcttgtctctgaagtcggacttcatgtgggtatattaagccaccagacttttaattattctaactctccaatattacctcatctgcaaataaacaataggtttccaaaggtctactggtaaaatttctcctctttattggaaataaataggcagttgttacctatgcaataattatttggccttacaatatcatagtaaagataaagactttagaaaacagggaaattttaagacctgagcatgaaagaaattgaagacggtgatattaatgatgttaaattagctgttacatattttatcaacattgtgagcacttgcatttagttaaaatttcagtcttatcccgtgatacctgtcctggtttgttatggcataaaggaacattcagtttaaattttttcgacttgtatttttaatgatgtaagataggatgcgtacaggaataaatctgtagcctaattttacgtgagatatttctcagatattgatctagagtatcacatgtaaatttagagacttatctataatccctttccttttatgttttccacagacaacttatatatatgtgtttttgtttttgtgtgtgttctgattttagatttaccttttccaggtgtacttctctgaagtaagatgatttgtcaaaaattctgtgtggttttgttacattggggtaagttatttgctcatttgctgttttaatgcccttaaacatggtagagattttgcctttagagatgctgttttatttattagctaacagaatttcctatttctagttaggaattctcatacatgcttatgattaaaaatgcaaaccatagtataggtgtatcagtgtgaaaacgaaaacccttcccaacctcctaaagacaacctgatggtgtatccttccagaatcctctctctctctcacacacacacacacacagactcacacacacagactcacacacacacatacacagacacactcatatctatagctgcaaaaatagcactggtctgtacatgttgttctggatgtttatttttccatttaacaggtttccaatttatcatgatggctttttacctttatcagtatttaccgggatacttattagtttaatggttgcatgacaatgcactgtatgaatatatataaaattattagtctatttgaccaattcctgattgatagacatttctttttctgtaacaaataatactgcattgaaacttcatgtgtctttgtatatttggaaaaatatttctgtagattaattcttttttttttttttttttttgagacgcagtcttgctctgccgccagactggagtgcagtggcatgatctcagcccactgcaacctctgcctcctggattcaagcaattctcctgcctcagcctctcgagtagctgggactacaggcacgcgccaccatgcccagataatttttgtatttttagtagagacggggtttcactgcgttggccagatggtctcaatctcttgacctcgtgatctgcccgcctcggcctcccaaagtgctgggattacaggcgtgagccaccgtgcccagccgatacattgccaataacttttgagcatactgttctcacgtgtttcttaccacattctggtgacattctgatttccttaaaccaaatcatctaagttagattgtgttccaagtttttgaaattaaagttagagtatctttaacaaaacttatgtgatttggcaattgtttatctagctttctttaacaaaacttatgttgtggcaactttatctggcagctgttacctgtgtgtcaactgattctgagcatctccttggctaccccaatctaaaggggctcttctaagcttccctataggtcttccttgtggtacatacttctctttcattgcagccatctgtatatttccagaaaataacctagatagctccaccattacagatttccaaaaaattatgccacaagggactatcaaagagaaataactcattctctttttatattctctaattttattagatatatttaagggaactgttcattctcttttataattctctattaattttcgttagactctagtgttttacattgactttctggaaggtttctggtttgatcaagtttttgaatcaaaagaattcctgggatattgttacctgataagatat

SEQ ID NO: 971 - DNA, 1048 bp, Homo sapiens
tttgcttcgaactgtggctctagtaatagacttggaccttgagtgaatcaggaatagaattgttttggaaatggtccatggggtccaggccccttgagcacattctttttttttttaatatagtttaagttctgggatacacgtgcagaaagtgcaggtttgttacataggtatgcgtgtgccatggtggtttgctgcacccatcaacccgtcatctacattaggtatttctcctaatgctatccctcctctagcctcccacccccctacaggccccagtgtgtgatgttcccctccctgtgtccatgtgttctcattgttcaactcccacttatgagtgagaacgtagtgtttgtttttcggttcctgtgttagtctgctgagaatgatggttttcagctttatccatgtccttgcaaaggacatgaacttatccttttttatggctgcatagtattccatgatgtgtatgtgccacattttccttatccagtccatcactgaggggtatgtgggttggttccaagtctttgctattatgaatagtggatgagcacattcttaagtggctgagtcacttcaccgaagttgaaatgaacaaaaaccaaaactgcacaggtcacagatgtaaaaatgtacccataacagaaatattgaactgtgacacttcccataatagacttagcataactaatgggccattttcaatttctgcagcactggcagtggccttccaggactcaggctgtggcatctttcctcctgccacagcccctgtctgagccacaggagctgcccagggggtgaggagtggtgggctacactttgaacaaaaggagacagtcttattctctctcccaaatgggatgatgctatgtcacagttgtcattatgttttctgtgcaacatgtacagtattgctctctgggcagtattaattgctcctcacattcaatcactgtttcacctgaatgaatattgtggaagctaaatataaaattgtaaatttaataattccaggaatccttatataaaataatagggggaa

SEQ ID NO: 972 - DNA, 1038 bp, Homo sapiens
tctacatagaaacttgcacatgaatgtttaagcagctttagttatattcaccccaaactagaggcaactaagatatccttcaaaaatgaaacgattctgtatacttctgaaatggtgggtatatagcactatgcatttgccaaaactcctcgaacttcatagcacaaagagtgaatcttaatgcatgtagattaaaaagaaaatcatttaggaggttgaaggatcccaggattgactgtaaactgtgacaaaggaatctacctgtattacaagtgtatgaagcaacttcactgaaggtggtgggagaaaaggccactttggaacttgagtggagttgttggaaatgtgtggaatcttaagactaaaggcaaaagaaactgtacataagcactgtactctagttgatacagttctcacagggctatgggctaacaattatggtactgctctacatgtactctggaaggggacaagcaagtaaatggatggtggatggtgggacccagatttctcactgttggattgggaggttacacacaagcacaggatgatccatgtggcaatgaattagagttggggatataggtatgaacttatatctagcttaatatagatatagctagattctggtttaggatacatgtacattttcttgatttgtaaggtaagagggcctaaaagtaatgacatccagtagtaagacatgtgcccagacttgtttctaattaccatcgttcaataatagaaacaagggctattggaagaaatggctaattttagggttggggcagaaaatatacgagattagcctggaggatcttgtagtaccagaaagtaaggaagcttaacattctcttacttgatggttaccaaaaaagtattcattaaaactgacatgtttttttttcaaataaaatgcaacatttgcatgactttgaaacatttctttcttgcggtggctgctaaaatcttactttcaacctatccagatgattccaagttttgcagggatacatgtatatgtgtttatttttctct

SEQ ID NO: 973 - DNA, 1017 bp, Homo sapiens
ttttttatttaatgtggttattttttgaagagactttcaattccatgtctcctgtcaattctaagaaattatattatttctttgataatttcctctcctcttgtttctttgtttctctttctagaatctgtatgttggatgatggaccctctgcgtagatcttccacatctcttaccttttatctcatattttcggtttctttgttttgtgtgtgtgtgtgtgtgtgttatattctgagaccttgccataccctcttcttccagtgcttctgttggatttttatatactattatttttgtaaatttccaagtattctttctcagagtattctgttctggttttatgcatattttcttaaatgttgctagaaataccaattcgaggatttttgttcttttattttaaaaattcttttttcttctattccctgaattctgtgttccttctaggtcgtgtgttcctgttgtttatcttggcctctcttttattatctcagactttcctcctaatatctggtaatcctttgttttcctttcatgtttaggaatgaaacagtagacaggctgactgggagcccagtgtatataggcagggattgttgccctgggtgagtaggcagggttctggccagatgaggaaagatgtgctctcagctagcaatattccatggctgctgtcttcctccccagacagttccttagttgcttttgagaacaaaccctcagtctggttgtgaagggtagttcttacatggaggctcttccatgttcagcagaggagtagaagagccctattccatatacagaacttccattaggccccagtttccagccacagttctcttgtcttcatgtgtttttacgtgccatttcttcacgcactgtctccgctgtatacggcagggctaattttctttctcctgagctgcagctggatatattctggtcttcagctttctttgctcaccttctttgatctatactcttccaattgttttctatcttttagcaatgaat

SEQ ID NO: 974 - DNA, 1022 bp, Homo sapiens
gttgacttatgttctttattattaacttaacacacttccatttctgccagtatgacataatgaagcaaaattttttaacataattgagccttaaaatgtgtcttttcttttagccagaaacgtttgagcatctttttatcaagcatacagcatcagtgacatgtggtcctcttcttttggagcctgaaacaatttcagaagatatcagtgttgatacatcatggaaaaataaagatgagatgatgccaacaactgtggtctctctactttcaacaacagatcttgaaaagggttctgtttgtattagtgaccagttcaacagtgttaacttctctgaggctgagggtactgaggtaacctatgaggacgaaagccagagacaaccctttgttaaatacgccacgctgatcagcaactctaaaccaagtgaaactggtgaagaacaagggcttataaatagttcagtcaccaagtgcttctctagcaaaaattctccgttgaaggattctttctctaatagctcatgggagatagaggcccaggcattttttatattatcagatcagcatcccaacataatttcaccacacctcacattctcagaaggattggatgaacttttgaaattggagggaaatttccctgaagaaaataatgataaaaagtctatctattatttaggggtcacctcaatcaaaaagagagagagtggtgtgcttttgactgacaagtcaagggtatcgtgcccattcccagccccctgtttattcacggacatcagagttctccaggacagttgctcacactttgtagaaaataatatcaacttaggaacttctagtaagaagacttttgcatcttacatgcctcaattccaaacttgttctactcagactcataagatcatggaaaacaagatgtgtgacctaactgtgtaatttcactgaagaaaccttcagatttgtgttataatgggtaatataaagtgtaatagattatagttgtgggtgggagagagaaaa

SEQ ID NO: 975 - DNA, 1061 bp, Homo sapiens
agaactgggatattgttgttacatgtatttgtataaacattaggagatgatttccatggcttttttttttttttttttaggaagtcttgctctgttgcccagctggagtgcagtgatgtgatctcggctcactgcaacccctgcttcccaggttcaagcgattctcctgcctcagcctccccagtagctgggattacgggcacaccaccatgcccagcttttatttatttatttatttattttggatttttagtagagatggggttttgccctgttggccaggctggtcttgaactcctgacctcaagtgatccgccctcattggcctcccaaagttctgggattacaggtgtgagagctgccgcgcctagcccttcatgaggttttatagtgaatgaattatttttctataaagtttatcaatatttattttggaaagctgctgaaaatgtctttttcaaaattaattatgcttaagatgtatggcattaaattcaattttatgaggctttctgacatatttactaaaaaaacctggaactgagactgaatttggaagacatttaattttgtagtgagatatctatattgtagatattgtacttttaaaacctgtcattaagtgtttggcatgtggttaatactttctctttagtcacaactggtattttaataaatgttataaacgtaagtgccaagatatgcatcactaactgttctatgaaatttgtctacttctcctttatgttcccaaagtcacagagaaagcagtgtactttatgacagtatatttatctttttatcattatgaattataagcagtgttaattttgagaaataaaagtccaaaaagaattattatgagtttaagttactttaggattatatctgttgtatggtaaataaaataatgatattatttcagctaacatttgaaaatataaagaagtaatccttgtggtttatacaaacagttaatacaaaatgtttatccattgttagcctgtcgttgtgtcttcaaaattccgaaagacatatgcttagcatttgtaaggggtttg

SEQ ID NO: 976 - DNA, 1037 bp, Homo sapiens
cttttcactgagcatagctgacctcaaacttctactctgccgtcacgtatctcttttgaatattcatattcaaatacccttattggctgcctatctatcttgcccctagggacaaaatgttctatgagccctttccataaattctgtgggtcatgccttgctgactcattctgaacttgctgtggattatagccttctgtccaccgctcttctattgggtacatgctgccacctagcctctgctcttctcagatcctatcatctccattgctattagggaacccactaccataacaatatctcacatcattattcccaggggtccttctgaccttattgccttgggcatgtcttatgggcctccctaaggaatatggtcggtacagggttttctgtctcatagaacggacccattgcttgcatgttgcttctgtgagccttttaagcccttcctccatcatttgctacagcaattctggcatctctattttgtttactgtaggcctttccttttctcaggctttcaaagttaattgtatcagctgattacagcaatcactggggctcttgccagggcattaaatcctgtgtcactggaaagtgccactatattgcaaaacactccctaacacagctgtatagcctatcttctcttgatttaaccccctgaggaaccacttccagttcctgatggtaacatgttatccatgtcttgatgtttttaggcatataatttcttttctgctttacctgtcccaacacttttgatcaggttatgctgagattttactctaattatgaaccaagagaggaagtggagcaagtcctgagaaggtaaagaaatgttatctaagatacctgcctcacttgatacctttgtataacttcaaacgtgtgtgtgtgtgtgtagctctgtcttccaataagagataattggtcacattttcaggtgcataggactcaggataacccaagatttgagattcttaactgtgtcgatacagatatccccatccaagcatcagggccccactccc

SEQ ID NO: 977 - DNA, 1030 bp, Homo sapiens
aagaggcatagggagaaggcagccatctataagccacggagaaaggcctgcaacatattcttccctcacaaccctcagaggagccgattctgctgacaccttgattttggaagtctagcttccagaacagtgagacaatacatttctgttatttaaaccacccactcatttgtactttgttatggaagccctaataacgtaatatatactattgtgtatgtcagaggttcagactgtattatcaaaaaggatctaatttatattgtataaggatagttgaacgagtatagttatttaggatggaagagaaaagtattaaagaaaatatctttgcagggctatatatgacccaggaatcctacatttgggtattttccatagaggaatgacagcttatattcacacaaaaacctgtacacggatgtttacagaagctctatttataattgagctcaaaactagaaacagcccaattgtccttcagtgggcaaataagtaaacaaactggtagagacttacaatggaatgctatttggcaataaaaattaatgaactattaataaatgtacatcttagctaaacttcaaggacattgtgctgaataaaaacttgatcttagcagtttaaacgctatatgattccatttatatgatatgattgaaaagacaaatcagtgatggagaacagatcacagattgccagggattagtggtggcaggaaggatgtgactataaaggtgtagcagagaaagttttctgagggtgacacaactattctatatcctgaacatattggtaattgcaagaatatctatgtgtgtcaactttcatagaaccctacaccaaaaaaggtgaattttatttcgtgataaattaaaaagtaaaacaaaagagacaaaaatagtaaccagggaagctttcaaaaaatatatgttcttgttcaagaccagcatggccaacatggcgaaatcccatctctaataaaaatagaaaaattagccaggcgtggtggtgggcgcatgtagtccca

SEQ ID NO: 978 - DNA, 1038 bp, Homo sapiens
tatcttgcagactttaagacaggattagaaataacatcttgtgaagtatttaataattggtagacaattcacagtggctattattttggtgtatactttatggtactcattgttatgtagttgtatataggcataaatggttaatgctattcataactgacaatgtattctgatcctttttggtggacaactgagagaaaagtctgtggtttcagattctgcccctttaggaatggataattgagaggaaggagccgggattcttcattcctctccctccattagcatccaaactggaaccttcatgatggaggataggatggattctcctgttagagaagatagttgcaccatctgaacactggttactcaggattctatgtttatcttttaactttttcaatgaggacgactattgtattggcagaaagagtgctttttgatatggtttatgtatatgcccaactcctaatgcacaaacctgttagtagagcacattcaggatactcaagccctgactactgttgaataaagaaacaataaccctattttatttagaggaaccacctcaaagtctcttgcagtaatgctcaattctcttcccttcctaactcaccaggaagaagggggctggaggcacaaatacatgtttcttcccactcccaaagagaaaggctgtgcagtgggagtaggctagatgttacaattctttgctccattaggggattaaaatgacaggtgacacttctcttttataagctaggcacctaggaaaaaaaggttgcttgttttgggtttgctttataataagaagaatatgctgaagcacagggtgctagaaaataaaagatgggtaagaggtttgatgaaagactgggaataaaagtagttgcatttctagaacagcatgaaaatgtaatcctacaatgtttgagattgccatggatgaagttttaaagaagtgactttgctcaggaaattaagtttttgatcaaggagagtaaaggttaagaaagtatttgcaatttggtatcaggt

SEQ ID NO: 979 - DNA, 1033 bp, Homo sapiens
ccagtcattctagcctgaagtatcatcttgttgtctacgtttctggggctgagaagatattttgctccacacctgccagcatgccctttccagccctgaggtgcaccagtgagtgtgtgtcccttctccagctttcctggggtaaaagtaccacctttggatcaaggcttgctggctgcggctcagaggatctgcgcagaggaagcagtgtgtcctcaggagatcctgaaggaggggaggggggactcttcctacttggaactctttgtttattggttaatgaaagggcaaaaataagtccctttctaaaattttagtttagagtttaagttggaagggaaaaaaaaagaaaagaacacatttgaggattaactatttattgacttttctctgaagttctcaattgaaggttaaactcagggattttccaggctggggtaaaactcaaccaactgcttccccatgaggagggctttgctgtgtaacttctccaaatcacactgggactccatgtagaaggactttcacaaggcttgagcctactttggagcattagcagacactctgttccctgtattttgtggtaattgacggctatgcaagatgtagatccaacatttatggggtagtttttcaacagctttcaccatagagaacatggcaaacttcaatagtcaccaaaatatactaactagagtcaccaagataaagcaggcaattaactccaagaagagaaaaagagtaccccctgagaaactacaaattgccattaattttcattttgagtgtcaatatgctgtagtattctaatcccattcatgcctagagtgctggaattagacattgactgtcttgcaaatttattaaaaataatcttattcagcatagtagttagtaaggctctgagaccaggcactctgtagacacgggtgaggattccaatccctcaggcttccgctcctcctttatggtgttgtgtgcaggaagcaatgaaagttgaatagagctaaccctaacaaaagggctaaccttc

SEQ ID NO: 980 - DNA, 1091 bp, Homo sapiens
cagtggacccctttcagtgaatatcgggtaagcagcaatgtgctacataggtaatgtggtttcttctttcatggtgttgctcaggatggtttgagctttgaggtgtgtagtcatatactaaggcaagatattactgaaggaaaatagcttatacagagaaatttaagttaaaaaacttaaatttaaaatttctgtgtttttaaaaaataaattttattgccgagggaactaaaaaatctaatatgtaaaagaaattatgttaacttttttgttttaaaaattaaagatggttgcgttattgtaagataaaggaaaaaaatattttgattcactaatcatttcctaatattttctaatgtatgttttagttttcttaaatattttatcagttggagaatggaatgttttgtgggaacgcatggattgttcaactgcaagaaggaaagaactggaattttgtttttatttggtttttagtgtttatttaatgacctggtatctttaaacaatttatcttctatattcttcagttacttgtagatagtttcatgtatagtgaattggggaagagttagaggaactttcgtgatctgtgtcctacaaaaaaatctaagacaggtgaagaagtgaaaagtacaattgatttatagttttcctggcctcaatacttgaataattatgacgatttttgagaccagtggttttaaacaattagacaaaggagaaatgcttggttggcttttactttgagctctcagtagattcattctttatgaagccaatataaaagcatgtgattaaataatccagatgctgaattattgtgcttttgatcaaataaatctgaggatttaaggatagcttgtgaagtaacagtaagtgcaaagcaacagtatatatctatttgttaaatctgagggggaaaacaggttattgaagaagtatgtctccagagaaaaatgtaggtattatgcttctgggcttttaaaaaaaaaaattgatgcttcctacaagagcatgaccctgaccatgtttttccagaaaaatatttaattcttgaatagaaagtgctttagatgagaataggatat

SEQ ID NO: 981 - DNA, 1402 bp, Homo sapiens
cttttttccacacgaaaagcctgttcttatttgatatgaccatttattatttacaattttttcatatttataacattataaacacttttaaagctataaacattttccttccatttttctgttgtaactattaaaaagcaatacataatagttgctgtgcgtagctttttcttggtacttttgacttacatccagcatcaaataaaaatatatacattaatattaataagatccacttaatttggtttaccaaactttttgaaatattccttaccaggaggttcagcaacatcagatgaccatgaatttgatccatcagctgacatgctggttcatgattttgatgatgaacgaacattagaagaggaagaaatgatggaaggagaaacaaacttcagctctgaaatagaagatcttgcaagggtaaataacatgtagagctagggtatgaattggttatgacttttttgtggaaagggaagatctgaaattttgattctctgattaggagagaaattgtgttatatattaatgactgaaaaattttgtgtgatcataggtgggatatttaaagtttgaaatgaaaggatttaaaaacaataactttattatgtgcaataacagaattcacatagttactttggtaaaacatagactgttaaatgattctgctataaaggtctggtcaaaaatggactataaaaggattctacacggcctcatatatcctttgtccttccccagttaccatatcttttacttattctccttcagagccaaaaattcttgaagtatcattttccattcactacataaagtgctctagattatctccactacataaagtgctctagattatctccacctcttcctatcaaggtgaccagtgaactttccttgttacatccatttttatattcacttttctctcactaccttactttttctcagcagtattcaatatagtttaacattcccttcttttacttgaattctggagtacaccactgtctggttttctttatctttttgtttctattcagtatcttttgcagactcttcttccgttactcaaggtttacatgttggcagtttgtgattctcagtttggaccttctttttttctctcctgtctctgtctggatcagtgctcctcaaaatgtagtatgagggtcagttgcatcagaatcaaccctgtacttattttaaaaagcagattttttggacctctcccccggcatactgaatcagaatctctggaggtggtgttcagatccacatcttcattaagtaagttggcattatatgtacaccaaatttgaaaatcactaagctgtgtgatttaatttattcccttggtgtgtatatccttagtattctttagtttatatttctagcatta

SEQ ID NO: 982 - DNA, 1024 bp, Homo sapiens
actccaacctataatatgttagtgtttgataactttaccctattgtcttgaaattagggcagacttaacttgagatatagtatatagtgtttatcctttttgatacagggtcttactctgtcaccttcccaggctcatgtgatccacctgcctcacctcccacgtagctgggactgtaggcgtgcaccactatgcccggctaattttttatttttttgtagagatggggtcttgctctgttgcccaggctggtcttgaactcctgtgtgcaagcagtcctcccacttcggcctcccaaagtgctgggatgataggcgtgagccactgagtctggtcggtttatgtttttaaaaagtccatttctcccaccttcagccagccttcctttagcttatgcagacatgattgcccttccttttgttacagtgtaagacaactcatttcttaaaatacagtctgcaaatatagtgtgtattcctgttttttttttttaagttaattttttagagacagggtctcgttctgtcgctctggctggagtgcagtggtgcagtcatagctcaagcatccttaacttcctgcgttcatgcctttctctcgcctcagcctcttgagtagctaggactgcaagtgcatgccaccgtgcctggctacattcctgtatttttattcatcatgtactatgcccactttccttatttctcacagtttatcagccctcttatttcacattgtaacaggatgctgtatacttaacctgacgttagattttgaagaaggcagtatatatgcatatgtacagaagggcagtgtaaagcagtgagttagactgcctgggttcgtaatccagttctactacttatttcagtgtgggacttaggataggttacttaacattgttaaacttcagatgttattacaagaataatatatctaaagcgcttaacataatatttggcacataataaacacaaaataaatcttagttaatgtcattcataagattctcaaaaaagtctctgac

SEQ ID NO: 983 - DNA, 1039 bp, Homo sapiens
tttttttattaggcaccatgcagattatatattcttcattggttagcactcctaattcaaacagttaaataaacatgatttgttagttataataacattccaggcatgctcctttggacttgtatctgttttgattacaaaatctcctgagctacccttaactttttcctaaattcatgtaagttatcatttatactaaccacagtgtattttaaccttttgtttactcatctttgtagcattactggtaagtaggtcgatccttgccccataggcacttagtaaacatttggtgcctaagtgaataggtgggtgaattatttccgaattagggtttccttatatggccttgtctaccccaaagatcccaaaaatataagaactttcgtctgcagagaacagaggctgagcagagaatagaaatcaatagcagtatatccagattcattttatcatggtagttttattgtatttataatttaggatataactaggattgtaccagcagattagaaaaggaatgatgtttattaaggaagattttctaaatattttcctttgggctgtactttaaacaaaagtatctattttgggaaacaagggaagatagaagaaggttttgaagtgtgtgtgggtgaggggacaagataattcatgtgaaaataatacggccgggcgcggtggctcacacctgtaatcccagcactttgggaggccgaggcgggtggatcatgaggtcaggagatcgagaaccatcctggctaacacggtgaaactctgtctactaaaaaatacaaaaacctagccaggtatggtggcacatgcctgtagtcccagctactctggaggctgaggcaggagaattgcttgaacctgggaggcggaggttgcagtgagccaagatcgcgccactgcactccagcctgggcaacagagcaagacttcgtctccaaaaaaaaaaaaaaaaaaaaaaaaaaaaaatcattgcctggtacataggatatgcttaattagctgttaatttcttttcataataaaa

SEQ ID NO: 984 - DNA, 1031 bp, Homo sapiens
ataacattattgacagggaatctgaggttataatccctgtaagatatccgttgttaccacagtgacttcattggtgtgaagctcaaaaacgaaacaaaaacctgttttattttgcctgtatatacttttcattaggctttttaaaattcctttggctatccctaagaatctgtgtatatcaagttggaattctcacctcggattatcttatgtacatggtaagaccagtgcctaccatgaacctatcttttttacctttttaatcattgtttttttctgatttgtttaaaattataggaatctcaagaagccacaaagaagggattttcattgatataaaatgaattctttttagtcctagggatactatggccaccaagtttatgcatatcctactttgtacatatttaaaggtagttgatttatcaggatcgaattcatatttgtttttctttggagttctctatatataacattcactaaagttatttgccctcaaaaaggatgaaaacactggatgtttgaaaaacttttaagaaattgtagcattgaactgtttatagtccttgtcacatattcaagccttttatttttctaggctttatatgaattggttaaatgcaattttgatacagaagaagcattgagaagattaagatttaatgtaaaagcagctagaggtaagtatagtttttattcattttcatgatttggcagaaattttaaaattaagcttttcagtttacctaggtatagcctaaacttaataatactgatttttctgagtttgataaatatttacaaaataccaagtattactaaacaaatcgttacggggagtgggattaagattgtcccttcctcctttgtgggaaaatacagtcatgtaagtaaaaatgtaaaaatttatactgccttatgcattcaaggcatatttataaatattttcttatttgatcttgataattgccctatgaactaggtagtatgacagataatacctttacttaaaggtaaaaattgatgagcct

SEQ ID NO: 985 - DNA, 1051 bp, Homo sapiens
ctctgaggaaactggtgataggagagtaccagtgaagagctgacttcttcctgacagaaactggaagagaaacactgtgaaagccttgatcctcttctgacctttggtctcacattggtcctgctggagtgtatatgcttagttcatttcatgacccctctctgttccctcactacttctaggaataaaccaaacaaacaaaacttagggcccagtaactatgtcctggtccaagaaggtttattgacttgatgtctaatgtttgtcacgtccattctgaagtagaataagatgctgagactctgaccttgggactaaccgtataggctcaagggaggcagacagttggtactactattgtttttcctgtttgttcttaacatattaacaccaaatcattttcttttcctttttaagaaactatttgatgagaacatgctgttaggctaggaaagtgttcataagttacttataaattacttgtagctcaaaagccactcaacattacgtacagtcaaaactgccagctttttcaaaggaaggaaggaacttttcatcccaatgttatattacttttttatatggggctttaattagtactttgaaatcttacagttatttttgacctaatcacagtcgtcagctagctttttggacttgttcctacagaattgttctcttcaatatattatgatgcataatccccatgtgcattcatgatttgagtgcattgagttggtcaaaatagaatattttcttctatcagaatacagtatttgaggctcatcctttatgccgaatatttttcaagcaattaaattgtaattattcagtgatgcaccctatattttacttcttatcaccaaaatttgcattccattttacagtcaactctaaaatgaacttttgttttcttttattagaataattttgcttttacttttctcacctactatagaatttgtatttactttttaagtaatttgtatttacttaagtaaataatttagcactttcaagtatatgcttggatagtgcggcattagttttt

SEQ ID NO: 986 - DNA, 1031 bp, Homo sapiens
cctcccaagtggctgggacaggtgtgcgccaccacgccctaatttttatttttttgtagacagggttttgctgtgttgccagggctagtctcaaactcctgggttcaagcaatccgcctgccccagcctcccaaagtgttgggattacaggtgtgaccaccacacctggccacaaaattcttgtagctagtgctagtaggttagaataaaacaactcacttaggattgcagcagatgggagttgtagtagaacctttgaaaacaatgataccagttttggcaaagggatctattttcgtgtatatgtatagttagttaggaaaagtaatgaaggtcatatgccaaaagtaacggttgtttttgagtggtggacttagagtggccagacccccttattaaagaagtctcatagcacttgtcccaggtgccatttggttttgcatgactatttccccctccgacagtaagcctcctgaaggggagggtcgagtctgttttcctcaccatcatacacccacatccaagcacagtgcctcttcccttactcactgaacatattagcatataggttatagcatagcctataatcatttgtctctcctgcttagggcctaactctggctactctttccagtgattgttctattctgcctttggggatacatcctgagttgccctttgtaccgctgccattcttcacttccatctgagtagtagtataaacgtgttttcatccagttactgcatcactggtagagggtaccattttacttgctttttgggggagctccgactctaggatttttgaaaacttttctttcttcaaagggttgcctggttaaattatggaaaacagcatctcccattgcttgtgtaatcctatacctacacattctcccactctaaagcctgttgatttgggggaggctggggagaagagaagaaacaattacatagatgtcagtgaccacattgctagcctgagtcccagttgccctctgggttccacagagagtcacagtcccattttt

SEQ ID NO: 987 - DNA, 1051 bp, Homo sapiens
tgttgcccaggctggagtgcaatggcgcgatctcgactcgctgcaacctctgcctcccaggttcaagcgattctcctgcatcagcctcctgagtagctgggattacaggaaactgtcacctcacccagctaatttttgtatttttagtagagatggggtttcaccacattggccaggctggtcttgaacttctgacctcaggtgatctgctcgcctcagactcctgaagtgctgggattacaggtgtgagccaccgtgcccagccgctgttgttgatttctaatttcattccactgtagtcaaagaatatattttctgttatatctatccctttaaatttattgaggtttttatggtctagtatatggtctatcctggaaaatattccatgcgtactgaagagagtgtatattctgctctctttggaagtgttctatcagtgtctgttagatgtagttcgtttacagtgttgtttgagttttctattttcttgttgatctctgtctagtttttctgttcattatttaaagtggagtattgaaattttcaaccattgttgaaatatctatttctccctttatttctgcaatttttacttcacgtattttggtgctctgttactaggtgcatatatgtttataattattttgtatttccgatggatccaatcttttatcactgaaaaaggtccctttttttctctaataatattttttaacatctgtcttgtctgatattagtatagtcacttcagctttattatggttgatggttgcataacgtcctttttcatccttttgctttcaacctatttgtgtatttgattctaaactgtttcctgtgaacaatagatagttaaaacatttttttaaatccagtctgacagtctcttccctttgaatggattgttttatctatttacattgatatgattggatttacatctgccattttactttttttatgtgtttttttttgcactaaatgaatattttttaatgtagcatttaaatttctttaatgatttgttttaccctgaaacctccgcctc

SEQ ID NO: 988 - DNA, 1050 bp, Homo sapiens
atgaaacagaatagagagcccagaaataaggctgcatatctacaactatctgatgttcaacaagctgacaaaaacaagcaatggggaaagaactccctatttaataaatggtgcttggatcactggctagccatatgcagaagattaaaactagaatctttccttataccatatgcaaaaatcaactcaagatggattaaagacaattttaaaatctaaaactataaaaatcctggaagacaacataggcaataccattctggacatagggatgggcaaagatttcatgatgaagatgccaaaagcaactccaacaaaaccaaaattgaccaatgggaccaaattaaacaaaagagcttctgcacagcaaaagaaactatcaacagagtgaacagacaacctacaaaatgggaaaacattttttgcaaactatgcatctgacaaaggtctaatatccagcttctagaaagaacttaaatatataagagaaaaacaaacaaccccactaaaaagtgggcaaaggacatgaatagacacttttcaaagaagatatacttgtggccaataagcatatgaaaaaaagctcatcactgatcattagagaaatgcaaatcaaaaccacaatgagataccatcttacaccagttagaatggctattattaaaaagtcaaaacataacagatgctggcaaggttgtggagaaaaaggaacgtttatacactgttggtgggagtgtaaattagttcaaccattgtggaaaacaagatagtatggtgcttcctcaaagacctaaaggcagaactaccatttggctcagcaatctcattactgggtatatgcccaaaggaatataattgttctctcataaagacatatatgtacatgtatgttcactgcagcactattcacaatagcacagacatggaatctatctaaatgccaatcaacggtatactggataaaatgtagcacacatataccatataatactatgcagccataaaacagaatgagattatgtcctttgcaggaacatggatggagatgga

SEQ ID NO: 989 - DNA, 1061 bp, Homo sapiens
gtgacttggttccaaaaggtagaaagcagaacatgcagtcttcctaacacttagatccagaatgccagtctagctgcatttaaaggaagtcagaagactaggccaatctcaagcagagaggaaatagactccatttcttgatggagagagtgacagacatggacaaggatggaaagaagtgttgacagccgtatttagagaccatctatctctgtcctctgccacaacaattcacatctcccttcacctgaaaatacattcatatctccttcaaaagtgacgtcccattatggaaccagctccaagtccaggattctgtcacttcagtcaagcccagatatggataaagatactcagggtctaaaggataaacttgggtagagtttgcaacataaaatataaggccttgcttggcatgtgactgggtagcaggcagagacctgaatggtaagtgaggtgattgctagtggaggaaaatggacactggggaaattgctatggaaaagtggagaaagggtagatcatgtcgtgtattggcagaaaaatttgtgagactgttgcctaaagttactgggaagacagataaaagtatctaaagaactctggatctggctgggtaagtttctaggcaaatttttgaaaatggctttttaagctgcctatgagaaagtaatgcaaaagacagatgaactaaagaagaaaattttcaattttcaagcagaattgagaagaaatgtttttaacccaggtattgctgggatggaaaaggacactatttatcattcttaatttttcagatcaacaaaaggcttccaaagtaagaagtagcttcagagaaaaggtgaaactgaggctctgacaataatgtgtggcctcagcattaagaacaaagtaatggtatagaatgttaaaaactgaaagattgaaggacagtgcttggtagaaaaatgcaaccaggcaaaagccttctagggattttaaagatattatcttggggcatcctgaatctcaacttaaagtggaaagaggcctgccttaaagagatttgtgattgtggcatt

SEQ ID NO: 990 - DNA, 1031 bp, Homo sapiens
ggatgcaggacgtgtttcggattcgacgtggaaagagggagggaagcacattagcattaaggtaatcatggcaccctggctcgtggactattagattggctaccagtggtctctaatcttactgtttgcagagtcaagaatgggggcgggggttgggggactgtatagattgccttttaaaatagtgtgacttcataataacggagatggctgaaagattgcttccttacactacttctcggccatcagggctgaataaaggacccgcctccgccctctactccggctcttctctggctgtctcttccccatcaagtcataaagcgagcgggttgggcgagagggcacagctcgaggcagagaagagacggggtcactttcacaactcccaggaatcggcttcagaaaggaaccatctgcgactcccacgttcctttcgaagttctccttcaaaaggaattacaaaaaaaaaaaaaaaaaaaaaagcgatgggggtggggatcggtaagacacaggggtcctccccctgctcttttcaattactttcccaatactctttcaacacatcgaatttacctgcagtggtaactgggtcagcaggtaaatagatttgtatctgtatatgtcgaaatgtggctctcctggtggatgaaaagcaattttttgtgagcatattctaacctaggcgaaatttctaagcacaatagagatttttatagcgtgggcgagaagagtgcattccagcgaaagcaggacacgtgatccctccaacgggtgagatacagtattaggaactcgattttctttgttccagcctgagcctatgagatgttcagcatcctggttgcttaagtcctcctatagaaggaaaataataataataataataataaagttgatcggaggcgaaatagagggaaaataagcacaggtagacatgcgtgaacggtttgaaagcttcgcctctgcctttttttaccgcccacccttcacccccaccccttgctccagccagccccctattttaaaat

SEQ ID NO: 991 - DNA, 1033 bp, Homo sapiens
cagggatgaagcattgaaatgtctattaacattgacatgatgtgtttaaatattttaacaatggagcagttgtttacattgtttaaataattcatttataggcttcttaaagatgcagtttcttcagttgtgccaggatatttttgctgtacacgaagttcagtaaggttgaaagcatacttaacacaaggggataggtatgcccaaggtagtatcataacaaatggcttaagttaaaaacagtggaactctaggatacttgtgtgtgtggcggggtgggtcagatgagggagatatttaaatgttgtagtactcaagaggtaaagtagtatgagaacaagtgagaagctattgatttcaattatagaaaagaggtagctgaccttaaaacaaaacaatagcataaatactatcattatcatcatgaaattttcataggtaaaaagaaatggtattgtgaaaagcagaaaaacagagctaacagaggaaaatatgggacaaacaattggaaaagagctgctagacaagtcactgagaaactacaggattttatgttattatattgaaaaagataagaatactctggtgtagtggcaaaatactttatagatgcttggctgtattgtcaatttattcaatactggaaggaaaggtaagaaatgaactttattaagatagtgcctaagtattatgaagacatttgttgcactaaaaaggtaggtaatggacacaaagctaaaatatgccagctgaacttaaagaattaatatgtcacagatggcgtaactaaaacaattaaaaattgcaaataatagacttataaatactaactacttaagtgttctgcatcaaaagtattcatcattgcagttcttaccaccagtaggcaccttacagaatcatgttggatggaaatataccttggaccacatattttgagcactcataaaattaaatagttactatccggtgttcttctgatcagtgtaattcaagacatgaaaaaaatttcttccctatatcaagtgtgatt

SEQ ID NO: 992 - DNA, 1076 bp, Homo sapiens
tacatttagatttatagaaaaattgcaaagatattacagggtgttcccatataaccctacacccaatttcctctttattatcatgtattagtataatacatttgtcacaattaatgaactattattgagatattattaactaaagtccatattttattcagacttccttagtttttacctagcatccttttttatgtcccagagaatcatccaggatatccgggataccacattgcccttagtcatcttgttgccataggctcctcttggctctgacaggttttcaatgttgcttatttgtaatgaccttgacagttgagatgtgtagtgcacaggtgtttttttagaatagtccttaactgggattgtgttatttttgttctcataattagactaggcttttgagaggaaggcaagagagataaagtaccatctatatcagtatggactcattgatgttgactttatattttgagttataatccaatactactttgtctattgtatagcacaccttgttctagctttcactattcactgctcttcatttggctcctatgcccctttgactttccccatgcttttttcttataataactttcttgcttcatggacagtacaagatactccaggcttatcttgtatttattttctgctccaattttagaattagccatttctccaaggatctctggtttcttttttttttttttttttttttttttttgagacagagtttctcttttgtcactcaggctggagtgcaatcgcacgctctcggctcactccaacctctgcctcccgggttcaagctattcccctgcctcaacctcctgagtagctggaattacaggcaggcacctgccactatgcccggctaatttttgtacttttagtagagacggggtttcgccatgctggccaggctggtcttgaacttctgacctcaggtgatccgcctgcctcagcctcccaaagtgctgggattacaggcatgagccaccgtgcctcgcccctggttctttttattaaagaattgtattaaaaaccaagatcaggacactaggtgtactatt

SEQ ID NO: 993 - DNA, 1063 bp, Homo sapiens
acttcttctttttggcttttgggttacatgctttaaaaatcactccttttgaggaaattgtgtacattgactgcctgcacttctttttttcatttttttttattgaaccttaatagaagtacatattttcagagtacctgtgataattttatacatccatataatgtgtacagatcaaatcagggtaattggaatgtctatcaccttaaatatcttttctttatgtctgcacttttcgaaaccctattataccttaattcactgcaatgtggatttctgtcttcactggtcgacttaacttgcccttaccaaggctgcaaatgaccaaagtaagcacattttctatgaaatttttttttctgctgttttacatgataccatatcctacccattttggtccttgctttctgactactactcagtctttacacgccttgaactcaaatcatctcattgttgatattcttcagagttttgccataggacagcatctctcctcattttttaaaactctgacttgtagctacaaggtttatctcaaggtgtgatgtcatcttgatgattgtggatgggggtgatgttctagttttgtttgacatcattatggccagggccccagggaggccaaggtcctcccccgacagtcgcttctttcccctctccgtaaagccccatgagagcttttttggcaagagttgccaaaaagtaaagagaaaatgccattttgttatcaaaggtgggctggtgtgagataaccctcaatgcagagctctgttcaattagataatagtgaagtgtttaggcttcttctaccacttttcctaaaagcccgatctctacctttggatcttactacactctagctggctgcttgataaactcaaactcataatcatcctgctcagtgtgttcagagtctgttttcaactctcttgccagagtatacatcttaatcttaaatctgatcatgtctgtttcctactcatatcactccaaagcctcccttgttgacttaaggtttaaataaaaacctttatcatgtcttacaagactttctgattta

SEQ ID NO: 994 - DNA, 1480 bp, Homo sapiens
gatcataaaagatataaatatttatatctgactggatttaatttgctaatattttattcatgatgtttcaactttgtttatgaatgaaattagactctaattttcttctctcatattgcccttgttgtgttctttggtataaaagttacagtgacttcgtattagttgggaaactctctcttcacttccttcgccttcacccttctctctttctctctctctctctcttcccctcccccgctcccccgcacacagagtttatataaggtgggttaactaaacacctagattcagtgcggggatttagggtggcatttgtttcattttgaggaggtaggttttaaactactgaataaatgtctttaatagctctaaataaatttaggtggttttctaattcttctttgagtttgtttcacgtcaatgtctcacactgtttttatattttccataaaaagtattattgtctttacatattcatattaaaaataattttgtcctaagtcttggggttaattctacataaatatttgagcattgcagagttggaaaaaagagtagcaatacaagactgctagttagaagacctgatctcttatcacatcccacaacccacttatcacaactaaacatggaggctttggcaagatatttaatcttaccagttctatttctacctaaaattttggaaaattgactggatttttggggaattaaatgaggtaatttatttaaaagtcaaatagtattcctcagggttatgaaatacacgttaatcttcttttcctttcttttctttcatgactatttgtaagcatctattctgttaaatagctttaccttatgtaatccatctccctgtaactaatatattttacttaattacacagaatcattttaatatgtcaactgttgattttctaaaggacaaagaatgttttttaaagataagcagagacttgatgaagcaaagctgaatttcttaagcctagtgcagtaaaagaaaatgccaccttgagataatcttagtattagtccagaatagaaaggtgacacatttttagggtttaagagcctcgcctgagattttaaggccagttttgcaaagagagagaaagggtgggattggagggcacaatgaagtgagtcttgatgagcaatatgttagtgtcaagaaaagaaattttgggttagtttacagaattatctttcagaagcaaatatttcttagagaatagccaagtttattttgtttgttctcaattttaatataaagatgggaaagtatgcactgtctcaatgttgcttaatttaaatacaagaaagtaatccagctctcagtagcgtttaacactatgtcaaaaattatattcattttagtactaaatattaatcattcatttggtcatttctaaccctgtgcctgaatacagactattattgtctgggaataattaattcagatctgtacttctgtttg

SEQ ID NO: 995 - DNA, 1037 bp, Homo sapiens
aattgtctcaaaataccaaaaatgggaaaggcatacagctgatttttttatcattctgacagtaaataatttgccagaagtccttccgacttctttcttgttttcctttgtgttttactggacagttgtcagaaattattaataagagaatttggaaattaaaaccttcattttcatgactattcatttcatatgatattagagactcttctattttttacaagttacagtggtagaaaaatatcttagtccttttgggttgttataacaaaatgccatagactgagtgacttataaacaatcagcgtttatttcttacagttctggaggctgagaagttcaagatcaaagtgccagcagattcagtgtctaatgaggtccccttcttcatcggcagctgtgctctcactgtaacctcacatggtagaaggagcaagagagtctctggggtcgtttttatatggacattaatcccatttttgagagttctgctgtcatgaattcaatatctcccaaaggccccttctcctaatactttactttggaggttaaaatttcaacatataaattttggagatgaaaacattccattcactgcaagtaggactcaaggctagcaaagacacagaagtcaaggaagcagtggttaaaaccacatgttctggagttgaattgtctagtttaaaatctagcactatcttctatgactgtttaaaattgagcacattccttcatttttcattgcttctttttcctcatctgtgaaaaaaatggatataattgtactcatctcttaatattgtctaagtgttgggaataaagcagcaaacaaaactgataaaacttgtgcctttcaggagaatcgcttgaacccagcaggcggaggttgcagtgaaccaagatcacaccactgcactccagactgggcgacagaacgagactccatctcaaaaaacacatgaaaacctatgtctttgtgaatgagttatttggggctattcatatggaatataaatgtgacagcagtttgagagatg

SEQ ID NO: 996 - DNA, 1053 bp, Homo sapiens
aataaatccttttcaactgttactataaataattagacatttatttggttcatatatttagtttttttaaagtgtgataagcttatactattacaaatacagttacccttgaacaacataagggtttggggcaccaatcctcccaagcaatcacaaaaccaaatataacttttgactccacaaaagcttaactactaatacccgctgtttactggacaattaatatatatacatgttttatatatatatgtatattacagagtatattagacactgtattcttatgatatggccagaaaaaagacaatgttatttaaaaaatcgtaaagaagagaaaaatatatatactgttcattaagtcaaagtggatcatcataaaggtcttcatccttgtcttcacattgagtagggggaggaggaggaagagaagaggttgctctttccatcttggaggtggcaaaggtggaagaaaatccacgtttaagtgggcccgtacaattcaaacctgtgttgttcaagggtcaactgtactaactccaaacaacttccaagttcatatcctactgaaagtatatcagtcattctgttaggaagccaaagagaaattttaaataatataatattgtccatgaagaataacctaaaattgaaaaccaattgttacaggttagaggtggcatttatatgggcagaaattgaaaatctaaagaatgaaattgatgacaagattcttcagattctgtataggtacgaaatgccaacatacactcaaggtgcctaaacgtttttaatatgattagaggaagttattggaactctggggtgagccagaaatagtcaacacaggaaagagagattggaggcaagaagggaacttgtcaaaccgtgtttgtctctcaaggccatgatggccagagagagactacaaccagcttcacactccaggctcctgtccagacctgtgctgctctggggagccccacatgacccagcagcttggtttctgtgccctgagtgttccgataccaggaaatcaagttttgatgctgccat

SEQ ID NO: 997 - DNA, 1030 bp, Homo sapiens
gttcaaatttaacttatcatcctgtatttttatttgctaaatctagcaaccctaggccaatctggtcattttaaatctttttccatttctatgcaacaaattttgtaagataggtagtaaaaacatggttaatttatcaagcaagtatttatttaatatccattctactacacagtacttgaagctttagggaggttacaagagaaataaatctcgatctctgcccttccggatctgacaacctaattacagagaaaaactgaagcattagaggcaagtgctcggtgatgtataatcggagccaaagagccaagtaccattgtagagcgtatgtatagagaagagctccatttttggagaagtaagggaagaacttgaccaaaaagcacagatggaaaatttaagatgcatcaagagttgaagggagcagagttgtgaagagtctggaactgcaggtgcatggatgtggatgggggcaatatgtagggagactgggggaggactcaggttatgaaagttcttgaaagtcacatagtattgtttggcttaatgcattgataagataattccattgaaaagtcttatacatcaaggaactcactaggatcctaagtaggcttggaagagaaattttaagatattttgtctgtttggttagttaaaataattgactaacaataattaaaaataatataagtacaccaaagacttaatatattttaccagtgcattatagttaaggagaatttattatcctttatcattgacctgccttatatatttcaaagaaattttacataatctttaaaggtttctgtgagtttcaaggttgaattttttttactttcataaaacagccatgtaagctagtttcccttaaagtatctgatatattgaaatatgatctaatgatctgatattgaggtatgatccaaacagtacatagatgtatttgtgcattataggaaaaaaataggaaatacaaaaatgaaaggaataatgcatcagagttcattatatgtgtttcaag

SEQ ID NO: 998 - DNA, 1077 bp, Homo sapiens
agctaatgggataaacagactttgattttagggcagtgaagactctctgcatgatggataatgatactatatatataaataaatgtatatatatataaaagaacaagctgtgtgtgatatatatttactctgctatgtataatatttatatataaatatatattataaaatgtatatatacatatatttatatatatggtgtacatttgtccaaatccgtcaaatatatattataatccatccatgatggatacatgtcattatacatttgtccaaacccatcaaatgtacactgagagtgaaccctaatgtaaactgtggactttgggtgactataatgtgtagatgtagtttatcagttgaaacaatgtaccactcaggccgggaatgtgaatattagggaaagctatgcatgtgttcgggtggggagtatatgagaaatctctgtgctttcctctcaattttgctgtaaacctaaaactgctttaaaaaaaaaaaaaaaaaaaaaaaagactgcgcactggccagaatatgcctgccacttagttgttacgaggaagggacaaactcaaaaacaaagaacccactaagtaggaaatctgacaaaaatttccaggcctaatgtcatgactggcctcaggccaagaactctctgatgaatgaaattggagtctcagaagacagcagcaaagacggtttctgagaggctactgaaaggaccctctctcgagaaaccacatctccaaacccctaggagtgggaagtggtcctgccaagcacggttcctagaggggcccaggggtccgctgtggcctcggtaggaatgagagatttctcagcgctggttggaaatactgcagaacatccaggcggggtggcacatgcctgtagtcccagctactcaggagactgaggcaggaggatttcttgaccccaggagttctaggctgtagtgtattatgctgatcgggtggcaacactaagtttggcatcaatatggtgaccttcctggagcggggaccactcggttttctaaggaggggtgaaccaactcaggtcggaaacggagcaggtcaa

SEQ ID NO: 999 - DNA, 1047 bp, Homo sapiens
cattgatctatatctctgttttggtaccagtaccatgctgttttggttactgtagccttgtagtatagtttgaagtcaggtagtgtgatgcctccagctttgttcttttggcttaggattgccttggcgatgtgggctcttttttggttccatatgaactttaaagtagttttttccaattctgtgaagaaagtcattggtagcttgatggggatggcattgaatctgtaaattaccttgggcagtatggccattttcacgatattgattcttcctacccatgagcatggaatgttcttccatttgtttgtatcttcttttatttcattgagcagtggtttgtagttctccttgaagaggtccttcacatcccttgtaagttggattcctaggtattttattctctttgaagcaattgtgaatgggagttcactcatgatttggctctctgtttgtatgttgttggtgtataagaatgcttgtgatttttgtacattgattttgtatcctgagactttgctgaagttgcttatcaccttaaggcgattttgggctgagacaatggggttttctagatatacaatcatgtcgtctgcaaacagggacaatttgacttcctcttttcctaattgaatagcctttatttccttctcctgcctaattgccctggccagaacttccaacactatgttgaataggagtggtgagagagggcatccctgtcttgtgccagttttcaaagggaatgcttccagtttttgcccattcagtatgatattggctgtgggtttgtcataggtagctcttattattttgaaatacgtcccatcaatacctaatttattgagaatttttagcatgaagggtttttgaattttgtcaaaggctttttctgcatctattgagataatcatgtggtttttgtctttggctctgtttatatgctggattacatttattgatttgtgtatattgaaccagccttgcatcacagggatgaagcccacttgatcatggtgggtaagctttttgatgtgctgctggatt

SEQ ID NO: 1000 - DNA, 1118 bp, Homo sapiens
gtagactggagctgttcctattcggccttcttggctccaccctgttgtaagttctttgagaaattgccaaactgctttccacaatgactaatctaagttatttccccatcaacagtgtttaagtgttcccttttctccacaacctcaccatcatctgtgattttctgacttttagtaatagccattctgactggtgtgagatggtatcttatctgactggttgttttgatttgcatgcttcctccctcttaaatcatggagggaaatcttcctcacaatctcctccagcagagtcctcttcctgtcccagtggccagaactaggtcataagttcatgtcctagttgcaaaagaaatttggatgatgactatatgacatttctcatctctgatgcagggcaggttctgctggcaagtaagaaaggtagttgcatgggaaatagccatggctactttggcagattacttttaaaggtccttagcctctaaagtttaaattctctgacagcttagtcacggagttatgcctatttgatacacccgtcagggtatcaacaatctaaggccaaactctgtaaaagcacggttagacctctgcagatagaaaatatttgaaaaaaaaaaaactacaataattttaaaaatacaagtaagaaaacaacacagtataacaaatctttacaaagcatttacattgtatcatgtatttacattgtattaggtatttaaagcatacaggaggatgtgtgtaggttaggtgcaactactatgccattttgcagaaactagagtatcagtggattttttatatccatgaaggtcatggaaccaattcccccaaggatactgagcaacgattgtacataaatattaatactcagaaagcccaatataacaagtaataactttttcaataaaatatagccagaaaacaatgagcctgacacattgtgtgtccttgtatatgcacacatgcatatgtatgtgttaaaggggtcttttagaaaagaaactttgtggtggtggtggtccttgcccagttatctacaagagttttaaaacagcttaacttggcttaactattttttcagtaacattcaacatctcttcataagcata

SEQ ID NO: 1001 - DNA, 1056 bp, Homo sapiens
ttttttccttcatttcaactttggtgaatctgacaattatgtttcttggagttgctcttcttggggagtatctttgtggcgttctctgtatttcctgaatctgaatgttggcctgccttgctagattggggaagttctcctggataatatcctgcagagtgttttccaacttggttccattctccccgtcactttcaggtacaccagtcagacatagatttggtcttttcacatagtcccatatttcttggaggctttgttcatttctttttattcctttttctgtaaacttcccttctcacttcatttcattcatttcatcttccatcactgataccctttcttccagttgattgcatcggctcttgaggcttctgcattcttcacgtagttctcgagccttggctttcagctccatcagctcctttaaggacttctctgtattggttattctagttatacattcatctaaatttttttcaaaatttttaacttctttgcctttggtttgaatttcctcctgtcgttcggagtagtttgatcatctgaagccttcttctctcaactcatcaaagtcatacgccgtccagctttgttccattgctggtgaggaactgcattcctttggaggaggagaggcgctctgctttttagaggttccagtttttctgctctgttttttccccatctttgtggttttatctacttttggtctttgatgatggtgatgtacagatgggtttttgctgtggatattttttctctttgttttccttctaccagacaggaccctcagctgcaggtctgttggagtttgctagaggtccacacgagaccctgtttgcctgggtatcagcagcggtggctgcacaacagcggattttcgtgaaccgtgaatgctgctgtctgatcgttcctctggaagttttgtctcagaggagtacccggccgtgtgaggtgtcagtctgcccctactgtggggtgcctcccagttaggctgctcgggggtcaggagtcagggacccacttgaggaggcagtctgcccgttctcagat

SEQ ID NO: 1002 - DNA, 1038 bp, Homo sapiens
gtgggagagaaccctgtaagacattttaaggatttaggattttattctgagtaaaatgggaagctctttggaagggtttgagcaagtagaacctcgatctaactcacatcaaattatgttactttatattacattaggtcatattaattaattacattatcaagaccactttactatgttgagaatagacgggtcaggcagtgtcaaggtagagtcagggaaaacagttagaaagttattgcagtaatctaggcaggaaatattagcatgctggattagggtagtagcaatggaggtggtaagaaaccaatttctgggtaaatctttaaactatagctagaagaagatatggtaggatctgaattttgtaaattgaggacacctatcaaaaactaatacaaaattagaaatacataattagatacaaaaaagaatgttattcagaataaaaaaaagaaactacaaattttaaattacaaataaaaatcataaaatataattttgaaagctgacaaaatgccacaaacatcataaaatcgtggaaaataacataatagcacacatctataatgcttccttcccccttacattttggtttcatgctctttgacagcctttccatgtgacaaacatcgtgtagtattttctttggagattatagaaaaacaatccagtctttcctctaacatgatttttaatattgatagtttggaaatgcttacaattttcattgatatgccttgcagaattttaggactgttgtcaaatttgggaaaacatttgcctccatacattctaaaccttctttttcctccaccacctacgtacttatagtgccaggaaccaaagaacaggtttatgtctcaatacatgctctggccctgcaccttcatgtcctgatggtcaggtgagtgggcacagtgggcagtaggaggatttccagaagccatttctaaataaaatggctagctagcacaagttaagtacacacagaaattattgcaaatcatataaacacattccacaaaacccgtatga

SEQ ID NO: 1003 - DNA, 1050 bp, Homo sapiens
ataaattaataataataaataaaagatagttagaaatatagatttgaaacttagtaaatgtgactgagctagataaatatttgagaatcactgatgaaattgaccctatgaaaatggataaaaacagaaaataaaatgtacagaatcagaagaaaaaggggttctggaaaataacataacaaatacataaaagttttacaaagtttaagatgttatataatataactaattattatcactgtttctgaacaattgaaccaaactactagatctaatttaacttccacaaaatcaaggaatttgtccccctggttcaccagtatattctagaacttatagaatattgtcaaacatatgatatgtttttagtaaatatttattccttgcccaaatgcatttattgaatgccttagacatatgtatttattatatgggtggattaggagtcatgacatttccccatgagagttctaacaattctcttccacagccacactgttgaatttgtaaagccagatcgttaactctgaaaaaaaagtcttccttaaatttatagcccaattaatactacagaaatcggtcattacttaaatgttcaaacagttggctttgcagggtaattattattttttccattccaagtacacatttttgtcttatgttaataagacaaatacaaatttaagaaaatgtttacagttaatgtggagaaaatgaaaaagaagcatacatctatagtaagattcccaatgaactagaactgcattcttcatgttcaggcacctccagtgtcttcacagcatgactagaatattgttaacagtgacaatcttctagttagtgccaacaaaatagagaaaaccctagtggtgcgtggtcctcctacatgctgtgggagccctcctttggagaacaaaacaacctccattaatcagtcaacagaaattttttgaactcctactgtttgccaggcattgcactacattccagagggcttataaagaaatgtgaagcctgcccatgccttcaggaaaagtatgtttgtaggag

SEQ ID NO: 1004 - DNA, 1047 bp, Homo sapiens
catctattgttcactgatttatttaaaaatcatgtaccaataaagctctatgaatcagaaactatgctaatgtcagggttacaaagataatacattcaatgaccttgaatatatttgtttgagaagctcgcacatagcaggataaacagatctggatttcactactcatagaagagcctgatttgtgctatagtcaaggtatgtacaaatcctgaggcaacacgagacacttaccaatccctgtgcaaagattgaagaatcagaatatatgccagctaaaagtttatacctcttcttcaatatatttatttattaaaaattacatagcatttaccacgggctaagcattctctctgtgttgtacaaatgttgattcattgaatccctacaacaatcctatgaagtaagttctactaccatccccattttatagatgaggaaactaaaatacaaaaaaagtaactggcccaagataacacagccagtaccccagggagctgtaattcaaaccagcgccagaggctgctgttgactgtaaagctcccaaaggctctctatggaaccaatagaaggtacaaatgagaattttacttttcacaattgttacattcccaaaatccactgtgcaaatcaactcacatgccaaatttctcaataagtttgttatttaagtggaaaggcagggatgaaatcttccataaaacatataatgctgcctaatttgtctgtctcgagagtagatgtttcatatgtactgctagctttatatagattccttactttattttgtatacttgcacttggtaatttgttatacgctgtgtgggaataccctacacctccctgccagaaatagccatggctttctggatgttggcgctggcaaagaattgcttttcagttaccccaaaatacttggctttgaatggttcatcttgagtgtggtctccagcctatgtctgtcagtttcacagaataattaaaacatttaatatcattagccatggggaaaagaagcacattcatttttttcttagttcatgtatc

SEQ ID NO: 1005 - DNA, 1045 bp, Homo sapiens
cttagtgagtataatcatcatgacccactatcaccagcccctcagtcactgatttttcccctcagagtgctactcagtgaatttcttccctgatgtattcccttgcatatcagataaataaaatctgctttgttttttgagctgtggtgttctgtatttaatttattgatacccaagataatacagttagtaagttacaaagctgggacacaaatccattctgacttcaacccatatgcttaatttctgtgttcaattgttaaataaataatggaagcaaattgcattcaagctaactagttttaacataaaaaaggatgctgaccaggcacagtggctcacgcctgtaatcccagcactttgggaggctgaggaaggtagattacttgaggtcaggagtttgagaccagcctggccaacatggcaaaaccccatctctactaaaaatacaaaaattagctgggcgtggtggcaggagcctatatcccagctacttgggaggctgagacaggagcatcacttgaacccaggaagtgggggttgcagtgagctgagtttgtgccactgcactccagcctggatgacagagcaagactacatctcaacaaaagaaaaaaaaaggattctaattctacaaccttactccacctaactcaaattcatttttccctttacattggtagaatcttcacccctgggggttccttcctattataataatagcaatataataggaatagtaagaacagtttaataataatttcaacaataccaacgccaactgcaatgtatctggtgcttactctgtgccaggcccttttttcccagctatctcaaaccaggcattgaagtgtcttgttgccttgtgataatttcaatgtacatctatacaattcctttctgtagatctgaagtaaagccggctaagtatggactggtagggattgtgacaaactggaggcacactgaagaattatgcccatttgaaggcagcagctattaatccatttccattacttgtcatggaagaatacagaccccgtat

SEQ ID NO: 1006 - DNA, 1059 bp, Homo sapiens
tacatttttaattatcatcagaattgatttagattttctcaacatcacattttcatgttggcatggcaacatcttgaatctctcatttactttttataacattgtatgtgtactttttctatcatggctactaacagctctcactcttagtgactaattacctttataattgcatatgtgttctattaataaagctagattgtgtgttatgtttgtctctgtcctctcctttccacattttctaaactttatttcttaaatcagcacatgagcacttactggcaaggcctaccaatatcgttacggagaacccaaaatggattcccaaatccaaaataacaattttgttaaagatttgggttttaaaaaaaatgtctctagatagttgattagtgctgtctaacaaccaaagagacatctttttgaacttgtgaattcctagaaaaaataatgctaaactgaaaacataccttcagaacatttcagttcttttacggattttgtatgttaaatccagaaccaatggatgatgcattctataccggacttctgattcatctttatatttcattgaattaccaaaaattgcatgcttcttcctgaaattctgtattcaaagaatgcaagaagaaagtgcatttaatatactctggtatatgtgtcaatgaaaacgtaaaatatagtaaatacttacagttatttagaagccctgtttgtgtgttatgtgttcaagtttgtttataatcagagtaggttcattatactttagagtgttttttctctgtatttacatttggtttatttatgtattaatgaaacaatgtgtgtttcaaaatctcaaactactcagttttgactaatttgaatatttccaatgccattggctattggacaaattagagcacaaacgaacttctaaataaatcatcatggaagtatgatgaatagaatatattgtaatcttacactaaatcacacttttctggttcattacatgtacattaaattcagcaccattttacctttaatttacatgaaatttaaaaaggaaccattgac

SEQ ID NO: 1007 - DNA, 1034 bp, Homo sapiens
tattggaatatgaaacattatcactttggtaacaaattttcctgcaaagctgaatatgcacatactcgacattccatcaattctcctcttaaggtattaaactagaaaaattatcatacatgtcattcagggtacttgaaatgtttccaataccagaaaactgggaaaagccaaatgtttaccaccaggagagtatgtaaataaattctgttaattacacaaaggaatatttcaaagcaataaaaattagtaaactataattacaataatgtgtattaactttagaaacataatttgaatggaagaaaaagtttctggaaatggcatacatatgtaataccatgtttacaaatcccaaaacaagcaaaactcaaaatatattatttaagcataagtacataagaaacctattgttataagtaaatggtaaatgtagtattcagaattgtggttatctctaaaggtaaagtaggggatggaatcagggagaaagtggatattattgctggaactgttctaattctgaaattgaattatggttctttacactctactttttttttttttttttttttttttttttttgagacggagtcttgctctgtcgcctaggctggagcgcagtggcgcgatctctgctcacttgctcactgcaatctccacctcccaggttcacgccattctcctgcctcagcctcccgagtagctgggactacaggggcctgccaccatgcctggccaatttttagtagagacagggtttcaccgtgttagccaggatggtgtagatctcctgacctcctgatccacccgcctcagcctcccaaagtgctgggtttacaggcatgaaccaccgctcccggcctacactctactttctaagctcatgagtgttcattttataattgtgctttgtaacctacatatgtattacatacttacactctttgttacttaagtgatttttctcttgatgaccacttcaatacttcaaaaatgcattaaatatcaaattttattttatccaaaatatt

SEQ ID NO: 1008 - DNA, 1070 bp, Homo sapiens
gagtaggaaaaaaaatatgagtcactttaaggttgccaagtataaagaatacaatttgagcacgggggcagtactttttttcctaaagaactatttattaaaaatatcatatttgggagtcatttcttttaataagataacaataaaaagtgttaaaagaattggtagaggtcagttttaagaagtgttaagtgcttgctatttcccagggcattgtgttgggtgttaataatataagatgatagcattaaaagagctttgtaatttattgatggaaacatggatgtcagcaaagaaatgtgaagtgccatagcttactaaacctgctaaagtacttgacagtgaggcacacctgcagccccatctattggggaagctggagtgggaggctgggtaacatagtaagacccctcccatttctttaaggagaaattgcttaaacattctttttactactgcgggtgcaacattgttaaattttatagcagcagtgtttcacatctaaaaaccactgtattctttaagaaacattcaacagtaagcctgtataacaaggtggcttaacttgcttgtggatatcctgttaattttgctttgaacttgggttagggtctgtgtttagcctgagaggtccttgtagggaagcttgtatcagaagttctaatgggtttgagttctcaggccatatatagcatcatgttagtgtttgagttgtgataaaaattatggggttttttgttaggcctaaattaaaagaaattatttttcttttcaacaatgaatctgaaattcttagtataaccaaatctgatgcatttacaattttatgtacacattggtgtgtttcattttttagaaactgtgaagcctcattcagatagtattaaaatacaggattttccttttcattaatgagtcctatgatgtaagtgttatattgatgttaaaatgaagtagttttgtaccctgggtgcataaaattgtcagagagaattaaaggagaaagaactcaaacttcatcagagatcttgatttaattcatgtgaagagtgtggattacccccaacccc

SEQ ID NO: 1009 - DNA, 1170 bp, Homo sapiens
taactacctatgtgggcatcctaagatgaccatctacctcagtagatgtagagtgagcattagtagcatgttaaatctaagctattaacatttttaaacccttgttatactgcagtccgtaatttttgcttgcagattttttttaattctaaaaattagaaattaggtctgttattataaggtatttaccttttgttttcttttaaaacatttttaagttgtttaaaaccatgtcccttattgtaactccctgagatacatctacttagttaatttaatgttaagttttatgaaaaagccctgaaggtaaatgattcactccatgtatgcttacagagccttcaaataaatgcatgatgttatttctgttttaaataaatgagtaggttgattttattttcttaaagcttcctcacattgataatctggaaaaaaaaaaaacacattgaatttcagtataccaagggttgcagtgattttggttttcgtgaaagttcaagatttcctgtagcttaggtgccaaatgggcactgggtgttttattttatgccagattttcttgttcattcttgctatatttctagaatatctctaaataataaattcttctctctgttatttgtgtgtgtgatttttatagtggagaaggcaaatgcaaaacccttccagatgcctgaaaaacagtgggtcctctgcagctacaggggattctagacattaactaaaggccagcaagcactcaagtgccccaagtgttttcctggtgtaaccatttgttaactacattttctctctttttacattttaggctgttaaagtaatttgacagaaaaaaatgagcaggttttttggatctaaaaagccactgtgacaagaaattttaataccattttgtaaaattttctaaggcgtattttataattagtttgttcccaatgtactgctacttgatttgcattttggtaactataaattttactcgaatcactgaaatatgataaaactgctggattttaagttaataatttaatatgctgaccaggatttaaatgctttcccctttccttaataaactggtcagtggaagtggaatcttaatattgttcattttagatgctatctgaaatctttgaaaacaaatgtgagcatttacaccataccttgtaaaag

SEQ ID NO: 1010 - DNA, 1023 bp, Homo sapiens
tagaacagtagacatagtctacggtaaggaatagtcttaattggtaaaactaagatagctgaatttggaaggaactcttaatagtaatggatttggggattttttaggttccttggttaatgtttgtttcttttgtctgtttctttttctttcatttctacacattcatgcagtatttcatggttctatcaaagcagcagtaaaaaaaatactcttgacgcatgaaaattaactggtgaggggcctcattgctatttttaaattgtagttttatttttaaatagtctttttttaatcagaggatcagatgcatgacttttttttttttaatggatgcagatcttctatcaggtgtctcacaataaattcaagaggattttagtttgccagaaatgttgcaaatgcactaatttgagtaagatgttgatactgaatatatcctcttgagacataattttgcatgcaaaattatcccataatctttgtaggtttgttaatattgatgcattactgccctatatctaaatgatcttctcccccttcccctccataactcttggtatctaaattgatgacagctctgacacaagcaagataacagtgctgtgtagtatacatttgtttatattatcggcacttctcagtataggtggaaggaaccattacctttatttaacagtggtttttcttttttgttgttgtgttttacagttcttttccctggttcagcctgaactatataccaggccctgctgaaaataccacccaacagttttcttctgcagcttatccagtttctcttaagtgccctgtacatattgtatgttttatgatgagatgcagtttcttaatatgtattacagaaatactactggtatttgcaaatatgtagtttaattgtattattgaactctcattttgggggcttgggcacattaacagattaatccatctgtatagggcttttgctgttggatagaatttaaattgtctacataaatatttgttttaggacccttagat

SEQ ID NO: 1011 - DNA, 1808 bp, Homo sapiens
tttacctatctctctttctctctcactcccatgcacacatcctgtgtgtattcagagaccttcagaaacattcatattcattttcatgagtcagcaaaagccctacgcttgattccaacagaatatttcctttacatactttcttctcttaatttttacaaaatttgtatggtaggtgtaaaagaaaatcatagtaactgtaccatattattaacccctaaatcaaactttttttgtcttgtgtatcttgatttttctgtgtgctttatagtgaagcagccgacacgagtcgttgttcataaaacagcttttgaaagttgagagcacacccctggagaaccgactgtgcttgcttacgtttggttcatgacttaaaaatcgagtacaggtgatgaaatcttggcagtgttaacaaaaaagtagtgtgtattgtgctatttttttttactctagaaacttaaccatttgtagagaaaaaggaaacaaattttcacacattgaagttcattctgacataaaattaatgataaataatcatagaaatcaagctttgtattttagcgaacataagtactttcaacaaactcaggtggtgtatcagggagacattttctgggtgtttttgtgtgttttctgtcttagaaaagaatgtgttctaatgcaaggatgtttctctgcaggagttattcctgatgaagctaaagctttgtctctgttggcaccagctaatgcagtggcaggtcttctgcctggtggtggactcctgcctactcctaacccacttacccaggtactagttctattgaattcttaaagggtggggaaaaaaacagaattgtgcataaagctaaacatatttgaactttgtaagtactcataagattctagttcagatagcattatcacatgtctatatcaaaatcacaaatagtatagaagatctcttagacttttgtattttaagaacattctgaaaaatcataaaatatctgttctgtcacttttaccattggctctcaaaataacccatgagtagttttggaacagtctcctgaggcatgaacacttctctgaacacactgttaaaaatatattcatttggaccaggaaagaaaactgaagttaaaatttcacaagtgagcccttcatttttttttccttcccctttatcttttcctgttatttggggggttttgaattacataggtggcttgaaaacaaaggcaattcttgatggagatgtttgatatgggaatgtgaaagaaaattggttgcaatagtgtttctaacactgacagtgctgtacgaagcttattttagaactaaaaggcactttaaatactgtgtattctaattactgagattgtaactggtcagtagtttcaaagattgtagtgaatgagcctcaactggaaatttataaaagcattctttctagtgtatcattttgcctgtctaaataattgactaattgactcttaactgtgaagtgcactatagaatgaaagattaggagttcctaagctttttaggtgtgacttttatcacttaactcctaggttatttcttttaacctataaaatgaggatctgagtaattttctttattctttgttctgttttgttttgtttttttttgtttgttttttgttttgtttgtttttgtttttttgagatggacagagtctcgccctgtcacccaggccggagtgcaatagcacagtctcggctcaccgcagtctccacctccctggttcaagcgattctgccccagcctcccgaatagctaggactacaggcatgccacca

SEQ ID NO: 1012 - DNA, 1031 bp, Homo sapiens
taagaaaagcgacagacgaaatagatgatttatgctttaaaacccccaaaaattcagaggtggtaggaaagcattggaactagagcaacaaaatgaaaaataattgattcattgaattatacaagtttccaaatactgacttgtatttgttatctagtgtcaaaaagtgacatctggtaatatcaccttagatcagatcagtaaaatgcaagtactaggaatctggcatgctcacaacaatggagtcattttccaaaatttaattttctcagatttttatcattggcaacagattcatctattttccttatataatagacttcatttatttttcaaaaaattgtctgccaaatacccaagtctaattaatcatagtttctagattctcaaaggtgataatgaaaaagcagttagttcagctcataactcaacacaggtgtcttccttaatacagccattatacttcataagcatcagaagtgatttatgcatactttccatttcatcacacagaatattactcaagagactagatttaattctgctactatattaatagtactgaagggggatttaataaaattaactttactgcttcatcaaagacatctttataaaagtggcattatttttttcttttactgcaagtgcatacagaaatgccagtgaagaagatagtgagtgactcctagggcagttcaatagcccctaccttgatttgtgttgaagagtcagtatttttacccactatggcttttgtgacattggtgcaaacgtcaacacagtggaaaaggcaataatttgttattactttgaaaataattttgaccttatggaccccataaaagggtcttagagcatccacagttgtgcaaacgacaatataaaagccattgctctaggttattcaccaactatttcagccattcttcgattttcttaatttccaaactcaatcctaattggcctagttgcatcctagttcttctagtcagaaccctttaggattgacattcagaactaggatattc

SEQ ID NO: 1013 - DNA, 1096 bp, Homo sapiens
cagacttaaagtctgtgctgatgttaatgatgaagaggtataatgaggcatgttcgaccaccacttcccatcaggacctgaaacagtctctgcagttaaattttaaaagagccgtgaatgaggaggaagtccattcagatagacggttggaagggggatcttagaattttatttttggtttataccactagccatatttgggttcaggctactatcacttgaaactgtctcctaactgatctgtgactcccatttcccacctgtgcttgcacacacaaaacctcacatcactcaccccttggattgccagatgtatcaaataaaattacaggacacccagttaaatttaaagttcaaatatacaacaactttttagtataagtgtatcccaaataggacagggatatttgtaatacttgaggtattgtcccatgcaatatttgggatgtacttacacttaaaaaaaaaaaatattggtgttgaccaggcacagtggctcatgcctgtaataccagtactttgggaggccaaggtgggtggatcacgaggtcgggagatcgagaccatcctggctaacacagtgaaacctcgtctctactaaaaaatacaaaaaattagccgggcctggtggcgggcgcctgtagtctcagctactcgggaggctgaggcaagagaatggcatgaacctgggaggcggagcttgcagtgagctgagatggcgccactgcactccagcctgggcgacagagcaagactccatctcaaaaaaaaaaaaaaaaaaaaattgttgtttatctgaaattcacatttacctgggcacttctgtaaaccaaaaataaaattgtaaagccccccaatcatctgaatggacttcctccatggccagggagctcctaaaatttaacctgagaggctgggtgcagtggctcacatctgtaatcccagcgctttgggaggccgaggcgggcggatcacctgaggtcaggagttcaagaccagcctggacaacatggtgaaaccccgtttctactaaaaacacaaaaattagctgagcatggtggcaggcacctgtaaccccagccacttagaaggctga

SEQ ID NO: 1014 - DNA, 1496 bp, Homo sapiens
ttagtctttgctcttaaggccttcaactgattgcatgaaactcatccacattatagagattaatctcctttgctcgaagtctatttaaatattagtcacatctaaaacatacttttacagcaacatctagactggtgtttgaccaaacaactgggcatcatagctgacacataaaattaaccatcacaaccatgttctaggcactgttcctcactgcctgagaagacaccgttatgtttattagggtttttgagttttatccacagcttttggttatctgcaaccatgtctcccaccattaacatagttcacactgagatgaggattccctatttaacacttggtcccaacttcttcacagtccatctggttttgtagagggaacataactggacattctggtcaggttaggtgaggtcaggccttcaggacgctattttcactgagttgctttataaggcacattatgcaaaattccatcagctcttctgttcactacattcactgttgaaattctaagagtgagactgctgtctcacaccaaagccagtgggtactatcttcagtaggcacgcagcatcatgtttgtatttgatccagctagatgacatgtaagagaaaactttattgtggactctgtaaagtgtgacattcgtttgtgactcaatttgctcatgtatttgttcctgggagttcattacatagctaacttccagctgctttcaatttacatcataaaagaaatgcatcatattcttctcagtgtcctggtagtgcattttcctttagtttttcagtgaattctgttgtaagtaaaatggataagattgttcattattttggattattttgctgaagatgaccagctctgagatgtgaggagtaaataagaaagtaacagtagaatctggaatatcttttaaaaattaagacatcatttttaacagcagagtagccttaaatgacctgattccacagaggagccaggaaacagtatgaaactacaaatttattttgtagaaatatggaaaccttaatactattaagatgtaaatcttaatactattaagatgcaaatcttaatactattaagatgcaaatcttaatagtatttttataaagtgaaaacaatatgatcacttaattactcaagtggagctgaagaaaatttcagagaaaaaaaaataaagcttggaatgcactttagaaaaacacaaaagggaacacaaatgcttcataacaaatctcttaggaggccaatattgaaagaaataacaaaagatggtaaacatgattaaacaaaatgtcatcaaggagtaacaaaagtattactcaaaataaaacttctcttaggaattatccaaagaaaagtaattgtttaaaaaagaatttccacttctatacaacaaaagaaaccctgatttcatttatttcacaatacaatacacatttacttagaaaaaaatgagtgcaataaaaaatgaaattgcttttaa

SEQ ID NO: 1015 - DNA, 1049 bp, Homo sapiens
gtaatggcatgactgtataagggtggaaggaaattttggcggccattttttttcatactaagtactacacgtgactttaataagaaagatgcttgaagtgggtcttgaaaactgagaagttcattagtgaatagaggacaggaagtttaggagaagaagaggagccctttgaaagaacagcagtaacatgaagacagaaagcatcatatttggtctgcctgacaggacatacagaatgcctggaggcatttgggaaaaggaattagaaatgagcttgagaggcaggcaagattataaacagtcttgtatgttttaagaagtaatggcactttatcatccaggctgcagaatacccagaggggtttcattcaggggaatgactgctcttcactctcattgattcttctgtactttgtcagtttcgtatgttcttgatcaataagacttctctggcttcatttccttattcactccagctgacaatccatggtcattcagttaaacctctctctcactgacgctcttatttcccaacactctcacgaccttcttctcattccattattcctaatcctcgattctagaataacccaaccatctgtttgttctgatcctgaaaccaggcactgaataatcctggagcaaatcacataaccatattgattgtctgtctgccttacacatttatgatttctgacatctgttggactcttaatctttttctaggaaatctttacagatacttacctatttcctatgacgctttctttttaaaatttttacagctttttatactttgtacttaatgctgcactctttattctttgcagattaccttccctacttcacagaggaaatagttgttacagtcaggaaaattttcctttataacttcttcctggagttcatctattcttttcattctggatgatcctctatctttccttccagattcctatcattctggacttattctacttctcctgcaactctaaattgatttacagttcttatccatccttattttctttcctccttcaacatagtca

SEQ ID NO: 1016 - DNA, 1061 bp, Homo sapiens
attcatattaatatataattaacctaaacatcatgaataatttttagataatatacataaaaactaaaatatattagaattatattcattattctcatgattgagcaatttcttgtttaataaatgtatgtatctgtggctgaatattacttattgctagaatgagtcaaagcttagcatcaatctattctatttgattgagtttcttaatcctgagttctagtttgattgcactgtggtctgagagacagtttgttataatttctgttcttttacatttgctgaggagagctttacttccaactatgtggtcaattttggaataggtgtggtgtggtgctgaaaaaaatgtatattctgttgatttggggtggagagttctgtagatgtctattaggtccacttggtgcagaggtgagttcaattcctgggtatccttgttaactttctgtcttgttgatctgtctaatgttgacagtggggtgttaaagtctcccattattattgtctgggagtctaagaaactcactcaaaaccactcaactacatggaaactgaacaacctgctcctgaatgactactgggtacataacgaaatgaaggcagaaataaagatgttctttgaaaccaatgagaacaaagacacaacataccagaatctctgggacacattcaaagcagtgtgtagagggaaatttatagcactaaatgcccacaggagaaagcaggaaagatccaaaattgacacccgaacatcacaattaaaagaactagaaaagcaagagcaaacacattcaaaagctagcagaaggcaagaaataactaaaatcagagcagaactgaaggaaatagagaccaaaaaaacccttcaaaaaattaatgaatccaggagctggttttttgaaaggatcaacaaaattgatagactgctagcaagactaataaagaagaaaatggagaagaatcaaatagatgcaataaaaaatgataaaggggatatcaccaccgatcccacacgaatacaaactaccatcagagaatactacaaacacctctatgca

SEQ ID NO: 1017 - DNA, 1049 bp, Homo sapiens
taaacattttttaaaatccagcatttctcaagtgtatttgactaatccattttttttcatgtaatacttactaacatcttttgtaactttacaaaatgctggtatacatgtatttctgcctaatgaggtaaactaaatgatttctcttgacagtattcctaattttatgattctaagaaacgttccgaattggacttgccattcaataaggccaatttaaaaaactgccttgggtaaactttcagtttcgaagttgttattctatgctttgttgctgctctatattagagagtgaggaactgtgtcaaaagtcattcttaatgaagccattttctaattttaagttatcttttgcttttcatatttacctatggtattctggaaacttgtgatttagaggaaaacttagcatacattactaaatacttggctgctgcagtgcctcatatatgtcaagttctaaaaatttataattttacaaatatctgtaaacaacagtattgtagcattaatagagaagaataattcattttgatttcactgggcatgtatcaacacatgacttaactatgaaaaataattgtatttagctcaagtgggaattgagggtaaagattttagctcttctgacctttgtgacaatattacaaatgaaatacacaatcaatgggggaaaaatcagaggctacttggcccaaattctgctagttatttattatttaatacccgaattttttgagggcagagagctaatttgaaatccttcaatatgtctctctcttagtccattttgtgctacaataacagaatacctgagactatataatttgtaaagaacagaaatttatttattatgcttctggaggctggggagtctaagatcaaggtgccaacaggtttggtgtctggtaaaggcctggttttcacttacaaggggacgtattgaacactgcatcctctggaggggaagaacagtgttcctcacatggcagaaaagcagaaaagcaaagagagacaatctactccaaaaaaaaccctttttaattatt

SEQ ID NO: 1018 - DNA, 1059 bp, Homo sapiens
tttcttctgcatctgatacttagcataaagtcacaggtcaggcagtaggaaaaggacagatgtgaaatggggagagctggcaaaaaccaaaactgtgaggaacaagctgcaatctgccttcctttcttattgagtcagcattggccttttctcatctccaagccaccaaccttgaagctgaggatgatctataggacatgctggctatcactcttgttacagaactgcaatagcacctgacccaagttgtggaaaaggtaatttaaaaatatcccatgggaggtggaggatttatggactcaggtgcttcctttgccaaaaagattggccagtagatggcaaaaaaaatgtgcatgagccacaagaaggcctaacctacattgaatttcagggagtacatatagtcactgttctcatcttcctttcaaatcacaagcaagtttctttggtggtcataacaaaccactaaaaacgtacagaaaagaaaattctagaaaacataattcaaatttgccaagctgactctttacgaagccatacacagaatttttgtgcattgtgtagcatagcaattaaaatttatttcttttttcatccggataaccccagatcaattattgaatttgccattctactacccactgattttcaatgccactttgtcatacattaaaattcattatatattttgttcttctgtgacacagtgtttattttgttccactactatttgttaacgtctgtgctagctttttataaaacatagtatttagtagcaaataatatagcatttgcaaactagcgaaatattgctgattccaaatctttgtattacttccagtggatatagcaaaggtggaccgtattgtaagttgtttgtaaaatgttctatatcttaaaaagatatataacataaaatacatcaaagaaaaaagtatatttattgtgagagaaaatatatgttgtaaacataaagttttatagctgcaaaaaatggcacagttttaattgctattctttgtccttatatctatggtaagataaatcccaccaccttac

SEQ ID NO: 1019 - DNA, 1031 bp, Homo sapiens
atcaatttataaaactgctattctgaaattgcaacaatcttgtacagtcaggactgataaaatggggtaatcagacattttatatgtccataaatgtaaaatcatctacttgaacattatatgcaatacattcacacaaaaaagcaaatactgtagccttatttgacaatattgaactcataaatactcatgatttcactctgtccgagggcctaaggactaggaatgctgctgtgatacagaaaaacatagtgaatacctcctctatttaaaaatgtcactcaagaaagtctcttctaacataaaggcaaatacatatagctactgagctatgactgtacttctgtcacattctatggtaaaaacaccagactccacaaatttggaatcatgacaacactttgaactaattatttggttcatccatagtttatacctcaatttacctacaaaccttacaaagaggaggtattttaactctaggaaagcggtcactgaataatatgcattcttgatctgtttctttctcccaaacaatggtactgatggttaacattttttgtggtagcaccactatttctagtaagtagattattatggagtgtgccactttaaagctgcaatacaaaataatattttatagtttattcaacaattccacaaagaatatttcttaaaagcaaataaataataaagttaaatgccatatttgttctaaaaactcttttttaatgtatcaatcaaaataatgtcatacatttattacagttagtagatttactagctttatgccttattattgccattttgtggaaagagtatacttatgtcccctcatttaagattcatttttctaattaaaattgatttatgatgtactttgggactaagttttacttgaagaaaaaaaatcacagtttttaagccatccctgctagggcaacatactagatatctcaaatatgtataaccactgcaaaatttcttgtatctaattttattatagggtctttgttgttacaacttgtaaa

SEQ ID NO: 1020 - DNA, 1031 bp, Homo sapiens
ataccctttgacataatggaaaaaaattcaacattatagtaatgttgatatacccctgaggaggatttagatattcatatttttcctgtattatgaagcttgtggttttatagttttacacttaggggataagttacgtattattttgcaaggttgaatttttggtcttttggtgtttttatttctttttcctatcgctgaaaggacaaaaagattattgaaagggaaataaaatatttagacgtatcagttataattcaatgaagacatgagtaagtaggacactgaaatttatcagaaaattgacttttttttaaagcaaatgccttgatgtaatatcaataaaactaataaatgttgtttcagattatctttgaaaattatgacagtctaaaataaagctaaaaattgagtccctcctctgaccttataacaaacatctgttttaaccttcagtggtatggtgagaataagatagctttgtactatgaatttggtcttttttttttagaattttttaatctctgatttttcatctctaaattggaaaacattttgcaattaaatggggttagtataagattcagataaagaatgtaaaaatgttagcacagtactacacatagagctaatattcatgtttttacctttcttttttcatcattcaaatcttccacaacttgctagttcaaccctccatgagtctttttcttttcattaggccaatacagaatgatggtactatcttctaatcattcttgtaagttaaaatctgtgccacatatatttaattattatagtcagatttctcatgaactatttataactcaaatgccataaacttattagtagaaagtgcataattctaggggaaagaaatacttggccaaaattcattaggcttatgatcactgatatgttttttaacctcagtttactcatcagtgaaatgagggttgtcatactgctccatgggtttttttattttttattttttttggtgataacattaaatgtgataacagtagtaa

SEQ ID NO: 1021 - DNA, 1061 bp, Homo sapiens
ttctctggaaataccaaaaaaaaaggaggggggaacaaatcttttgcctgaatgacctggggaaaaaatagacaatactgaaatcaccaatatcaagaatgaaaaaggggacattactaatataaccttattgagataaaaatatgtataagaaaatacaataagaaatagtatgccaatgaattaagatagcttagagaaaatggagaaattcctaaaacacacggactccccaaaatgactcaaaacttacaaaaaaaaaaaaactaaagatctaaagagacctacaactatcacaaggctagaattagtaattttaaaaactttccaagaagactccaggctcagatgacttcaatagtggagtttaatatttaaagaagaatttataccagtaatttagacattaatcctaaaaataataaaagggaaagaacacttcaaaactaattatattagtcacccaataacaaagcaagagaaaaatatcacaaggaaactacagacccataacttatgagtataagcataataattctcagcaaaagctagatactaaacttggcaatatatgtgagggatttatacatcatagccaaataggatttatcccaggattgcaaaactggttcagcatctgaaagtcaatgtaaatgactaagaaaatacttgatcatttttacggagagaaagtatttaacacaacctaatatcctttcataataaaaacactcaatagattaggaatagaagtagtcttcctcaatttgatgaagggaatctattaaaaccctacacttaacataatacttaatgactttcttaaagactgaatgcttctcctctaaaatcaggaataagacaagtttatctgccctcaccactttaattcaacatcatactagatgttccagccaggaccattatgcgagaaaaagaagtaaaaggcaggttgcaacgacggagcaaaactatctctgtgaaatggccataatcttgtatgtgggtagagaagccaaaggaatccactaattaataatagaacttataataaatgaatt

SEQ ID NO: 1022 - DNA, 1016 bp, Homo sapiens
aaccacaaatagatgtaattttaccccagttaaaatgtctattatcaaaaagacaaaaataaatgctggcaatgatatagaaaaaggatagctcttgtatacggttggtaggaatgtaaattagtagagcctttatggaaaacggtatgtacgtttctctaaaaactaaaaatataattatcatatgatccagcaatctcactactgtatgtttatcgaaaggaaatcaaatcagtgtattcacaatagctaaggtatggaatcaactaagagtctgtctatgcatgaatggataactaaaatgtggtagatatacacaatggaatattactcagacataataaagaatgaaattttaccatttgcagcaacatggatggaactagaagtcattatgttaagtgaaataagccaagcacagaaagaaaatatagtatgttctcactcatatgtgaaagatagaaaaattgatcccaaggaggtagagaatagaatgatacttaacagaggctgagactgctgagggtaggaaggtgaagtgaggtttgtcaatggctacacacatacagttagatagaaggaataatttctagtgttcaatagcacagtagaggcactatagttatcaacaatatattgtatgtttcaaaatagtaagtggagaaggtttgaaatcttcccaacactaagaagtaataaatgtttgaagtgatggaatcctaaatactgtgattggattattacacatggtattcatgtttcaaaatatcacatgcacctcataaataaatttttatgcatcaataaaaattgttttaaaaaatgtctttaactggcagtttttataaatgtaatattgtctattaggagggcctttgagttcttcaaagatgttcactttattacaatttgtaatcaaactatctattaatataaaacatttaccttgaaatgtattgctattttattttctttccagattttcttctttgataagaaatttgattgaaacattt

SEQ ID NO: 1023 - DNA, 1040 bp, Homo sapiens
aaaataatagcaaccatatatctagttaacttgagtcttctgtgcctctaaaattttgtttagagaaagcctatttctattgaggttgaggaacacaattctaatacttagtaaaattattaacattcattgcatttaactttgtcgtattttccttcctccaatactagtgtgccaaattctgtaacatagtagcatttttcatgctcccatttatctgtatatacagaaacttctgcttaggtttttttttatatataaagaaagtctagtcataccagtttggttgaagaatactaattctgtccctggaagagctgtctacgtgagccacaacaaaccaaacttgccacatcattcaaacttgccaatttggccgtagtttagtagatgacaactttgggtcaggttaatatttggggaaatggaataataaaagctgctgattttcctactgtattgctacttggaggattggaggtgtagagggaagatgcctgtaaatgagtcactgttatcacctacctgcacatcagcttgattgttgacacttatgtctaaagatgttcatcccaagagtattattgtgcatgcaagtaactgattgatactaacgagttaacattttattttgggctgcttggacaaaaagtcttatctttttgaagcctctggctgcagggatctcttagccgttgcacatataaatttcaaccattcacacagagcaattcatttctgattgctgtagactagtgcaatccatctgctagtgtcatttcctagctatctgtgccagaattacactccttcaattgtgcttcagtgcatttctgaaacaatctaaactaaaatgtctgtattctttggccactggcttatgatgtgttactgatatgcttgttgaatctccagcctctttaacactttttaaaatctttgttacaaccaacacatcatagctaagtaatctgcacatgtaaatgatttttttaaatttcttttcttaccagtatccactgttttctctctgtagcaca

SEQ ID NO: 1024 - DNA, 1028 bp, Homo sapiens
atgtatttgagttggcttttctttataaattattaaatttccttgagtacttcaaatgctctttttaaggaattattattttttgcatcatttgttttatatttttccataattttttaaattaatattttgttagaattgttttcagtttacaaaaaacatggatcagaaagtacagagttactatatactccccctacacacacacaatttttcttattaacatcttatatagtatatttgttaacatgaatgaaccaatattgataaatgatttttaactaaagtccatagtttacgttagtgttgtgtagttctatgatttttgccaaatggataatgtcatgtatccaccattagagtatcatacagaatatttctctactctaaagatttcctgtgcttcacctactcatctcttcctctcctctacccctgtaaccactgatctttttatggtttgtatagttttgccttttccaaaatgtcatatagttgaaatcacacaggatgtagccttatcagactggcttatttcacttagtgatatacatttaaagttcttccatgaattttcatggctcctttcttttcattgctgaataatcttccatattctggatataccacagtttgtctctccattcacttatgaaggaatatcttggttggttcaatttttgtgaatcacttttaaaatacgagactatacttgcatagccaaatcatgtattgccccaggaattaccacaggatagaactctttgataatctgaagtaatctttcttttgtttttattctacttatctcttttctcttgcatgaaattcaaaggtaaaaaaatttctgttaagtagcatctcactttaagcaaccttaaaatagtgcttcttaaatgatgctccaagtagcatctacattagaatcatcagagttgcttgttaaagttcagattcctgggctctactcttgatgtactgaatcagaatttctggggatggagcccaggtttctatttttttaaaca

SEQ ID NO: 1025 - DNA, 1063 bp, Homo sapiens
gccatgttatacctggagaaaatgaggctaatcaaattaaactggcttgaactagattaaacaatttgtatgatttacctaggattgcatccatctttatttgatttcaaaatgtatcatattcataatcttggttatgaatattatacaacctttttgaaaaaactatggaagtgatggctctccacatgtgacttcaaatgttttcaattaaattattttgtttcaatagtttttatcataataaattttaagactatgttttgctaatttcattgtcaagccaaatttgtatctgcttaatctataatatgaaatttaaaaccatgagaatactccagaaaagttataatttttctttttctttttctttttttttttattatactttaagttttagggtacatgtgcacaacatgcaggttagttacatatgtatacatgtgccatgttggtgtgctgcacccattaactcgtcatttaacattaggtatatctcctaatgctatccctccccctccccacaccccacaacaggcccccgtgtgtgatgttccccttcctgtgtccatgtactcaattcccacctgtgagtgaggacatgcggtgtttggttttttgtccttgcaatagtttgctgagaatgatggtttccagcttcaaccatgtccctacaaaggacatgaagtcatcattttttatggctgcatagtattccatggtgtatatgtgccacattttcttaatccagtctatcattgttggacatttgggttggtgcttagttccaagtctttgctattgtgaatagtgctgcaataaacatacatgtgcatgtgactttatagcagcatgttttataatcctttgggtatatacccagtaatgggatggctgagtcaaatggtatttctagttctagatccctgaggaatcatcacactgacttccacaatggttgaactagtttacagtcccaccaatggtgtaaaagtgttcctatttcttcacatcctctccagcacctgttgtttcctgactttttaatgactgccattctaac

SEQ ID NO: 1026 - DNA, 1063 bp, Homo sapiens; identical to SEQ ID NO: 1025

SEQ ID NO: 1027 - DNA, 1063 bp, Homo sapiens; identical to SEQ ID NO: 1025

SEQ ID NO: 1028 - DNA, 1063 bp, Homo sapiens; identical to SEQ ID NO: 1025

SEQ ID NO: 1029 - DNA, 1063 bp, Homo sapiens; identical to SEQ ID NO: 1025

SEQ ID NO: 1030 - DNA, 1032 bp, Homo sapiens
actatctctgtgttaccagctttactgatataaataaataatacattacttacctgcattgctttttgaaaatcttcatatctctgctgggttatttagtttcctaaggtaaagagtttagatgaattcataagtttttatcagccaggcacttttcattcccagtgaatttacaaatccaattctgtttttagcaaaaaagataatttatttaactggaaagggcgaatggagctagaatcaagtattgctggttcagatgttcaaatcttgtcttcagagtacccacttcatcttcatctttaggcactggttctctttgcagtgtgcctttattctcttctgctgcagataatctttgttgcagaaatggtagctgtcagcaacaccagtagaaaaagaactccttttcctgcaattcatgtgtccatcttagagaaggacttggaattgtcctgcttagattaggtgctctccctcttaggttaattatttttgctagtggaatgtgatgatatccttgatcagacataagcaagcacttggcacctctgatattgtgatagggagagtgatgtgtgacagggtaatgattgacagccccaccagaaatcaaatggtgtgaaggcaggacgatgttgcccggggatgctgggcagacagaaataataactgtcttgtataaattctagctcagacacaatattacatgtttcactaggtggtcagactacgccgcaggatacactgtaacatgggtgcagccaaggttaaaaggcaggcaagtgctacctagggaagagactagtacctgactcaaggtcactaacaaaaaacacgcatactaggctcaagtgttgtaacatttgcttatagcaggagggaagagactacacaagatctagccctttgcaatgtgtcagtccccatggctagcagattggttccacagctgatcagggcagagtgatggcatgtaccccactttgtgctgcagtagctcccagaccctgaacactgccccatagggtc

SEQ ID NO: 1031 - DNA, 1022 bp, Homo sapiens
ttattttaatttgcctttccctgatgactgagcattttttcatcaggtatttgtatattctcttttgtgaagagctgtacaagtctttttgtcttttggcctactggcttgtctttattatttatttaaatggatttgcttaatttcttcatgtaatctgcatataaagctttttgataattgtatgtgcttagaatattttctcctacttagttgcttggctttttctactctcttaatggaatgtttcattgagcacaagttcctaattttaatgtagtttatttcatcatttttccttcatgagccatgctttttttggtgacatgtgcaagaaattgtttatactcaaagataatgaagatatatcttctatgatatcatctagaaactttgttttacctttgctgtgtagatttacaattcatttggaactgaattttgtgtgtggtgtgaggtagaaagtgaagcttttttgttatgttgatgaaaatagaaaatgtccagcttctctgtagagacatatttgccataaatcaaatgtccgtatgttgtgtcaatttctgtaccttctgttctattttattggtctatttatttttgtgttgctacttaatcattctaatcatggtaggtctataatttttaatatatgataatgtgtttctattttgttgttattcaagtttgtattgcccattcttggccctttatgttttcataaaatttacctacttgtctatttctaccccaaaagggaaaacaattaagattttgatacaatctattacagcaaatatattgatcagttttaggaaattgccatcttaacagtattttcttccataccatgaactttagcatgtctttccatttgtttagatcatctttaaatcatctcatgatttagacttttctgtttagtaatcttgcacatcttctgttaagtttatctctaagtatttcttttgattcagttgtaagtggtattttctctataagtagaaatctggattggtagt

SEQ ID NO: 1032 - DNA, 1050 bp, Homo sapiens
aaaaaacaaacaaccccatcaaaaagtgggcaaaggatatgaacagacacctctcaaaagaagacatttatgcagccaaaagacacatgaaaaaatgcgcatcatcactggccatcagagaaatacaaatcaaaaccacaatgagataccacctcacaccagttagaatggcaatcattaaaaagtcaggaaacaacaggtgctggagaggatgtggagaaataggaacacttttacactgttggtgggactgtaaactagttcaaccattgtggaagtcagtgtggcgattcctcagggatctagaactagaaataccatttgacccagccatcccattactgggtatatacccaaaggattataaatcatgctgctatgaagacacatgcacacatatgtttattgtggcactattcacaatagcaaagacttggaaccaacccaaatgtccaacgatgatagactggattaagaaaatgtggcacatatacaccatggaatactatgcagacataaaaaaggatgagttcatgtcctttgtacggacacggatgaagctggaaaccatcattctcagcaaaatatcacaaggagaaaaaaaccaaacaccgcatgttctcactcataggtgggaattgaacaataagaacacatggacacaggaaggggaacatcgcacagcggggcctgttgtggggtggggcgaggggggagggatagctttaggagatatacctaatgttaagtgatgagttaatgtgtgcagcacaccaacatgtcacatgtatacatatgcaactaacctgcacattgtgctcatgtaccctaaaacttaaagtataataaaaaaaaaaaaagaatctgaaaatgcactcctcagagagtgtgtcagaaggcatacagcacgttctctgttcagatgtcctctggaggtcaggtgccacgcctgttcagtaccagaccttgtctactcaaaggaagctttttgcatctgcagggaagcccatacaaagctatagtgtagtattgtctttacatgaatcaaca

SEQ ID NO: 1033 - DNA, 1028 bp, Homo sapiens
cacttgccttctaccacccccttttatccattactgcttgtgtcttgtcactcctctgtttaagagctctaagaggctcccctgtttctaccagataaaattttaaatttgtaatgtgatataaaagattctcgtcgaccatttccttcctttctttccagactcatgtcttaccattcccttacatgcacagaatttacatactgtggaactctggtactttcagcattagaaacactgggtaactctgtttcttatcttagtgtcatagcatatgccattacttgtacctggaatgcatattcttcctctttttccctcctcgcaaagaagccattttcctttttgagacttaatttaaacatcctctgccctgggaaactagtttctcaagccccttgtctgactttcacacatagagttgcagtatagttatttatcttcactgttacattgtgaaaatctctaggactgaatgtcttttacctctggtttccccatatcctaatttacatcgtggtacatagtagatattcaatacatgtttgcatgaatgaatacatgtgaaattgaatttaatgaacttgtttaaagctatctaacattttcactttttattaaatatatgatttgttgatatacctatgcctaatttgaattatatattaagtgtttttaggccaggcactgtggctcatacctgtagtcccagcactttgggaggctgaggcagaggattgcctgagcccaggaggttgagaccagcctaggcaacacagtgagatgccatgtctacaaaaaatttaaaattagctgggcatggtgatgtgtgcttgcagtctcagctattatacacgggaggctgaggcgggaggatttcctgagtccaggaagccaagactgcattgagcctctgcattccagcctgggcaagagagtgagaccctgtctcttacaaacaaaacagaaaagtttttacatttgagtggtttctttgattttgtaagaacattttaattttagatatt

SEQ ID NO: 1034 - DNA, 1112 bp, Homo sapiens
gcctccttcagacgctgagcaatgcactgccgcatcctgttcattttctcctgatgttctgaatgcagacctttgccagctcctggctcagctagtggtgggacagcagtgggttttactgcagacacaggtttgctagaaggaggttgtgagggcgagggcactggtggcatcgagtgggtatgggtgctgcatggggaggaactgccgctgctataggttctgcttttggggctgcagcagcaggagcttcagccggcttggccttagcaggagcagcaccagttttcctgagtgtgaaaagcggagtgcctccttcgacttttcccccatcaggtacgaaaagagcttcaatcatgccatttgctggtgatggaacctgcaccaatgtcttgtcagtttcaatctcacaaaccacttcatcttctgcaactgtgtctccaacagctttctcccacctgacatctccctctgtgacaggttctgcaaacgctggggttttgactgtaaccaagtcatacttgcatacagttgtagttctgaagaagcgaacactgaagacactgttgttaatgacaaccttcctgctgttagggtaacctggtccctggcataaggagaccccaggcagggaatgtctccctagagggcagttccccttctggaaggcagagagcgagtggctgaacgcccgggacacagtgggaccgggacagcatcacggcggccgggtctccgttttatattattccttttcacaggcagctctatttgccctccttttcaagatagcatgccccttaaagaataaaattagttttgggaaagaaaaagtgccagtttcaacaggcatagactgtcttgttgtaataataatactataccaggaatttttacttgcaactcatattactaaaagaaagttaaatagcatactatagtccctccttatccttgcaggatacattccaggacccctaatggatgcctgaaacctcagaaataccaaaccctgtatatactatgtttttttcctacacatatatacttattataaagtttaatctataaagtgggcccagcaagagattaacaacaactaataaaataga

SEQ ID NO: 1035 - DNA, 1100 bp, Homo sapiens
tatgaacaaataggcgtgactgtattccaatcaggctttctttgcaaaacaggcattgcagactacagtttgttgatccctgttttaggtaattgcagaaagtcatgaaacagtgattaaagcaaaaattgatgctggctcaaaaaaaattccttaaaatatatcaattttcttattaggaattaaacatgggccagcgatgttcagatactagaggaattgtcttcgaagatgtgaaagtgcctaaagaaaatgttttaattggtgacggagctggtttcaaagttgcaatgggagcttttgataaaaccagacctgtagtaagtaatatgggttcataatctttataggatcttttatttattacattaaataagtatttttactttaaaattgtatgttcagtgtgtttctctttttaatatctgcttattttattaaggatataggaaaaatactgttacttttctttctttttttttttttttttttgagacagagtctcactctgtcaccaggatggagtgcagtggtgcaatctcagctcattgcaaccttcacgtcctgggttcaagagattctcctgccttagcctcatgagtagctgggactacaggtgcacaccactctgcccagctaatttttgtatttttagtagagatggggtttcatgatgttggccaggatggtctcgatctcttgacctcgtgatctgcctacctcggcctcccaaagtgctgggattacaggcgtgagccaccgcgcctgaccatattgttacttttcttaattttttaaataattcttcaagttttcttactatacattatagaaattattttagcaactgcaaaattactgtagttggtgctagatttagagaggcagtccaccctaaatatgatcatcctgttaatatgtactcattttctgtttttactcattaagaacatttcccctagtaagatttctcttgttaaacaaaagcaatgacttttttctagagtatgatactatgcctaacaaatgcctcttactacctttaattaacaaataatataaacttacgtgcctattccctgttccccaccagtttcttg

SEQ ID NO: 1036 - DNA, 1052 bp, Homo sapiens
cctggctaatttttgtatttttagtagagatggggtttcactatgttggccaggctggtctcgatctgcccgcctcagcctcccatagtgctgggattacaggcatgagccactgggcccggccttgtgctatgcattttaaatatattttctagccgggcgcggtggatcacgcctgtaatcccagcactttgggaggctgaggcgggcggatcatgaggtcaggagatcaagaccatcctggctaacacggtgaaaccccgtctctactaaaaatacaaaaattagccgagcatggtggtgggcgcctgtagtcccagctactcgggaggctgaggcaggaggatggcgtgaacccaggaggcagagcttgcagtgagccaagatcacgccactgcactccagcctgggcgacagagtgagactccgtctcaaaaaagaaaatatatatatattttctgattctctcagtaacccttttttgggtggtgttatctcttttaaggatcaagaaactgaagctcagaggtattaaatgatttgtccaaggccacacaatttataagtcacagatccaggatccttgcttttttttttttgcggggggtgggagacaaagtcttgctctgtcgtccaagctgaagtacagtggcatgatctgggctcactgaaacccccacctcctgtgttcaagtgattctcctgcctcagcctcccgagtcgctgggactacaggcacacaccaccacacccagcaaattttgatatttttagtagagatggggttcccttatgttggccaggctggtgttgaactcctggcctcaagtgatctgcctgcctcggcctcccaaagtgctaggattacaggcctgaaccactgcgcctggcctatgttatactcttaattcttgttacttcccatgtcctcttgagtatcagataattttagtactataaagagtcgtgtcttccatgaatttccagggtaattcttaactcttacccctttaaatattgatgctcccccattatctgtattctttcctgca

SEQ ID NO: 1037 - DNA, 4396 bp, Homo sapiens
tcttggagagggggtgtcaaagatttctttaaaatcgttagtgatgtggtctcgctttaagatttttaatgggatcagaagaaaattcggtacttaatcacttccggtaatcttcatgacctgttatagtgactgcagtgtactctcaatgaggaagatatagatacgaaaagaactagagccgcatcacatggggacttctgcaaatacagagactcggattaaaggtggagaagatggagctaaaggaactgcttatttaatacatttgaacaacttttggggtacttagaaggtgctttgaaacctgcatttgattaagcaagaattcgcttgcaagttaagggttagatttttttattttttaaaaatatgctttctgccacatgtaaaccgtaagttgtcctgaaatgataagctttgatattctatggtgtttattttttacttatctttttgaatgaaaagtgaacaacaagaaatgctggtggtaattttttgggtcaatgatgagttggcatgtattctgaatctaaagttgattattactactttagctctagaattactctgagacctgaaaattacctgaatcgtgactaagacgaagcctgaatgatttaagttcttttttgttggatacaatttgttgttgttgttgttgttttggttttgtttttgagtcggtctccggtcgcccaggatggagtgcagtgacacaacctcagttcactgcagccttaatttccctggctcaagcgatcttctacctcagcctccctagttagttacaatttttaaatggaacgttttcctattacaagatgaaatcaagtgaaaattgagatgtatgttgaatctatgctgtggggcagaagaacgttgtagaggtaaacattgatgagattaccactttattttgaaagggcactccacagaaggatgttattatcaagtcagatgcaccggacactttgttattggagaaacatgcagattatatcgcatcctatggctcaaagaaagatgattatgtatgtataatttttttatgttggaaagtttattttaaagaagtgtgacagtcataagcagtgagacagtatttatgtcttaaaatggcatccaactccatgcagagaactgaggatgtgctgtgcctttgaacttcagttaagtgtgctttggacgtctgaggctgtgggcttattagaatctcagtttttacctatactgagagggcttgccagacaaagtagatgagggtttgaggtacaaaacgggtttctctttttgtagttaggggtaatactttcaaggtcaatgatgtgttggcatgtattatctgaatctattgctgatgtgtaataacactttagctctagaattactctgagaccttgaaaaagttttaccttaaatttttaaatttcgaggaaaactctgggacaatcttagcaaaaagtagtaaacaacttagttaagagtaaatgtttttccctgtagtatccaaactcagttgtcttagtctaccgatttgtgggatatatggtatgtattaattttttacttaagtgttaggttcccataaccttgaaaatactctattagcaatcatggagttaaggccatatggatggggctggactcgtttctgcctttatctgctatctatctttatgccctgaatttgggttagtagcaaactaagatgcaccacctgttaaaaaaacttctttttttccttttgagagctataacctcactttgttgcccagactggaggacagcggtgcgatctgggctcactgcagcctccatctcctgggtttaagtgagccacctgaatagctgggattacaggcacattccaccatgcccagctagtttttgtatttttcgtagagactgagttttgctatgttggccagagtggtctcaaactcctgacctcaagtgatctgcctgccccagctttccaaagtgctgggattacaggcaggagccaccacccagccacaaaacttcttaaaatataatgcattgttgagtgtgggaaaaatttgtttctggaatcctaatactaattttcatgtatcattgattagccactgttttatctgggcttaaacatctttggcatgtttagggcattttgatttttcatgtagttatataatttactaatagataataggttttgtacagagtccacattaaaatagatgtctgataaatatggtataggtactcggaaagaaatactctccctgaacttcactgatgaaaaaggtagatgtttttctgtctctggctcatgggagaaactaaagcactgtttgtattgtcagccatagattaactaatcctgtgcttctcagataattgtttttttctgataatagttgtgtctgaagatggcttctaacattgagcagcacagattttaaactcactactgatcagtgctgttaaggtcaggagaggtaaaaatagcagcatggctaatgagttacctttgtgtttaatctctttataacttgttaccagttcaaatgacagatttaagaaattgtgtattattttaggaatactgtatgtctgagtatttgagaatgagtggcatctattggggtctgacagtaatggatctcatgggacaacttcatcgcatgaatagagaagagattctggcatttattaagtcttgccaacatgaatgtggtggaataagtgctagtatcggacatgatcctcatcttttatacactcttagtgctgtccaggtaaatactaatcaaaattgcaacgatcttgatagtatgttctcttacttcagagttggaaattgaaactgtatcaggatttggtcaaaaagttttgttacaagtgaagctgtcctacaaggtcaatgatgtaatggcatgtattagctgaatctaaagttgatgtgagttctaaaattacactgagaccttggagggtaaaatttttatcttcagtatgtgtaaatactgtaaaatagctaaatggagctatttgattttgatattagtgaacatctacctggtggtttaaagtctttctggtactactgggtgctgagatgggaagatcaggactttgtgtggatgtgagttagtatacttgagtatcttggaatgccaagttaaaatttatatgtagaaaattatactttaaagatttgagttttcttgatactatctaattttattcaataacaggagagtctgcatatttgagaaaaggttatatacacagagacaaaaggatgtgcttgacaacttaaaaagagttgagcataagatcattagaataaacctgaaagggacatttacctaatacttgtctttattgcagattcttacgctgtatgacagtattaatgttattgacgtaaataaagttgtggaatatgttaaaggtctacagaaagaagatggttcttttgctggagatatttggggtaatgtcagatttagtccattctacccaaaataccaatattaaaatgtactggttttgctagtaaccagtttataagtttttcatcttttcaggtcccactaagcagctggtctaactggagttaatggtctgctggaacttccagcatgcactgtggtagttatatcagcatatacaggagcactggaacagagggggccagtctaaaagataaggtaggtggaatttttttccccaatatttggtggctttgtaaagttttttaaaaactacttgctggaaagggaaaaatatttaaaaaaaaaaactttacaaacttgctgaatatttgagtggagggagggaatagaattttatttgataaacgtagataatctctgctttagggatgaacacagtgcaggccagagagaccagctgcttcatgggatgtgaaaaatctacttttataaagtagggtaagtttatttcattattagaaatggactaatactttgggttctattagttttcttctctttggttttcttctctttctgggctttctttaagcagcttaagataatttgctgttacttttttgtggcagggtcttggctctgtccaggttggagtgcagtattttgggagacagttgctggggctggagagctctgttgcccaggctggagtgcagtggtgcaatcttggctcactgcaacctccacctcccaagctcaagcaattctcctgcctcagcttacagagtagctgagatgtgcaccacaacacctggctggtttttgtgtttttagtagagatggggtcccctggcctcatgtgatcctcctgcctcggccaccaaaagtgctgggatttcaggcctgagccacaatgcccagccccacctaattttttttaaaaagtt

SEQ ID NO: 1038 - DNA, 1054 bp, Homo sapiens
aaaaaaaaaacaacacatttttctttctttcctaagataaattatgaacctcttttcttgtgccagagaacactgaatatgtgaatggatggctgtgaaatactagccatgaagaaattttgacaataatatttcagtgcagaattgcatactagtaatagtatgcttggattttttcagatatgtggtattaatacatgtttggaattttaagtgtcagatcaagaagaaaaacttaagatataaagtggtgttttaataatttgagttttatcacttttaatgtcaagaaattattatacacataaactttatgtctgtaattttagatctattgttgcacaggatttctggcaattacaagtcagttgcatcaagtaaattctgatttacttggctggtggctttgtgaacgacaattaccctcaggcgggctcaatggaaggccggagaaggtattgtttgataagccatattctgctagctttagaaccttgagtgaatgctgctgctttgtcttgcctgtttctatattgtaaattggccatgagcttatttattacctttccctgttgtgaattttcagtaatatatcctactaaaagactccccttgacaaagtagacccccatgagttgaaatactcattgatcctaatgtccatttccagacagtcttgtacaggaatctccatgtttaaggacagttgattttggcaaattggattttttaaaaattagactacagaatttttgtttgcaatcttcttatttaaggaatacccagataatttggtttggagagaagattattaaattttcctccacataataggtctctcttatcaggtctgtaagggacaaatagtgaatactcatttgcaactatgtaattgtcctgtagagcaagtgcagccataagtggtaagaaatgaatgagtatggctgtgttccaattacaattattatggatggatatacttgtatttcctatgtcagatggaatcttgctctgttgcccaggctggagtgcagtgacgccatcttgattcact

SEQ ID NO: 1039 - DNA, 2044 bp, Homo sapiens
gccctctgaatgggacgtggtggtacagtagctgggattacagtcatacaccaccacgcccatccaattttgtatttttagtagagatggggtatcaccatgttcatcaggctgatcttgaactcctgacctcaggtgatctacccgcctcaacctcccaaagtgctgggattacaggcgtgagccactgtgctcggcctgtatttttatttttaaaccttagtatttctgaataacaacgggtagagaaacacccgcagtagctgtctacaatagagtgaaataaaaagcctgaggaactgtcaacagaaaaatgggtggccgtggggagcaccgggacctgcacttgcacacaatctagggcagcttctaatgagtctatgagttactcagggatctcattaaaatgagatcagccttgagtggggttttctttatagacttctgtcaccatattttgaagagcaagggtttagttgattttaagcaggtgtgtacccccctggacagtgcttgtagaaaaacagaactatacccatggatttcatgattatactgctagcttcttggttaaggggctgagttaggcattcattgcagatagaaacaaagcagatgcatgcttatcagtgagtactgagatatttagcatggttacctatgaattgaagtttggtctcttcttacccattaattgattatctttcattctaagcaagtatttcataccctgcatatcagtatatccctggatttcgtccttccacatggtttgacactttgaacatcagattacctaagagtgagacttaacccacttttaaattgttctcaaaattagggaaataaaagagaatgaaattgtggcaacttttttccctcctagttaccagatgtatgctactcatggtgggtcctggcttccctaaagataattggaagacttcattggattgatagagagaaactgcgtaatttcattttagcatgtcaagatgaagaaacggggggatttgcagacaggccaggagatatggcaagtaatatttctgacatatttctataaattatttcagcgtttgcattacttcatggttccatggatttccagggtggcattccgagtgttgctttgaaagcagtttttttttctatttattgtagagtgtatgaaggatatagaacaatcttacagaaatttcttgtcgcttgttgctaacaaaattagtatatggtaaaggtcaggtattcataatttgaagttaaagaagttttcattttgtgatctgtatataaattcttttttaaataggtggatccttttcataccttatttggaattgctggattgtcacttttgggagaagaacagattaaacctgttaatcctgtcttttgcatgcctgaagaagtgcttcagagagtgaatgttcagcctgagctagtgagctagattcattgaattgaaagttgcatagtatagttttgccattttaacatttctgtatttgaagtgcttatcgaatctaaaagtgactactgttaatattttgtatattgtgttaaattaattttaataaattatataattatacatattgtaaaataaagaccggtattttattttctgctttttattctgaagtcctgttattctgactacagttctttgtgtatacttctgtgtctgttatgttcaataactgagctaacataaaataactctaggtttctacttgatttttcccccatgtatacctttcatctgttctatagcaagttgatgtaaattggtttgtcaacaagaatgttaactgatgaaagtggatagaacccatacatgaattaaatgatgcacaaaataaatggctgttgaaatttggaaatgattgataggtttgaatatggttattctgaattggtcacagacttaggttaaatggcaatctaccatcttaaaatggggttgtgattcggactgtcctttttttttttttttttttttttttttttagcattttatatatcagaattacccaaagaa

SEQ ID NO: 1040 - DNA, 1026 bp, Homo sapiens
gcacattgtggggaatgagtggcttgggtaaaagtagtgctctttggatggattgataacaacagcaacaataggtgccatttattgaacagccagagtgctcaggctggcttctgtgctaagtaaacttttattacaaatgaagacactgaagttcagaaaacctaagtaaattgtccgatgtcctgtggtcagtaagtgatggaggtggggttcaccctgacttcgtgtggttgtaaagcaggggtgttcaaacttttggcttccttgggccacattggaagaagaattgtctgggccacacataaaatacactaacacgaatgacagctggtgagctaaaaaaaaaaaaaaaaaaaagcaaatcgcaaaagaaatctcataatgttttaagaatgtttacaaatttgtgttgggccacattcaaagctgtcctgcgctgcgggttggacaagctatagagcttgtcttttaccttcagtgccaatttagtaaatatttatagggattctgaatttatttcaccatcttctaccccagacaatatccagtctagacaacttcctaatctggtggcctgatggggaccacttttagctgtgtcgtttttatttgttcctttaagtttcctttgtgacagaagaactagaggaactagaggggctgcaaagactgaggagataagaaggctttaattctgtttaattctgaatagatctttgaccctgggcaagttatgtgaacctatgtgtcctttttgggggtgggagtgagggagagttggatttaccctgaacgcaagcttcagggcccttccaaggttctgggaagagacactagcattttggtatttataattttatattcattttatcaaggaatcccacaaatcgtatacatttcaggctccccaacatagatctgtcccttgggtggtgttggagaaccaaagagataatgcttgtgaatgcactttgcaaagcagagtgcactgcataggcatgaagtggaaatggcaaaaaacgt

SEQ ID NO: 1041 - DNA, 1580 bp, Homo sapiens
tttcttctactttcttttgtttaaattgactgattttaaaaaatgatttcttgaagtggttagtagattctcaaattttgtcgtaatgtatttacacaatagggttccccttaagtactgtttttgctgttttagatgaaatcattttattatcattcagttaagagcagtttctaatttctaccagggattttctagccatcttttcattattgatttttggcttcattgcattgtgaggaaagaacacgctttgaatgatttcagtgcttgaaatgtgttgagatgtgtttgatttcataacatctggcatatttttatacgtgtttgctatgtgcttgaaaataaagtatatcctctatttgttgagtgcaatgttctatatgtttatttggccaattttgctgtttatgttcttcagattttctgcattctcactgatttcttttgtctttttttgttttatatgtttctgagagagatatgttaaaattccataatatgactgtagacttgtctttttctcaattacaaaggatcttccatatacctagtaagactttctgccttacagtctatcttatctgatattaataaaaccacaccagctttctttcagttagtatttgcctggtgtgtttgtgtgtgtgtgtgtgtgtgtgtgtgtgtgtgcctatttgaatacttttagctcctgcatttctatagcattatttttagatgtgtctcttgtatacagcatatggttgagttggacagaatttgtcttttaattgcagcattgagttttcctacttttaatgtaataatacacgggtgggttgaaatttattattttattaatttgctatctttcttttagtcctgcttgttccttgttccagtttctcctctttttctcccttctgttgaattgaggatttgttgttgttgcttttaaccattccactttttatttgtctattaccttggaagttgtatattcttttattattattttggtgcttacactagagattatagtatgcatcttgactcaggtcttagaccactttaatggcatttatcactctcttgacttctgtgtcattgttatgtattttacttctatacctttcagatgcccaagacattattattattattgctttattcagtcataattcattttgattaatcatatatttattcttttctttgttcttcattttattttcttgtattatttatctttcatctgggagcactctctttttgcctgaagaacatcattcactatttcctttattgtaggtctgttggtaacaaattcttttgttttttgtttgaagtgctttattttactatcactcttagggatatttcctctgggcataaaattctaggctatctgttatgttctttcaatacttaaaagatattttatttacttctggctttctttatttctgttgataagttagataaaaatccaatttttgtttctttttcacccttatgctgatttttagtttttttttttttttctttgtggttttagcagttttattgtaattggcctgggtgaagttttcttttta

SEQ ID NO: 1042 - DNA, 1063 bp, Homo sapiens
acagttccacagggctggggaggccttacaatcgtggtggaaggtgaaaggcatgcctcacctgcggcagacaagagaagagagcttgggcaggcaaagtcccctttttaaaaccatcagatcttgtgagacttattcactatcatgaaaacaacacgggaaagacctacctccatgattcagttacctcccactgggtccctcccacaacacgtgggaattcaagatgagatttggtggggaaacagccaaatcatatcaaaagttttatctggcatatctagtgagtcattatcagaagcagtagtctctctgaagcttttctcatctatccaccttacatttttatgattaaaaattccaaaaattacagaagtggagggaatagtccaaatattcccccatcactcaaatgcaactcttatcaagattttgtcacaatttgcatggaaatattcacaacctataagaagagaaagttttaaagcaaggcaatatctcaactcacagccatccacttacctctaatggccagcatcagagacaaagacttctgccttggttactgctgtcctgagcttctagcacaggtgtgcccctagatgatttcagtgagctattgttaaatgaatgtgaattcactgaagaaccacagactgtgggagctggaggaagtcttggcttgtcgtaatgaaccacagattacagatggagatgctgacatcctgagattaggtcacagaggtgcatgggagagttaggccaaggtctcaactcagggctctctccacttttccacacttcctcctcattttgctagctcatttaattaccactttttcttcctttctgataacactgaagtttaagagcatttcattacaagtgtgatgatacaatgtggtattaagacatgacaaggcaagttttattggccattactatttgcctcaagtgagtggcaaagcctttgaccactcgaggcatatattaatagccctataaaatacatcctggattgctagtgctattaccgtctggctattacatttaaaaaaatatt

SEQ ID NO: 1043 - DNA, 1033 bp, Homo sapiens
cagagcagattagcgaaacaagcactcagctaagagtccagggcctggtttctagttctggttgtgaccctaatcagccgggcaagtcacttatgttctctgagcctcagatttctcgcctgtgcaatgatgatctttcagattctaactctaaaattctgtgcatgtctcttttccagtgactgaggaagttcaaagtagaataggatggggatgacacatgaataagctctgaatcctcacctgtctcgaggaggaataaattcaatcctaatgccaaaacgacagaatctctttacttcctcactgctttgccaaacgctcatttagatgtatctatcaatcactggtttattcatatggtgcctctcaccgtgaaatctaggttctggaacaatataattggcctaattttggttttctgactgcagaagtggatgcttcctctgcctgtctctactctcagctcttattgttttttttggtgaaagagattaatccaatgctccgtggaagtagatatcaagaactcttgagcagagagaagttttgcattctgcctgtttgacatttacaaggtatttcattaacactgtgggcgattcaatccccttttatttttggctgcccttgctgtgcctctgaaggaaggaaggccattcttttgccaggtaaggggcaggaaaatgtgtgactccaaagctacctggagcctgatgggggttaggttggtccttgctgcccctgctggtcacatggtccctgcttactctgcttgccttttgtcttcctctttgtggactcctattgatccttgtacttcctctggcagagtgtttatcagattatattgaaattgcctgtttacttctgcctctcccacagaacagtaaaaacctcaaagactggggctctttctttctttcttttctttctttctttttttttttttttgacaggttctctctctgttttccaagctggagtacagtggtgcaatcacagctccttggactcctgggtcaagggatcc

SEQ ID NO: 1044 - DNA, 1129 bp, Homo sapiens
gtcattcagggaacgttttagtgtcaagccattaaatcacacctcaaaaggttggaagtggcccacatatgagtccatataggtgggtctggaaaggtggggcgagcaggaatctctttccattatgatgatggggtttctaaagtaattattgctttaaaaaaaatctgcctctgccattttccagtcacactgttcttggagcgagatgcatcatcaatacttttcatactaaacgttctctcctattggatttacctggattctaggggtatttttttcacatttctctggagacaagtagtgctgataaagattttataaggtctctcttgctctcaagctcgttttccttaacttttcttgtcccagttaccagtttatttggtccccagaaaccttctaatcttcatctttaatgataaatttatcttttgtagttctcctgtcaaagcttttgtgtctagtggctcattttgcttaattgctggagttttctctggccttttgttatttggtcctgcgtattttcaaagattctgtagaattttcagactgttactctgatgtttacttggtagattgattgctaagttgcattgtcttcagaggaggtttttgaggttgtgtctattataatgtctgcttctacccggagtccattgcacttggagtgcttcttgaagcccctgagcttatgctgtgataaaagcgtgaatgttttactgtgtcaaagcactgtggctcataaggcttcataagctctggcttttatatcagagcatctcatatggttgtgcagattgcatcctggtcaagcatgccaggatgaggggccaagggtgtactgaatgccagcctgtgcttcatttgccaagccttgcatctgatgtaggactgtatcctcacaggggacaccttttcctaatacacacaaaggtatcatgtgggctagcagctgttctgctataacttagctaggtgtctttacaggagaaggtagtggaagaggtggtggtatttctcctcgggaactgagattagcttactcgacgggaatcttgaagtgtcccaagatgaagccattggtgccccactcccccaacagttgtttaaaagttattaaaga

SEQ ID NO: 1045 - DNA, 1045 bp, Homo sapiens
tagtgctgcaataagcatacgtgtgcatatgtctttatagtagaatgatttataaatcttttggtatatacccagtaatgggattgctgggtcaaatggtatttcttgttctagatcattgaggaaccatcacactgccttgcacaatggttgaactaatttacattcccaccaacagtgtaaaagtgttcatatttctccacatcctctccagaatctcttgtttcctgactttttagtgatcgccattctgactggtgtgagttggtatctcattgtggttttgatttgcatttctctaatgaccatgataatgagctttttttcatatgtttttgaccacatacatgtcttcttttgagaagtgtcttttcatatccttcgcccactttttgatggggttgtctgtttttttcttgtaaatttgtttaagttccttgtagattctggatattagccctttgtcagatgggtagattgcaaaaattttctcccattctgtatgttgcctgttcactctgacatagtttgttttgccaggcagaagctctttagtttaattagatcccatttgtcaactttggcttttgttgccattgcttttgatgatttagtcatgaagtctttgcccatgcctatgtcctgaatggtactgcctaggttttcttctaggttttttatggtttggggttttacatttaagtctttaattcatcttgagttaatttttgtataaggcataaggaagtggtcaagtttctgttttctgcctatggctagctagttttcccagtacatttattaaataggaaatcctttccccattgcttgtttgtgtcaagtttgttgaagatcagatggttgtagatgtgtggtgttatttctgaggtctctgttctattcctttggtctattcgatttggtaccagtaccatgctgttttggttactgtagccttatagtatagtttgaagtcaggtagcatgatgcctccagctttgctctttttgcttaggattgtcttggctatacaggctcctttttg

SEQ ID NO: 1046 - DNA, 1056 bp, Homo sapiens
tctgcttgtttattgttggtgtataggaatgctcgtgatttttgcacattgattttgtatcctgagaccttgctgaagttgcttatcagcgtaaggagtttttggggtgagatgatggggttttctaaatatacaatcatgtcatctgcaaacagagacaatttgtcttcctttcttcctatttgaatacactttatttctttttcttgcctaatttccctggccagaacttccaatactatattgaataggaatgatgagagagggcattcttgtcttgtgcccgttttgaaagagaatgcttccaggttttgtccattcagtatgatattggttatggatttgttataaatagcttttattgagatacgttccgtcaatacctagtttattgagagtttttaacatgaagtaatgttgaattttatcaatggcgttttctgcatctattgagataatcatgtggtttttgtcattggttctgtttatgtgatggaatacgtttattgattagcgcatgttgaaccatccttgtattccagggatgaagctgacttgatcacggtggataagttttttgacatgctactggatttgatttgccagtattttactgaggattttcacatcgatgttattcaggcatattggcctgaaattttctttttttgttgtgtctctgccagacacaggatgctggcctcataaaatgtattagggaggagtccctctttttcttttgtttggaatagcttcagaagcaatggtatcagctcctctttgtacctctgatagaattcctctgtggatccatctggtcctgggcttttttggttggtaggctattaattactgcctcaatttcagaacttgttattggtgtatttagagatttgacttcttcctggtttactcttgggagggtgtatgtgtccaggaatttatccatttcttctagattttctagtttatttgtatagaggtgtttataatattgtctgatggtagtttgcatttctgtgggatcagtgggatatcccctttatcatttttgat

SEQ ID NO: 1047 - DNA, 1065 bp, Homo sapiens
tggggtgccagagccagggggactgagactgccacaatgtgtgggacctttcctttctgagcacagcctggtggcagtcagcctttccctccagcccccacacaaaacaagtcggtcaagccatgcacgagtgatcttgatttgaagagagagaaagaaatttgatccccaagtctcagagctgaggtacttatgcactgaactccaagaggcatttcatttctaactagcttagaatttcccacagtttgacagcaacccaaataaagaaaatacttgaggaagcaaagtagatgtgctggaagttgagggcattacctgatggctgaatgaatttgacaggcttttctcctgttgttttgacacaattgtattttcctctacaccgctgatggagtgctctgcctaaccacgatgtacccaccttccgtggctcagctgagggccactttgtcaaatatctccatcttactcattcctcgccgtggccctctcccaccagggacctcccagatcactctgtcacccccaagactacacatttcggcactttatgccgccttgtcttaccctttttttcatgttttattgctgcatggcatttaatgttattactacagcaaaactgtatttccctagagggagggaatttgacttgttctggtctcaaactctaaactccggtcagttgtgaagaagcctggaaccaaatttgcagcccatctccaggaaagtgtatataattgtgtggtggatactgtgggtcatgaccctactcacggctctatctaattgtttcttctccctcttcccccttcctccttgttgtcagtcttttctaagtttctttcaatccttttagggattgtatggagtataaataaccttccatatgctaagccagaagttaccaacatgggtgtttcctgacgccaggcaagtaatgtaatataatgactcagccaagggaagagggcagggcttatctctgcacagctgcagtcacttgtggccatgctggaatgagggccctttgttgccaaattttcagatttttcaagagaa

SEQ ID NO: 1048 - DNA, 1081 bp, Homo sapiens
ctgaacaaagtcatttaaaatggcaccagttactgtttctcagggatcagctttattgtgatttttcttaaattagaggaatcgcctatatgttcaaactaattttttagattactagaaatattcttgtaacaatgtcttatggagaacccactgtataaaacccatagaagtgtacttccccagccagatgcagtggctcacacttgtaatcccagcactttgggaggccaaggcaggtggatcacttgaggtcaggagttccagaccagcctggccaacatggtgacatcccatctctactaaaaaaaaaaaaaaattcaaaaattagttgggcctggtggcacacacctgtaatcccagctacttgggaggctgaggcagaagaattgcttgagcccgggaggtggaggttgcagtaagctgagatcaagatcacgccactgcactccagcctgggcgacagagctagactgcctcaaaaagaaaaaaaaaagtggtactttcctccatgggttgcctcctgcccctgaacgcccccatccctcagtgacctctgagcttccacagtacccaagagtgctccggaacaatggtaagaccactgagctaggaactagctttgttttgtttgtttgtttgtttctatattattatttgttgatgttacagagtatagaaaattggctttttttctttaaaagaagaaactatgttttctttttttaaaacaactcacattgagctttgctatactactttgttacctgaattggtaatggttttctttttttctatgttataatagaatctttatatttaaataaacttaaatactttcaggcgctgtggtctagagctcactgaaagtgttatgtgtacatgagcaggaccctcaagagccaacctgtgttttttgtctcattaacttggaggaaggcatgaggggtcagggcctacaatatcacttggaaacaaggaatataaagaaaatctggcctgtttggtaaaactgtgcttctccatgtcttgcctcttttgatctcttgcctaagttttgttttgaaaggttaacactatt

SEQ ID NO: 1049 - DNA, 1044 bp, Homo sapiens
cattaggcaccataggtgcggtgccttggggccgtggcagttttagggctccacaaaaatgttttaatcttttttaaaatcaagaataaaaaatgaatctaataaaaataatgaatatttattaatgaattcagcatagattatataaacttgccttatgccaatgtagtcctaaaatatgttttcatatttttttctatagaggaaggtactcatgagggcagaagtgactagggccaaaaaagtcattgtgcagctctgacagattgaatgaccatgagagagacacagaatgacaacctcctgatagatagatgcagagagattggcagagaggaacagagacagaacagcgagaaacagatacaggaagatacatgcagagtgagaaacagggacagagagacagagggagatgaaaacagacacacatgcccacacacaaagagagaaacaggcagacacacacccccgcgccccctcccccatctggacccgccccaccaacatcctgacagatacaggaaggcagagagaatgagacagatggagacacaggaaagacatgcagaactagactgacagccataggctaagatgtcacagggaacattctactggaaggaggcagccatcagcttggtcttacttgtttcagcctcccaggatcaaatatgtctgaagagtaacaggcctttccatccactctttatttttagccacagaggaaacagtaagagagaagagggcagatgcttctgtttaccaggattttaattggctacctttggagcctgtgggcctaagctatgactattgtctagaagctttgggagaaaggtaaaaccacagtgtaaaatcacagtggaagcttggagctgaaatgattattgtatcttctctaaccttatacccagtaatgatgtgtttgtaaggccagtggtccaattttttctgcagagtgaacaaaccagtggctcccccactacctccatagagatgttttaacacagacacattctaaacagcaaactacatcggacg

SEQ ID NO: 1050 - DNA, 1053 bp, Homo sapiens
ttatctcctgaaggaccaaggaggctttgaagagaattactaagacacactcataccttttaaaaagtaactcttggtcaggcgcggtggctcatgcctataatcccagcactttgggaggctgaggtgggtggatcacctgaagtcaggagtttgagactagcctggccaacatggcaaaaaccccatctctactttaaaaaatacaaaagttagcagggtgtggtggcaggtgcctgtaatcccagctactcgagaggctgaggtagaagagtcacttgaacccaggaggtggaggttgcagtgagccgagatggtggcactgcactccagcctgggtgacagagcgagactccacctaaataaaataaaataaataaaataaaaaataattcttcaaaattcaatattttccaaacttattagaatctacaaggaactcaacaagaaaaaaaaacctcattaaaaagcaggcaaaagacatgaaaagacatttctcaaaagaagacatacaagtggccaagaaacatatgaaaaaatgctcaatatcactaattatgagagaaatgtaaactaaaaccacaatgaaatatcatttcataccagtcagaatgactgttaaaaagtcggaaaatgacaaatgttggaagatgtagataaaaagatatgcttatacactattggtgggaatgcaacttagttcaggcactatggaaagcaatttggagacttctcaaagaactaaaaatagcactaccatttgacccagcaatcccactattgggtatacagccaaaagaaaagaaattatatttaaaaaacacctgcattcatatatttatcacagcaccattcacaatagcaaagtcatgaaaacaacctaagtgttcatcaatagtggattggataaagaaaatgtggtacatatataccatggaatactacgcagccatagacaaaaaatgaaaccatgtactttgcagtaacatggatggagctggaggccattatcctaagtgaaatagttcagaaactgaaaatcaaatactgtgt

SEQ ID NO: 1051 - DNA, 1003 bp, Homo sapiens
agtggttgtggaaatcaagacttccaagcagtctactgagtgaaataaagttctctgggccagaggatgacttgacagaaggccagattctcagaaaaaattatactgtatagaaaaaaaatcccagtagacatgtatgctcaacagttctctagatgtagtggcttttaaacccccaaagggtgtgaaactcaaaggcaaaagtaggccttaaatgggaagcttcattaaaatgtatacagacttttaaattttatacaggctttaaagggtttatttatttatgcatcatgggatctatctctgtagttgacttacttctctcttacaattatttctcctctccttagatttttttttgacctatgcctccttcttcaagtttagttcaaaattaagacaagtaaggatagttacattcttgtctttaaaacatatgagccagcagcaatctctgttttttctctattcttggatgcttgactctttttaagacagagttggttgttttgaaaattttcatcctatactacgcccatctgtactactagatgtttaattgcttgggcaaatatttcaaaatacctttcactgtgtctgggatgttataagagctctacagatgtttgccgaattgaatttttgcttctctgtaaacagacttcttattagatatggtattactgacctacatggactcctctagttagctctttttctttctttcttttgttcttgtttgttctttctttctttcttttttttttttttgtttgtttgtttcaaggagtggaaagtttaataggcaagaaagaaggaaaaagctccccgtgcagagacagagggaggggtgctccgagcggagagagaaaaaccccatagctccttttcttagtgaagagtaggtcctctagatcagtacagtgcttttcaaactttaatgtacatcaagccacctgctgacccaaatgatttgaggcagggcctgagaattttcattttt

SEQ ID NO: 1052 - DNA, 1069 bp, Homo sapiens
tttatgttcactgtagcttggtcttgctgagccagcccttttggaggatacctgatttagtgtatataggtttttctctagagagacattgaattttttcagaaaacacctcatactcttgcttgggaacataacccttgcttccaggaggctgaggatctcaccattctgtgtatggatttggggctttcagctacaagttgaaaaccaattctccattgtgtccgttgctctctttatttcaagtactgagggaaaaaattttttgccttctctctgggagaggactacagttgcatgcctattctctaggtattgactttcaaccagtactctgttcctcttttaccccagcattttgttgtgctttttaagatatcctggactcttagtctgacttactacctctataaatgaaaattgcttgaattttcagagcctctttacccttatctgtagaatgtccaccttaggaattgaaagaattatttatgtaaaaatactttatggctggatgtggtggttcacacctataatccaagcactttgggaggctgaggcaggcagatcacttgaggtcaggagtttgagaccagcctggccaacatggcaaagcccgactctaccaaaaatacagaagttattctgcacctgtagtcccagctactccagaggctgaggcaggagaattgcttgaacccacgaggttgtggttgcagtgagtcaagatcatgacactgcactccagactgggcgacagagtgaaactctgtcccaaaaagaaaaacaaaaacaaaaacaaaaactttgtgaagtaactgtaaaccacagtacaattcagctatatgactgtgacttctttctatgccattagatgagaaactcatatatgacagctacactgctacagatttatatggtctcttttttcgtttttcttttctttctttcttatttatttatttttttgagtcggagtctcattctgttgcccaagttggagtgcagtggtgcaatctcggctcattgtggcctccgcctcctgggttcaagcaattctgcctcagtg

SEQ ID NO: 1053 - DNA, 1047 bp, Homo sapiens
atgccatcatcatttacatttttgttacctccttgtggatttgagggacgatatctaatagtacagaacatagcattgctccaggacctagcacaatgtcttgcctagtgtaggtgtttagtaaatattgaatgaattaaattcagaaccctgagggagaaaagtcacaaatttatcaagtaattcacaaagagacatatccctgacagctaatccagttaaaagtattaaggtaagctgaaaccagaatatgtttcaaatcatttctcttcttataagagttttgttactggctggaacagttgtttcttggtatgctgatcgaatgtgacttgagccagaaagattcacaatgaataacaccaggaggcttatgaatgatgtataaagccaaccagtctaatgacaggtaaggcagaggtgagcagttactttatttcagagcagccaaagtcttggcaatgtaatgcaaccacgggaatagtgagtggttgtgaccagtttgtagtaaacttctagaatgaaacaagctttaaatgttctgatggatatttgatcttttgtattaatggagccattgcttcagatgagcacaaatgaaaatggcccctcttgctcctctagtatttgcccaggggttacaaggatcagctaagtgctatggagggtattaatcactttttacttgcagtgaaactatatttgttttttggtaactagcaattctaatacagtaaaacttcaactactaaataaatatcattagtattatgactttaattgaagaccaaggtgtcaccatcttgaagaaaatggtgaaagtttactttctgttccctattgatacaccagggccaacactgatgacctgttaacaataatgatataatttttttttaatttttcctgaattttctttctaaaatctaggttcggcaacagaataatcaaaggatttattgctttgccattctgtgcctagcactgtgaatctctgtaactgacttgatagaaacatagatcataatatttttgggtggaaatgaa

SEQ ID NO: 1054 - DNA, 1035 bp, Homo sapiens
ccttggcatctgactctctgtggacccaggagtgaaatatcttcctggaagtggtgatccaggttagtcttgtctctctgactcatgtcccaagttgcttccatagagatacctgtggcatcttttccccctttactctgttttcctgaatttccctctatttttcactgactacaaagataaagaaaaagaagaaacaattttaaaacatataaagtactttgaaatatttatccttggataactggagactagatcacattcttatcttttcatccagcatttttttttttggtgaataccatattatgtgtttaaaaagacatatggagacctgactcacactctgaatcttccaattttccattgaccacattcttaatgccctgagaacacaaggtcaggcaaaggagcctctcagctgaggtcctggccccaggccctaaacaggtcttctgtgagccaggccacagagttccttttggttggggtcagtcttagcagaatgtagatcctggagcaaatttggtcaagcagcttcctttgctcccatcaccctaagcctgcactggggcctgacttctggcatctcaccaatccagtcatgagggatggctggctcagaaagagcaccttgtcaaggaagaagcagctcaagatcacgaaagcccaagcacatttgtccctgtgcccagaacagagctagactggtctgcctctccctgcattcttggggctcttcactctgtgtattctcagggcaagggttgtaccaagggagagcacactgtccagcctcctctcaccaattcattcagtcatttacccactcaatacagatttagtgagtatctgtcatatgccagacacagttctaagtactgaagacacagaagtctttgctcattttactccataacttgctctgaagaggtgcctccaaggatcttactctttcatgggctctgttctcgatcacttttgctcagtattgtgaaacctatgggcctgtgatcagaaaaaaaatgtctttaa

SEQ ID NO: 1055 - DNA, 1045 bp, Homo sapiens
ggtacttacttaacagatccttttttactgttaattttattattataaatgtggctgagaaaacagtatattcttcgtaatattgttgcaaatgaatcaggcagatatttaagggtaggatttcttgttctgttgggaagatacgtatgactgcctttgtcatctcaaacaaagttgcaaaaagtgtcatgacttagggtaactaatggtaagtaccatggtaatcaatccctaaattttctagtttaatttaaaaaaaattatttctaacttacttcactgtctgatgaaggccaggaaactctcctaggtaacttacctccaagttgtagaattcaggcccctttcatgtgtttaaatataacctttttttcttcccctccaactccccttcctaaagataaacttttaaatcaataggtatctcacagtactttgtgaaggaaggtaaaataaagtcaactcgaaaattgtatatttaattgattactgacctctataatttaaaagctgcttgatcttggacaaataattctttttcattgatgatcttggaacccagtgggaaagaactacagaacgaaatggtaaatcaaatatcgaagatgttttgttacttgaggaatcttctgttaggttggtatagcggaggaaaccttccaattgagttttgagtttaagtaacaagttttgctcatcaagctgggcaatctgggcaaaccaattaaccactctgggctttggtttcctcatttgaaacttagcatgttagccacactgattttgctaacatcacttccaaatcaaaattgcaattattctagtagaccatctctttagatctggattaaggatgaggcctacttggaggtgaaggaatcaagtagaaagatgtgaaatggtccctccctccatatggaaaaatctgcctgagatttagacagacactattcaaaactgtaagtccactgagcaccaactgcggtacaaaaagttaagttcccaggtctcatttacagagtagtagctgcttgttagttatcac

SEQ ID NO: 1056 - DNA, 1031 bp, Homo sapiens
caattttttgactccaatccttgtaaatgccaaaatgtctaatggtttctgtgtccccaacggtgcccccttgccatttgaaagcctactttcccagtctacccatgtcaagaatcagcacaatcttccagaaaaaaatgcagctgaagatcattattacacctgtccaatagccttcctttccaatgattttagcctctctaatacttattatctacaactatctattgcatacctttaaacagatgatttttgtgtttgttttgttttaaaaaaatcaacaggtaaatcaatctacttaaaactaatcttcatgcaacaaaaagcctgccaatctgttcttatttatatcaaactgaaatttctattagtttactgctctgctcttaggataaccagttccctagtcttaccatggcttttacaatcatattataatgtcttgtcagtagtaatttgagagggaagataggtgaacatgtcccttcaataagccatcttgaactagaacccccagggcattttgaaccttctgcctgtattacagttatctgattatatttgtctctactgctatgttatacatttcttaaaggtaaagactatatatgttatagttatctgattatatctgtctctactactatgatatacatttcttaaaggtaaagactttatgttattcatattcatgcttaccataatacttagcatatgtaatcatatatagtaggtattcatcatttatttattaaagaacttgtgaatagataactgcatgaagttcagagtcagtggctttcttggtatctttcacatgatgaatagtattgcttttaacaatccaaatattgtgtataatattatagaaatagaggcaaatatttcagttttttttttttttttacagaacgtggtatattctatgcccctaacaaaactcaagcaatattaaaaacaatttgcatctagcttctgggatttttgagagaattctttaaaaatgaaggactttaatcatctggtccctc

SEQ ID NO: 1057 - DNA, 1050 bp, Homo sapiens
ataacaataataaagttattttacattaaattatcatggtacagttacaaagtacttcacatatattgtcttaatttacccagtggagaaaactgtgctgtttagctattcaatatatgttttgtttgattttattatgaaaatatatgaagcaaaaagtctttctccatagaaaaatcaagtaaagcccatagaatagttattagcctagcatatatgagagtgctcagtgtaggttctttctcccttctgcccctctaaagctactttggctaataggcagtaaatgttcctaataccttcagcagtagagattagttatcatttcccccattatgtacaagaaggatccattaagcatcccaagtccagggaagggaaagggatgccaagaagtagacaagaggtacgagagtaccacatccccctttctcccacaaagacaatcatgccaagacagtaggctgtgttcttctgacctactagtttgctcctagttagaccgtagacttaatcttgcagcattggttcttgtggaaaacaggatgatctgttggaataaactgagtacctgagatacaacacaaagcaggtgaagcttgtgtcagcgcctctcccttgcatggacccagtgggagataaagagattatagaagaaaagaaactgaattaccaggtcttcaataatttgttgtgatctattttttcattctatttacttttaaacctactttgtatttgtaattttattttttcttaaagattctcacttccttcagtaatataggccacacaagctagatccacccttgaagagaacttaattcaaaagaatcccacagcaaatgactgcaaccttcacagccaggccagattcaggattcaatgctaaattagtggtggattcactggtgatgccaaattggtgatatcaaaagacaacaaaccaggctcaaatatgcaagttgaatgcagcattttttttttttttttttttttttttttgagatggagtctagctctgttgcccaggctggagtgcagtggctc

SEQ ID NO: 1058 - DNA, 1050 bp, Homo sapiens
gagaaggcacccagaaagcatttggagcccctgaccctggctctatcaccgcccactcctcttcacctcagacttcctggtcactccttcctactcactgagggccctgtggactggctcacatttccccactgcccaaattcctgctcttgctcagccgttctcccttgacaaactagctatcatatcaggtattgaccttttcaggacaagaaaaccagaataaatgccaagagacatcttgccttctctagcatagcatttggggacgcagaggagaggatgtgtgccttacataacttggaatggtggggagtgaaaaatcttacagagaagccaaagactattttatacaaatccacttttaaaaggggaattcttttccacatacaaagaaccagaaatactcattttgtcctccttttttttttgtttaatgtatatgcactcacagttgctaagaattaatactgaaaacatgattttttctaaataactccttgagaaggcacttaaagcctccatttgttatccaaatgtaacatgaggacaagaacagaagaattatttcataaagaaaataatcaatgaatcatttatcagttttcctaccctttgtatgacaaattgtaattagtatgatgtctttgttggcaagtgcttatcaaacaaaatgcagtacagaagcaaaggaagattctgtaaagaactgtgttgttttgaagacctaattgtgatgttatctctggaattttctgtgattacattgttaatttttaatctggtatccttaatagcaacaaggttattagcacctacctagagttctgaatgcccacattagataacacaatcttggcatggtgaacccttggaaataagcatttgcctaagatagaaaagagattcagaaagctctgatggccttggacagggcagaattttgagaaattgaatgtggcagaataaaaagaggttttatcaagcatctttctaaagtgctttcataaattttctctttggtaaagaatgtaccacacccgatcaaga

SEQ ID NO: 1059 - DNA, 1027 bp, Homo sapiens
acttttatgatcaaaaaattttctcctccagttgccattctgttctaaattttactttattttttgatgtaggaatgtttctttaaacatcaagattttagtttccagtagaaaactaatgaattattaaaggatgggaacttgaagcaatctttagtgcttaataaggagaaaccacaaggcttgaataaactgttccatatttctcttttaatgctccgtttaaaatctagacggtgtgtcataagccttttaaaaaaaaacgattgtgtttaccaatatagaatatgagatttttgtttctttttaggtatttttcttgcaattaggatatactttgatgttaccatggctatggcttcacgttccaaacaatgagttttttcttatgtttgattaaaccaaaataatgttagtataatttccctgtaaattattatttgttgacaatcagtgttaatgccactaaaaattgagtataaatatcaacaaagtacattggtaaatgattaacaggacaaatgaaaagaaaaatagaaattctaaatagaattgctatacttctccagaattcattcctcctagaataactccctcagggtgaatgaaaagtcaggtgggcaaagctgtgagctccacctccttcaactatacaaattttgatttggtaaaggaaattttgacctcattatttcaccctgctttgaaccaagtttttatgcacctactttattattgctctttgcatgtacattaaaacaaatattttattttgactttaacctagaatgagcactacagttataagcaattgacacaagataagtctaaaagaaccaaaaaaacatagagtaagattcgtgatagacaaaaagtgacttgctggcaatattaaacattgctaaactcaagcaacgaaaaattaggctaaatattgtcaacagtgtcaaaatgttctccattcataatctattattgatctacgataactaataaatctgtacactgtgattcatgtttttggaaa

SEQ ID NO: 1060 - DNA, 1032 bp, Homo sapiens
accaagcagcttgtaggttttcaatgccccaaggaatgtgtgcgccattcttcacactgttcttgctcctagatggctccccacatgctgaaaacccccaccttcttcccttaatgggtttcgatttagtcttcaaggcatgtctcaggcatgttcttttcccaaaagttttctgacactccctctgttaaaggacaaggtgcctttcctctgtcttttggaggaaatttaccagtgatcacactgagcatatatccgatagtctcatctcctcagctataaagtctttggttttagaacctgtattaattcatcttaacatcccctgtgcctaacagagtctaagtgctgagtaaatgggggctgaactaagctaaattccaaagatcaagccaagagttcttagttacttgaaaaacaaacaaacaaacaaacttctgacctttcttcattataatcttggcaaatcagaattcctttgccctaaaataactgtaatcaaggagttgacgctaaagtgatgatgagaactgtagtatcactacactaatgaatcttttagccttgtacaagaaataatagaaaaatccataaccagtttcacagagaactgctaataaaaatcagaaaacactataaatacggcattaaaaaaggtaaaaagctgggctgaagcttaaagatggaaatatttgcagaaaactaaggcagtgagaaatgatgtcctgtatcatgttttgatgtgttatattcatctttctggtgatgactttatttcacatgtaaattaggaaaaagggaaaggaaagcatatccatatcattcatgtccagggaaggaaagtgaagtatcttagaacagcttctcaagtcagctctacatagctgggcttttgaagtgctggtgaattttttttaatctcgccttctacaaagaaataacaaagcttagaaatttaaaaatccaggctactgtcaattctgtgactttccatgaatcagtctcgttattctttgacatcttaaaagaaaa

SEQ ID NO: 1061 - DNA, 1048 bp, Homo sapiens
ggaaactcaaagaaagggatgtatttttttttccagattgaatgggttagaggaggaaagacaagggtagaggtaactgaactgaatctccaaagaagtgtaggttgtagggcatagaatagggaatgaaaagccagaatgggccaaaaatatctgcatgaagccaaacagcacatcagttgacaagtttgttctttgacaagtgcgcagccacaaccaagggatagcaagtgtaaaatgcttagtagtaggtgaagacgaggaatgtgactaatctcacgaaccacctgtgataaagaaatctttgctttctgattttgttacaccaaaaaaaaaaatagaaaagccattagaaaacttgtaaacctggtatctaaactacaagcaaattgaaactgacccagctcactgttaagagtctctttgtgagggaaaccagagcattttcctgtaaagtcaacagggtttacagttgtaataggccattgattctgaatacacaaatctgaacaaaccacggatcaaatcagtctccctgaaagatggcagcttcaaaaggtaaaagccagatgcaacagagttaacctccatcaccactttaaagaggagcagagctgtgattgtctccactgaagaacaaaatgaagattgggtttaagccagtgttgtgctggtaaatatttgaacactgactgtttaaaaatgtgtgtgtgtcaaggacagaaaaccaaacaccgcacattctcactcataagtgggagttgagcaattagaacacatggacacagggagggaaacatcacacactggggcctgttttggatctgtagttattgggagggtcaggggagggatggcattaggagaaatacctaatgtagatgacaggttgttgggtgcagcaaaccaccgtggcacgtgtatacctatgtaacaaacctgcacatgtaccccagaacacaaagtataatagataatattttaatgaaatattaaaattaaactgccaagaatgtatatttaaaaaggtgtgtgtttaagcttatta

SEQ ID NO: 1062 - DNA, 1006 bp, Homo sapiens
agccattaggcaagagagagaaataatggacatccaaatctgaaaggaggaagccaaattgtccctggttgcagatgacatggtcatatttatagaaaactccaaagattgcaccaaaaaactgttagaactaataaataaatttagtaaatttacagaatacaaatcaacatataaaaattagtagtatttctataaaccaatagcaaactctctgaaaaagaaatcaagaaagcaatttcatttgcaatagctaaagaaaaaaacctaggaataaacttaactgaggaggtgaaagatccctatagtaaaaactataaaacatggatgaaagaaattgaataagacacaaaaaaaatggaaaggtaacatgtgattatggattggaagaattaatatttttaaaatgttcgtattacctaaagctagctgcagattcaatgcaatccctacgaaaataccaaagacattctttacagaaatggaaaaaaaaatcttaaattcatattgaaatgcagaagactctgaatactcaaagcaatctggagcaaaaaaataaataaataaagcaacaggtatcacactacctgattttaaaatacactacaaggctatagtaatcaaaacagcatggtactggcataaaaacagacatatagaataatgaaacagaatagagaacccagaaataaatctatgcatttacaaccaattgattttcacaaagatgccaataacatacattgggggaaagagcagcctcttcaataaatggtgctgggaaaagtgattatattcagaagaatgaaactagactcctacctctcacgatatgcaaaaatcaactcaaattaagactgtaatgtaagactgggcatggtagctcatgcctgtaattccagcattttgggaggccaaggcgggcagatcacctgagatcaagaattcgagaccagcctggccaacatggcaaaaccccgtctctactgaaaatacaaaaattatc

SEQ ID NO: 1063 - DNA, 1030 bp, Homo sapiens
taataccagatatcatttaatgagtgggggagttttattgtttcagtatttttacacttcaatagtgctttagagagacatgtcctcttgtgtttgacaaaacactgatttgcagttctggtatccctcctgagtaagtcttatttttgagataaacatcacatcagccccgagtgcaactaaaaatgagctgggccagggcagtggggactgcagtctgtcaaggctctgtatttaacaatgcctttctccagtggcctctgccctgtgcctcccacactgtcagctctaaaggatatttagtccttgcagcctcaaattctttaacccttctttggcctcttaagacaagccctgggtatcactgaaacctaaggcatgtccagaaacaagcacaaaagaagaatgtgaccactgctgcttaacctggccagagaaattcactaagtcttgcacctgaaaaaccgaaacaaaacttcctagcaaatcaggttcccacaatcaaaggatggaaaatctcactggaggttggaaaaatgatcagagcctcttcaaaacttcaggacatcaaaagacctcactgtactcttattagaaatcaagctggaaggaaacatcatagtccttcaagtgacacatgaacgaatggaaagccgaaacccactttctgcagcttcagaaattcatatttttattcattcaaccaacatttattgagtgtcttttatatttaaaacactttgtgggacagtgtgggacacaaagaaaaagaaagttattctgtctcccaatgaagtgacacacaaatggctgagtttggtgaagaaataactgcagtgagtagtggggtttgctgatagcagtggaggaggtggaagctcctctacagattagcttattgaaccctcacagctttatgagctcgggtctagcattaccattattttataggtgagggaactaagacacagggaagttgagaaattttcccaaagtcaacagttggtaagtgatgggatttgaacccaag

SEQ ID NO: 1064 - DNA, 1041 bp, Homo sapiens
taatattgatggtcttttgggttgctttcattttagggctactatgaatatagttgttatgaacattcctaaacatgaattttggtggactgtcttggtccatttggactgctataacaaagtgccatagactgagtggcttccaaacagcagaaatttatttctcacagttctgaaggtgagaaagtctgagattgggtgtcagcatcttcagattctgctaagagcacttttccacattgcagagtcatcttcgcattttatactcagctggcaaaaacatggcaagagagctctttgaggtctgctcagggattcttcaggcccagtccccattttaatttactccaacacactgattttcaaatgttaatacaaacttgcattagtagggaaaaaaaccacttagtcatgatgtagtatcatcctttctacttattatattttagcactgttttttaaaggatttttaaaaacgttttcacaagatagcatggtctgtaatttttcttgcttgtattaactttttcaggttttgatatcaaggttatgctagtgtcattaatggattagaaagtgtttcctctttttctattttctacaagagtttgtgtaatgttgttattatttcctccttgagtgtttgaaagaatcgaagccatttgaaactgtaattttctgtgtgaagatatttttaattatagattcagtatctttaataaatacagaaatagattttctacttccacttctgtcaattttggcgaattgtgttttaaaataaatttgtccatttcatctaaatgaaataaagttgtttgtaatattcttagtctctttttaatttctgcgggatagcttgtatatctttttctctttcctgttagtggttctccctgtctctctctctctctgtttaacttgacaggagtttcttgtaattgtttgtttgtttaacatatccttgaaatttttatattaattagtgttttcctcctcctgttattgggtttaatttgctgtacttgttctagcttcttc

SEQ ID NO: 1065 - DNA, 1073 bp, Homo sapiens
atttggatacaggtgtgcagtgtgaaataagcacatcatgaagaatgggatatccatcccctcaagcatttatccattgagttgcaaacaatccaattacactctttaagttattttaaaatgtacagttattattgactatagtctccctgttttgctatcaaatagtaggtcttattcattctttctaacattttttgtacccattaaccatctctgcctccaccccccgacacatccgcaaccccttattaccgacccttcctggcctctgataaccatccttttactgtctatctccatgacttcaattgttttgatttttagatcccacaaataagtgagaacatgtgatgtttgtctttctatgcctgtcttattttacttaacataatcacctccatccatgttgttgcgtatgacaggatctcattcttttttatggccaaacagtactccgttgtatatatgtaccatattttcttttcttttcttttttttttttgacatggagtttcattcttgttgcccaggctggaatgcaatggcacaatctcggctcaccgcagcgtctgtctcctgggttcaagcaattctcctgcctcagcctcctgaatagctcagtttacaggcatgcaccaccacgcccaactaattttgtatttttagtagacacggggtttctccatgttggtcaggctggtctcgaactccagacctcgggtgatccacccgcctctgcctcccaaagtgctgggattacaggcataagccaccatgcccggccttatgtaccacatttgctttatccattcatctgtggatgaacacttagtttgcttgcaaatcttagctattgtaaacagtcctgcaacaaacataggaatgcagatatctcttcgatatactgatttcctttcttttggctatatacccagcagtgggattgcagaatcatatgggagcttcatttttagttttttgaggaacctccaaactgttcttcctagtggttggactatttacattcccataaacagtgtacgaggattcccttttctccacatcctcgt

SEQ ID NO: 1066 - DNA, 1028 bp, Homo sapiens
ttcaacactcctctatcagaaatggacagatccaaccagaagaaaatcaataaggttgtagttgaactcaataataccaccaaacaccaccagtcaactggatataactggcatctatagactgctttatccaacaacaacagaatacacattcttctcaagctcacatggaatattcaccaagactacattctgggtcataaaacataccttaacaagtttaaaagaatataaatcatacagtgtctgctctcagaacacagtcaaattaaactagtattcaataacagaaagatagaaaatcctcaaatacctggtgattaaacagcacatttctaaataacacttgggtcaaataaaaaacctcaagagaaatgttaaaatattttgaactaaatgaaaatgaaaatttaacaaaatttgtgagatgcaccaaaagcagtgataatggggaaatttatacaattgaatggatatatttgtatatacattgaattcatatattagaacaaaagaaaaattaaaactaataaaagcctccactgtagaaaactagaaaaagaagaccaaattaagtccaaagtaagccaaagaaaaaaaactaataaaaattaaagcagaaatcaatgaaattataaataggaaatcaaaacagaaaactaacaaaaccaaaagctggatctttgaaaagatccataaaatcaatgagcctctagccaggctaaccaaggaaaaaatagagaaacacaaattattatcagaaatagaagatgggaaatcactacagatctcatggacattaaagggataataaagaaatattattaacaatgctatgcccacgaatttgatatgaaatggaccaattctttgaaagacacagccaaaactcatacaagaagaaacaaactatctgaataggtatatattattaaataaattgaatcaataactaataatctcccaaaacagaaagctctaggttcactggtgaattttaccaaacatttaaggaagaaatcatacca

SEQ ID NO: 1067 - DNA, 1082 bp, Homo sapiens
tatgtctccaaaagaccatttcaagtgttaggctgagggaaggggtttaaaaagaggagacttggtatgggaaacataagagtaacacaggatgcaggttcctatgtgttgttccaaggactatctcgaattattgtctgcctggagtacaggctggtgccattttatttgctgctgagttacagattatcagttttgaggtaatctccctgtagaggagaattcattccaccgctgggtctttttgcctgggttgttgtagcccctggaatttcttaacaagcatgcagttaggtaagtgtgcatggtgcaagggagtgtctggtgggaaagagaggggagcagagttcaaagaagatttcaaggccatattttaagacttaggacacaaagtttctacagtttgtttcaaggttacatcttaagactagagaaaaaggataaaaaaagttttaaaatgcatttcaaagctgaaatactcagttacactaatagttttgtactggtatctcactgtggtcttaatttgcatttcccaattggctaatgatgttgaacatcttcttgggtttgtgtgtgtttgccatctgtatatcatcttcaatgaaatgaaatgtctcttcatgtcctttgcccattttctaaattggattgtttgctttttttttttttttttttgagatggagtctcacccttgtagcccaggctggagtgcagtggcgcgatctcagctcactgcaacctctgcctcccgggttcaagtgattctcctgtctcagcctcctgaatagctgagattacaggcatgcagcactatgcccggctaatttttttgtatttttagtagagacggggttttaccacgttggccagcctggtcttgaactcctgaccttaggtgatctgcccgcctcagcctcccaaagtactgggattacaggcatgagccacagcacccggcctgttttttttgtttgtatgttttttgttttttaaagacagggtctctctgttgcccgggctggagtgcagtggtgtgatatcggctcattgtagcctcaatcttctgggctcaagcaat

SEQ ID NO: 1068 - DNA, 1050 bp, Homo sapiens
acttcaagtgatctgcccacctcagcctcccaaagtgctgggattacaggcgtgaaccactgtgcctggctgctttactaaaattttatctttttttttttttttttttttgagacagggtctcactctgtcgcccaggctggagtgcagtggcgtgatctcagctcactgcaacctctacctcctgggttcaagcaattctcgtgcttcagcctcccaagtggttgggattacaggtgagcaccaccgcacctggctaattttttattattttttgtagaggtggggtttcgccatgttggccaggctggtctcgaactcctgacctcaagtgatctgcccgcctcagcctcccaaagtgttgggattacagccatgagccaccgcgcccggccttaaacttttattttgaaagaattttatttaccaaagagttgcaaagattgtacatagaattctcgtgtatgctttgtattaacatcttaatattaatgtctgttataactctaatacaactatcaaaactaagattaacattgtaatcttaattttgtaagtaatattcttaactacactatagactttatttaggttttattacttttttccaccttatatccttcaggatcttatctaggttcccacattgcatttagttgtcaggtttccttagtcttctccaatctgtgacagttctttcagttttccttggtttatatgacctgctgcttttgaaatatataggataggtattttgcagaatgtccctcagttgagtgtgtcttatgttttctcagggttggattcaagttatgcatttttggcaagatgtcacaatatcaggggatacatgatgatgtctgtgtgccttgttactggtgatagtagctttgatcactggtcaggcatggtgtctcattcctataatcccagcactttggcatgacaaggtgggaggattacttgaacacagtgatgcatgtctgtagtcccagctactctggaggctaaagtgggaggatcgcttgagccctggagtttaaggctctg

SEQ ID NO: 1069 - DNA, 1046 bp, Homo sapiens
gatgataagatatgcaagaaaggtgtggatttcacctacatttgcagcacctctctccagcctctcaacagtgtattctttctccaccagatttgaaacgatgcttgctgacctcttcttgctaacgtcatgctatgtcttgtccgtgtaagccaatgctaatgtcttacctctctgcaaatgcctgtctcgttagtttagggggcaattggttgccctctgatctccgtattctgatggagtcagaatactttattttgttgttggagggttgaaagtgacattctttccagctctcaacattccaagcctttagctttattttagagttcctttgcttttaggtatttaatagtgtttgtctcccaagagaaagttaatcgcttcttgctctgatgttagtacttatataacttagtacttgtataactgtatttatcacattatgctgtaattatttgccaatatatctgtctccactcttagcacactgcttgagggaaatagaagagtatacgcaaaatgcaagatctgtgacctctgtatacatagtgcttcctgattggttgtaggcacttattatgtgctcatagaatagaattacagtaagattttaatttataacacagtcctggtactttaagattctgaagaaatatttgttaaataatttgtgaataaaatggcttatttagaaagtatttagaaatggatttagcttctatttcctcagatttccagatagttttttttaaagctcagtttaatcatccctgtaaaaaatcttgctgtgattcagacagaagattcagttgcgtgaattaatccttaattgctcaaaaaatattaacggggttgaattattttctgctcctattgactttggggtaatattgtttacctgagatcttcagagtagtgagtaataaattacaacatttaagatattttttaaaaaatcaaattgggctagcttgtcattgaaagagtgaaatgatattctcttgatagtatttagaaataggttagattaagagtaagtttag

SEQ ID NO: 1070 - DNA, 1022 bp, Homo sapiens
atttacacaagtgagtgatgcatgttttaaaattagaagctttctgggtgaatatattataaactctgaaatttttacctgaaatttatcattggcgttattgatatttttaatattagtatgtttatttgataggttcaagttgttccagtagcagacagaatttgacattatctttaagttctaccaaagacaaaggatctcaagtttgtaactatgctaatggaggacttttcagtaaatattcaggttctgcacagagtttggcctctgtaagtacagaaaaaatattaatttttaaaatttttgtttatatgtcttctgtgatctattagtttaagtgtcatatacttatagttcttagtatggaaatactcttaagaaatcgtctgaatgtgctttctttaggcaagtaaaatacctttttgctgactattagtcaatttggttctaggtttctttgaataagtgatgtggtctcatggggtcctgtgaaaatagtgttgatgtggaagtattgcttcaaaattagatgttcttgttttcacttatttgtgggagctaaaaattaaaacaattgaacttatggagatagagagtagaatgatggttaccagaggctgggaaaggtaacggggggtggaggggaagtggaatggttaatgggtaaaaaaatataggcagatagaataaataggatctagtgtttgatagcacaatagggtgactgcagtcaacacaaagtattatacattaaaaagtaactaaaagattataattagattgtttataacacaaagaagggataaatgcttaaagataaaggtgatggataccccatttaccctgatgtgatcactacatgttgtatatatcaaaatgtcttatgtactccataaatatttacacctactatatatccacaaaaatcaaaaattaaaattaaaaagagttattaatttaaaagaattagctgttcttcaagaagctggacaatgcagccagactttgtgctgggtcac

SEQ ID NO: 1071 - DNA, 1051 bp, Homo sapiens
gtctgagaagtgcctcttctgaatttcctcaattgaaagttgaagcccttgttgactagaagtagataaggtgaatttcatgataatagtgtaacaagtctttagaatcactgtactgtacttgcctaactgaactagtcattcctcttttgttaaatcttacaatttaacaaaaatataaatttaacatagttgccagtatttttatactgattacagtagaacattcaaataccaccctaattaattaggtgaatattttactcttcatttcagaagcagcataatctgtaggctatatgttgtaacttgttgctcctaggctacaaacctgtaccacatgctactgaactgaataatgtaggcaattgaaacacaatggtatttgtgtatctaaacatatctgaacatagaaaaagtacagtaaaaatacaattttgtaatcttacggtagggttgactgttgtatatgtggtccgtcgttgacccagatgttgttatgtcgaaagtgtctgtagttagtttgagatgccagcagaagagccaaatggagtcacctaaaaggcaaatgaaaatgtgggcttagatttctcaaaactgaactggaattaggacagaactggagttaggaatttgagaatcatctgcatagaggtgattgaaatgatttgctcagtggaccttgctaggagagggcatttacaaagatgatagtggcttttttattttaggtatcatttagcagagagtcagcattgtaaaacattctaaaagaaaaataagctagctagcttaaatcacagtaggtatagataaaatttataagtgaatgcttaaaagaataaatgatataaacataactgcctgatttctgatggaaataagtgatttacattcaaaatactactcttcttgtgtatttttgagcaaacaggcttagaatagagtcgtgatttctaagtttgattgattatcatcagaattatttcttcatgtggaaattacatggattgtcttaccactaataggatttataaaaataatttgtaaa

SEQ ID NO: 1072 - DNA, 1038 bp, Homo sapiens
aggttttgccgtgttacccaggctggtctcaaactccttggctcaaatgatccacccaactcggccttccatactgcctggattacaggtatgagccactgtgcccagtcacacagtccattctcttaatcaccatgctgtattgacttaccacttataggacagacgtcttccttgaatgggaggattaactgtgaactttttgtggacaaagtatgcctatacccaaaattccctgtaggaaaggtcagcttagagcaggcagcctggaaattccacagctgacagagtaaggagacttttatttctggtggtggtatgcttttgtgtagatcttttttttttttttttttaatttttcttcctctatactcatgtggtgatctgtagttagctcatgtgtctttcttcctttctcaggctttctaggcagatttcacacattttgtagaaagaaattgtcaaggtttaatccaagaacaaaagaggcaagctatgtgagacagagggcctgactgtgaccctgaacttagtgtagtgctaatgagttactctgacggattatcctacatctgtataataactaaaagtacagactgtggatgcagactaactgggttcaactcctgacatttccatttatctgtgtgattataaaacctgtctaagccttggcttcctcttctgaaaaattaacatatagagtaccaattttataaactgaggattaaatgaaagttctaggaacagggtaacaatgtgtattggctcggaatttggaacttctctaggacactcaggaagaccatcattttacctctagaatcttaggctgtcgtttttgttgttgttgttgttcttattctacctttctgatcctgtatttgccaatttcaagacgttctttaaaatttctggtccactgatatcctattcatgttttccagtgatgctatactttactccattaaaaaaaatttcttctgtccttctcaatgggcctttgggaggaaagagaagtaccttcttgaactagaa

SEQ ID NO: 1073 - DNA, 1283 bp, Homo sapiens
tttaaaagcttgcatagagagaaaaatcatatgaggaaacttttttttgtttaaactgaatctatccaccatcaaattgatttagagtatattcacatgcacattttgtggattagtgcacaaatagcttaattcaggcaatgtcactgcagtttcgttatccaaacagctgtattaactccatcttctaggaaatagaatgcttcttgaacctcgtcagcaatggatttcagcaagattaactcataatgcacaaagaatttagagtaggagatatttaataataatctgtaaaaaaatgttcttcataataacattgatgacagtgtaatgaaattcacctatgatggaggtaaagtcccatgaaacccaattttgattaagaagaaataggctaattatctattttataaaataggaaggagatgattcactacttataactgtggtacctgtcaaatcatataaaacatctggaaaaatgaaaaagaattttgaggatctagaaaaagaacgtgaagagaaagaaaggatcaagtacgaggaagataaaagaataagatatgaagaacaacgaccatctctcaaggaagcaaagtgtctttcattagttatggtaaatttttgtttgtttgttttctaagaaacaaatcaaggcagtttaagttagcagcattttcctttatgactaaaaggtgggttttcataacgttttcttaggatgatgaaatagaaagtgaagcaaaaaaagaatcactttctcccggaaaattgaaactaacttttgaagaactggagcgacaaagacaagaaaaccgaaagaagcaagctgaagaggaagcaagaaaacgtttagaagaagagaagcgtgcttttgaagaagcaaggcggcaaatggtaaatctacatatttaaaccttacaattaatattaatgaagttagccgacttaagataaggtttactactacaaattcaaagagattttacatatagaagggctgattttctaattgtattcatatttcatatataaaatacatctaggctaggcacggtggctcatgctgtaatcccagcactttgggaggccaaggtgggtagatcacctgaggtcaggagtttgaaaccagcctggccaacactgtgaaatccctgtaatcccagctgcttgggaggctaaggcacgagaatcacttgaacttaggcgatggaggttgcagtgagctgagatcacgccattgcactccagcctgggtaacagaatgagactgtctcaaaaaa

SEQ ID NO: 1074 - DNA, 1078 bp, Homo sapiens
cttcctacaactcctacaaaaagctaatcttgtcatgaatattttagttttagcaagttatcaaggaatgtcagaggattttagccatatttcctaatgagaatagcattttaagtagaatgttttcaataatgccttaaatttgtagcaccattttgagttagtaaatttggaccctgcatttagagaagaggttaaactgtatttttggtttcaaataagaaatagtgcacatcttttggatggtttcttgtacaaactaatatgctgatattcaatcttttttttttgagtcacacatggtggcatgtgcctgtagtcccagctccttgggaagctgaggcaggaggattgcttaaacacaggaattcaaggccagccttggcaacatagtgagactctctcaaaaacagcagcaacaaacttattaattttttttgaaggaagaggaagaaaatgaaacctttggattgagcagagaatatgaagaactgatcaaattaaaaaggagtggctctattcaagctaaaaacctaaaaagcaagtttgaaaaaattggacagttgtctgaaaaagaaatacagaaaaaaatagaagaagagcgagcaagaaggagagcaattgaccttgaaattaaagagcgagaagctgaaaattttcatgaggtatattacctttatatttaacatagttatggtacagtaatgataataaatttaacagaagtaacattggctttgaaataagttttagtacttaaaattaatcattggtatatacagtaatctgggaagtaaatagcaaaacacatgtagatcttagactttgaaagactagcattgtttcaaaatcacctttatcagtgttaaaacctatagtgaatgtcaaatggttcactctagcaaaaatgttcaaaaatattttttggctgggcgtggtggctcacgcctataatcccagcactttgggaggccaaggagggaggatcacatgatccaggagtcctaggctagcctgggtaacaaagtgaaaccccatctctacaaaaaaagatacaactaaaataatatattttttg

SEQ ID NO: 1075 - DNA, 1038 bp, Homo sapiens
tccaaaaacgtgattgttcttaaagttcagtgttagccagatttaataacctagtatatgtatgtgtccatggccatttttattaagggtttttttttgtttgtttgtttgttttgagagtctcgctctgttacccaggctggagtgcagtggcgcggtctcggctcactgcatcctccgcctcctgggttcaagcgattctcctgcctcagcctcccgagtagctgggacaacaggcgcctgccaccacgtctgggctaattttttgcgtttgtagtagagacggggtttcaccgtgttagccaggatggtctcgatctcgtgacctcgtgatccacccgcctcggcctcccagaatgctaggattataggcgcgaggcactgcgcccggcctgttaaggtctcttaagttaagaacagcattgtttcttgaccaaaatagattttgtagcttcttaggcgtagtttctcccaccccatcctgtgggtactcaaatgtaagatcatattctgaattgtcatcacaggactaggtatatatatatatatatgtgtgtgtgtgtgtgtgtgtgtgtgtgtgtgtgtaaattggtattttatgttatgtacttcagttaccaagtaatgccagacatttcttcagaccttctccaacatatcgtggcatgtaatttactgtgttaatagtagtaagctccaggaatcgtgaggatactttagaagtcttactctttattattgagtatatcacagtgactttttttttccaaaattatttgtttaaataacaaacaatgaggtaaaatgaactttctcgactttgtggcattttgtcttacttggttaggtctaaaaaaatactttttcagcagctcttaagagtaattgtgagaaatatatatatgctgcattctttctgaaaacctaaaagtaatgtgttcatttgcttaagcaccaaaatagcagttaatatgaatgtagatacaggtgagccatcatttccctttaatcagcttttaaggcagtagtatccattta

SEQ ID NO: 1076 - DNA, 1040 bp, Homo sapiens
ctatattgttttcttcttctctggactatcttaaaacctcttttatcctttccttattacaagtctatctccttcagacaacttgttagaaatatttaaatttaccatttcattttcatttccctcttaatgttcaatttaccacattctagcttttattggtcacaattctatctacctcatagaattctgagagactaaatgaggatacatgtgtttttaggttaatatttttttgagggctcaccaggattaactattactactgaagccaaaatcattctcactcttacagatacttttctatcatctttatttacttttctgtatccctcatgaaatagcttctgtcttttggtttttggacactagtggtgtcaggatgccttcagctccaagtaagagaatctcttaagtccaatgataggtagttccaagattgatttagagatgcaacactgtcaagttaggctcttactgtctttgtattctgccgttttcactgtgtcatagacgtctacctttaggattgtaagaatttcattattcaaaaacaggatgcagtgctggggtttctccttggtggatatctccttatagggaggaaaatccccagaacatctctcttacatctcattggctagaaccatgtcacatgtctgcccttaaacaatcactggcaaaggaaatactactgtgattgatttaaatcaaccctgagccatccccaagagactgggggatgctctcaccttccttgagttcattactctatttctgggagaagatatctgttagctagaaagaagatatgaatggttctttggtatgtaaccagcagtgtctgccgtagcattctcacctggttgatctctgatggttccttctgtcttttttattgtctcctgttgattgatgtgccccttaaatgctggtcatcccaaagttctgtctttgattctttccaaaaattgttcctccttcacactataaaatatcacttgcattaggatcctttctaaatatttgtctccaactaa

SEQ ID NO: 1077 - DNA, 1118 bp, Homo sapiens
tccttaaactactctctctctttttttttttttttaactactctcatttttctaatgagccaattaagatgacatctcaggccacatataagaaaagagtatgagaagagacattttagaaaagataaaagtgaaaatcacgtagattcctcatttccaagtgttgcttttacaattaaacattgtgaaagtgtatgtcaactgagcatgtgtaaatacattcctactaccttaagtgtaaagtattattttgaaaaaaattatcatattgtttatatggatgaacaatgtagtactattttataagtaaaatagagttcacctgttaagactttatttaccctaaatgtgcatgtgagaggtatgtatgtgtggtatacttgggctgagattcacaggctgagatttctgaaaaattggattatagtactgccgactagaaggaaccactagatctgcactgtccaacacagtagccactagccacatgagactcttaagctactgaaatgtacctatctgaattgaggtcaaagtgtaaaatacatgctgtatttcaaatatttagtacaaaaaataaagaatgtaaagtatttcattgataatttgtattttgattatatgctgcaatgataatattttggatttactaggttaaataaaatacattattaaaattaatttcacgtttgtttttactttaaaaaaatatggtttctggaaatgtggcttgcatttgtagcttgctttatatttctgttggacagcactggtctaaatagtgtgatctttcaacacaggcaaaatgttataatgaaatattagtttatcaagacccatttaaaatgatgtagaaactctagctctttttaaaattttttggctaatacagtgtttttggttttgagacagtcttgctctgttgcccaggcttgaagtgcagtggtgtcgtgatcatggcttattgcagcctcatctccctgggctcaagtgatcctcctgcctcagcctcccaagtagctaggactacaggtgcatgccactacatctggctaatctgttttattttttgtagatacgaggtctcactatgttgctcagctggtcttgaactccta

SEQ ID NO: 1078 - DNA, 1114 bp, Homo sapiens
tcggtgacagtaaaaccctgtctccataaaaaaaacttcgaacaatctgaccgtaacttattttctgccagcttcccagggcaagccttcctaatttgcatgcattaatctcaccagtatttttgctgtatcaaatacattttatgctcttttgcttcttgacttagtgttcctgatccaaattgcaaattctccctttctctgtcaaaatctatcagtctttcatgactttgctcacaattttctgttctgaagtctttcctatccccaccactccagcccaagttgaggataataattaactttttttttcttcttttctttttgagacagtctccctctgtcacccagtttggagtatagtggcatgatcttggcccactgcaacctccacctcccaggcccaaatgatcctttcacctcagcctcctgagtagctgagaccacaggtgcacgccaccatgcccagctaattttgtattttcacggggttttaccgtgttggctggtcttgaactcctggcctcaagtgatctgcagtccttagcttcccaaagtgctgggattacaggcgtgagccaccgcaccggcctctgtttgactatctttaaagctcttaaaacgatctcatttcgttattaactttttattgtttgtcttccccctctagaatgagttgaatgagagcaaggataatgtctatctagttaacagcacctaaaatagtgtgtgacacaaaataaacactccataaatatttgctgagtgattgaaatactttatttgtggaaaatgtgcactatgataaccacctttttaaacagtttgtgtacccatcaaatactataaaatggacagtcagatactgttgacaaattccaaatataatgaatccaaactactgtcattgcctaaaaaaggacatttacaggtaaggggcgtgggagagtaggatttctaaaacaatttaagcttaaatggatagggcttaatgtcttaaagacacttgccttaagtttatgtatttcagcttgtaacgtagataaggtaagaagtgaatctctttaaaatttctcagctgagtgcggtggctcagacctgtaatctcagcact

SEQ ID NO: 1079 - DNA, 1041 bp, Homo sapiens
gttttagtttagttgaagtaactaagttcagatactaaaatttcaaaaataagtatttgtttgccagaactatgaactcatgtatactagaaataactagttagctaaaatcatgtttaagtcctttacttattttaaaataacgcatttgaattttattatagatactcccttaacaatgtgaaactagtacacaaactttctggcgtttctgattgatagaccccaggaattttgaagacgacataaattacttggaaatcctaatttaaacaacctgcgttttggtattatatacttaacagacaaatagcttaaaattaaaaaatccctaaagtagaattgtcgttccttttatctgtatattaactttaacttcttttaacatagggtgtttaatgactgtgatgattttcacctagtatggagtacataaatatatagttgtgacattctgtgttgaaatattggcatgttaacccatttgtcctgtttaattaggaaataaagacggtagagctagtcggaaaatgaatagttaatcgtggaggaggagaaaacatagctcagtactttgactagaggcagctgggaaagtgacgtcctgtagcatttgctgttctagaaagtacagagacacgtagtgaaaatgggaggatctagaaggaggctgtctcctgtgtagtgtatatttatctgtaagtgagccgttggggaaggattgaatacagagacgctgtctgcttgctgccttaagacagctagctgaattgctgattaacttttaaaatacccagcttggtttatttttcttagaatctgttgctaagactggggacgctgttttcttttacaaagggaaatctaagttaatttcaaggcattcgaaatggggaaagactattattgcattttgggaattgagaaaggagcttcagatgaagatattaaaaaggcttaccgaaaacaagccctcaaatttcatccggacaagaacaaatctcctcaggcagaggaaaaatttaaagaggtcgcagaagc

SEQ ID NO: 1080 - DNA, 1036 bp, Homo sapiens
tagtcaaccttaactaattagtgggaatcattgttatagatagtattccaaacacatatttggtttgggactgcaaactggttgactggttagttgtaaaataatagcagtcttgctaaatcataggcaaatgttgcttctctggtgcgttttttgatcacacaaagtgatgacgatgtctagaaaacattttgaatagcagagggaatccaattggatattaaacatttccattagcgttcaaaatgtacatgattaagaactgaccatatagttaatgtgacattacttataattttatgtgctagacaatgcaagtgatacttgcataataatgtatattaaagtggcatgaattttggtaggatttttttcttttttttgttgtttttgagacagaatcagtctcctgagtagctgggattacaggcgtgcgccaccacgcctggctaatttttgtatttttagtagagacgaggtttcaccatgttggtcaggctgatctcgaactccagacctcatgctccacccaccttggcctcccaaagttctgggattataggtgtgagccactgtgcccagcctaggatttttttcattcattagagtagcttcgttctttgtctgagctgcatagttgactgtttaatagtgtctaggaaaacctcaaagctgcattggagtctttttatcagctttggtaagttacttcagactttgtatgaatcttctcagagactttgtaattatgaccgaattgccctttttggcagaggaggaagaggttttccagaaagccaaacccatgatgtaataaattaaaacattattctttcttttcatgaattcattatgggtgcaagtatttaaattttgtcttataagaggctagattgggcaggctgatttacccagtttacttaactcagttaaataattatactcccttaagtctatgggatgaaggataaaattatttaaataatttaagcattggttgagtcactttggtcatgaccttgagctacatattatt

SEQ ID NO: 1081 - DNA, 1008 bp, Homo sapiens
ttggtttggtttggaataaatattacaatttaattcctattttaaacatatttcctattggaaacaaagtttcacttttacagaacattttctgaggtccactttctctttaactatgaattattgatatatctgtgtcaccaacgtatcaatactttaagcatgaaaattatttctgtgttagatgggtagtagatccaccacaggtattactttatgggctgatattttgagttgttttaagcattctttgcattcctggcttcttttatggagagttgagtcttcatgaaaatttctgactgaaagattttgtcagaactttggtggtctggacacaagtgccttggggattaagttagggtcctcagacaggtataaacaaccttataaaaatacaggcttaagaatctcaaaataacatccagtactaatacttcagttgaatattttctctttttttctctcacatatctaggaggattttaatagatattaattactgagccattattttcctgcccaccttgtattttaaaagcttctgatttttaaaaatacccctgaaaccaagcttttagattcccatagttgtgctgtaatagtgacagcttccaggtcaatgccctatttcataccatgtgccttttctctctgattaactgtgaattgttggatttgtatttgaatgaacatctgcacacactctttggccagtgttcacagtcattttcaagtctcaaactggaacgaaggtagaggtacatgcactaaaaggaggaaaggagtaaggtggagatgatggtgtttgtgcttgacaggaactactgcatcaaaacttgtcaatagtggcataatttctaaaatcattgaaatgtataaattgaaatttatatttaagtttttgtcaaagctgatactttattaatttgttgagttttaatcaatacaaaggtaaaatgatcataatgtttgaattctctctcatgttaatagactctattttac

SEQ ID NO: 1082 - DNA, 1055 bp, Homo sapiens
agattgactcaagtgccaccactaaactgaactaattttagtgaaattgactggatcatcaggaagggctgattttttgtcccgaccagaagtatatatggattttatctttaactagactcatattatgctttagggttaaatagacatttattattaattctggctcaactcttttctgtgtgttccacgtgccttaatttgttggtcttctagtatctttgcatttggtctgtaggtttagattggctttttcaaagacaaattttctctaaaatgtatggatatcttttatttttgaaaggacactcttctcatttaaaactcccatcaaataaaatagatagatgccgaggcacagggaaccaacacatacattccagtaaagagataggtcccaaaacagtgaaccaacaaatgcattttaatacatagttagatgtccaggcacagtaagcaacacatacaaatttcaataaataagtagatgccgaggcacagaagaccaacacatacatttcaacaagtagatggatgctgagaccgtgaactaatacacacagtttcaataagcagatagaggctgaggcacagcgaaccaatgcacacatttcagtaatggatagatgcccaggcacaaaagacctacacacatttcaataagtagatagatgagaaaaaaattctcattaaataattaattattgtaccacaactttgagaatgctttgaaaaatctttccaaactactgtagcaataaactaaatgggccagttggaaatttcttgctggaaaaaacataatgtgttataggagagatggtttactgaaacgcctaactggtatggtctgtttttgctattaaaacgacgttgccagtggtcaaataaagtagccttttattcctgaatcattgtacctccaatattacaactaattactggactagttttttctttaattcatagatgggatgctaataattacttcagtcatgatattttagataaacattttttattaggatgaaaatgtcttatgcatctattattac

SEQ ID NO: 1083 - DNA, 1043 bp, Homo sapiens
tctatatagctaaaacgaaaaatacctgaaagttaatacatacatatgtagatatattttgttatgtgataaatgtttcttgtttgcacacttttggacttgagaaatctgcttttgttttgtgcctactctgagtttagaacccaaataagaggacttgttaaatatagagtgtactttttgttaaaactattgctagcttcacctgtataccatcattgttccaaattaaataactgttttgggtcagaatataaatgctgggaatatacattttattacttcttaatctgggtgtcaaagattttaccacctggtaaataatgttggacttcaacttgttactggcacattttaatagtagatgaaacatgtttttcttggttatgtgaataaatgtatgttgtgctcttcatacttgttggattgtatagagattaaatagtgatatgtatattttgttgtttgctttggtatgcaactcatgtaattttagtgctttgactagcttaaaacttcaaacaagtaattttataataaagttggactaatgtttttcaagagtgattatttttagaaggaccatataaaacttgaaacgcttgaacctaaactcccgttttatctgctactggatgagaagaatttcaacttaatttccattattaccttttgctctcccaccctgcccaatcttctgtgatatcttctctcttttacctgtgtctcaacttacctaggcaagtcataatttagatagaaatctgatttcccaaacctccaggtttagatatatcattcagaaaagcctcaatgtgtctgtaataagaaacaatctccaaattacagcgccataaacttcacaaaagtttgtatctcccacatggttcctgtccactctgaaggggagctctgctgttgtaatcactcagagaactcaggtgaaaaaacagccaccattatatgtggctgtttctcaaactacagagcatggtgaatcacacacaggctgttagaatatccatctggaggcaacacacatt

SEQ ID NO: 1084 - DNA, 1034 bp, Homo sapiens
tttgcccgagccccttgctggaaaactcaggagggagagatttgtcctttgacgctgtacacgctagtatgtttatatgattagcccaactggcggggagggcggatttgggggaaggaggaggaggaggctggaggtgactccagttcagacctcgcggagagtctgtgtcaggacttcgcattcccccgtctctctctctctccctctcgctccctctcactctctctccgctcacacacacgcagaggtgctggggcgaaatcgggagcttaccagagaattccttgggattgttggggggcatctcccctccgctgctgtgtgtggcgtggctcttcccggctactccttgcttccccgagcccgagtctgcgccgccagccttccttggggcagcggccaccgctcagccccggccgggagatccgaaatgtgaggaggggtcgccgccgcctcccgccccaggccgcagggtcggcgcgagggatgctattccggccgggcgctcggggggctgaggggcttcgcctgacaaactgagttggcctcgcgcccccggcgccctcccgcccgtcgcttcgaagggactcccaagtctgcgcacctctgtcaggcttttgcttccaccacccctttcgctctgattcccgatttttttttcctaagggagcgtgcggtctgggggtgtgtgcgtgtgtgtgaaagacctctctcgaagagcggcgtgtgggaaactgcgggaaaatgttgacttaaccccaggagccgcccggcgctggctgctcggctggaggcggcggcggccgagcaggaggacgcgccgagctgcggcgccgtgtccggccggggagctgcggcgctgcctcccgcgcggactcggcggccgaggacccgctcgcggccggcctcggccctctccggccggggtagccgctgccctccgcgcctgtccccgcgcggcccccacgccagacggccctccctcggggcgcgctcgcagacggaggtaagagccgcaggagcgaacaatg

SEQ ID NO: 1085 - DNA, 1051 bp, Homo sapiens
gtgtgagtcacggtgtcatgagaaaagggagatcctaatcaaaaatatttaacatttttttcctgagatcatatatctgctgcactaagtaggcaataatttgtagatattttttgatatattcttatccaacagttttttaaaagcttattttattattattatttttttacaaaaaacctcctatatttgacaaataaacattatctaaaggaaaaaaaaagtagatggaataaaggaaccaagcgcttaacatctgcaagtaaagtgcagcttatagcaaaatactattgattggtttggaagtagaaagcaagtttaaatacaatttgtttaattacaacgaaaatgcagttttatgaagtaatatagtttgtcttcacagataattttatgcattgtctggtagtaagtaaaatcccatcacacttatataagtttgttcaattaccagaatgactaaaagaaaaaaaatcaatttaggttgaaaaacaacagaaattagattaccttggtttgtaggaactcgccagcagtgtctacattgcttaataatatcaaaagttaccatgttcacagtgtaaggatattggcgccagttttgatatgcatacatttgttttcttggtgacttttgttagatgcagagttttttctttctgcttttcatttttgttttgtttttatgaaagctattgcatgacatacgagaaactacttccactggcatattctcatttattttagaggtttgtttttaagtagttgcttttccatattccttggatttattatcagttgatattttagattagtgaaatatcaggtgtaatcttaagaatcaaaagaaacctactccattataagatataaataggttattatcagcgaccaaaatacattttggcaattcttactactgattctagaattacattgaattctaaatcccaaattcctgtggcaataaagtagcatgggattcatcgtagcagatagctgggcacctgttttattaccaccttgattaattctggcacccagatttacg

SEQ ID NO: 1086 - DNA, 1069 bp, Homo sapiens
atcttgctactacactccaacctgggcaacagacctctcagaaaaaaaaattcctcttgagagtcttactaaaataaaaatcacaatcatattaaactttcaaaaatcaggtatttcatatgtgggtacaatctcttgaagtatgttatgcttttgtagttcagagcagctatttcctttttttacagataaggtcttggatttactttaataattcacagcatttataatgtcttggattttacattcaagatgtaatttttggtttcctacattgccacagaggttattgtggcagcacatgtggttttaaaaatttgacagaacttctggtactgagtttgccaaaattaccagaccaaaaaatacgcatttgcttgcattggtcttaaaggctgtattttgaaatgttgattgtattttattctttccaagaacgatcctacttataagcatattacatctaccttgccattacttctgggcttaattctattaattttgtttagatcaacagccatttattaaggccatgccaggaaaactgtactgttatgtaaggactgtgctcactaggttcactaggttgtgaaatatttgcacaaataattcttataaaagtcatactacgatatcatgccaaaatgaagtgcagagaaaaggttgtaaaaatatagggtaggttagagtaaattcaaaatgagtggtatggaaaaagagaccccatttatttagaactgaaggcagaggaggattgtaggctatatagtcttttctgaggaggagaaaagttcagaggtaaaggcacaggaaaggtaaaaatatagtgccttagggggaatgtgaagtgtacagaaagtaggagatgaaacgggtgtgttagtttgggacatgattatgaacagcctgctcttttaagattctcttgtaggccacaaaatgttgttgatattttcaattgagaacatgttatacttatttgatagcattcaaggtggtgtatccaatgaactagagtggggaactaatgaaagaaataggaacctaattagaaggggtggacgacagt

SEQ ID NO: 1087 - DNA, 1033 bp, Homo sapiens
tggaatatcaacattagttaaccagttttagaaaattgtagtttaattttcttttgcccttattaatttgaaatgtgttatactctctttcagtgatgcttattaataaacattttattttttctacatttgttaaataagcctcatcacataataaggctaggtgtgatttcctggtaatgtaatgtaaatatgtgacttaaaattagttagcggtgttgtccttttaagtaattttgcggacagttttaggcgcgggatatttaatgcagctaataaatggaagcaggttactgtctgaaagactgcagctgactgtacattgcacgtagtgtataaaacgttgagggctgttgggatatacacagctgaagcatattcctggaagttactgctcagctttggaaggtttgatagtaatgatgcattaacggactttttacatgacagggtaataggatacttagatcaaaaaaaatgacagaggtttggtagacaatggtttgtggtttataggaacaagattaggatgaaattgtttgaatcttatttgaaggataaggaaaaagcagaggtgggagtaggttgtacgttagaagtggtttggatttttgaaagtcatagtcatttatagtttaagtagaaatctgttgtatcttgttttactaagaaatgaactattacgtagcaagcattaccaggagcttcaccatgcactacacctctaccctcccagttcctcccccacttcatcctaagctctttgatgttcttggaaaaaggttttctaaaaatcaaaagaaagttattaatgtgggaatcatttgaagtaatcttttctgtttgttgaaaggaaatttaatagaccttttctggttttgttatttgtttttgttttgctttgtgaaatgctgttattgagctttttgcagttacagaatttgaaggacaaatgttagctgttatctatgccagtggtttggctccaatatgatttagaaggaatgccttcttgggattagtgtcatgatat

SEQ ID NO: 1088 - DNA, 1046 bp, Homo sapiens
gcatagttgctatgtttgtcatttaataatgaagagaataagaaaattctccccgatacaacattgacttaattgtccttttataatacttcttcaaagtatgatcattatgaaatgaaaatgtgaaaacacttggaggaaatgaacctccatggatttgagtaaaaatttattttcctttttatttagcatttgcaagtgtatatctgatgtgccatgctgcctctagctgtgtgtctcgctggcttatttctgttctcatcctctctgtcaacttagaaaaaaaattagtaaattctgtgtttattagaaatacatactttcatggttttgacagctgagaagtactgtactatgtaaataaagatataccaacataatgaactttttagctttattaaattattttttaactgtgcttaagaaaaatcttattggtatttaatctgtatgaagatctgatactttaaatttaacctgtaaaaatcaacatttttttggtatagtagaaaaacgaactgaactgtcaggtcattccaagagcgaagaggcagaggcagctggtccagaggagaggctctagttggtgcataaaaaatatatgtcagcattttgacactgcattcttttggggtatctgttatcactgaataggaaactgtttcaaattgacaggcagacagaatgttgtgctgaatgtgtaaattggaattatcacatctagcagttcccttcaccaggtgctgggttggaacttggttctccactaatcgagagagtgccaggaatagttttatttgctaattatccttcacctcttccaatctagtttttttagtaaacagcttgcctgggtgtttttaggaatacctagcaggacaatgtacgactgcaggtgcttatgtggcaagaggatgccatacagaacactgaaaacacctatatccatctgtgtgaaaaagatgattgctttcaagggttttaccccctaatgtcctgagaatgctgcttgtcagtagtttgttggcccagagatcctggtgacg

SEQ ID NO: 1089 - DNA, 1007 bp, Homo sapiens
ttaaatcctaagcaaattcagacatcatagaaaattggaaagaacattaaaaattattagaaatccttacttccagaaactaacattttcttggaatgtttcactgttttttttttcccccataaaaaacgggccaggcgtggtagctcacacctggaattccagcattttggaggccgaggcgggcgaatcacaaggtcaggagttccagaccagcttggccaacatagtgaaaccccgtctgtactaaaaatacaaaaaattagctgggcgtaatggcaggtgcttgtaatcccagctactcaggaggctgaggcaggagaatcacttgaacctgggaggcagaggttgcagtgagccgagatcatgcctctgtactccagcctggcgacagagtgagacttcgtctcaaaacaaaacaaaacaaaacaaaaaaacacttgactggtattctatattttaaagactaaataacaggtaattcctttgaattattttttaaaaagaccttttatttttattttatttattaacttcctatttttgtagagacagggtttctctatgttgcccaagcttgttttgaattcctggcctctggtgatcctcctgccttgacctcccaaagtgctgggattctaagtgtgagccactgcacctggcctcaggtctttttaagtgtacattaaagttttaaatatgcactatcactagcaaattttataatcatataatgtatgagttcagtcacttagatctctgttcattggaaaaataccccatggtaacatgacacaaaaggtactttggggaagcgtaatttctaggaattcaagatttgggattttggattctctgagtctacctttgggtctaattagttactttctctggttcaagctcccttatcttaaaaattaagaaattattttagaagggggccaatatttatgctgactttcagccgtgaaataaagttagtctactataggagaatatttgcttct

SEQ ID NO: 1090 - DNA, 1048 bp, Homo sapiens
atagtgtggttaaaaggctttaatttgaggatttctttatgttgattatgttcaccaagccatttccctgaccatcagacacagtttcctttcctgttccttttcttccccaagactagtagcagccagcataccataacgatgttctttacaactctgtccccaaacctgctgctgatggccatcatcgtttggagaggcattaaagtaacatttaagaacatgaacccaggagctgaattactgggtttgaaatcttaatttcatttttattggatataactgtagaaaacttaatctttctctgcctcaacttcctcctctgtaaaatgttgataataatgttacctatcttgtatggttgttttgaggattcataatcaggaaatatttatacagtccttagagggacttctgagggtggcaaattccctctaaaacaagtgtaaaattagaattgtcaacaacaaccattttgggagctggaaagtaaccaaacaacaaacggggaaacattatttatgaaaatctactagaacttctagcagatgtttaaagccttctagcatcgggctgctccttatcccccgcaatccctccatctcttactccttaactatgtcattgtggaagtttcatcagggcaagattggccttcaaaaccagtggctttactgccatgaagagctgacatgatttggagtagagagtggaaactcatgcccagcagtgttgtcaatgaaagtaaacactgtagggaaaaaaaaaaatggggaaaacctgtagctctgctatcctttggttgtagttccagttgggatgactggaaaccattctgaaacttaacagggaaatcttggaaatgaagaaaccataaactttctgtgcattcttaactaactgggaagctaaacacatgtacagaggagacatgagaggacttggcagcaagtaaataactgagtctgacttgtaaactacttgaacttttaatactctttctaacatacaatcacatcagcaaagagtggagacttaataatgggcc

SEQ ID NO: 1091 - DNA, 1047 bp, Homo sapiens
gtcgaaggtgggcagccacatctggtgagggcctcatgctgcttcctagaatggttgaaaagtggaaggacaagggaatgcaaaaaactaattaattcctttgagaactaacccagtcttaaaacaaaaactttggggctgggcacagtggctcatgcctgtaaccacagcactttgggaagcggaggtgggcggatcacgaggtcaagggttcgagaccagcctggccaacatggtgaaaccttgtctctactaagaatacaaaattagtctggcgtgatggcacatgcctgtaatcctagctactcaggaggctgaggcaggagaattgcttgaaccggcgaggcagaggttgcagtgagccaagactctgtctcggggtgggggcagggggaaagaaagagttataaagacccagtcacctgttaaaggcacgacctcccagtatggccacactgaggactaagcctctacttgagtttgatgggaacaagccatattcgaacgatagcaagtaccatgatctcttttctccagtagattctgtattggcaatctactaaattattaaagtgcactgatctttcttttctttttccttactatacttttttttttttttgagatgggagtttggctctttttgcccaagctagagtgcagtggtgccatcttggctcactgcaacccccgcctcccaggttcaaatgattctcctgccccagcctccctagtaactgggattacaggcatgcgccaccacacccggctagttttgtatttttagtagagatggggtttcaccatgttagccaggctggtcctgaatcccctgacgtcaggtgatccacccgcctcagcctcccaaagtgctgggattacaagcgtgaaccacagcgctagaccttactgtacttttctggatgactgtgaccaaagctttaagactgccatccctgaattatcaaaacggtaacacactcaactatgccaattcccaaataggtttcaaaagcagaggaaaattcacttagaatgataactcta

SEQ ID NO: 1092 - DNA, 1021 bp, Homo sapiens
aattttgttctaaatttggactaaaaaagacagtggctagagtactaagtcagttggaatttgctagtgtatatggagaagtgattagtagctaaatacttatcccgccttccttttaaataggtaatctatttcataagggtttgttattggcattgatgatacaagactatatccaaattgacagggttctctgagaatcaggtacggctgattgaggcataattggatgtctggtgtttattttctattaaccatgtttatttatgagcagaaatagccagataatcattaatcattatttaattttttcaaaaacaccagattcttatgtgctaggcatataatcacctccaataagaatttgtaagttggcagcttcttttttcttttattattttctcttaaactcccactttctagtagtttctaaatttttaaaacttgtgtacctgaacagaatgtaatttacttattaacatataatttatttttacttagttattgaggctcaagaatgcatgtaattcctattctattaattaaagaacagattcatattgcaatagttcgtctgtagatattctgtttgtttagcatatacaattcacctaaggatgtggtttaagctcttccaggaaatcctgtgtatgttttgtttatacttggcactatgaaaaggagtgtcattacatgataccttggtaccttggaagcattgatttcacctccaaaaagtgagcacttttaactgagacagacagaaagtaactcaggaaaaaaaaaaagtcttaccattgctagtattttgtaattgaagtttaatgaataaatagccactaaaatatttaaattgatgaagcaatcttcatcgaagatgcagactcaataaaggattgaactaattctttaattagtaattgtataatttcaaatttaagcaaactttaattttttagtttctgtcatgatatactgagcttttctgttgaatgctggaatatttgttcaaggcggtaga

SEQ ID NO: 1093 - DNA, 1050 bp, Homo sapiens
ttactttagaaagtaatgctaaatttttggaaatatactttggtttattaagtgagttcagttttgtgggaaataatttttgatgataaacgaatacttcattaaaacaagattatctcatactcatgatgaaagaataatttgttaatgtattattatagagcttgcactgtttataagtcttctatttgaacagtgtttgtttaagatctgaatatcctaatttactgagttaatcttgaaattattgcattatttcaaaattttaggaactagaaagttctttggagtgattaaattaatatcctcaatagggtggggcagagactaatatattttttcttctcttaaagcaatgcaagtacacacacttaaatatgttcataacaaacacatacccatacatattttaagatatgctgttaatcagttttaaatattgtcatacggtcaggacctcaaaagcagaagtcacagctctttgtcatggaatttctaatttgagtcattgtagaataccaaaatacatgagttttgttcatataataacaataatgatccactgacttagtgtacatcccctttttccctaaatcaggttatgtttgtattttttggcttatagttgtagcagtaatgttcattgttaaatttataacaatgaaatcttcttttagggcatataattttattgatagtatcttagaatcatttatttaaaaatgtatacatatgtttgctcatgaggcagcagtttggtttgtttcatctatttcaattgtttttccaaaagctgctactacaatagtgcttctttatcctataggtttgtcaaaaggcaaacttaaggcattgacagacttgtattggcattggctaaaattgtattgatccttatgttaacctttttgtagcctgtattagtctcacagttgttagatttgtcttgggtagcagtaaattttttgtcatcctcagaaaaaaaagaaagaaaaaaaatgttttacaaattgcaaattcataatcaggcaacaacctgaagaattgtga

SEQ ID NO: 1094 - DNA, 1083 bp, Homo sapiens
taagcagttttggtagtcagtgcagactcagactccagaggactactgcatataaacttcgagctctggaacaccagcttaatttttgaggatttcttctttcctcattttcagcagataaaaatctaacctctgatttttcttttcttttacttaaaagctccaaaaacgagagaagacatgcagggcttaccttaaggtatctctcctgtgctgtcaccctgctttctcccttcttcagctacctgccacgctttatcatcttgctgcatgatccaatgtatttcagtctttgataattatataatgtgccccatatcagctgtacaaatgttggcttttcacaggtatattactctcagaataagcaaataatttacttttaatgatttctgctgtttttccattcatccaaaagtacacgaattttaatgaaatatcctcttaattggaaagtaattatgtagtctctttgtttcctgttgtcatctctgtggattaaaaaacaacttgagtaaaacagctatgatatattctcggcagtttatcatatcaaagactgtatagtcataatatatgtgcatgaaaaagtcactgctttcttatctttgtggtatactcttaaataaaataggctttattctgaaatttttaggagtcatttctagaatcaggttgatatggggatgggttactaaaaatgaaatatgaatataatttgactgtgatatctgtatatgttacatactgttttttatcaagctaataggaacagaaagccactgttgagctcagaatccctgtccactccagccgggttttctccctggtatatccaagtaataggaaacatgctgaggctgccatagtggttctgtgtgatagatcaaaataataataccaaattgcattttgttttgttctctgaattttaggagttccttttggggagatattactttctaaccttacttttcaggggaccataaccatggtaaatcaaaccttgaagaacgaatccatatattgtgacaagaaaacaaaagaacttttgtagtttcttagactagagagtattaaaaa

SEQ ID NO: 1095 - DNA, 1049 bp, Homo sapiens
ttttttgtaaagatttttttttacattaagtggatgttgaaatttgtttctgtgaatactttttaaatttctctatttgatgaattatatgaatacattttctaatgtattaatttctatatgcttttttaacttaatttactaaaaatttaatttgtccaggatattataaaatgtgtgtatattttattaaagattttttgcatcattttaatgactgaaagtatcctatatttttttgtgaaatgagttagggatatatctttttctgttttctgaaacagaaaatagaaatcttatttaaaattcagtatgtatttatcagttgagttttttaatggtcataaactattagggtttttaatttcttttagtcagttttatttttctaggaaagtttctattgtcttttaaaaatttattgatataaatttatctatttgttggtacaaagttcattattgcattttcttatggaaatatcttaagtagcttgaaatatctactgagagctgtagtcatgatcttactacttttaataatttaaagtttttctttactgtgaacattattttttaaactctaataagtaaatttctgtttaatgaaattaaagtttgataagtaaatatttgtttaatgcaattaactctttgtacatgtatatctatgtttgggatgattcatgaaaactcagaggatattcttctttcatcctgtcttgttttaagatatgaaagcttctttcaatgtgaggaagaatcagttactttaattaaacttctttccctctttcctccctgccgcccacacagagtctgagaacagttcatccatctacccagcagcttaatctttccaaacaagtatcagtaaaataagtgtatcaaccagtttctgcagctgatagaattttagcagttacatgatgctcattataaatttgtatttcagggtttgacatgtggtttaattgcttataaaaatgtatgaatgttattatatttacacctaaatatagatgtattttacaaaacagagttgcagaa

SEQ ID NO: 1096 - DNA, 1051 bp, Homo sapiens
aatcaataaagagtccagccgagtatacctgactgatcctgtgctttttaccctgccacacattgatgtaagttaatgtatgctaatgaagtaatggaaggttataaaagcagaaagaaaggaaagcaaaactgaggtgctggggatggggagagaactggggagatgggagggaggaaagacaagacctttccatttgaattttaaatgttggactaggtcagagacacaagtttatttaagtctgtgaacataaaattaaatgagcttggttcagtgattattagaacttaagtgtattcttaatgaaagctaattcagtaatcaacaggaaaatgtaaatgactctaatttgttttcaaatgaaaattaacccttaccttacttagcagcaggatagctgagtattaactcttaggactctgcctttctgtgtggcaaaatttttttcattagtttactgatcacgtttgacacagctgttaccaagtattgtgtttaaaaaaacagttgaggagatgtgattcctctgctgtgccttaaaatgcaagttgatacttacgtaactacactgtattggaagattgtctacagaatgtttggctgttgtgataagtagagtgaataaatgcccacagataaaaaagtggatctccaaataggcaaagaaaaataaatttgtgtggttatggtactcatatctgcttcagttgattgactcttttttttttttttttgagacagagtctcgctctgttgcccagtctagagtgcggtggcgcgatctcggctcactgccagctccacctcccgggttcacgccattctcctgcctcagcctcccgagtagctgggactacaggcgtcctccaccacgcctggctaattttttgtatttttagtagagacggggtttcactgtgttagccaggatggtctcgatcttctgaccttgtgatccgcccgcctcagcctcccaaagtgctgggattacaggcgtgagccaccgcgcccggcctatttgattgactcttaagagcttgtaggtact

SEQ ID NO: 1097 - DNA, 1105 bp, Homo sapiens
attttctgaacttgtattgtgaatgtattgtatgtgtaactagaaagatacattaaacacatgtaatgtcaaaaacctcagttaagtgaggggagcaaaagaggagaaatgcattgaacagtctgtttttaaaggattaattgagataagttttctatggcatattcaccttggttagtattaactaggaagaatgactttatcatacttaagtcttgattgtatttttatattggtagatttcattttagtatgtcacttttattggaaagttgtccctgatttttgccattgaaaaatatttcttctgagttcacttctaagattttatcattttctactcctcttctttttgcaatataatactttatatgttcacatttttccacattcacattttttagtttccttataaattttatacattgtagtggataatgaataacttctttctttccagaatgttttagtactactaatattttgttcccaagggaataattaatatgcttagaaaattatgaacaccaaattatggtcctgtacacttcaggaaattgtttaagaagagcaaggaaaaaaaacccttatgttcagaagtttgggataaaagaaagtaaattgttcttatcaggccattcaaaaacaaagagtcagaaacaaagggagaacaatttaaaggattttaattgtgaatctgcaaagcagccatcttacctattatagtcagtttatttgtttacttgggtttttatttctctgtttatttttaggatgtttatagagttcttgtttttaaccattcttgaattttactagttaaagctagtgttgcataaaattaaaaaaaaaacacactcttaatttttgcctttaaaaaataattagaggtacactttaccatgattctttaaaagcctaatcagatatgtactatactaccaaaggacctctaatttctcaaaggcagaaattgtgtcttacctcatccacaatacaataagcacatccttgtacggaacaaggtcaataaatatttgttgaatgaaatgtatcatattgtaacatctccgaaaattcaagcatttatttatattatgaccaa

SEQ ID NO: 1098 - DNA, 1045 bp, Homo sapiens
tcattaaaataattttaaagagtgaagaaaatattgtgaaaagctcttggttgcacatgttatgaaatgttttttcttacactttgtcatggtaagttctactcattttcacttcttttccactgtatacagtgttctgctttgacaaagttggtctttattacttacatttaaatttcttattgccaaaagaacgtgttttatggggagaaacaaactctttgaagccagttatgtcatgccttgcacaaaagtgatgaaatctagaaaagattgtgtgtcacccctgtttattcttgaacagagggcaaagagggcactgggcacttctcacaaactttctagtgaacaaaaggtgcctattcttttttaaaaaaataaaataaaacataaatattactcttccatattccttctgcctatatttagtaattaatttattttatgataaagttctaatgaaatgtaaattgtttcagcaaaattctgcttttttttcatccctttgtgtaaacctgttaataatgagcccatcactaatatccagtgtaaagtttaacacggtttgacagtaaataaatgtgaattttttcaagtagttaacatgtgaacttttatgtatgatacataattggctttaacatgttggtccattcccaccttggtttaagtaacgtcataccaaagtccatggatatatgaaaggatacaattaagttgcctgtttgttctttatgctgaaaggaatatatgtcttccaattgcccactacatatgcacaaaatctgctggataagttttaagagggatatattctgaaagcatttttgtttgttgcattgtaccaggactaaaaaaagaaggattggaagttctgccatcaaatttgggtatcataaaaagtttttaactgatttttcagcagtattgggaagtttcttaaacatactttaaggattataaatatccctatagacagctgtgaataccaatatacattaccctggaaaagttttactccaagttcaaaaatcatataattgaa

SEQ ID NO: 1099 - DNA, 1083 bp, Homo sapiens
atagcatgttatgtgtcatagggaaaattatttgaaatgtcacgtgttgattaatgtttgtaatttcatttggagcagtgttatcaggtatatgttgctgttctgtagtgaacaaagaaattgtattttaaacttaatgaaagaactcatcattacgtacctaaatgttctgtgtattttttaaagaattattcttgaaaatttgtttttcaaaacttttagaaatatatgatgttagagatcagcctgtacaatcattccctttcaaagatcctgacctccgaagaagctggagttgagatcatactgttagtaataacagagtaaggaatagagtctgatgcctggactccattcagcatcaataaataatcagttaatatgtttattttcaaaatattcaccaaatgttttagtttcaattaaagactataagtaaaagctgaaaaatgttactgtctaatgggaaagaaaatatgtatatataagagttacctgaaaggcaaaaatacaagtgctaacattatggaaagtggaattagaactctgaaaattgctgtatgaaaatgtttgatttgaaaagttgattaaaaatatcaagtcagttaagatttcaggttcagttagcaccaagcttcagaaaggcaggtgattccagagcttatttctaaaaatattccagaagaatgaagttaggcataaagataatttagaagggtcttggttaactttaactatctggtgcctgtattgtactctactgaaccttttccctctattagaattaacattttctggggtaagacctaaaagctaggtgagattccatcttcatctccacaggttttggagataacattaacttaggtacctgttgttctgctgtagtgaattaggaaattgtattgatgtatctcaaaacttaatgaaagaataactggtactattacatacctaactgctctgtgtgtgtttttaaaattactcttgaagatatattccttttaaaatttgggcgtagttatttaaacgtcagctaatacagagaaacataaacttttagaaatatgataaaattctcag

SEQ ID NO: 1100 - DNA, 1028 bp, Homo sapiens
gcatagagagagcccaggccagcccacagcactcctggtcaggcagccacaccttggtcctcatctctggtcccttccgatctgaagcctcgtgcctggctcttctgccacctgcatttctctttcttgctgctgttttgtaaaaagaaaaagaaaaaagaagcccaaactagtgagaataatttataactctctcggtttttgtaggtctgtaataaagaacttagtcatcccacctcctactgtgaagagcagaccctgggtcccacactcaaatcccctgtagttgcccatcctcacccctcagggagccccctcccagctagcctcccgggcagggggcacagaaaatgagtggtgggctggggagccctggagagccttgactctgtaaggctcgaggcacctcctttgccccttaactggcctgttggtcctctgagcagggggcttaactgtgaacaaatcagacaataaagcaagggtctgcacctaaaaagacaaatttatgaatcactgtactgatctttgaagatattttcatgttctactacaagtaaaggagccatcaaaatgttcgccatcagggcagagtcttggaaataaaacatgaaacattctattcttatgtgaaaccattaatgtgctatgtgtagttgtggtgttttgtgtatagcagaaccagagaaagtttagatcagggcagctaacaggagtaagagcatgggaagtctattctgtgtgaataaactgtatatatacatatttcatttaatctagaaaaattaaagttacatgattaaagtgtataaaatcaagtggcatagacagaaaatctgggattgctcacctaaacttgaaacactagaactcatggactattcttccaaacttataaaagctagctgtagaacaagtaaaatgaattatcgtaaaaccttgatatagactgggcttagacaataaatgtatttaactgattagtcatttatgtttaaaggtgaaacatgtgtttacaaattcaggta

SEQ ID NO: 1101 - DNA, 1027 bp, Homo sapiens
tcatattcctggtgtcactggaaagctttcaatattttggaaccaggcagaaaatttttaagatatcctgttatctgtttaaggaaggtttcttctattcctggtttgctaattatttttcctttgagaatgggtatttaattttatcaaatgttatttctgcgtctgtgagttttgaatcttaaattaatattgcatacctggaataaacccattctggttgcaatatattgtccatttcatatccttttttaatgtaatagtgaatttggtttgctaaaatgtctcagtgtgttttctttttatcattattccattgttttttctttgactaatggctacattggttagttttcaaatatttgggggtttttagcttagtttcactgtgttcagagaacatgtttggaatgatttcagttctttgaagtttgttgatacttgccttatgggtcacctttatagccatatacagtagtcatttgtaaatgttccaatgacttttgaagagactgtctattctgctttcgttgcctacatgtactctctctcacacacacatacacatacacacactaagacaattaattcacactgaattcaaggtattctgtatcatgttatatttctttagagaggacttattttacttctggtgtgattcaatattatttttactaattgcagtcatgtggtatgtaacaacatttcagtcaaaaacatactgaatatacaatcatggttccaaaaattatactacttcatttttaatgtactttttatatgtttagatacacaaataccattgtattacaactgcctacagaattcagttagtaacatgcagtataggattgtagcctaggagcaataggctatccatatagcttagatatgtagtaagctatacgatctaggtttatgtaagtgcactctatgatgttcgtacagtgacgagattgcctaatgacacatttctcagaatgtatccctggcattaagtgacacatgactgtatttaacactc

SEQ ID NO: 1102 - DNA, 1033 bp, Homo sapiens
tttgcgcttattccttcatgcattctctggtctaagttacttgtgccataaataagtcttgtgtaaaggtgtcctagtgatgaattatgtcagtttttatttatctggatttgtgtattttttaccttcactttttcaggatatattttataagtatggaattttaggttgagaattactttctttgaacactttgaagatgtttcatcatgttttgttttccattgttttgttgagaaatcagctgttagtctcagtgttgctttatgaaggtagtatatctttttttttctttggttgctttgagattttctctttgcctttggttttcagcagtttcacaatatgcctaggtgattttattccccctactttctgtttgcaactttttagaatcatggctcaaaatgtttcatttatttaagacagttttcaataagcatatcttaatatgttgcctctatcccgtcttttctttcctattcttctgagataccaattacatgtatatgtaaaatttctgatatataatttcaattattatatttttaatctctagattttccagttgatttttgagtttctacttgtaaatttttctactcatttatatttttgtacaaattaatcatagctatattaaagttcatgtctgaatttacaatttttattaccagtgtgtttttctatggtatgtttgttctcttatttttggttatttggtcttatcttttggcatgcctaggaatctttaattgaatgtattttgtatcatgttatatttcttaagagaggacttattttggctgatggttagagttgggtcagattgtgttgatccatcaacaattaagatgacttgttggctgttctcagtctttgtgaggcttggtctatttcctattcttactcctatcgatggagcctttcagtggttttgactgaaggcctggtggtgtttatcagggccctacctcatgctagccctgaacttcaatttttctttcctcactgtgagattactgaaatattt

SEQ ID NO: 1103 - DNA, 1051 bp, Homo sapiens
catttaggtctgcttgcatgtctcagagcagtagaaagcaatattatcagttgtgaggaagaattatgggaaaagtgttggaagtttggtaaagaggagaaggtataaaagtcatctagaagagtgggagattggatggactaggggagtacaatatgattgccagataacagtaaatatactcttgaggtttctggttatgaacttcaaatcataaaaagttaagagtagtttgtttttctccagtcttacccagctgcacaagtgcaggcacagtgtaggtatagagatttcaccagggttctggttttgccaagcaagtatagacaaaacgagagagaggcaagtggctgaaaatgtatgctggaagtgattataatgctcggctttggaatttgtgcattttaaggaggaaaaaagataatatttggggtatcaaggatcctgaaaaggattagagatcctggtaaggtttaaagattgttgaagttgagatcttaaaagagagtgagctaaaaagatagaacatggttagagagaaagggtagaatgaaatgggctaagggtatgatctttggagtcaatggctaagacagggtagggtgggaatgtacatattaaatgaatttagatattgtattagaaaggttagaggatatacatattcgatgaatgtgtatatcttcaattaactacaaataatccaattttatttgtagtgttaagtatagtaagaaatataagtacaatacctgtttaaaaattttacaaaatattttagcaaagtactttttaaaactttaatttttaacttaatgtaattttcaggtaaaaggataatatattcagtgcattttaatggcatgagtttttaattaatgttgtatagtcgaagacatagtagtatgttagtttatatattttctagaataacatatttcagtttaaatatgtatttatttttgaatttaaaatattcatgtttgaatggttaaatgagaatgtacccttatttctgtggaaatatagcttttattaacagcaaatataa

SEQ ID NO: 1104 - DNA, 1050 bp, Homo sapiens
ggatcatcaagaataaaaagatataaaagtgaatggggacattttagaaagttattcaccaaaactttaataattataaaaagtggcttttatctcagaataaccctatgtagtaagaatactgaggcttagagaagataagatcacacatttaatggcagaattttgaatgatgcaaactccatcagtctgattctaggccctctgctcataagcaccatattataccatttccctaacacagtgaggaaaattttcttttaaaaattatgtacttaaaactcatcaaatctgaaggaccttagaagatctatctacctacctatcaagtttgtagagtattacatagctttttctatgtgtcaggcactgttatcaatcctataacaactcatttaatctttacaactctttgaggtgggaaccatgattgttcttattttatacaagaggtaactgaggcatagattaagtaacttgtccaaagccacacagttaaaaagtaggcaagctaggacttgaacccaaacagtgactctagagtgttgttaaccgtgccatattgactgcctttctaaaaatttgtgaagtttttacttcatttagttttctccttattataatcttttcaatgataagaaactcattacgctgtaaggctatgtgccagtcagagttacaccagagaaacagaaccagtaggatatatcggaagagatatattgcaagaaattgacttattgattgtggtggctggctaggtaagtctaaaatctatagggcaatctgcaatgaagggcaagctggacctctcaatcacaggctgaagctgtactttacaggctgagtttcttcttctgggaagcttcagttctgctcttaagggctttcaactgattgagtcagatccacccaaattatctatggtaatctcctttacttgaagtaaactgactgtggactttagtcacatctacaaaataccttcacagcaacacctagatcagtgttgaataactaacgactataccctagccaagttgacacata

SEQ ID NO: 1105 - DNA, 1145 bp, Homo sapiens
caagtatatgttttatggcttttgcctttggtatcatgctttaaaaggcctactcatactttcagctttttcattctgctctgttcttccccaaagtgcatgtgtatgtgtatgtgtgcatatatacatgtatgtctattcagattttcccataaaaacatgatacagatagccctccatatccttggattcaaacaaccaagagaattcaaccagccatgtatcaaaaatattaaaacaacaaaacagtaaaagataacaatacaacaatatgaaataatacaaataaaaaacaatacagtataacaactatttacatagcatttacagtgtattaggtattataaataatctagagatgatttaaagtatatgggaagatgtgcataggctatatgtgtgacagtgtatgtatgtttacatatatatatatgtaagtatatatatatacttgagtttttcccataatgttcaatttcctctggaaagaaaatgtaaacttgcttcctctatgctgtatcatcatcttattctcaaattcccttcaaaaccaaactttttaattagtagggtaacacactgcttccattttcttactttgtgtttacgcctcaaatcctctgaggctgatatctattccttcctgccgtggcaaaagtcatcaataatttgttgtgagttttttcccttactctatagtagagtttccctaatctatagtgttttccccaagtgacttattcactaattacttcatgttctgtcagttccaattactttctatctttgtgacaacatatatctcttctgtgctctgagtgtaatttttgctggatatgaaccctgcaaagtcaaattggggaaattatcgtttcctgaatctgcacttcctattttggtgaaaatgatgcacctctttagtcatataagccagaattttgggtgtcatcttagattctttaattttccttgtcttctacctctccttgttgactgagtcttaggaatttgtcccttcatttctaatttcactgattctagcttagttcaggtctttatcaccctttttgaggatatctacaacagtttcttagccattctccctgccttcaatttccctagtcgatcttccaaatctaatctaa

SEQ ID NO: 1106 - DNA, 1034 bp, Homo sapiens
gttggccaggctggtctcgaactcctgaccacaagtgatccacctgcctcggcctcccaaagtgctaggattacaggcgtgagccaacatacctggccgtactttttaactatgtcttgcctcatttggttcctggctaaatctggcttttcagtcttctcatccattccatatgtactcaatctaataaattcattttctgcttaaattgactagcatcaatttttaatttacatttttgcaactgacaacccagactagtacaggtcctaaaggggactctaattcacatgtcctcccaagaaaggcaggtagcaaggtatcttatttgtatgtgtctgatagggctcccaagaaaccagtggaaggtactcttaggattgatagttaaagtcttaggcacagtaatcaaggaacctaagaccgagtgacagaggaatgtttttacatgggagaactctgagatacagtgttagaaattccctaaggaggttagtaggaaatattttccaagaataaaactgacagaggattaatatccagaataaagagcattttataagtcaacataaagagactaaaaatgaaatagaaaaacatagcaaaggatataaatggataaattactaaatatgaaatttagatgatcaattaacatatgaaaatattttatttcactagtgatcagtgaaatatgatttaaaatgaggtaccttttttaattcaccagattagcaaagatgaacaagtcacgtagtatcacatatgacaagcatgtcaaatgtaaattgggatagccattcctgagacaatttggttgtatcagttaaaatgaaaatgggcataaactgtgacccaggaattccactgttaagtatcttctgagtagaaacacttatacatgttcaaaaggaagtatgtatcaaaaaaagacatactggtgaggatgcaaaggcatgggagccctcagacattgctggtggaaatataaaatggtacaggtgctttggaaacagtttttcagtttcttaaaa

SEQ ID NO: 1107 - DNA, 1803 bp, Homo sapiens
tcagttgagggtttatgtgttctaagtcctgtgataggtaccaggaatgcagagataaacagatccattgtaaacagtcaaatgtaatagaagaatcatatggctaatctgccatatattaagtcatagtgtctaaattgcattaaaccagctcaatataagaacaactgttttcttaaaagttatatgagattttataaaagattttaccttgccattatatagtaattatgattgaacttaccaaattaaatgtaatgtgacgtttactagtatttttccattaaattgttagtgaattaaaaggacgttttggaattatatgggggatctttggaagacttaattttttcatgggttgtataaatagatttatgagagggaaaatggatattagtttctgatatggtagtttatgtgagaattttatagtttgatttgtataaataaaataatgttattgcatatttctggtacattacacttttatttgtataataacctaaacttgtgtttatcttatattgctaaaatttaaggtaatgacaataaaagatttttctggtatgtatgtgaagcctaaatggccccattctgccaccttctggctgactccgtagcttataatattgtgaggtaagtgtcatctaaccgttctgccatggttggcagcagaccatatatttggggcctgggtgatttaaaacagggtcagtttaagcaataatgtagttctagtgcctcaggctcacctttatttcatagttctaaaatgtgttagaatttattggaatagaataccacatagtgatgtatgagattgtttctcccagggtatggagttgtagttaattttgacttttctgcaatactaaagtttcttcagatattacttgataattaaaactgtatcaacatggtaagctatttatcagaatcatcataagaaagttacttggagagtgatatagaaatgaaagttactgaaatcagcaccaattccttatagagaaactaatgggttcagtaatcacttactagagttctaaaataaaaggagaaaccatatgtacaacaacaaagtactaacaaaatcttagtaatttaaacctctagttttgtgacacttctatatattgccatttattaaaaaaaagaatttgggaaggcttaaaacttttggaaatgtaattcatttaaaattggtttgataaactttttggagagggatagagaaaataaagtagaacgctataaaatgttgcaatttgtgaccttttgcagcacacttaacctctttgtcactctggaaaatgggataataatatccaatataaaggtagattgttgtgaggaataaatgctttatttacttcatgtgaaacacttagaatgatatctgacatataataagttagcattgttatagtcaatcttacaacatttagaatatgttacatagtctaatataaatggattccaaaatattctaggcagtaagctttgtattttcttaacatttttacactcaataatattaaattaaaagagagaaattgaagactggaaatgcatagctccctaaagtagtgtagaaatatatgtgatatattggggcctaataaagggcctttatttctgtctgtgactcatcttttagatacctaaagctatctcataaaaaagctatggtatcttgaagaaattaatcaatttaaaaacatttattgagtgtatactgtgtgatcatcagtgtgttagattctggtaagaaatgatatgagaaactcacaaaaagaagta

SEQ ID NO: 1108 - DNA, 1030 bp, Homo sapiens
catgcaggtgagtgggtacagggactgggacaagtgcttctgggcatccgcaggagtagaatcctgtgcagtccagtggaagcttcctggggggtgggggggaggggaggggaacctgtgacctccggagtcctagagggcatgtgttacagtgtgctcatttagctttgccatccacagacaacttaagtgtttaacagatcagtggagggtcagggtgacagccttttgcacccgccctcttggtacccgagtacttgtctggcatccaggaagaataaggtcatatgaatgaattgaagggtggtgaatgtggaggattttactgagcagtagaagtggctcttggcaggatggggagctggaaagcggatggagtgggaaggtggtcttctcctggagttcagccgtcccctgtggaactcttctgcgaagtcctgctgtcaagctgttcctctgaagtcaagctgcttctctttgatgtccttctgctgcctctcttctctcctctgccactctgccactctgctggtggggcttggggtttttatgggtacaggatggggaggtggggacagccaacatggttttggaaaaggcaaatttgggcaggaaaacaggaatgcatgttctcactttggactgcaggtccaggcttgagagtgtggccctcgttggggtctgccctcttctacccagtatttccccgcctcctgtctatatcacttcctcacccttccccagcttaataataactggcatcactacttattcacatgctcaagccaaaaaaagtaggaattatcttttattacttttattaattttctgggttcaatgaatcatcaaatctccttgtttttcaaaaatatatatgaaatctgtctgtttttctttcccaccacaacctcagttcaggtatccatcatctcttgcctggacttttgcagtagtccttaactatttttcatgtttccattcttaccttccacctacacagaagattcctgaatccattctcttcctagta

SEQ ID NO: 1109 - DNA, 2092 bp, Homo sapiens
tagtgactataatattggacagtgtaccctagactcaaacatatgaataaaagcaatttgaattcctggaagaaaaattagagaatacttacctttcaatgtacagcatatgttttgagcaattgaatattcttacattagaattgtgagattaaataaatttccatatctctttttatgttgaatagtaagatcattgtttttgcatattgtattaacttactgcttaatattcagcacaattataaacttttttagtttactatactttgagatatatattactattataattttaggtattctggtgagttcaaggataaaaaacatggagtgtaattgtgaaaatttgtttatgtatttgaaaatatatcagtttgccaagagtgaatcaatttcatattaataatgacaccatacttgatagtagtaatcatgaaattttgtataaaaattacattttttaaagaaatgtatgcatgtaactttttgtctcataaagtactgtgacaaaagtactacaactttactgtggatttactcagaaaaatgtatgtcaatttcacactgagattaaggtgaagcatgttgaaagtaaaacttttatcttttacattttttatttctaaatctattattaaattattaaaatcagaagtgatgagattagcttctagttccaattaagatggagtaagtaaatgcacatcactctattcctcccactgattatgcctaaaaaagattctgaacagaatacataaagtagctgtagaaagactttgaaaagtaaatatagcaggaagattggaaagggaaatcaaaacttgaaaagagacaaatacagtagtgaatttcctgcttttagcaatttcttcctacatcctccagcttagactcaaggcagtcagaattccagaactgtacagtggattcagacagaaaatgctgtggctcacgcctgtaatcccagcactttgggaggcccaggcaggcagatcacgaggtcaggagatggagaccatcctggctaacagggtgaaaccccatctctactaaaaatacaaacaattagctgggtgtggtggcgggcacctgtagtcccagctgctggggaggctgatggcatgaacctgggaggcggagcttgcagtgagccaagatcgtgccattgcactccagcctaggcaacagagcgagactccgtctcaaaaaaaaaaaaaaaaaaaaaaaaagagaaactctctttctctaatgagagaccctgtaaggaaatccctggtgacaaggaaaaaaatcaatgaaattccatttgtttgtttgttttctggtcctgctttgagacaagatatactcctaaaactgcactcctgtgtcagtggcagtagcaacaatgaccaaacaagtacctcaaattatgagaaagaatggagacaacccagaaaagagtcagtgaattagaacagaagatcaggagaaattgtctattgtaaacaacaggaaaacatttgtttaataaagggaaaagagccttaagaatctgtaaaacaatataaaaatgtctaaccctacaggtctttgaaatcacagtagaagaggaaagagattgctgcagaaatttctaaaaaaattgaatatgtaatggctgaaaacttctcaaatttcgcaactgacataaatttacagattgaagaagcttagtgaatgccaagaaaacaacatccaaagatataaccaaattactggaaaccaaagagataattcatcaacagcaatgctgctttaaaagaaatgctaaggaaagttatttaaacagaaaataagtgataccagagagaaacttggaacttcatgaaggaaaggaaagcaacaaaaataataaatatctggataaatataataaattgttttttctcctcttaagttcattaagatatgtataatggtagaaataaaaagttaacaatattgtctgttggggtttccaatgtgtataggtcggaaacaactaataatatgaaggagaagactttaaagagaaccaaatgtctgtaaggtttataagttacccatgaagtgataaaattttaat

SEQ ID NO: 1110 - DNA, 1078 bp, Homo sapiens
atacacaaagtgagcatggggcatcttgcagtgctagaaagtaaggatgtgctcaaacacatacacaggtgtacacacatgcacacatacacagtgatggaggtatatcaaagggacataggaggaagttgatggagcttcccatggtcaaaatggaataatttgaccaacaaaataaataatgtaatgttgtataaatgctacaggcattaaaagagtaatgtgtacattagaaacaactttattacacaaagttgacaacttagttgaaatagaccatttcttgaaagatgcaaactactaatattcattcgagatgaaattgataactcagtaatactctgtttattgaagacattgtattagtatttgtaatcttcaaaaaaaatcaaaaacaaaaacgaaaaacaaaacactgtcccagatagttctgggaaattctacaaaacatttaaagaagaaatgataccaattctcacagtttcttctggaaaaatataagacagaatacttctcaacttattttgtgaagccaatcttaacctgctaccaaaatcatgcaaagatggcacatgaaaataaaactaccaagcaatgtatctttatgaacacaaacagaaaaatcctcagtaaaatattagtaagttgaatccagcaatatatacaaggaatattacaccaagaccaaaaggggttcattctgataattcaaagctggttcaatatttgaaaattaatctgtgcaacccaccatattagtagactaaaaggtaaaaaccacatgattttatcaacaaatgctgaaaacacattaggtaaaattcagcatcctcctaagataactcttcactaacccaggaaaaaaaaaggaaactttgttatctcaataaggggcatctacaaaacagtgtctacagctaacattttagtagttaatgatgaaaaactgaatgctttcttcctaagacttggaataaggcaagaatgttcattgtcaccaccttgttcaacattgcactgtaattcttgaccaatgcaataaggcaagacaaataaataaaaggcatacagattagaa

SEQ ID NO: 1111 - DNA, 1061 bp, Homo sapiens
aggtaagagggttccagttttttcacatgctcatcaatgcttggtatcatcagtctttctttcttttttttttttcccctcctgaaacaaagtctcactctgtcacccaggctggagtgcagtggcgcaagtgattctcctgtctcagtcttgagtagctggcattacaggcatgcgccatcactcccggctaatctttgtgtttttagtagacatggggttttactatgttggccaggctgggcttgagctcctgacctcaagtgatccgcccgcctcagcctcccaagtgctgagattacaggcatgagccactgcacccgtcttatcagtcattttgattatggccattatgtgagtgtgaatccgttgttcacagttgtttcactttgtattttcctaataactttatgatgttgagcatattttcaagtttttataacccatttgtgtatgtactttggagaaatgtattttcaaatcttttgcccactttcaaaattgagtcgtttttcttcttattatcaattctcaataattctttgtatattctgaactaagttcttttccaaaaatataaatatcaaatatttccttctagtctgtcttatgttgtcatttttaaaaatgatgtatttgaagagcaaaatttgtaattttagtgaagtccaatttatcgttttttcctttttggattgtacttttggtaccagatcttaagaaatttgtatctaacgcaaggtaatgaagattttcaatctgtacttccttctaaaagtctattttttgagttaatttttatatatgttgtgaagtatgaattgaagttcttttttcaacatgtagatccattttttactgcactacttgttaaaaagaatttcctttctctatttaattatcttggcatctttctcaaaaatcagttgaccataaatgaaagggttcacttctgaattctcaattctgtcccagtgaactacatgtctgtcctcattcctatactacactgtcttgattactaaaactttaaggtaagttttgaaatcacatagtgtaag

SEQ ID NO: 1112 - DNA, 1029 bp, Homo sapiens
aaaaataaatatgaggaaaaaatgtatgtaattctaacagagccttaaaatatacaaaacaaaattgacctatgtaggagaaattttatagatatagatagagaattcttacccagtaattgaagaatacataggaatatgtagaacacttacaaaattaataatatgactaaatgtattcaacaaatttcaaatgattgatatacaggctacagtatatcaattcttaattacttaactaccacaaggcaattaagttcaatcagtaataaaaagctttaaaaaaatcacacaaatgtatacatttggagatttaaacattttaaataacttaccaaataattaactcgtaaatttaaggtgtaactatgtatcagaacttgtggggtgcagcaaaagtggatatagagttaaattttaagtgctcaaattaggaaaaagaaagacattcatgatataagaaaacaagtttaaaaagccacatggttaatcaaaagaagaaagaaactgataaagacgagcaaagatcagtgggtggaatagaaaataaagatacatgagaatcaaaggttagtttatgggaaaatattttaaagtactaaatagaactatacctgttttaaaaattgaatcacagaatctttatgcagaacttaacaaaattaggactggagagttttacatacaagttttaggaaaccttcaaagaacaaaaacttcaatcttgtatggaattttccagagcattgaaaaagagaaaatactcttaaatgcatttactgattctagaatagttttacaagtcaagtataggaaaagaaaattagatacattttctctgaagttgggaataggaaaaggatgtccactgccattgtttctgtacatcattgtactgttagtcataacctgagcagtaaaacaagaaaaacgtggagagaaccaaattgtcattattcacaaatgatttgtgattggttacatagaagactcaagtgaatctaccaatgtgatttcagaattgataac

SEQ ID NO: 1113 - DNA, 1134 bp, Homo sapiens
taaaaactgggcaaaggacatgaaaaaacacttctcagaagaagacattagtgcagccaagaaacatgaaaaaaactcaacatcacagattattaggtaaatgcaaatcaaaaccacaatgagataccatcttacaccagtcagaatggcaattattaaacagtcaagaaacaacagatgctggcaaggttgtggagaaataggaatgcttttacactgttggtgtgaatgtaaattagttcaaccattttggaagacagtgtggcaattcctcaaagatctagaatcaggaataccatttgattcagcagtcccattactgggtatatacccaaaggaatataaatcattctatcatgaagatacatgcacatgtctgttcattgcagcactattcacaatagcaaagacatggaattaacccaaatgcccatcaatgatagactggataaagaaaacgtggtacatagacaccatggaatgctgtgaagccctgaaaaggaatgagaccatgtcatttgcagggacatggatggagctggaagccattatcctcagcaaactaatgcaagaacagaaaaccaaacactgcatgttcttacttgtaagtgggagctgaagaatgagaacacatcgacacagggaggggaacaacacacactggggcctgtcaggggtgggttggggagaaggagagcattaggaaaaatagctaatgcatgctgggcttaatacctaggtgataggttgatagtgcaacaaaccaccatggcacacatttacctatgtaacaaacctgcacatcctgcacatgtacttaaaataaaatttaaatttaaattaaaaaaaatttttaatcagctgaagaagacttatttgacaatatatgggaggtcttcaattctagttatattttgtaaatctactattttgaaaagcctgcctagtttcatctctatgacccagttttctcatttgataaaatgggccttatgtattttccttcatcagaaatgtgtttcaggtttttgttttttgtttttttggcttttttttttttgtaatacagaccctttatcacctaccttgtgccagcagaaaatattaaatagcactaggaaatactcatgaagt

SEQ ID NO: 1114 - DNA, 1132 bp, Homo sapiens
tgggcagacaaaaaatatttattgtgaagaatatggggagggagaatagaataaaataagagaaaaacgatgctctttatttactttcacattctttcaaaaattttttgatgtgcaagtagtgttctgtatattgtagatattaattccttgccagttctaaacattataagtattttcttccagtcgtcatctatctttttgtccatggtgttcttccttggatgaaagtctttaattttggtataggaaatcaaaattaaggatattaatccttatagtttgtgcttttatgatctttttaaagaagttgttctctacccttaattcaccattcttctgcattttctgtaatagttttatccttcatatcaaattccattgtacttcaactttgcatgtggtgggagatattaatgcaccttgatttttcgacatcaagtaagccagtttccaacaagctatcttataattcagggttggctaattttttttctgtaaaaggtcagatacaaatatgtaggctttgcggattgtactttctcctttacaaatatttaactatctagtgtaaagataatcatacacaatatgtaaaaaagagagtggctgtgttccatgtattacaaaatatttattcttattttaattttttaaaaatagactctttttagagcagttttaggtttattgcaaaatttaacagaaagtacaaagttcctatatattccctgctcccacatacgcatagcctctcccacactattaacatcctacaccagagtagtacatttgttataatcaatgaatatacattgacaaattatcactcaaagtccatactttagggttcacttgtgtgcaggctctaagttttgacaaatgtataatgacatgtatctaccactatagtatcatacagaatagtttcactgcctgctgtggactgaatgtttgtccccactttaccaatccccctcccccaccaaaatttatatgttgcaacctaaatccccaatgtgatgacatttggagacggggcatttgggaggtaattaggtcttgagggtcgaaccctcgtgaatgcaattagtgccctagtaaccatataagaaaaaacaggagagagata

SEQ ID NO: 1115 - DNA, 1118 bp, Homo sapiens
ttttttaattagctgggtttggtggtatgcacctgtggtcctagctactcgggaggctgaggcaggaggattgcttgaacctaggagttcaaggctgcagtccagcctgagcaatagaacaaaaacctcatctcaaaaagaaaaatatatgaattttttatatattttgaataacaatacttttttcagataagtctcttgcaagtatttttctcctagtttgcagcttgtcttctctttctcttgatgatatctttcatagagtagaagtttttaattataataaagactaatttatcaattatttatttcatggatcatgctttcagtgttgtatttaaaaagtcagcctccaggaaaaaaaaatggcagataggaggcaggactaacttgcatctcccactcagatgaacagaacagcatgtggagactgacatcatgagcttttgctccaagaactaccacaggaacataccaggaacactgaaaggattcacagactctttgaaaaagtggcttgtggctgcaaactctgtgaggcagctgaaaaattgtgagtgcccaaaatgtgaagggggaaagcctacctccgaacacacatcctcactggggaacctgaaaatccagatcacgggagaaggatttaaccttacctagagctgaaatgaatttagagagctgagaaaaatataaaagtagaagcagcactgggaagagccctctaggtgctcccagtcaccagggaagccatttctgactttatctcactggggtccttggggagggctgccaatggaattggggaaggaccatagggagaaggaaacttccagttgagctttgtaataattttgaccaagtgtgaattttcctaggcagaatccaggagtgggagatggacgggaagtgcagataggaccacagaagcagtggcaagctgggagaggtagggcctgaaagccctgctggctttttcagtggagaggcttgtagcctggggcaattagtgccctagcacccatataagaaaagacaagagaaagcatttgagaaaaccagtgtactaaacaaaactacaaccaaggaccctcacagagtccacttcactcatatgctac

SEQ ID NO: 1116 - DNA, 1051 bp, Homo sapiens
aaaagcagtgctaagaggaaagttcatagcattaaatgcctaaatcaagaagtctgaaaaaacacagacgatctaaggtctcacctcaaggaagtagagaaacaagaacaaaccaaacccaaacccagcagaggaaaggaaataacaaagatcagagcagaactagatgaaattgaaacaaaaaaaaaatacaaaaggtaaatgaaacaaaaagctgattctttcaaaagataaaattgatagaccattagtgagattaaccaagaaaagaagagagaagattcaaataagctcaattagaaatgaaatggaagatattacaactgataccacagaagtacaaaagaacattcaaggcacaaactagaaaacctagaggagatggataaattcctagaaatatacaaccctcctagaagggccaggcacagtggcttatgcctgtaatccctgcactttgagaggccaatgcgggtggatcacttgaggtcaggagttcaagaccagcataaccaacatagtgaaatctcatctctactaaaaatacaaaaattagctgggcatcgtggtgtgcacctgtaatcctagctactcaggaggctgaggcaggagaattgcttgaatccgggaggcagaggttgcagtgaaccaagatcatgccactgcactccagcctgggcaacagagtgagactctgcctcaaagaaaaaaaaaaaaaaatatatatatatatatatataatatatatattttatatgtgtgtgtgtgtgtatatgcatatgtacatatacatacatatatgtgtgtgtatatatgcatatgtacatatacatacatatatgtatgtgtatgtatatgtatgtatatgtgtatatgtacatatacatatatatacacacacacacacatatacacatatacaaacatacaaaaccatcctagattaaaccaggaagaaatagaaactgaaaagatcaatacagacagcgagattgaaatggtaattttaaaattgccaacaaaaaaaagtcaaggaccaaatggattcaca

SEQ ID NO: 1117 - DNA, 1104 bp, Homo sapiens
caggcacagggactggcaagtgcaaaggccctgagacaggagggtgcttggcaaggatattgcatctggctggagtgagcaatagaaagggtatacagttatagagataaggtggcactcaccaagtttgtcttttactgtaactcaattggggagatttgagaaccacaaacagaagtgatatgatcagatgttggctgctgtggttgacagcaggttgttggaggagtgaggatgctattgcaataatataaatgagagatagtagcttggaccaggctggtaatagtggagttgaccaggtgatttttattcttttttttttttttttttttttggaaacaggggtctcactctgtcacccaggctggagtgccgtggcacaattgtggctcaatgcagcctcgacttcctgtgctcaagaaatcctcccaccttagcctcccaagtagcttggattacagacacatgccaccttgactgctaatttttttaattttttgtagagatggggtctcactatgtttcccaggctggtctggaactcctgggctcaagccatcctcccgcctcagcctcccaatgtgctgggattatatgagtcacagtgcctggccaatgaaggtagaacaataggatttcctcttggattagatgtgggaaagaagagattagtgaaagagaggagtctgtgatgaatccaagatttttggcttgagtaactgatgagagttaccattaaccgaaatttgaaaggctatgggaaaagcaggttttgactgcagaggtgggggctttagatgttctgttttaggtgtgttaaatttgagaggaaaagcagacatccaagtggagatatagactaaatggtggatatgcgaatctggagttcagggaagaattctaagtgggggtatagatttgggaatcattggcatatagatactaagctgtgggacaggatgagattaccaagacagtggcagaaaagagaagatgtccaagcactatgccttgaagcattatcaccttaataggttggtgagatgtgagggaaccagcaaagtcagaagaccagccagtgacttaggaggaaaaccaggt

SEQ ID NO: 1118 - DNA, 1035 bp, Homo sapiens
catgaatataacaaacatcttttatatttagttttagctattatcaaataattcaaaaatggaagaagaaagaaagacacatatatgatcatttttacctgcaaaaggagatttcaacatgggactgtcctccaccattataccttcttgtgtcttgtgtcctagcttttgcttgtactgctgcacaaattctgtggaatgggcaggatgtataggattcattccatttgaccgtgtggtctgaatatcacctgcatgttcggaagagcacagtgagtcttcagtatgccgctctgctttcatcaggtcactgccagacaacatgctcaaattgacagcagggagcttcagaacagcagagtcggcctcaccaaaactcaaggcacttgatataccaaggtcatcatcctcaggaatgggattgtaccatatttctccttcatcatctgcatcattttcctcattaaaatctaaagcacagtttttcgataatgaagagtttgtagcgttacataccacatatgtacagtactctttagatgatttgaggaaagactgtgatagctgatgtttaggtagagacacaggtgagatggataaatgacttctatcttggcatttcttattttcttcttccagattaagaggcctcagagtactctgatatagccaattgcgtttctttgaaacagtgatgctgttaagtggcttatgacctctgaattcaatattatccttcagctcttcaagttctcttcccttcattgaagacccataggcattttcaaataaatctgttgcaaagatagaatagaaggtagaatataatggctggtatatcagaaagacatgtcacttcagaccagttatttaaaaaaatttttttaaacaaaaagtaacaacaatcacattcagagactaaaattgaactagaaaaaatttgaattttacatataaatatgatttatattatttagaaatcaaactgctagtacaagtgtcaaagaattctaagaaaaaggatatacaaactct

SEQ ID NO: 1119 - DNA, 1049 bp, Homo sapiens
actgtaaacatcagtgcacatgtattgatggcgccgtgggctgcattcctctgtgtccccaagaactatctctccccaacttgggctgtcccaaccctcggctggtcaaagttaccgggcagtgctgcgaggagtgggtctgtgacgaggatagtatcaaggaccccatggaggaccaggacggcctccttggcaaggagctgggattcgatgcctccgaggtggagttgacgagaaacaatgaattgattgcagttggaaaaggcagctcactgaagcggctccctggtaagtggagactgagcacttcagacactgtactgagatgcatttctggtctaaatctttgtagaaatgagtgcttgagcctgtttgtgtcggtatgcctctgagaagtcttccctcttatatgtctctagtttttggaatggagcctcgcatcctatacaaccctttacaaggccagaaatgtattgttcaaacaacttcatggtcccagtgctcaaagacctgtggaactggtatctccacacgagttaccaatgacaaccctgagtgccgccttgtgaaagaaacccggatttgtgaggtgcggccttgtggacagccagtgtacagcagcctgaaagtaagttccttcagggacgtgtagactgttgcctggcaggtgggtgggatgtgaacatctttttgaagaaagagaaatatcacccctaactttccttctctcctttctcttacagaagggcaagaaatgcagcaagaccaagaaatcccccgaaccagtcaggtttacttacgctggatgtttgagtgtgaagaaataccggcccaagtactgcggttcctgcgtggacggccgatgctgcacgccccagctgaccaggactgtgaagatgcggttccgctgcgaagatggggagacattttccaagaacgtcatgatgatccagtcctgcaaatgcaactacaactgcccgcatgccaatgaagcagcgtttcccttctacaggctgttcaatgacattcacaaatttagggactaaatg

SEQ ID NO: 1120 - DNA, 1218 bp, Homo sapiens
ggcttcttagaccacaagagcttgctgtgaaatcgtgaatcattttcaattccaaatgatgaggtggcacttttcttctaatgaactgttatgttagatctcttggaactctaaagttctgttactctgactttctttaataagtttgtatgtgctaaggcatcaactctgtttcttattcccctcttacaacatctaacatggttcatcttttatatcattttagccaggcaaattaccatccatatgtgaagtttaatctttgaagggcaacaataagcatgttaaataacagtatctttattagtattttctaacattgtttgcggaccttgaagttaactaataccagtataaattgagtacctcctaggtgcttggcgttgaaagatacaaagctgaatgagaccctgttcctgccctcagagacttcataataatagtctcaaacttgtcataaatcttatttgtactaaatagccattttgtgaataactttatttgataaatctttcaagtggataaaggaacaagagatgtgtttttaactcagaattcttattgaagcaaaaccttgctcaccatcattaaaataagagcaaagactttctaaaaagaatttttcaaatcaaattacttagggagggagttcattttaattttctaacatttcctctaaactgattattaaagtcatactatgaaattcgtgaacaccagctattttctaaggaatatagttcttaaaatatagttttgagcttggccttgatctcccatttatttcagcaagtgtcatggtgtgtctaaggatgtaaagatgaatatgatgttgccgttcaatagctcctgtcagaccctccctggagtttcagtttggccaaacaactctctcaagcacttctgaaatcctatttcttttacagaattcacaccgtgacaacttcaccatgtttcttaaattctaataaataaaatatgtcacattcgaaatccatacattttcttgttatataaaaactctacatgtttagtgttacttaaaactgttttcacatcctttggtgctatttgcattactttagtaaaatagatagaagatagtttgttaacctgatgttaaaatttacacttatgtactacatgagtaaggtaattagaaaatctataaaactcttttaaattcatcatatttcttgaaagaattttttttttttt

SEQ ID NO: 1121 - DNA, 1025 bp, Homo sapiens
ctgtccagagtgctgcgaacagacataggagaaaggaagcacagaatatgattggataatagtaatagaaatagaaaatactaattttggaaatcagcaagtatttactggaagggtagtatagcatgataagactatgactcaaacagatgtgagattgaatcccaacaatgacaccttggacaaagtgtttaatcaccctgagtctcaatttattaatctctacaattattcttactttattttaagattctttcgagtatttgttgtagaatgcacagcttagttaatggaatttttgaacatacactaagccttgacacagaagtatgagaaagatgtaaatggatgtgctgaaatgtgaaacatagaaacattgtcatgtgaccctacagtactgctattttctaaacaggttttctgtaattagactgtctcactcatgtgtaagggttccatgtatcttctgaactaaaatagttaaaaaaaaaaaacctactaattgtgtgtgtttgtagaatctttatcagttaacatattttctttcttcctcagactcatacaaataaatcacttggtgcaaatacccatctttgctctgttatactttcatactcttttcaaaaagaatatatatttattgagatacctgggaggtagtatcatgagagtcacaaagaaaatgttaaataattaagcaaacaggcctttttacctgaagattgaagtgttttattttccaaataattaactttctaattgctgattttcctgaaatactgtcgggagaaaacttgccctgaaccccagtttgtatcagataaattcagtgactattttattttatatttatttattttattattaacttattaattagagatagggtcttgctgtgtcacccagaatggagtgcagtggagtgcagctgggactacaggtgtgcaccaccatacctggctaattttttggatttttttgtagagacgtggtttcgccatgttgcctaggctggtctagaactc

SEQ ID NO: 1122 - DNA, 1722 bp, Homo sapiens
tctgtctttgccattaaaatgtaagcttcctaagaacagaaaccttatatgttttgttggctgctgaaacccatgtgtttagaagagtgcctagcacatatgtaggtgcttaataagtatttgttgaaggaataaacaaaatgaacaaacaaatggataaacttgcttattaaagggaaatttatgcatgcagtttcaatttttaaggggctaagtgaattttttttagatcactctttataggtgatgttcacctgagtgaaaggtattccctttcttcccttcctattggtcactttatctgggagttattttatctagccattggtggtagactttgaacatgtaaaagtctagtaggaggtctgttgcttagaatcttcagggatctgtaaagactacggggttctctgttaagaatgaggttgcatagtttatccagctggccttgggatcagggtttgcttttgctcagtgcccagtcctccagctacactgcaagtttatgggcttaggcaatagctttgtaactgctatttttggttctacccactaggtcaggggctggctatagaccattctcaaaaagacccaaggctttacaaaagctatttaagctgttatttctagcccctaaacaggagcctcagtggagattgtaaccagaagtctaagaatagaattctagaggatccttcagcttaaggtgttgataataacctgaaagtattaaaccaagaagaaggatgctgaaagaaacaataaaactcagaaaatagagtagcaaacgagatttttgagaaacgaaaggagagaaaggcaaggtgaacactgttttgtcagccagaagtgagtcattactgagcacagaattaatgctagtgatatacctgtgttaagatgggaggaagccacatattctagaggaaaatgatgcatgataaacagcttgagtcatcacctctaatgtttaattaaaagtatccagaaggctgtagatctacacagaatctttttactgctttattattatataggcagtgctaccttttctcaaataccagtatattcaataataaaaattgattcattgagtacgtttaaccacattttatgacctttaaaagatgtcttcatagtatgaataggatatgttccaaaagttagtctataaataaattgctggaacatatcctcagcagcttaaatgacaggttttatggtatgttctgggaaactatttatctaactaggtgtgattaaagtgctaataagacataaaccacaataaacattaacagctctttcaaaacttaataattacaaggcaccaaacaaagtgatttgcatacacaatcatacttaatcccccaaacactataaaatatgtattgtctctcttttataatagagggtactaaagaaaaaatattcaatacattgctcagctcacacagcaaggaacaaagttaagatttgaattcagattcaactgactcaaagctcttactctttaccgttatcctagtctacctaggataggtagttgaaatagttgcatgctttatataccaagaagtatacttaggttttctgtagaattcacaccatacattttagcagaactaagggtatgtgatgactgtaaggtagggtcatccacaaaagaagtatggataaattaccataggagcaaaaaaaagtattcataagcaatggctt

SEQ ID NO: 1123 - DNA, 1044 bp, Homo sapiens
tacattctatatgggggcagaagggagcagaaaagcaatatgtatataaattatatagtatattagaaggtgaaaatggtgtaccggaaaatatagcaggaaactactttgatgggagtagagaaagacgtgagaaagcacacatgcaggcatctgagagaagatgctccaggtagagggtgcagcaagtacaaaaaccctgagggcatgacatagctggtatggtcaaggaacagcaaggagggcttggctagagacgagtagaggaaacggggagccaaaacatatagggcttcgactttggtctttactcagagatgaggcgcctttggaaattttgagctgaagagtgacataattttaggctttaacagaatcattctggctgccacgttgaggataggtgttgggtggaagctgactgatctgtttcaaacttattgcaataatgtagtcagtaattcagtcagaagatggcagtggcttggatcagggtaattgtggtaggtaggatggaagtggtcaggtcctgtgggcctgtgggtgttgtttgttttttgtttgtttgttttgttttgttttgttttgtttttttgagacagagtcttgctctgttgcccaggctggagtgcagtggcgcaatctcggctcactgcaagctcctccatctgggtttatgccattctcctgcctcagccacccgagtagcggggactacaggcacccaccaccacacccagctaattttttgtatttttagtagagacagggtttcaccgtgttagccaggatggtctcgatctcctgaccttgtgatctgcccgcctcggcctcccaaagtgctgggattacaggcgtgactgtgggtgtattttagacttaaagccagaaggatttgcttgacagactgtatgtatattggacacaaagaggtcaagaattattgcaaggttttgttttgttttgttttagagacagagtttcactcttccagtccaaggtggagtacaatggcgcaacttcggctcactgcaacctctgcct

SEQ ID NO: 1124 - DNA, 1048 bp, Homo sapiens
ccaccacgtccatctgcaagtttttgacctaagtaactgaaagaatggggagttgtagatagttaaaatggggaatgccagaggaggcaaagatttcagggatggaggtctgggaagtatgtcagttatattagaagcccagttttaaatatgttaagtttgagatgtctcttaaacatttaagtggaggtatccaattttaggatatgcaggtctggacttggattgggggcagggtgaattagataattagagagttgtcagcatatcaaagatatttaaatctgtgagactagataaaccctcaaaggagtaagtatagagaaaaggagaggatcaaggactgatccctgaagtactctagcatagagagttgaggaacgaggcaaggaagatgataacgagtgaggcagtgaggtaaaatggaaactaagagtatggcctggaagtcaagtgaacatgtgtgaaagtgggagagaatggtcactgcctaggtcaagtgagaggactacgaattgaccattggatttaggaacattaaagtcattgctaaccttgacgagtagttttggtgaaacagtaggcgcaaagtaatgtttgtaatataagagactcggaggagaggaattgtgaccgtaagaatacgtaaatctttcaaggggttttggtgtaaaggggaacagaggaatgaggcagtagtcggaggagaaagtggggtctagcaattttttgcttgttttttaagataggagaaataagggcatgtttgtaagctgatgggaatgatacactaggtggagaaaatatgataatgtgggagggaaagggaagaattgctagagtgataccctagagaggcaaaaaaggatgagattttgtgcacatatggaggaattagcatcaggagcatagacagctcattaaagagtttcctggccaggcgcagtggctcatgcctgtaatcccagcactttgggagatcaaggtgggcagatcacttgagctcaggagtttgagattagcctggtcaatatggtgaaacgctgtc

SEQ ID NO: 1125 - DNA, 1061 bp, Homo sapiens
gttttcaagggctcatggaatcagtcttccatgtgacagctttttaaatattttaagacaaaaactgagtcttctaatcttaattgtgttctagcagtagtcattgtaattatagttatttttataatttatttgtttagtgtatatctgtcactctagaatgtaggctccctgagataaaaactataattcttttgatggcagttacattcccaactcttagcacaagatctaggacatagtatgaactcaataaatttttgttgaatgaaagaaaaatgcaaatttataagccttttcagagacctactgaatcaaactctgagagtggagcccagcaatctgttgtaaaagctgtttgagtaatactgttgcactctaagcttgagaaccactgcaatagaactaagagaacattcatttcaccttcaggcctattctctgacatcacttgaaaaatcctctctgccttctgtaacccttaaccaacaacagtgccctgtccatgtaggggaaacttctgggctgtattacaagtgggtaggaaggtataaggatatcatagtgggaagtattgcttagaatgccagtacttgtttgctgtggaaggtttctaggaatggattgcttagtctaaagtaagcactaccaccatccacgttttcactcaacacagtgccttttaattggtgactaacatcaaaacaccttgacaaaccgttaaaacagtatcagaaaccatgtgtacatccctgtgcctcttagattgctaagttctgctctcattcttacttcaaaggacactttttaaagaattgttaatgcttttttataatacaagtcatagccctgttggcaaaaagaaaaaagattcagtgagaaagaaaaatcactgataattccatcatccagggagaaccactgttatttaagtatatggccttccagacttttctgtgcatttatagatatttttaatgggatcaaagtgtacatactgttttgtaactttttttcactcaacaataccatgactgtcttgctgtgtcaagtatatttct

SEQ ID NO: 1126 - DNA, 1023 bp, Homo sapiens
tccaagtttacccaattgaatgtcgtcttgattgagctctgtggcagaggaaaccaaccgtaaaccgaaccaagagcgaagcgcaggggctcttccgtccaataagcggacccgaacggggggaggggcggggcttctggttgccgagcagcgtacgcggatgcgtgcgcgtggtggcggagggggatgggcgggggcggggatgagggcggcgcagccgcagcgccggtggaggggcgcgcggccgcgagcaaaggagggagggaaggaaggaagagagggaggcgggcaagcaggcgggcgcgggggtcggggactgaggcagtagagggaggcgagagcccggcagccgcttcgcgctgtttgctgcgcgggcttttggagggggcggccgtttagtcggctgaggagaagcggacaccagcggcgttggtgatagcgcctgggggagggggactggagaggcgagaaggggggtcgctgcggtggttctctcgctgtcgctctctctttgcctcgctcccggctcggcgggctcctcccggcgtctctctcgcctccggggtcccgctccccgccccccgcggtatgtcttgatcccgagcagcgggtttcatggggctcctcaggattatgatgccgcccaagttgcagctgctggcggtggtggccttcgcggtggcgatgctcttcttggaaaaccagatccagaaactggaggagtcccgctcgaagctaggtgaggaactgaactgccccgggctgagtgctgtggaaggggccgaggaggcgctgccgccggagcaagtgggcgttcatctaacctggggtctggctcgggggctgaaagcggtttcaaagagaaccgggaacaaggggcagcgagagcacgagctccaagaatgggttgaattaagcttgagcggcgtgctgggctcgcgaggtcacggggcagaggttgcaaggttgggcttccctagccaaagggtagccccgaagtaggcattccgcggagagagagcg

SEQ ID NO: 1127 - DNA, 1030 bp, Homo sapiens
atagtttattacatttggctctttaaaccatttgtatgtttacagagatttatcatgattttctcagtaaatcattttttccaactgtatgttaacattccttcttttaatcacatactaagttttcatatgttcttggatcaattttggatgctattttccattaatcagagattctttaaacctcggggacccataaataggcttcaaggtatcagtgaattccctgaaattatatacataactttcatcagatttgcaaaggagtatgtgattcctttaatggcaaggatcacagatttatagtagatgtttcatatttagtggacttttttttgtttttagtaacataacgtgcagattgtgagttaaatttaggagataagcttattacctgtgaaaaagagaagtttttcaacttcaaatgaagttaatacttcattgtattaaaatgtagacttaattttctagtgagaaatggaaaaggacagggaatccaaatgaaaactatttaactgtgactcgttactataaaatgtcagaatttgtggctggtaaaaagtagttcttcccgaatttcaagagcgcacttgttgctaatattgactggtcgaacagtgcagtgaaatattttctcacataagtgatagaactatgtgcttggtaactttattttctatagggttttagcattgtaaataatatttgttgactgtattcttacatctctatatggatttatgagcacattaggaataatcttttacatggggaaaataattgagaatggattatgtaatcatccattggtgagaattaatgttagtcattatgttcttaaaactctactagactaaacaactaattccagggccaaggttgagactgctttttggaatttggtagtttttacaagtaagttcctgaaaccatgcagcaatacctgtaagatgttccagagaatgctagatttcctcacttctgaaatcatttggaaaacctcatagtagctactgttttgaggactttg

SEQ ID NO: 1128 - DNA, 1034 bp, Homo sapiens
aactttgatgctctgtttcccttttaaaattgaatgcctttaatggcacccaagtcatctcttgaatgctttgctgcttagaaatttctttcaccagaaaccctaaatcatctctctcaagttcaaagttccacagatctctagggcaggggcaaaatgctgccagtctcttttctaaaacataacaagagccacctttgctccagttcccaacaaattccttgtctccatctgagaccaccttagactggaccttattgttcatatcactatcagcaattcagcaagtctctaggaagttcccaaactttcccacattttcctgtcttgttctgagccctcaaaactgttctaacctctgcctattacccagtcccaaagtagcttccacatttttgggtatcttttcagcaatgccccactctatgataccagtttactgttttagtccgttttcatgctgctgataaagacatgcccaagacaacaattaactaaaagacgtttaatagttctacatggctggggaaacctcacaatcatggtggaaagcaaggaggggtaagtcacatcttatgtgatggtggcaggcaaaaaatgagaaagcttgttcaggggaacgcctctttttaaaaccatcagatctcatgagacttattcactatcatgagaacagaatgggaaagacttgcccccatgattcaattacctcctaccagttccctcctgcaacacatgtgaattcaacatgagatttgggtggggacacagccaaaccatatcacatgcttttcctaattttttttgaacaagtggaatattgttataataactctttctggtgctgttgtctactaattctatcatctgggtcatttcttggttgctttctattgatttgcttttctctacattatgggccatattttcttctttacgtgtctggtaatttttaactggatggcagacattattttaccttgctaggtcctggatatttccatattcctataaatactttcaaactttgtttt

SEQ ID NO: 1129 - DNA, 1411 bp, Homo sapiens
tgtattttaatagatagtttctgcatttttaaaaataaaatagaagaaaacattcatcattgtcttctaggacataaatttcttattttccttcctactttgaaggttaaaacaaaaaagcaaacaaagttgtgtgatgatattttagtgtcttgaaatggatttctcagccattaaaataagggatatgtatgacttttgcacctcacctgggatttgtcagtgatactctctgacttgatatgtaccttttcaggtttgtcttatagataagatgccatcgtgtgccctttttcttttaccctaggttggaactttgtgtttaattagtaagccatcatgacctctgaaccttcatttagacaataactaacagttatggagtacttactgtgtgtttataagtgttttatgtgtatagtttcatttaatgtaaatgatacttgtttttgctttcttcagagaattgctgtgaagttaaatgatgttcaaatgagataatgaatgtttgtacaaacactgtagttataaattgttattaataatgacaataatatctaactactttctctttgccattgttgtctttaaggtttaatatagtctacagcctacattttttggtgctgtagtttttcccagtgcctcatctcataggatgacacttgtctgataagtcctcagataaatcacatgatgttacatgagttatagatttgacattcagattagctttttattctttccttccctaggaagaagtaataatcactggcaattcatattgttatttgcctccttaaagtagaaatctatttgttttcatataaattctagaaaagctatggctttttgatgttactggactctcttcactctttcctattaatacctgtgaaattgacaatttaaagatagatttataaaatgcaaattaaatttaaattgtgatggagtttttgcatgtgtatatgtatgtgtttatgtgcgtatacatatataaaataactctttggcctctaaatttttaaaggattaatgatagtcaaattaatgaaagaagaaagaacctaagcctatttctccattttagaaaaagttttgtgtgatagttgctttattatattgtcagttttcccatggtgattcattgtcatatctcaaatagaggaatatgttctgtatcctttatttaaattaggaaagttcagtttttcttacctttttcactcaaatacagaacagtataggctgtacattaatatttattgccaagattttgaggatgactttagaaaagacaaaattcttgaatcttacacagcttcaaacactattaactcaggtaaatagttacttgccattctacaatcagaaattttggtagactgaaatggtggactatgagagg

SEQ ID NO: 1130 - DNA, 1035 bp, Homo sapiens
aggagcttgagaccagcctggccaacatggtgaaaccccgtctctactaaaaaaaaaaaaaaaaaaaaaattagccgggcatggtgttgcatgcctgtagtcccagctacttggtaggctgaggcaggacaatcgcttgaacccgggaggtggaggttgcagtaagctgagatcacgctactgcactccagcctgggcaacagagcaagactctgtctccaaaaaaaaacaaaaagaatggagtgaattaatttcataaagaaaattcaggttaaacactatttgcaaactgatattcccgaatttaaatagacttatcaaaattgtatgtttatattttaaaggatcaaaatactgagcctgcaccttcctccctccttccttccagaggtattaattaagtatagcccctattgagaacctaaatatgtcaaaatttacctaggtggatatggaattaagtgtgggaatacaaggaaattaatattttatatttaaatatgaaggacaatgtatagttagctttttgaagaacatcaaatattaacttttctatcatgcaagttgtatgcattctttcttatttgtgataactttaagatgatgtcaaagtttcactgtgacttaagagtgagtaaattataaaacagtagaatcatttatttgaaagaggccttggttttactcagcttccttcccattgtgggaatgccttcctctcctacattttttcagcatcttatttgggagaaaaggtttaattttttattcctagctgcagtctttaacagttttcttaaaatatttattcttttcagattgcctttccttctaccttatatatatataaaatccctttctaatctgagctaatcagtctttttttttcttttttttctggtagctatattgatttctttaggtacctttatcttctgcattggcattcgttggtaccttctcttccacctgtcctactcttatttcagtaatttagatgaggtaaaatttgtaaaaatcacacttgcgcttaca

SEQ ID NO: 1131 - DNA, 1067 bp, Homo sapiens
ttctatatgggaatggtggaattttctagacttgattaaagtactgttgtttaattttttaatgagaaccttctttcccaatacttacaatgtcagtactttcaattaagttgctgtgaataattcctcctgcccattttttcttcagctttttaatttttccaagttgagttttgaatttttgatctcttttgacagcctttttttctttttggctaggactctctacataacttttttgatagttatggaaaacagtgggatagatgttcagatgttataacttctcttttttggctgggatggggtggatgagtaaaaagaaaaaatcaataagtcagtgaatgttggcaggtgttcagagattttttctgtgtgtcattcaccgtggcacagttaagtaactgcttatgattaagtttttcacagtctcagaaaataaggagtttcaaataataatgtgggtaactgattagtatccaactagtagtggtgttggatggattaattgattcttagagagtctaggaaatgtcagaacagtatacattcaaactgctattacgacaaagtaaaagttaccttgaaaaataagtaattcaactggtagaagaaactttaagggacagactagatttggttttctatatggtctttcattctgaatactaattagtacttgaacatatataaagctcaagtgttgttttttttagaaatacagttgtgaagtggttatgcaaataaattcaatttaaatttcttgtcatgtaaaatgtgtagaaggacttactgaggttactttcagtcttgtttttttctcagatagcgatgaaccattttcatcattattgtttggacttttattatatttaaggacaggagttaaatataagtcctgaagaaaaacaaatgtttcatatcacacttactttagagtaaagcttagttgtagctgtgtacaataatcagttgtaaaaaggtgtttccattcttccattgtccttttggcttatttctcttgtcttattcaatttgctgtggatttgtttttgtagtgggaaaat

SEQ ID NO: 1132 - DNA, 1049 bp, Homo sapiens
tggtacagtggctcatgcctataatgccagcattttgggaggccaaggtgggaggactgtgtgaggtcaggagttcaaaagttcaagaccagcctggacaacaaagtgagattccccgtctctacaaaaaattaaaaaattagccaggcatggtggtgtgtgcctatagacccagttactcaggagactgaggtgagaagataatttgagtccaggaggtaaagtctgcagtgagctatggtctcgccactgcattccagcctgggcaacagagcaagtccctattaaaaaagaaaaacagaaacctgaaacagatgatcaaagttgcatgtataaacgttattaaaaaagattcatcatttgaatatttagttactatttactaaagctgcatgtttaagagtttctttaggtgacttcacatatattattgtcatattcattaggctatggtaggaagtccagttagatttaaactgatacttgttctactcagaataatttatgtcacctgaagagaggctgatggctatattcttatttcagcatatttggatatgggaaaattaattaaactaaaattctcatatgactttggaaatgactattgaaaacacactggcgactgggcacagtggcttacacctgtaatcctagctagccctttgggaggctggggcagtaggattgcttaggcaaggagttcaagaccagcctgggcaacatagcaagaccccatctctacaaaatatacaaaaatttaccatgtgtggtggcatgtgcttgtggtcccagctacttgaggggctgaggtgtcaggatcacttgagcctgggaggtgcagtcgggtgagatggtgccactgcactccagcatgggtgacagaacaagaccctgtctcaaaaaaagaaaaaacacattgggaagtagaaaagctactcatgagccatctaagtgacatgtagtccaaacatctgtaatatgctgtagaactggaacaaaatgatattaaggataattttagaagcatcttcgtgaatagttactga

SEQ ID NO: 1133 - DNA, 1050 bp, Homo sapiens
taaaagtgctaaaggaatgctgaagagggtggaacaacagcataaacatttttgagagggtggaatagagaacataaacatttttggagttctaaatctaaataaaattatttcagaaataatgaaaatattttgtattatttctgaggaaaatcagctttttggggggtactttttctgcagcactgtttagctatttttggcaaatgaaaaaggtattggggtagagacagagatttcctatttgaagttgaggcaatgaataactcctttcccctactccaatctccttaagaagaaataagcttttcttcattgataaggtaaagttagttttatactgtttatttaaaacaccaccaccaccagcatctcaactcttcccccaaattagctttgtgtctgaactctactttagtcaatgattcctttatatttttatatctcttaggcttgaaaactaggagtcatccttgattttttttccccccttatctacaatcatcagactttctggctctgtctccttggggcttgctttaagctttacccttcataacaaacatgatatgttagtagtttctttcagctttaaaatattatgacctttaagatctaaaattaaatgttgaaatgtaaaatttaaaggcttattgaaagaatgttaataacttttaaaaaaagtattggtttaagattagattctcctaactaaaaggatcctaaaaattaagagtaagatatttagaactttgtactaagtgtaaagtcttagtattacaaataaatcattgggtatttattattatttaaatgtctgatactgagctttgcatcttattatggagaaaaactttggattccaattgaaacgagaagaaattattgttatatcttaaccagcgtctaggcaacttggacccttcagatactgacactgagagaacttaatcccaaaataaataaaaattttgaattaacattctttttagtccgggtgcagtgccccacgcctttaatcccagcactttggaggctgaggttgaggct

SEQ ID NO: 1134 - DNA, 1381 bp, Homo sapiens
gagtagctggaattataggtgtgcaccaccatgcccggctcatttttgtatttttagtagagatggggtttcaccatgttgaccaggctggtctcgaactcctgacctcaagtgatccaccaccttggtctcccatagtgctgggattacaggcgtgagccactgtgccctgccaaaattgacatgcttttctgaatggtgtcttgctatttaggaaattttatttttaatggtaaaagcatatttgcttgaagaaaatgctgtggtgtgcctttttctctactaaactatccccgttcctaaatctgcatagaaccatgaaaaatattatttttaacttcctaggcctttttgcttatgttcattaagtcaactcaaattgtcatgaagcaactcctgggtatactagatactccgctgtttttaccccacttccattgtacgtttagcttcaaacataagattcattcctttggcctatttctaatttgcaacctgctgtattctactttctatgaaactagtgtgtattatctcttatatccctctaaattttcttgacggttaatagtatgtttccctttgatcaccaccagcaagcttcgggggtcagactgactctgaaagtagcagatatttgaagttctcttgaaggaacatgggattttattaaggattttaagaatggataggaatttgatgaggaaaattcatgcagagaggatggcatgatctaaggtgtgaaaatggagtgctcaacataagagatgtgatatggtagaaatatagaatattattgggatatagtaggggatatcattgggaagatggagaaaagatcatcgaaatgagtttctggtcgtttagtaatgtctgtcatttattgaatgcttactgcatatccaactgtgttaggctctttatgaaaaatctaatttaattatgacaacagttttgtgtggcagatattattctctgaagaaattgggatttagacagactaaataggttataagactcatggagctaataaattagatttgattccgcatctcttttaaaatatgctgccatcataagcctctttaattaatctgctttgcagtgatctctagattctattcaagaagaaatttgcgacaatcttgaacttgtacttatagactaggtgattactttaacagggaagaaccatgattatgaatatgccaggcatcggaagaacttcaaatataaatctactacaggaatatgaactgatggcctgaaaaagactgcatttattttggataacaaaataatttcttggccaggtgcagtggctcatgcctgtaatctcagcactttggaagggcgaggcaggtggatggattgagcccag

SEQ ID NO: 1135 - DNA, 1064 bp, Homo sapiens
ctctttacactttgagtaacatgttcttgctagttgaatttaaggagttagtagcatatattcagtaattgcaaaacagaccttctttcctcacccctgaatctttggacagtaaaaatacattatataacattgaaatcattcacaatttagtggtttgaaattccagatggtaatgccatgaaaagacctgtcatattttgtaccttatattatgaagagggttatattaatcacaattagcaagtgagttgtgggcttcaagttgtcaagtgaatttttaggtaatgaacaagtttctagacatttatagtctaagtttcaggacatttatagtctaagtttcttgaataaattttgtcattttaaagagcaaggataaatgattgaaaaagaatttctgaatttaaatttttacatgaattatttaatttgacaatttaattcttacatgggtaagtaatgttaatcatcccattttacagaggaagaaacatgactctcataggacaaatggcccatcacatgtttagcaagtgatggaaaccagatttaaactccagcagtcttatgcttaaccactttgctgtgattctcaaaatgtgtagaataaacacaattgcaacatgtgatgtctcagctctctcctaagactgaattgctaaggtctctgctcttttattttacttctctttttacttcctaatccccagtttttgcttgttttaataataaaatctagaggaaatagaactgctacagttaaatatacttggattgaaagaccagatcttttatttattcatagctacatgacaagttacttcatttgagctcacttaaaaaaaaatgtaataatgtactaataagggagttaaaaacataatgttttgttgtgaatagtacacaggtataatttttaaagtattgaaatcattacctggaagatattagaggtttttttagattttttttttttttttttgagatggagtttcattctagtcatccaggctggagtgcaatggtgtgctctcagctcactgcaaactctgcctcccggg

SEQ ID NO: 1136 - DNA, 1090 bp, Homo sapiens
tgaagcaaaatagcgcataggtagaccacgaatatagtaaattgatccttgacaaaggagcagagacaaggaaaaacggtaattttttccacaagtggcactggaataacaggatatctcattcccctccacgccaccaaaaaaaaaaaaaaaaagaatcttgacacagactttatacttttcacaaaaactacctcagagtgaattgtagcctttaatgttaagcacaaaaatgtaaaactcctagaagataataaaggagaaaatctggtgaccttaggtttggtgataactttttagacaaaacaccaaaagcatactccatgaaagaaagacgttgttaagttggacttcgttaaaataaaatatgtacgttttgtgaaagttactgtttagggactaaagagataagtcacagactgggagaaaatctttggaaaatacatacctgaaaaagaactggcatccaaaaatattcagagaacccttataactcaataataaatgaacaacacaattaaatggacaaaaaaatctgaacctccttggagaagatatacagatggcaagcaagcatttcaaaagatgtttccacatatcattagagaacatgcaaatttaaaccacagtgagatactatacacctattagagtgatgaaaattccagacactgacaataccacatgctggtgagtatgtggagtaatgggaattctcattcattgctggtgggaatgcaaaataataaccttcaaaagacacttgggcagtttctttaaaagctaaacatattcttaccatatgatccagcagtcatgttccttggtgtttatccaaatgaactgaaaactttaagtccacataaaaatctgccgatacatgtttgtagcaactttatttgtaattgcccaaacttggaagcaaccaagatgtccttcagtaggttaatggataaacaaactgtggtacatccagacgatgcaatattatctagccataaaaagaaatgagttatcaggccatgaaaagacatgcacagagtctatttaataaaaaaaaaaaaatctacttggagattgaggttacagt

SEQ ID NO: 1137 - DNA, 1049 bp, Homo sapiens
aattccacccaaatgtggaattctcaacaaggcattgatcaaaaattggctaatcaaattaatgatttaagacagtctgttatttggcttggagattgggtagtgagtctcgaacattacatgcaaatgcagtgcgattggaatacttcggatttctgtatcaccccgtattcctataacgagactgatcattcatgggaaacggtcaaagacaccttctgggcatgtgatcttaatggtaagagtttcactactcagtcctccctttctttctggtgcggaggcagacacccttaaaaatggagatttcctttatagatgtagatttcttttataaacatgtttcaaaatagccagctaaaagacagaaaggtgtattttagagaccaatttagttcagtagacagtctttataacttagctatggttttttaactaaaatgactgagcttagggctaagcccattaactaatagggcaaagaaagtattctctctacctggactccacaaggatagctcttataaagaagcaagcctattttacctgagggcttaccttctattagcaaacactttatccacctttattttcacattcaggacagtatagtaatttagccaaaagatttgcagattcaatttttttaaatcaactagttccttaagctttttatttgctttttataaagaggctttcaaaagaagcaataaaaatattgcaacatttttagaagcttctgcacatcaataggcatccttgggtcagccaaattcaggagaacttatttatttattattatactttaagttctgggatacatgtgcagaacatacaggttcgttacataggtatacacgtgccatggtggtttgcagcacccatcaacctgtcatctacattaggtatttctcctaatgctatcccttgcctagccccctagcccccagcaggccccagtgtgtgatattcccctccctgtgtccatgtgttctcattgttcagcttccacctatgagtgagaacatgtgatgtttggttttctgttt

SEQ ID NO: 1138 - DNA, 1038 bp, Homo sapiens
ccacagataatgcagttttatacattttattttcaatgctttttagtgggtgtatgtgtatgctatgtagagaaattagatgaagtttctcttaacttcattatgggcaacaaaattccttggctttgttacagtttactaggccccatagtgaaaacacctctgagtgtaggccaattctagaatacaaaattacttgtgatcagagctgtaatatgagattgaaatttgttacacaaagaggttactatcctttttttgaggataattaaacaatttgtttctttaaaacaaattaatagtgattgtttcaggatagtataaagtacaatttaatctttaacagtgagagaggctttgtagtggggtctcagtggttaagtccaattctgggacaagtaaaaatgttttagggtcttattacagaatgaaaactatattgtttcttaaggaatttaatgaactaaaaaacatttttgcttaacactcttgatttgtagtacatcgaccaagtatcttcatttaacagaaagtacatacttttgttaaataatgaagttttctggaaatctgttaactaagggtacttagagtaggaatgtgaatatttcaaatttcaaatcatccttttcttatgacaaaactctttttgtggcattacactgctttagaataaagttcattaatgcttgcttaaaaaaacataaggggtactgtatgtgtcaaaaataaaaagttggaacttcataaaattataggatttttttcttcctttcccacctctactgttttgtcattgctctttgagatgaaagagtctaaacctgtatgtttatttaactgttggatttcttgtttctcaattaggaaatgaaagcaaaaatctacacttgattttataattgacctatttgttttcaaaagtatgcacataaatgtcaaaatttaagtctaatgtaagctatttaccctaagcattaacatatctgtgtaaaaatggttacccatattgcatgtttaattaccttggtgtttaag

SEQ ID NO: 1139 - DNA, 1061 bp, Homo sapiens
cacttttatgcttcctattctagtacatgcagtgctgaaatgaatgggaaaaaccactttcccacatgaatgctctactgcacttttatctcaaaaggagcattgtatttcttgagtttccaaaggattttagataccattcttaatttaattattttatggccctttctctttaggtctgtattagtttgtgagggctgccataacaaagtatgacagactggatggcttaaacatctgacagttttggaggctaggagtttgagatcaaggagatcaaggtgttggcagggttgatttatttgaggccccttcccttggcttgtagatcatcttctcactgtgtcttcacatagtctctgtgcatgtctgtgttttaatctcctctcctgtgaggacataattacctctttaaagaccttgtctttaaatacagttacattcagaggtactgggggttaagacttcaacatatgaattgggggtcagggaaacaattcaggacataacaagatctttagccctcatctaaatgaaccatgaccataaacagttctgagcctcattctataggtacatcagttttcttctctacctttggttatcaaattccttagtaccccagctactcctcttttcccatttaagatgacctttctcctattccagacattggctgggaagttagtcaagaggtaacttaaggaatttagtgcagggtgtctaccttaagattttcactgatttgccttaaatcatgttcttccattacatataaaaaaaattaccagcaggccttgtccttcaggtgtgtttctcactcccagaatacatgttgactccacttgtccttcaggtgtgtttctcactcccagaatatattttgaatttgtaagaagtacgcagtttagaccttgttcagaatccatacagtattcattagttcccccctctagtcaatatttgtaggccctacaaacattccatgttcttccataaatcccttcttgagataataaagaagtatagccttttaaaccagctactcagcttgcttgtca

SEQ ID NO: 1140 - DNA, 1025 bp, Homo sapiens
gtgatccaccagcctcggcctcccagagtgctgggattacaggcgtgagccaccgcccccggccttaaagtggtaaattttttagtttgcataatactttgacttttgttgacttaaaattccttatagtgaataacagtataccaccacagtgagcaatgatgagcttaatgagggacaggaatggaaaaattacagttttactggtttagaagttcagacacagtagctaacatattgtctaatgagtaatattttgcaaatattgaggattattaatttttaaatataaagatgtagtaatagttctttggtaagtctaaaaaataagtagaccatctacccttttatttgtttcaaagtgtcaaaacaaaaatagaatcaatggtgagaatggctttgatgaaataccagtgaggaaggtcacagtaaattattatttcatgacaaacaaaaatgtaaattcttttacattgcaaatataatattacaagagaatagcaaatttacagtatacacttggagaatcattctaaagcagttgaagtctccccaacaccacacttcaattttttgtgatctgtggtctccagagtaactattataagtggttttcccagattctggaggggagaaaataaattaacaatggattgataactttattgttcaagctatagtaattcttttcactgtgagattttacataattcactaaaattacccttgttttgtaaatatggaaccattcaacgaactacttttgaaaatgcaaatattgtactctagctagtacaatgagctctaggaaatcagaatcacattttgaaagaatcttgaggtttcaaagcctttcaaattctctcagttgagaaactgttacagtgtaaagtatatgtacgaagctttcccttttaaaagacaataaaaaatagttttgaattgaagagtaataggattagtaatctttataaaattaaagagccagatatgcccattgttttcagctaaataatggttcctta

SEQ ID NO: 1141 - DNA, 1057 bp, Homo sapiens
ggccacatcttaaatgctttgctgcttagaaatttattctgccagatgtcctaagtcatcacttttgtgtgtgtgtgtgtgttttttgtttttttttttttttttttttttttttttgaggcagtctcactctgtcagccaggctggagtgcagtggcacgatctcggttcactgcaacctccgcctcccgggctcaggcaattctcctgcctcagcctcctgagtagctgggattacaggcgtgtgccaccatgcccagctaatttttgtatttttagtaaagatggggtttcgctatgttggccaggctggtctcgaactccagacctcaggtaatccgcctgtctcggcctcccaaagtgctgggattacaggtgtgagccaccgcacccgaccagtcatcactctaagttcaaacttccatagatctctagaacttggacaccacatagccaagttctttgctaaggcataacacaggtgacctttactccagttctcagtaacttcttcatttccctctgagacctcatcagcctggacttctgtccatatttctgtcagcatttttatcacaatcattaaaccagtctcgacttaagaaatttcaaagtttccctcttcttcctgtcttcttctgagcccttcaaattcttccaaccgctgcccattacccagttccaaagccactttcccattttcaggtatctttatagcaacacccaactccttagtaccaattttctctattaggccattcttacattactgtgaaggaatacctgagatggtaatttataatgaaaaaaggtttacttggctcatggttctgcaggctgtgcaagcatggcaccaacatctgtttggcttatgatgcaggcctcaggaagcttacaatcatggcagaaagtgaagtgcgagcaggcacatcatatggcaagagtgggagaaagagagtgaagggggaggacccagtcgtttattattattattattattatttttgagacaaagttttgctcttgtcgcccaggctggagtgcaatggtgtgatct

SEQ ID NO: 1142 - DNA, 1040 bp, Homo sapiens
ctaaatacaatttcagaaaaggttctgatactcttgtttttgataaagcattttttcaactaaccatgaattaagatgagtccatttgcctcttctgccttcactgagggtttgggttatacacctctactgaattgtgttaataactgtttggcagtgtgtactttgtttttgtgagtcatgtctcatgaaatttattggaatgtttaatcatatttgctaagaaatgtttctgctgtagttggatttgcccatatttatgtaggtggttttaattttttaaatggtgattagtgttaaaaatcaatttaaatcatgactaatatggtaaaaagataaagcatcaaagcagtatttctcattcctgcctcctcaatatctaatactgggaagatacttcaaagaatattgagattgtctgaagttttagttaagattttcacacattaatatcaaaaaagtaagtttagtatttgtttctccatgggttatttgtaaagctgtaaactgagatatcggtgactccgtattatgactccattagtgagctgtggtatgggtaggattttcctacttcttctgtacttttacctgtagactatttttactaaggtgctttataatgtgttttaaagcattgcatttacaaaacaaggaaaatgctgtaaatattgcatattttatgtatttggaccaaaaggttacaagtaattagacaaaagtggttttgcaccaattttatgtcaagtaaaaccatcagacctactgttcttgtatttctcatttaactttactgttaagacatcactgaaatgaacttcagtaagctttcaattttgatacacagttcattattcataacttgaggcagtaattacagtggaatgagtactggacaaggagtcaaaaaacttgatttcaggtcctagctctagcacttacagctgtgtgatcttgggcaagtcacttaacctctctttgcctcaatttcctcatcttgaaatgaggataataatacctgctgtacctacctcacaggg

SEQ ID NO: 1143 - DNA, 1029 bp, Homo sapiens
tctcagggttttgttacagcttaattggtgcagttcttattctggtttattgtgcggtcactggacacacgttccgggactctttcggaggaaatgtgtttaaaatcggcctatttaaggaacccgagtccttgtttcgttccttcctcgttttttttgcagcagccaagttgggccgggtacaggcaaagttcgccttcttctgaggtatcagctgaatgtcttgagcagatagccgggagcctcagggggagcccacactctcagcttacagaggacaaagacaatacaggctgcttaattggcagtaaataacttgatctttttacagaataagtgactagaggaacactaggactttattggactcgggattgaaggcaacaaattaatcggtttaggctaagctttataaattgattcctatattatatcccagttgcatctcttgtggcattcattagagtggggaattcttttttaaagcagtttttggtgacagcaggacgggctcgaatttaacttgtgcatcccttaatggtgccttctcgcacattatctgtaacgccgcccgccccccccccccccccgccctttggaggaacaaagctttagcatttaaattgctgatcaagggcagattagtgagaccaaagtggagagtgtttgtataggaagttaacaggcatcctaaagttcaatgatctattattcttgcctgtgtcctgaaaacccagagaaaacactcattgatcttcaaaatgaaatgagatttggaacaataatgggagatggcggtcaccacaatggcatgtgaaaggtgctgcttaaaatacgaaaaaccagtttcgcaactttacacactgcacccacccctcccgtcaccttgccttccctcccatcaccacgctctccgtctcccgtctgccggtccctccctcgttccctttcggaaaaccgaactatttccaacttgtgaactgcagctgcacttcccggggcagaacccgggagggaacgaggctccgg

SEQ ID NO: 1144 - DNA, 1068 bp, Homo sapiens
taaactccagtcatgaattgtatcttttttttttttatgatgaacctagtaatctgataaaatgtgtgtagaacagaattgtatttgctagaggtgtaagtcaatattttgattaaatctggggcatcctctgcggtaggcagaagtttgttgtcccacaaaaaggatttttcccagattatgtaaatcactcagaaaatctgaggcttgagcctaagaattcagcctgtcaaatgcattccaaagggatgcccagagtctgggggtgtttttctttctttttctttggtttaggattattcactggtgtcaaccgttattctttgtttcaggttatttggaaatagcggtgcttgcagcgcttgcggacagtcgattcctgcgagtgaactcgtcatgagggcgcaaggcaatgtgtatcatcttaaggtagtatttgcatctctcttttttttttaaaaaaaaaatcatacctttcctacctacatgggggcaaagcatttctccttggtatgaactgttttctcaagctgcagacacttgaaggaatgattgaaattgtagcatggcagtgatggttacacatccacatgcacagaccacgcttcccctatgccacagacagaagtacacatgtatttggatttgtccccatttagcctggtccagttgatagcaatttggcttactgttttctggagatctgtcaaaggaagaaaaaacgctaaaccctaagtgtctctgtacttgacagatacctgcttaataacaggttataaacttgtgaccaaaaaaagacttaatttttaccttgttttcagtgggtttgtttttccctttcagtgttttacatgctctacctgccggaatcgcctggtcccgggagatcggtttcactacatcaatggcagtttattttgtgaacatgatagacctacagctctcatcaatggccatttgaattcacttcagagcaatccactactgccagaccagaaggtgaatacccagcaattactaataagctttattagagcaagttggaaggttcaacctcttaacctagca

SEQ ID NO: 1145 - DNA, 1081 bp, Homo sapiens
ttataatagggagccagccccccctttttttgtatattggccattgaataatattattttataaaacatcttagcgcaatgtgtccttaatttttcttagcctcagttttgtcatctgtgaattgcaaaagacaagctgactctcaatatttcacaatgagatcatgtatatgggaagactttgtaaactctaaagctttatacaaatgtagaaaggcacatgttgcagaaagaggccccagccccaagtgataactggtgcactgaaatccaatttcatttccacattcgtccttccttggcaaatgtcacagctttgtgtaatttgtaaagtcttcattattagctaactgtgttgtcctgtgcagacaggctgtgaggcagaaaccagattacagtacttacctttgtgctactgccctcttggggagtctggcacgtagtaggggctcaacaaatgcgtgctgaattgaactgaattgtgcagagggtgtgaggacttggagtgaacaaaacaactgaatgcaagatcagccactagcttggttgaccctctccagggaggcggtgttccaggacactgccttgagacaggtcacttgaggactagggaaaggacccagccattctctatagcagggcagagtgctcagagcaattgtgatgggtgggttgttgcaatctgtccccttttctctcctgtccgccgaggggagaagttgttctcctgggtagctttccttctgatgctttctctcaccttcccttccatcttttaccacttggaggaaggagaaatgctgagcctttacttatttgttgcttataggctttttcttactctgagaaagcttagattctttggggaaatagcatggattccctagctctcttctttagggaatgcacaggagctagaaaaggcgatctccagattatgtcacatggtgagggtagggaagaaaggagaaaggatggcattttggggaaatacgtcagcacacagttttgggaggaagatttgcttactcaatttgtctttaaaccaaagcatctgttttggtcattaaagtaaaacatc

SEQ ID NO: 1146 - DNA, 1050 bp, Homo sapiens
gcttaagcagaaattggattttttgaaaagctatggggttgtatcacttaagggtaagatgtatagccagatcccatgagtactaaacaggaaactggatgttttctttctagggctacatgttctcttttctttaagtatgtgtactgctttatgtctctgtatactggttctctttgctctccttgcctgtggtctccaagttgcactcctaacttctaaatttacattaactacaagttcattgcacatagaccacagctgactgactgagttgctatatgtcacaattctaaattcttagatgagaaaatctgagtggccttagtcagtggaacatgtgtccctgatccagctaactatggcagtggagggatgagattctctagtatcaatatggcttcaagaaacctcttgtgaggttgggacagactattttctgaaaagggattctaggttgagaattctagggattctcctgcttaaatgtttcagttactttccatcgattatagaataaaatatatttatacttttcatcatctgacccccattttttctgatttttctccctatttatcttacactctggaatattaaaactatttacatttctttgaaccacactccctatctttgcatatgctgattctggttttaagaatactaatattgcttgtctgtctgaacagcatttgacaaattggacaatccttaaaattctgataagaaaatcatattcattgactatatgaatatatttatatctaataaaagttttacttaagatatatttttgattaataaatttagggaattggtcatgaagcattttgatacatttgcaaattagtctctgattttacagctcctgttattgaataatatatcacttaatatggtaattgttacatgtctctactactttcaagacaggaactaggtcttactcctctttatgtcgctagcaactgacatataggttatgcttaataaatgcttgaataaataaatgaacagattttaaaaaacattatatgaccaatctgc

SEQ ID NO: 1147 - DNA, 1047 bp, Homo sapiens
tagttacttttatttgactgttgcttcagtctcttcagttgtttcttctacttctgtatcttgagttcattcattactttgccattgtttaagtgtgggccttcattatcatttggatgattataatatcttgatattttacctccacctcttttgccttgttctgctgttatttaaactatgtacaattgctagattcagaatttgtccttagcattcagtgactccttaatgcctgtgggatatagtcctaattccttagctaggcaatccaagctgtcattgttgtagccccaaaatgcttttcattcttaagtcttactcatgtaagcagcttattttttcaggcatactatgattagtgatttttcctcacctgtatttttactacattctgtcagctggaatacttcaaggccaaattcaaattttgcatatttatttttttccttattttcccctactcatgttcagtctctcctcaaaacttaagaatattttctatctcatgacatttattatatattgcattgtactgtagttgtttgtatcctacttcattttctcttctaggcttaatgcttaaaatctttgaaggaaaggactatatttttaatcttcatcatttacccctttagccctttagtcctgaagaaagtagcttgcacatagcagtgttgagactcagaaaacaatactctacaatgaaggtcttagaagtagtctcagaaacaaaaggactgttttattttttaacctttttttgtcctcttgtctctcagttttatttttcctccaaggctagccatataaactagaatccatctttttaaaagtgggtcataggaaccagaaccaccaccccccttttctttcttccccagcagaagcaagctttatttagcactgaccttgacagagattcactcaaggacccccctgtacaatgaacgatgactcatgcataaacaatgtcctcaacaagttttacagtaaacaagaaaatattctttatggttgtttttcaaagcaatctttgataaaagc

SEQ ID NO: 1148 - DNA, 1050 bp, Homo sapiens
catggctgcatagtattccatagtgtatatgtactacattatctagtctgccattgatgggcatttaggtggattccatgtctttgctattgtgaatagtgctgcagtgaacatacacatacatgtatctttgtaatagaaccatttatattccttagggtatatacccagtaatgggatttctggttgaatgatatttctgcctctaggtctttgaggaattgccacactgtcttccacaatgcagaacccgttttaaaaagtcagtcataaagcctaagaatattattctaacttttccttcttccttttttttgtgtaacaccagtcataaaaaaattacctgacctacttcgtttgaccatagttcataagatccctattttagaatccttctccatacccaaaagtaaggagtacatactcagagaggcacacaaacacagaagaatgagacaggtcttgcatggtttccccactcagtctattaacattagatcattccctttttgtccaatcacgttacggctgtccatactttgttgaacctaagcgtaaaaaaggacagcttcccctgtatttttggttcttcattctgaaggctttcatgtcacgtaaaactatgatcaaataaatttgtatgccttttcttctatttatctgcctcttttcagtagttctcaacaaaccttcagagggcaaaggaagtattcacttctgtctgacagtggctgctgattaatgtttgttgagtaaataacagtctaatgtctgaaaatcttccaattttaatttgttacttaaattttttctgcttttattttggtatttatgagggagcagaactgcagtatatcatttttcccttggtaggtacataattttatcaccttaagtcatataataattgaattcccacatctcagactgagattttttttaccggcagaaggagctgtcaccagtcacaacagaagtagataataatagtaatgtttattattaaaaacaaatgataatgaatacatattgatgttacttaatcgttaa

SEQ ID NO: 1149 - DNA, 1077 bp, Homo sapiens
tattttgttgagcagtggtttgtagttctccttgaagaggtccttcacatcccttgtaagttggattcctaggtattttattctctttgaagcaattgtgaatgggagtgatttggttctgtatttgtctgttcttggtgtataggaatgcttgtgatttttgcacattgattttgtatcctgagactgctaaagttacttatcaggttaaggagatttggggctgagacgatggggttttctaaatatacaatcttgtcatctgcaaacagggacaatttgacttcctcttttcctaattgaataccctttctttctttctcctgcctgattgccctggccagaacttccaatgctgtgttgaacaggagtggtgagagagggcatccctgtcttgtgccagttttcaaagggaattctttcagtttttgcccattcagtatgatattggctgtgggtttgtcataaatagctcttattattttgagatacgtcccatcaatacctagtttattgactgtttttagtatgaagcgctgttgaattttgtcaaaggccttttctgcatctattgagataatcatgtggcttttgtctttggttctgttgatatgctggattacatttattgatttgcatatgttgaacaagccttgcatcccagggatgaagccaagttgatcttggtggataagctttttgatgtgctgctcagttcggtttgccagtattttgttgaggatttttgcattgatgttcatcagggatattggtttaaaattatctttttttgttgtatctctgccaggctttgctataatgctggcctcataaaatgagttagggagggttccctctttttctattgattggaatagtttcagaaggaatggtaccagctcttctttgtacctgtggtaaaatttggctgtgaatccatctggtcctggactttttttggttggtagactattaatcatttcctcaatttcagagtctgttattggtctattcagggattcaacttcttcctggtttagtcttgggagggtgtatgtgtccaggaatttatccatt

SEQ ID NO: 1150 - DNA, 1053 bp, Homo sapiens
tttacacttagatctatgactcatttgagcataccaattctatacatattttgttaggtttttatctatgttttaattttttagacagattgtaactggtattgtgtttttaactttgttgtctacacagtcattgttagtatatagaagaatgattatttttgtatatggctcttgtattctgtgattttgcgaactcacttattgtagatgttttctagtacattccttgggattttctatatacatgaccctgttatctgctaatagggggagttttatttcccagtttatatgctttttattaacttactgtagtggatagaatgtctgatattgcattgaataagagtgctgagagcagacatccttgtcctaatgccgatcttggggaaaagcatttagtttttcaccgttacatatgatgttagctgtaaatttttttgtagatactctttgtcaagttgaagttcttttctagtttgcttggagtttttgccatgtatagctcttgaattttgtcacataatttttctgcataagttggcgtgatcatgtgattttttaaatctttattctcttgatatatggtggattatattgatggatttttgcatattgaaccagtcctatatacttggagtaaaccctactgtgttgtattgtataattctttttcttcggtactatattcaatttgagtatattttgttgaggattattacatctaaattcatgagagaaattagtttttgtgtgtatttcttctgtcagggtaacaccaacctcataagagcaattgggaagtatttcctctgattttctggagaatattgtataatataggactgtgcagattatgtatttcatattgggtgagttttggtggtttttttttgaagaattggttcatttcatctaagttattgattcatactctgtatgcttatgtttcttcacatttctttaggttttatgatgcaggctgtggtctatcatggtgagcattttgtgggtgcttgcaaagaatatgtattctgttcttgttaggtg

SEQ ID NO: 1151 - DNA, 1040 bp, Homo sapiens
agagatggtgcataccaaaggtgaagcatgcttagtggctgagccaagagagatgatttcttgaagtaaagttttataatttgatatgattggagtttaaggaacaaagtggaaagaaatgggagttgaggtaggcagtaaacgaaagtgttaggtatttcttctggcctatgagaaataaggaataatttcctgagatattaagagtaccatgaacaaggaaattttgcagacctctggctttggacataatattaaagaacaaatctgcgaaagcagttcataaagtgttttctgataaatgtgtaaggattgaaacaaaaatatttggaggaatggaactagcttaaactattttttatctaagcattttttgcctcagtccactttacctgaaactagacaatatgaatttgggattttattctttgacaatagacatgtgctagtgttgttgacaacttgccaaggatagacacttaaactttggaaaccaaatggatcgtaggacttatattccattataaatagtgaaaaatctagacagcattttggctcaggtagaagatcattgtttatctgtatagtgacagatcagaaatacaacttctaacaggtgtagattacctgttttaggaattcttaacctaggatccgtggaacctggtaagtatacataacaacatgaaattttctttgtactattttttgttggcgtttcaaaggaattcttagctagaaacaggctgggcacgtgtttcatgcctgtaaacccagcactttgggacgtcaaggtgggaggatcacttaggccaagagtttgagatcagcctggacaacatggcaaaatcccatctctaccagaaaaaaaaagagatttatagaaatcaactacttcatattttgcataatatacctgcaggcacaaggtaaattgatatgaaaaccaagacgagatcccgtatcacccataagctcacccttttcactattttgcatgatacataatttttagaaattaagaatgaatgtagaaagta

SEQ ID NO: 1152 - DNA, 1058 bp, Homo sapiens
taaaaggtggctactattattatttagattttgtagactattaaaactgagtatttgaaaagttaagtaacttgctcaaggttcacagtgtaggggttgggatctaacctgggttcctaagataccaaaatccgctatctttacacagcctttgtgtgtagatgtgttcactttattttaatataaatgtatttgtcaagtaatgctacttagtagccagtgagttcttgaatttatgattttgtatggttataataaaagtcagtaagtagttggtctattgcttattaaggagataattaaatatagttaaatgtaatgtaatcaagaaagactctcttaggctgaaaacactgcatatttactgagcagccaactctcctaaactcccacatttgtatgtttattttttctgtagggggattcccgaagtcttccgttttctgagaatgtgagtgctgttcaaaaattagacttttcagatacaatggtgcagcagaaattggatgatatcaaggatcgaattaagagagaaataaggaaagaactgaaaatcaaagaaggagctgaaaatctgaggaaagtcacaacagataaaaaaagtttggcttatgtagacaacattttgaaaaaatcaaataaaaaattagaagaactacatcacaagctgcaggaattaaatgcacatattgttgtatcagatccagaagatattacaggtatagtagtgctttatttgatgtttatatggtatattaataaaaaaaatgtatctttttagaaaatagtaagtttggggacatgaatagtttttagcttttctgaaagtagagagactttttctcttttggttaaggtcttatttatattctgtttagaagggcaggagttgataggtatggaaattgaaatgtttacttagaatttaataaccctaatgtattctctcttactctctatcagtaggacgttacttagagtgagtctccagtattaatgttttgtattgagtcaatcacatgcttttacgtgattcatcctgtaatcaacagcacaag

SEQ ID NO: 1153 - DNA, 1057 bp, Homo sapiens
tccagctactcggaaggctgaggcatgaaaattgcttaaacccaggaagcagaggttgtgttgagccaagatcgtgccactgccctccagcctgggcaacagagagcgattctgtctcaaaaataaaaggtttattgaagtataaattacgtatgacaaaatgcacgtattttaagtacatgatttaatgatttttaacaattgtgtgtgtgcacccagctaaccatctctacaatcgatctagaacattttcatcacttcagtgcttctcgtatattccttcccagctaacccatgatccccaaccctggccataggaacccgctgatccatcttctatcactttagattgaatttgtctttcctactgttttatataaagaaattacctcctttaagtcctatcaaattcctgatcacccttaaaaaacaatttttaggtattaccataaaaccttccatgacattctctgctttatcttctctgtgctactttgtccattcattgttgcattgtaatgtatttctgtacatgttatatcactaaactgtctcctccttgaagggagggacatgtgttcactcatctattttcaaggcttattacagaaactgaaacatagtagatgcttacttgggaatattatatctcaaaatagaaaaacacccagcaaatcgcatcttatattagtctttagaattagtatcaaagcctaattattatgacacttgaaacattaaataacttagaaaacaaagacttaaaagttttatgataaagccagaaactttttatactgaccatttttaatactgacatttcagataattggagggcagatgatatatgaaatataactttatactgtgacttcttaatacttcagtttgtttagaataaacttgataagttcgtcaaatttttattttattaaaaaaattctgtttgcaaatggcatatttacacaacttggtaataagtcattttctcttttttccattttactaacttaacaatctaaaagcaacaaccacaacatagaggattaaaattaat

SEQ ID NO: 1154 - DNA, 1062 bp, Homo sapiens
caatgtgatctacagattcaaggtaattcgtatcaaaatcccaacatcattcttcacagaaatagaaaaagaaatcctaaaatttatatggaatcagaaaagaccctacaccatcttgagcaaaaagaacaaaactagaagcatcacactaccaaattccaaaatattacaaagctatagtaatctaaacagcatcataatgacataaaaatagactcattaaccaatggaatagaaaagagagcccagaaataaacccacgcaattcaaatcaattgatttttgacaaagctgccaagaacacacggtggggactggacagtcttcaataaatggtgttgggaaaactggatatcgacatgcagaagaaggaagatgaacctttatcttacccttatacgtaatacctttataccttatacctttaaaccttatacctttataccttatacctttatcttaccttatacgtttataagacttaaatgtcagtcctgaaactataaaactgctagaagaaaatatagagggaaagctctatgacattggtctaggcagtgatttcttggataaaagcagaggcaaaagcaaaaatagatagatgggtttgcatcaaattggaaacttctgcacagcaaaggaaacaattagcagagtgaagagacaacccaaagaatgggagaaaatatttataaattatatattggataaggggtcagtaaggaactcaaactactgaattcaaggaaaagaaataatcttatttaaaaaatgggcaaaggacctgagtagacatttatcaaaagaaggcatataaatggccgacagataatatgaaaaaaatgatcagtatctctagccatcagagaaatgcaaattaaaaccacgatgagataccacctcatgtgtattagattggctattatcaaaaaaatggaaggtaagtgatggcaaggatatggagaaaagggaagccttgtgcattgttggtggtattgtaacattagtatggccactttggaagacagtgtggaggttcctgagaaaactaaaaataggatt

SEQ ID NO: 1155 - DNA, 1199 bp, Homo sapiens
tggcgggatctcggctcactgcaagctccgcctcccgggttcacgccattctcctgcctcagcctcccaagtagctgggactacaggcgtccgccactacgcccggctaattttttgtatttttagtagagacggggtttcaccgttttagccgggatggtctcgatctcctgacctcgtgatccgcccgcctcggccccccaaagtgctgggattacaggcgtgagccaccgcgcccggcccttttttttttttttaatcttgagttttagactcttcacttggatagatgcttttagatatttggcccttatgtttcaagaagatattgatctagaatgtatctcttcatttaaatagattatcaagtacttacaatcagtcttcatttaaaaaaaaatctgttacctgtttaagagtatggctttgttttcttttgtttttttgttttgttttatttattttttaattccagaagaaatctttaaagctagttgctaagagtaggagtagaaactttcggtctccccatgttacaatatttggatatctttcagctctaaaatctttttttcagatttgtaatttagatgtgtaatgacaaaaatgaaaggctctgaatttcaatatcatatcaaatatttttatttcagtgtttattgatgtaaggactaagttattgtaatgttataggaattcatttcttttcatgattttaatcactgcaaattggaaagtcagataaatggtgcaattaaaatttttttttcctttctagcaaaacctgtgataagtcctcttgaacttcggatggaagaattaaggcatcattttaggatagagtttgcagtagcagaaggtgcaaagaatgtaatgaaattacttggctcaggaaaagtaacagacagaaaagcactttcagaagtaattttaaataaaaatttttatttggtttaataaatacattattcaaagtatgtgattatttaaatgacaacaattgtcttttccctgtgcaaggctcaagcaagatttaatgaatcaagtcagaagttggaccttttaaagtattcattagagcaaagattaaacgaagtccccaagaatcatcccaaaagcaggattattattgaagaactttcacttgttgctgcatcaccaacactaagtccacgtcaaagtatgatatctacgcaaaa

SEQ ID NO: 1156 - DNA, 1048 bp, Homo sapiens
atgctcaaaggaaattctcattggagcattttggatttgggatttcagatttccagattagggatgcttaaccagtaagtataatataatataaacattccaaaatctgagatacttctggtcccaaggatttcagataaggaatactcaacctatactatatttgattgacctatttgtcagagcatatgagttctttttaccttttgactgttgtgagtagactgctatgaacatttacgtgcaggtttttgcttgaacatctgttttcaatttgggggtatattcctaggaatataattgctaggtcatatggtagctatatctaagattttgaggaactgtcaaactgttcttctcagcatttacattattttatacttctaacagtaatgtataaagtgggtttcagtatctccagatcctcaccaacagttaatattttttttcattcttctttgatcgtgttctaataggtccattattggaagtatggtaatatatctaactatgtctgtagaactgtctgtatttctcccttcagttatgtaaatttttgtttcctatattgtgggctgttttgctaggttcatgtatgtttacaatttttatatcttctagacggattgactcctttacctttaccttaactcctttataatgtccttctttgtctcctataacaatatttaatttaaaatctgttttgtctgattttataacagctacccctactttgttttggttttgtctttgggttcaaatgagtctcttttagattatatattattgtattctgttttataagatccattctgtcagtcttttttttttttaattcatttttattgagacagagtctcactctcattgcagcctcccactcccaggttcaagcaattcttgtgcctcagcctcccgagtagctgggattacaggcatgtgctactgcacctggctagtttttgtatctttagtagagacagggtttcaccatgatggccatactggtgtcaaactcctggcctcaagtgatctgcatgtgcca

SEQ ID NO: 1157 - DNA, 1019 bp, Homo sapiens
agaatacagaaattagccaggcatgatggcgcatgcctgtaatcccagtaactcaggaggctggggcaggagaatcgtttgaacgcgggaggcggaggttgcagtgagccaagatcatgccactgcactccagcctgggtgacagagtaagactctgtcttaagaaaaaaaaaaaaagtcctcctgcttcctccaggcctttatgttttgtgatgagaaatccactgttaatgttactgaggatcccttgtaagtgatgaattatttttgtcttgttgctttcaagcttttctttgttttttcacagtttaattataatgtgtcttagagtggatctttttgaatttattctacttagattctttgagcttgatgtgtaggttcttgtctttcatcagatttgggaagtttccaatcatttcttcaaatgttctttcttctccctctgagactttgatttttgcctacattggtgtgctttatggtatttctcttagactctgattttcttcattattttttctttctgctcttaagactagacaagtgcaattgatctaccttcaaattggctcactttttcttctgcctgctcaaatcttgtattgaacctctctagcaaattttttcatttttgttatacttttcaattccagaatttctgtttggttcttttttataatttttaaatccatattgatgttctctatttgtagacacatcacttttcttgtttcccctagatatttgtccatggtttcttttagatttttgagcatcttaatttagtaagtccaacatgtcttgacttccccagggtcagtttctgttaatttcttttttctgtgaactgaccgtattctgttactgtgcttgcttcataattcaagtacttcatttccttagtatacttactcacaaatcagattttactctttccaaagatttcatttttctgctatatgttgaatgtagttgtttgcctagtaacttttataatctattttgtagagactatt

SEQ ID NO: 1158 - DNA, 1054 bp, Homo sapiens
actgttctttgtttattctcaagtctttctttagtgtcttctatttttgataatttctttgctgtgtcttcaaggacactaatcttttcttttgcaatgtttaatctgcctgcagtcccatccagtgtattttttttttaatctcagatattgccattttttaatcactagaaatttggtttaagtctttttcatttcttccatgtgtctgtgccacattttcagtagattgactgttttgatgtccttgccttctaaccctaacatttatgtcagttaagccactaagcttgtaataatttgtaacgcaaccatagaaagcaaatacacctggtaatctttgagtagatgcagacattgtgaattttaccttgctggatgctgaatatttttgtatttctataaatgttcttgagctttgttctaggacacagttacttggaaacaatatgacccttttgggtactgcttttaagatttgttatgtgaaacaagcatcatttagtttaggggtaattattctctactgctggggcaagactcttctggatattttcttcagtgcctcatgaattgagattttcaagcctggctggtggtaacaaacactattcctacctatatgcactgagtattgttctttctaactttttcagtgggttctttcccctgcctcagatattttcttcataggcaggtgctgattagtactttgatgaatacttgaaaaccctctgaccatctcaggagttctttctatgaacagctttaactgccttgtgaactctagctgctttggtttccttgtactcttatttctgtctcttcaacttggctccgcctgagtttccccctccctgcactgtgtcctagaaacccttaagacagtaagctggagcaatcttagggcttatctcatttgtttcccatctctcagggatcactattcgtctttaacctttttcatatattttgtctgattttctttttttggtagtttgaattgggaagctttgtttgttactacttggatagaaatatataagtacttcag

SEQ ID NO: 1159 - DNA, 1053 bp, Homo sapiens
gtagggtataatccaggattttttttttttcttctttcttgagatggagtttcgctcttgttgcccaggctggagtgcaatggcacaatctcggctcatcgcaacctctgcctcccaggttcgagtgattctcctgccttagcctcctaagtagctgggattacaggcatgtaccaccacgcctgtctaattttgtatttttagtagagatgggggttctccatgttggtcaggctggtcttgaactcccaacctcaggtaatccacccacctcggcctcccaaagtgctgggattacactcctgaaccaccgtgcctggcctaatccaggattcttaatgaagtctacttactaccagctctgtgttctttctattctgtcgggttactcttttatattttcttgtagctatgcaatttttcatttttcctgaattccctcagccttcctgttataaaaagcttaatgaagctcccatgagagattgaaataaatgacaaaatgttacactaagacctgttaactctttcccttgcacctttcctttagaataacgttactaacatagtagtagaagttctttatcaatattagaaacagagaagagccctgtccttagaaccaaagcttagaacaattttagcagatttcagtgttgttaagagcagaactatagaaaatgtcgaccgatcactgggaaaggagggaaagagagtatagaagcagttaggacaagtaaaaaggtggtaggattcatggattgggactaacagtgggattgtcatatcagtggatgttgaagtattagagagagtgaactagaatattaggagataatgttcagagagaaagatgcagacagttgagattgtggaaggattatagttactggtatgacagtatgatgacaggagtgaaacggcaaggtaaggcaagtcacaagattataagaagttagccgtgtgcagtagcttatgcttgtaatcccagcactttggggaggccgaggcgggcggatctcctgagttcaggagttcaagaccatcctgacc

SEQ ID NO: 1160 - DNA, 1060 bp, Homo sapiens
ctagaatatcgttgctcctagagtttgaaattatctaacagcatgcccttgccttgtgtaactgacctgcttcatctagaaaattgccggcgtaccagcaatcacacttgcattttaaattctaaacattgggccaggcacagtggctcacgactgtaatctcagcactttgggggagccaagacgggtggatcacctgaggtcaggagttcgagaccagcctagccaacatggcaaaaccccatctctattaaaaatacaaaaattagccatgtgtggtggtgggtgcctgtaatctcagctactcaggaggctgaggcaggagaatcacttgaacctgggaggcagaggttgcagtgagctgagattgcaccattgcactccagcctgggcaataagagtgaaaccccatctcaaaaaacaaaaaataataaaaaataaatggtaaacattagtgacatcttcttatgcagaagcttcagtctatctgtatggtaccttgtttttcagataccatgtgactgttttacttattcaaaccatgctggatgttaggatttaaagtgggattgaacacaagtggtggagtactaacataaaatatctctagatcacagccccaccctcccacttatgttgtgaagaaagtaacgctcactgggaacagtgcaaagtaacaaaaaatgaagagctttatatgtaaaatgttagaaacagataatcggtgccgtgaagaaaagtcagcacggagacaaaggatctctcagcaaggcaatctttactttctgcagaaagcgtgcccctcgcaaatggaacaatcgcgagagcacacctgaacaaaggaaaagcagacatatatatcccttatgcatttgggttgtccttactgctgtgtcctgcatccattggctggagctggacctcacagtcttaaactgattactgatttgctaataacctaaaactttcctaaataggtaaatgcaaaggagaacaaagaggaagaggaagttgcttatgaaaggtttaaggaagcaacaacatttccaaataaggaagg

SEQ ID NO: 1161 - DNA, 1107 bp, Homo sapiens
cgtagattataaactaatggataagaatttttaaattatgacttttggttatacataaagaaattacttgctgtttttgtttttttcaacatctacaggcaaaacatttctcagagctcctcaaatgaatattaatattgccacttggggaaggctagtaagaagagctattcctacagtaaatcattctggcaccttcagccctcaagctcctgtgcctactacagtgccagtggttgatgtacgcatccctcaactagcacctccagctaggtatgtgtctgagattttaagcatctcttatacaaagttattgggacattcttacgtactgattatagcaggtgtactgagtcttgcttttttcccaagtagtattttgaaagtagtgttctgtttacttaaaaagtaaattgtttgctttaattttaaagctgtttaaaatacagactttctattactgttttggtgagttactttatcttctataagtgattctacagtaaccaaattggactttgatcttgagcctgaacctcctccagccccaccacgagcttcttctcttggagaaatagatgaatcttctgaattaagagttttggatataccaggacaggcaagccattttaaaccttgcataattcctcttcactgaatgaattagcaataaaagcatcatagtgaataaggcgtgtctttccatttaaaattgccactgaactgtgaatttatggttttttgtttgttttttgtttttgtttttgttttttgagacagagtttcactcttgttacccaggctggagtgcaatggcatgatctcggctcactgcaacctccgcctcccggattcaagcgattctcctgcaagccattctcctatctcagcctcctgaataactggggttacaggcacatgccaccatgcctggctaatttttgtattttcagtagagatgggatttcattatattggtcaggctggtcttaaactcctgacctcgggtgatcagcccgcctcggccttccaaagtgctgggattacaggcatgagccactgcacccagccgaatttatgtttcttatggtctagtctcagctaaat

SEQ ID NO: 1162 - DNA, 1053 bp, Homo sapiens
cctctggatgctcatggtccagaagagatagaataggctgcttaaactagaggtaatataggagtgtggttgatactacatgacatactgcctgaaatactattcttcttctaacttgattaacatacataataatgtgttagtttttcattgttttggttttgttttgttttgagacggagttttgctcttgttgcccaggctggagtgcaatggcatgatcttggctcactgcaacctccgcctcctgggttcaagtgattccactgcctcagcctccctagtagctgggattacaggcatgcaccaccacgcccactagttttgtatttttagtagagatagggtttctccatgttggtcaggctgctcttgaactcctgatctcaggtgagccgcccgcctcggcctaccaaagtgctgggattacaggcatgagccaccgtgctcagcccagtttttcatattttttagataagtttaatataaaagcgatggctccagctactcgggaggctgaggtaggaggattgcttgtggctgggaattcaagacctctctaggcaacatagtgagacccacctctaaaaaaagaaaaaaaaatttttttaaagaatgagtatctgaattttacttttcactccaacatttatattgacttttgaaatgtttttccttaattttatcattatcaaataagttgttttctgggtatttctatggattcacgtgtatttaatattttacaggattcagagactgtttttgatattcagaatgacagaaatagtatacttccaaaatctcaatctgaatacaagcctgatactcctcagtcaggcctagaatatagtggtattcaagaacttgaggacagaaggtaaagaatatataccaaattttgcgactacatgtttggtaccatactttattgtcttattattaattgaaatttctcttttcagatctcagcaaaggtttcagtttaatctacaagatttcaggtgttgtgctgtcttgggaagaggacattttggaaaggtaatctttttg

SEQ ID NO: 1163 - DNA, 1034 bp, Homo sapiens
attaacatcagcacgataaaagccatgttgagtggcccaggtcaatttgctgagaatgaaaccaatgaggtcaatttgagagagataccttcacatgtgctatcaaaagtattcgctacaccaacagctccaccgagattcctgaattcccagttgcacctgaagttgctatagaactgctgatggctgtgaacttcctagattgttaaataaaatataattttaaaaaaatgaaagaagtgttaccttaaaaaatggtagagttgaaaaaattcgcattttttcctactgttttctgtagattaacttaaatttctgaggataattgagttgtacatagaaattattactattaggaaacagtgagttatgttaaggcaataataggagactaataatttattatgttataaattgttagaaatgttgaattgggatgaaattgggaaagagtaaatcttttaataagtaattgaagattacttgaagggacttgaactggagatgcaagaaaaattattttaagggattggttcattattctgcagtttccccatgccagcaacctcccttgtacacttgtaagtttgaagaagttagtgctgaatgaacaaattatcaaattgaatatcagaaatttctaaagttttgttctatgcttgtcatttattggcacttaccccaaacaaatggttttagtttcgccggatggataaccccttttggtatgtcaatttgaagtggattccttggaaaaggaggagaagtatggctaattaaaatttatcatgtgctaagcactgtactgtatgccttaaatattagttcatttaattttgcaacagcctttaataagctcagtactgatcttctgcccattttcggaggtgtaaatagagacacaaagagattaatgacttgcttaaagtcacacagctctcatatggtggagctggaattttaaccttgtcactctggctccagagcatatctaaagcattatgctttgctgctccaggacaggatcttcaatt

SEQ ID NO: 1164 - DNA, 1032 bp, Homo sapiens
aaatggaatggagtggaatgaaattaaatgaaaagtcatatcatatatgagatagacaagttttttataagggtctataaaatttaaagatttcagaaagagtatatggtgtattccctctgtaatagatacatatctgttgtcacttcttatagttcttttgttgttgttttggtaggcatgggtttattgttgttgttgttgttgttgttgttttgtctgttttttctttttcactgcctggatcttggttgtactttgaatgggtgataagattttactgccttaaaacttgctttaacttactcaaaggtatttcttctagtctccctttcctggtgatgatgaagaggaagtttttgacagtattgtaaatgatgaagtaaggtatccaaggttcttatctacagaagccatttctataatgagaagggtaagaattaaaataaggataagaattttttaaagactactttaattttttatactaaagaaaatttcccagtagaactttaaaagctgtttttcagttcataaatgttgcatggcttagacaaaaaaagacaaaatatatctaagttttttaaagtaataatccttatcagtgaattttattctattggttttattttaacttttttattttacattatgctagctgttaagaagaaatcctgaacggcgccttggggctagcgagaaagatgcagaggatgtaaaaaagcacccatttttccgggtaagtgtgactatttaaaattttttatgaaactagagcgattagatttaacaaactaaactagtcattttttattttatgatccagctaattgattggagcgctctgatggacaaaaaagtaaagccaccatttatacctaccataagaggacgagaagatgttagtaattttgatgatgaatttacctcagaagcacctattctgactccacctcgagaaccaaggatactttcggaagaggagcaggaaatgttcagagattttgactacattgctgattggtgttaagt

SEQ ID NO: 1165 - DNA, 1050 bp, Homo sapiens
tcattgtactctgagaacaattaaaattgtccagagatcatttatattaccttccaaattgtttattacccaagatcctttgggagaaaatcttatagaatgggggaacaatatgtggtttaaagttattttaaaatgccagttaatttcctcggcaaaggacaatagaggaacttagcttaattgtctggctttaatttaaactgtgttaatacaacattaaaataaaacactaaatacttttgaggtacagtctgctcacttttttggttctcaaatagcaaagaaagtaatgtctaaaataggctcttagcattaaaaactgacagcatttcgtaactacacagtgtacagaatttttttttaattgaagtcaatcactaaaaaaattagaaggcagggtctatttacacaattaagctgaagaaagcactaattttttgtagtttaaaatatatatatattttagtcagatttaaaattttaagctttatagagtgtaaatatattttgctattactgtatgtgtatgtgactgctcaagcactttgtaaagaaattaggatattttagaatggtacactatgcattcaaatgaaatgtgcctttcactatgtcattctaagaaaacaagtgttttttgcagtcataaattatcacaaatgcacaaattaaagtctatatagattgaaatttgtaactttggttttaagtattctttccttttagaaacttcctaatgattaaaatatactttaacttttctgtgttcaaaatctcaaagactaattaactttaataaacattcttgcaagtactttttgtcctagtgaaggcttaaaaccatgaacattcagagcaaactgtccacttcattgggaataatgggaaaagtttgtattctgctcctgtaaggtcagtagcatcttttatttgaagcatatttatggactgcttactgtgtatagatactgagaataggaagtttttttttttaaagcaacaaaatgttgatgaatgaagaacagcctgttttaattaagatgcaag

SEQ ID NO: 1166 - DNA, 1102 bp, Homo sapiens
tgagggcctgaaactccttctacctctaaattcttgtttctttgcctatgtggctcttttctttttacttgacgagcaaaagaagtatactttgccaattttgttatctgttgtaatggccctaacagtgatgtgaaaatatgtctgaatcaaccccacgctttgagttttaaaaaacccacacagtgtaaccttccccagtcatgtcagcttttcccctttgtgacacgaatgaaagaacaagagcattggagtgggagttggaacagccagtgctgaccgtggcacagcctctgccaggggtgagcttggagatacatttatatctctatacaaagcatacagcttcctcaggaagagcccaggagccccaaggaaggttttgagagattatatcagattagttttgggaagtaacactggcaactgtgtggagggtgtgctgaagatgagagagatcatattgcgagaccaagtagggcagtgggatgaagtagaggagactagtagaaaagttagtttagaaaaaagtcataggattaaatattctatttccttttatcagaagatcctatggtaattacttaagtcaaactgtgattactgacattttactagttttactatagcttctaactttttcagagaaggagtggattaagttttgaaccagatgatttggggtcaaattgtcaaatttcaggttaccagtgagtgtgctttatattagcacaactttttaaattatagcttctaaacatttatgtcttctgactggaaatgggaaaagatttgggggaagtactatttgttctatggaagaataatgacactttgcacaggagaggtttgctgaaaccaggtaatccctccaggcagcttagctcattgtcttccagaaagctaaaaaattatgggctcattgggtaaggtttcttggcctagagagaatagaggttgtatttgtgaggagcttattctttcatggattgctgttctctaaaacctcctgggcagagagagttcccatcacttttgatgttgtcatcactgtgaacatagaaagtagaccaggtagagttatttctatttttatcaatta

SEQ ID NO: 1167 - DNA, 1091 bp, Homo sapiens
ttcaaaggcatagtaggaagggttggaaaagcggcctggtaccaaatttgatggtgggggaggatttgtgaatgtatgctgtggagccttggtgagtgctagtaggcactggttcattggttggacttgagttctgcttgactgtgagcccaaagtggagttgcagtccagtgttggcatcttatcaagaatggcagtaactccactttaccatctgcttcaggagtgtcagatctaatgtgccatattcagttctggaaggcacatttaaagaggactttttgcgaaccaagtttcaatggtgggatatatcaagcacggaagagtaactcacatcttcttagccatcttctttctgtcagaacactccatcagctcatggttgtctacctggaatagatgtattttcccttcttccaagtctctctactactccctttcaaactctttgtcttttgagagccaaagaataggcaataaaaagcaaattaaacacattgctgtgattccttagtgatatgaaggtacataatcacaaaggcatctgactcaacctcctggcaacagactaacagctgactgagctatacccagaaaggagccctcagtgtagctttctgaagcaaagttcctcctccttcttgctgaagctatttctctatagctaagtaaaaaagacaagagatgtatcagaaatttggttaattgataatattaaggaattgttaattatttgtatatgattcagtaatgattctagagctgacacacataagcttgtgaaaactgattgttgtgttataggaattttcaagctagttaaacatagtcattaaaaactaaattgtacaaacttaaagtactaaaagtaaaataaatactcaaaactctcacttcctaattattttgctataatttgttgttatctatgctcttaaggttatttatgtctaaggtatctgcagagtagaagtgctgtataatgatgtgtgacacatctcttctcaactccacattcagtgacatcatgttggtactttgaaattggccatggtgggaatcatggaaaatggcaaagaaccagggtcctt

SEQ ID NO: 1168 - DNA, 1067 bp, Homo sapiens
tctagtaatgagtcttgtgatatatggtgagaactggcatggaaatcacaacttaggtggaaaaccaaacctcctaatatgtaatctggtatttgtttataggatcatactttaaaggcaacctttaaaggattaattttagataaagttactactatgttaataaataatcatgtttagtgcttacattgtacctgctgctgtgctaagcatttgaattgtagttgtctcaattaattcttaaaacaactccattaggttgaaaccattattatggttattatccctattttacagatgagaaaagggatactcagcttatctaagatcaagcagatggtaaacaacaaagtcaaaactcaatcttaactattctgcttccttcccttccaagtctctcacattttcatcagttttaggataagaactaggcctaacaaagtaacacattgaaaacatgtgatactcctttttaaagtctttcaaaaagaaggtcatatatgggtaatatggttttgatttattttaaccacattgtaatcggtatgtctggaagaaaagccatgtaaaacactgttatttaactacagattaaacttgagttattcatcttgttattaaattgttggtaaatgtttcttcataagaggctgtgcaagcaggatgtacccttgctctggctatctatcatgtcgactttaattatttaataggcagccagggtggaggaagcacttgttggttctgtttcactagatggaatactgagcaatgagctaggaaaacaaaatagatctcatttttaaattgtctcttttagtttttctaaaagatagattgtagctttgaaaaaaggagagagctgtcacattctatataaaactcctttttatatagctccttggagaggctgtgtagcagatggctcttagtcagctctgttgtgaatgctgggtctgcttatgaacttgagcaagtttgtttctctgaacctcaactttttcacgtttagagttggctaataatatctacttcaccaggtacacagtaagtgttatccttcccct

SEQ ID NO: 1169 - DNA, 1052 bp, Homo sapiens
catatattaataaacaatgtaaaagaaatattagtaaatgacttcctggaacgcagatgaaggagcaacaaattcagcctgtgctggtctggatggctcatagaggtgattccacttgatccagaatgggacagatgatgcagtgggatgttctttttttaaatccatctgttatttatgattttgaatttttcaaactgatgaaatgggagactttaattttacatagtaaagccttaaacttatacaattgcccgaggcagggtgaatgagtatgatattccagtgattcctgccatagctgtcctgccaaacaagatcccagtgactatgcctttaacccagttcaagtcctttgaccagagattcttgatatcttgctagatctttcctaagatttaactatccctacaagacaaatatacccaaatggaaaaccaggctcaaattccaaaattgtataatagttctttgtgcactacaaaaaagtttgttttgtcaaatccaccatctctcctgacaagaaagaaacaagaacatcaagagtaagatcctttggggctttttgtttttctatcagaaagctgattgctgctgtgttgttccttaatcctcagtcacttgggagccgttccttatatgtccttggttgggagccttcctttcaggaggaagctcttatttgagaaagaagagaattctcagtgttacacttatctccaaatcttccagaatacccttttatttttaggttatcttggaattgactttttaagttaaaatacacccgtcttgtgtccttcctctggagagagaatgtttttgaaggggtagattagctagttgtgtaacactcattagcatagcaaactggtggacgtgctgacgcaggccgcctgcctcagcagctgggtcggtcagaattgctttaacaatctttgtcctctttttatcctgcctaatatggactatttatgctattctaagaagcattgtcatttagtatttctcatttcattcttccaacttggtacttttatgttttgctaagg

SEQ ID NO: 1170 - DNA, 1026 bp, Homo sapiens
tgtcagcccagctatcccagtttttatgaaacacttctgtaaaggaaaataccctttcctcctaactaattcctatattcattcaagaaggaattcaactcagttttcaattgttttgttctgttacggaatgttaggtttagtgacttagattaaccagttctaaaaacagattacctgggttgtatgcaggcccctctgcttactgctctgtaaccccaggcaagatattgaccttcctaagcctccatttcttgagtaagagtaggcttatagtacctggagcccagagatatttgggcgttaagtaatgtaatatgtatgatgctcctgacacttctaagtacacagtaaaccttagctcgtgttatgatggaggtggggttttcctttatacataaagagaacttcattttacagtaacagtaattaattgttactgttaataaaactgtcaataaaatggtaatgaactgttactctaaaataaaatgcttataaatatggaccccatcagaactacagttttaatgttcaaaggatcatctacattgagaaactgttttgagaggtaaatcattgctgtacatgtggactagctctgtgtcatgcaaaagtgttactgctcagacaactaggtcaggggctgggcatgccaaaatgagcaacctggtctctgcccttacagaatttacagtgtgggaatggagatagttgagaatataaataacccaggggagtgaagaggtgaagagagcaagtaggaaagtgttgatcttggactgcttatgaaaatactcagccacgggcttccaaaataggacactgcagctgtggtctgagaccccttcaaatattatccaagcagcgtgctcttcttgagagagggtgggctgtgtggggaagcctgacagtcctgatgtggtgatctgggaatgggtggtgtccaggtaagtattaaccaaagatgtgatattaaaatataaattcatggagtactgaaatcattttaagtgagtaaaccct

SEQ ID NO: 1171 - DNA, 1033 bp, Homo sapiens
tccagctgtttgtggagcccctccacttgggtgtctagtagacatctcagatttcagatgtctctatccaaactccttattccccactccctaaacctactttctgtagcctctcactccctttataaaatggcaactccattatttcagcttctcaacttaaaaatattggactcataatgattcttctctctcaaacctcacacccaatccatcagctagagcacgagttacttatattgggaaaaactaaaaaaggagtaaacctagggcagtgggaggaagaaattaaggtaaaatacaaagcagagcagtaatagagctactttctgggcagtgtttgatgggatgaggaaaatctaagctgaaggcatttgagccttggaactcaggttgctgggaaatcacatcctaagccacattcccttaaaagagctaaaactttaaagtggtttgctatgttttgatatgtcttaacatcaagagtgagttagttggcaaaactcaagctgtcaacccatgggttagaaagagactttaggtacccgtgagaatgttttacataaagtttacctaaagtattttccatttcctgcttctggaaacattgtgggacctgaatggagaagccagaagtgcaaagtcataataataattttaaaaaacagtgagcatttgaaccagtcttagaaaaatgaatgttctttgttggcatatctacaataaagcaaaacacttagctgaaacatcagggaaaggaaatgataaatgtcatggggtaaaagatggttaaatacttaagtatcttgattatattaatttgaaccatgaaaaggaagtaagtactcactgtccttctgttttgatttggtatacatttcccagcattcaaattctcagcacagaaggttcttgctgttttgctgcaccaagttcttggaaatcacatacagatccccctaaaggagattggaacagtgcaatatttggggactgcattctccacccaaggatttagcatcaaatgaaaaac

SEQ ID NO: 1172 - DNA, 1033 bp, Homo sapiens
gaattatgcttgtgagagggaaaaagcagctactgatcatagatttttagtgaattcaaaggcctgtggctacaataatataggtaactgtggaaactgtcatgtaaagcaaaagccttgaaatgtacagcctgaagcacacacaattaaaaggatttttctttaaatatgtgaagagcataatcagaaacgaataatatcgtcattgtttgagagaactaaaattgctaggtagaagtacttttgccacacccaccaacacccttagaaaaataggttaagctcaacttgaagactttccaaataatgtaattggtccattaattgaacatacaatatcatggagatatccaaggaaaagatggaagtattcattgggttgcaagttccgcttacctcttaagattcctttgagtcaaaagttctatcattttatgatgctatgaggacagtatagcttaagaatcatttaaatgtgttaatgttcgtttattttttcttttatattgtcaaataagaaacatgaaaagagaaatttgagtacaggaaaagttctatttaaactctttgtttcttagcacagtttaacttctttcagttacagtcagcatcatgtggtattagcaaagagctctagatggaaagaaaaagatttggttaaaagttatagttcaccattagctgtgttccttgggcaagtcacctaatctctcttggctcaggattttcacccataaagtaaggggtctggactggatgatctctttgacctttttcaggtcctaaaattttataacccatttatgcttttctcatttaattaaatacatttctacagaaccatataattatgttctgcttcagtggatttttccagaaatattttgtcatgaatgccaaaactgtacaataaaacacaatctacagtcatgctctcccaagggagaaaggtataatttttatgtaattgggaaattttgcctttttgctcctgctttttatttccatcttttcactgccaaaagaaaagcaa

SEQ ID NO: 1173 - DNA, 1056 bp, Homo sapiens
tacttatggagccccccataaaatgattaggtaatctatggagccagggaaaaattccaaaatcttgaattggcacagtttatttatatatttgaacactatgttagatttgtctcgtttttattgagagtgtatgtgtgcgtgttgattaaaacctaacagattagaaggttggagaggaaactgtccttagatgacccagccttccattaccatgtggagtagcatatgatgcaacacttaaagtattgagccatattcatatcattttctccctgctgtgttttccagcatttaaaaaacatggtcaaaacttggccctttttttctcaaaatcgctaaagtttaatggaaagaaaaaagaaaaaaactaggccccttttcccttaatttttatattatgcagcatttttaaaaattaattttagaaaattctgatgtgtttgtcatgtccaaatagttaaattgttttggtagctatagtttggaaattagactcgattctgttctcagtactgtagacaaaatagctattaaagtcaaaagtttgtcaaaactttgtaatcatgattattatgttgttgaagtggtagcttgtaagagatttcagttatttttaattggagctggtgtttgacattctaagaaacaccagttaatatttgttgagtgccagcaggaagcagagaactggagtgggtgctgtgggatcttaacaaggcaggagaggattctcgtagtaatcacagagagcagataagacaggcacacatgaggatgccagcagaagcagacagttacagttgtctaagaatccagggtgtgtggaaccagataaaagtttatgaagtatgctgagggaggagtggaaatctgaattgacttttgacagtggtcagggatgtggaacagaatatacgactaataaaggagggtagagggaacctagttcgtgaaaaacttaaccacaagtcagtggtgttaatcatttgcctcaagaccagtggctctcagaagtaggcaattttgcttctcagcagacattgaggaatgtcg

SEQ ID NO: 1174 - DNA, 1038 bp, Homo sapiens
ctgacctcatgatccgcccgcctcggcctcccaaagtgctgggattacaggcatgagccaccgcgcctggctacccttaaattttatagttgagcgtatccaggcacagggaggtgatgtgcttagcgtaagtttacacatgtagtgacagagtaggcattagaatctatctgccttaaagaccacaataaaggctaaggatcaggatttcttctctgcttagaggtgtgtaaacagtggggtccctcgggtcttatttacataattgatctaaaagaaggaacacacagtggaatttctaggtttgcagatgacagcttttctggattatgaaatgtctaaccactgggtatttgctccagggaaaccacactaggatgtattagtcatcagacgatttgcaggtgagtttcttgtgggcaaataggtggttgggtattaaggggaaattacagaattttcataggatggtgttttgttggataaactcagggaagggctctgaaaataccttcatgttgttgtcctgacttgctgttgcagaaaaacaaaaaccatgaaatgctaggcttcatcaaaaagattttggggctgggcatggtggctcaggcctgtaatcccagcagtttgggaggctgaggtgggcagatcacctaaggtcaggaattcgagaccagcctggccaacctggtgaaaccccgtctctactaaaaataaaaaaattagccagatgtggtggtggtgcctgtaatcccagctactcgggaagttgaggcaggagaatcacttgaactcaagaggcggagtttgcagtgagctgagatcgcgccattgcactccagcctgggcaacagagactgtctcaaaaaaaaaaaaaaaaaagattttggggaaaaaaatacaaaatatagtcttaattgagttttcactgtgttttttcccccaaattcgtgggcacctaaccttcagaaagacactagagctggaatgaccattgtaatgatacctacctagaatgtttggacattgctgctagaa

SEQ ID NO: 1175 - DNA, 1040 bp, Homo sapiens
cctccttttggggaacgctcataaatatggtgttaggttccattacaagcattttttttttcttaaaacatttttttctttcctcttatgcttgctggtaatagttaggaacattgccagagaaagcttcacttccccaacaatgcataaatcccattgctacatcttagcatcgacagatagccagcactgcaacgagttctgcagaacaaggagaagaaaggatgtacaagaagacacctttttctctgatggtcattggccgccagaaagctgtgtctcaaaatctctcatgctatagagataggacagaactcttcagattgggtattagatgccgtcagtcaaaattctcttcactgattgcttacaacccaattttaagaaatactagaaaattaaaatgcttggaaaaatggtccccatggtgcttgcaatggcactctactgagtaggcttttaaaatcagagtattctcagatatggctgcttttttgttttcgtatttaacttagctggttaagaagtacttggacaatgtatggaacacctaaagttattaataataacagctattaggcacttaatgattgtccaaacctatgccctggaatttacatgcattctcatataatcctcaaaacaattctgagtgaaagatagacttattcccactctacggatgaggtcataaggctggaaaggttatgtcatttgcaacaacgtcacatagaagtggcggaggtggaatttgaaaccagactcattttataccagacttttttattttaaaccagactttttaatattttataatatatacctattctcttatctactgtaccctttctcatttctgcacatttctttgtatttattttataatacctagtagtatttctgttacatgaaaaagagaatcaggttttgaggtgtaaaggtacctgataactcctctggttcgtgctgcgtgtttgaagagtagagccatagcggcatcccggcatttaggcttccaggccaatgctcttgtcacccca

SEQ ID NO: 1176 - DNA, 1050 bp, Homo sapiens
gttcagacctgaagtcttaacattttaaacatgtatctatttgctattgcttacttagttcagtcttggcattttaggtttagaggtggttactacccattggacatccatagccactccctgcaaattaaaggggacacaaaaatgaaactgaacttctgtttttcttcacctctctgctaatttaactaagtcaattggctcgccctcatttgccctcttcacacctcccaaattaatgttatgtgcaaatttgattaaaacagcgtgagtaatttccaagttacttttgaatacggattgaattccgttccttgtggctttttcttcatcatactagtagatgtagccagtgtttttgtttctagcctgcttaacttgtgtggttcttggaacaacataagttttggttgatttaggatcctgatttcacaggatactgtatcaactgctttaccaagatcaaagtacatgggttcactgcattcctttcagttgctaattcagttgtgctgtagccaggcaatcctggagccttgaaatccaggattctggtcaaggtgaggaagcagcccttcctcctggccttttcattctgcaaataccttttctttccttcttaatatttatttattcagcaatgtggcccaggctctgcatccctgacttcctaaagctttcagcctagtgcccctagacaagtggttacattcttgctacaaactggaaagtctctgagcccctcaccccactcctccccacttcttttcttctgctgtatttatggcactgtacctcatgaactttcacacaagggaaagcaaactcaatccaattgggtcttatgggtaagaaaatgtgttggttaaagtagattctggtcagccaggctatcgaagttttagtatttactagcagtgtgactttgggcaaattacttaacatctccatgtccatgtctcttttctcatctgtaatatgaagataacaataactcctacctcatagggttgttgtcaggaatcattgaagtgttaatacatgtaaagt

SEQ ID NO: 1177 - DNA, 2185 bp, Homo sapiens
actcccctgcaaaggctcagtcttgtctttacaccttccccgaggtaattattttctggggggtaggggtgggggttgggagggtgaagaaaggaagaaaaagaaggccgatcacactgggcaccggcggaggaagcgtggagtccattgatctaggtacttgtggggaggggagaacccgagcagcagctgcaaacggaagggctgtgagcgagcgggcgggcgggtggctggcagcgaggccaccagcagggggggcccgggccgaggccgcgccacctcggcaccacgcgggcagccggtgcggcggggtcgccacggccaggggagcgctgggtgcccaccatggcagttatgcaagcggtgaccccctggtcttgcctccccgccgccctgcactccttcctccccgctgccgacacttggatctctctagctctttctctcccctgtgttttcaaacaggaagtgcacggctgtctataacgtgctgccgggtctcaggatggaggagtgaagtctcctgtcgccgtggttccagcctccggagctcgcccaagccgcgtccccagagagcgccctgagagaacagggtggccgcttggtccaggtgcgcggggtcgggtctgggtccagggagcgggtcgggaagtctgcggcacggagcactgctagtgtcggatctgcatctccagctctgtgctgcagcttcacttgcccgccccccaccactggcttctcacccggggtctctgccaaactctggctgctgccgccctgggttcgggccggcggaaggccctgggcgtgcgctgcggagccgcctgcgaggactccactagggcgctttccaggctggactgccccgggctgcgctggagctgccagtgctcggggagtcttcctggagtccccagctgccctctccaccctctcctccagctgctgctgcctgaagcagcagctctttgttcctcccttactggtctggggtcatacacataaatgtcctgggaggcagggtggtgggagggtaaggggttgggacgtagggaagaggaagaagatgagttgtgggtgaagtgtaaggtggacaggagaaaagaatcttagtgtccatgctcagaaatcagctcttcagctgctgaaacagaggaccccggttccttggtttctgttttgggaaagccaggccatgccaaacagagggaattaatgatgcaggcacacaccggaaaggtagggaccaggaatgaggcacagcagcgagttctgagatgtttagtctggtgtctggcttgttaactccactgtggtttctgagccaggcctcctcgctgagacagaaggtactttaacatatgagccaggcatctttattaattccatttgtcatcaaagtaaaattgagagtgacttttctcaaattcaccaggtagattatactttcacttccacatcgtgttccatctcaaatgttcataggagaataaaacactagggttggttttatgctacagacgttttgcatctttatttccctggcaggtccaatctttctccagaataactcagattgacttctccccccagtgaaagcctagccttgttttaccgcctgtttatctacctggtgaaactctagtcttggggaggacactaaggggagtgggatggctgagaataatcagtttgatgggatcattatatggcctcaaattaaatgtttgagccctgttaaagccagtagcatcttcttaatttttatttccgaggaagggatgtgagcatatgactagaggggaggaaagtgagactctgccaaagaagatctctccctgtagcacagaggaaaagtgaatctgtgtagcacagtatcacatacactgcgcgctttcactttatcgggtagccaagccatctaaggagtcagggttaggtgtagaatttacattcatgacgtgggatgctgactatagcattctgatgctgaaaattttatcataaaacatatttactacataattaagtttgctttgaaaggaaaatttaccagggtggtacaaatttaccagcttgagtacaaaacatgtaatcaataagtacatggcattaagtagccaaaatgcactatgaaaactgaacaattaaacttatccttcctagatagacatgaacttcgtaa

SEQ ID NO: 1178 - DNA, 2315 bp, Homo sapiens
aatgcataatatgttagccatcagattataaagattcccaggtggaatttttcctctttgttgtacattaaaaggatgatgtgttaagccctgattttggatctggtcatgtttccgggctaatcgtttttcatggtcagctttgagatctttgcagttagtcatggataactggatttctcttaagagcattttccctacaatacttctgcgaatatgccttccctgtttttgtagagtcaggactgtgaggccagtttcagaatcatgatggtcatagccactaccaccaccaccaccagccctatattcatttcccagaagctaaaagaggcttcccaatcttaacctttacaatttgtggtaagtttaaggaaagggagataggatttatccctgttctgcagtgggaaaaactgatgtgtgggttcatattgaattagtctctctgatttctgtgtgtgttgtattgacatgaatgtaagtcattctgcttgagataggttgagcagggcatggaaatctaatagggttatttcatgaagttcctttatttgttaaaagaaattacttcctatctattgaacaccatatttttcaggcattgacaaatagacactgattatctctaatcctcctggtgttatgcagagtgggtaataaccctgtttgtttttttggttttttggggtttttttttgagactgagtctcgccttgtcacccaggctggagtgcagtggcgcgatctcggctcactgcaagctctgcctcccaggttcatgccattctcctgcctcagcctcccgagtagctgggattacaggcgcccaccaccacgctggctaattttttgtatttttagtagagacggggtttcaccgtgttagccaggatgatctcgatctcctgacttcttgatctgcccgcctctgcctcccaaagtgctgggattacacgcatgagccaccgtacctggccaataaccctgttttatgtgaagaaactgaggcaggcagagactccaagtcacacagacaagctaaggcctggacttggatccaggtttgtgcagtctccaacactaaaacatttccctcactgtatatcctgctttccttgttcttgaactagactatgtaaagaaatgatcatggtttgtttagtcttacctaccctttcagcaaaagttaagttaaaactgtaaacaatatggagacagtacaaatagggacatgaaagggtcaacatttttatgaatatttttggcttccatgtagtatgtattaatttttttctaagcaacctaggcatatggaatttattggccttcatgagaatttcttgaggcgatattgaccacaaacaatattgctggatcataggatatatgcgtactaggaactgcataattttactgggaactgcacagatagttgccaactttatatctccaccaatactgcataatgccttttttttttttttaaacaaatttcctgattgctgccaacctgataaatgttgattatacctaatcaattataattatacctaaccaaaattaatggtttaattttgcctttttctgattgctagtgaggctgaacatgtcttcatttacttaatttaatttcccttttccatgaattgtctttttatgtctttagcctgccctttattttctgttgggtctcttgcctttttcttgcaagaacttcttgagagaatttttgtaatgtttcttgtgtattctagaaattaattcctctttgtctttagacattgtaactttcttctagtgtgtcactttcctaataactttgtctatggtgcctttcagtaatagcaacaataaaatctttagttttaatgtacttgtctcatcactttatattattattatggtctgtgcattttgagtcatttaagaaatcctcccctattctgggctcacaatgttgtctctcctcattttcttttattaacttcaaaggttactcttattatttgggtttttaaactctttgtaatttgagatacgaagtattaacccaatttttatttttaaaaatctggtcatattgtgagccagttttcccagcactatttgccaactagtacattctttctccacagagttttggtgctacccctaggatgtcagtgcatatatgtagatgtatctttctgagatctctatttggttccagttgacttaattgtatgttcttgggcctttgatacactgttttatttatttatttttcaacttttattttaagtttaggggtacaagtgtatactacaaaggta

SEQ ID NO: 1179 - DNA, 1034 bp, Homo sapiens
gacagttaggtattcagtgggtagtcagaagacctctaaagcctaacactggattgtcaccagtgaggaatgaggaggagttaagaagtgggggcatcaaatggagagacagcgagagagcacaggcaggagagcgagcagatacacgcgggtgtgtacacgtttgcgaggagttgtgtgtatgtgtgtgatagtgattagagcttatagtttggttgagaatagtggtgaggaagtgactacaagtagaagaggaaatcattaatggagtaaagttccagaaaagataggggggccaagttctagagcacaagcatactcaaaggggttgttataaaagggaattgggacgtttattccattgggacaggagaagacgaggaagagatatgtgtggctgtaggtgaatatgcaagtggatgggaaagaagttgagaaagtttgttcctgatggcttggatattttcagtaaaggaggagatgaaatctgctgagagtgtggggccttgaggagacagctggaagttagtaacagttacctttgtaaaaggagcccagtgctttaggatgagtgatagctgtgtgtcattgaaggcccagttgtagttttgtcagtggtggttaggtgctgacggaggatttttttttttctgtttgatagagtactgtaatatgaatagcatgaatgaccttttacaatagaacgcacaggccctgcctgaaacattaagtttggatggtgatttaaagattggacaggaggagagaaggagcagcagacttaacattagggaacttgagttctagtcctagttcttccatttaatggaagacggggagttcttcctcctcatctttcaatggaggaagttgcatttgatgtcctctcaagtcttctgtagctctcagaacttctgtgagatttgcacatcattagacaaaaatgagtggagaagagagtaagagcagctagactcccatcacttatcatttatgggttcttctgatggcagcgctaatcccagagcctttgg

SEQ ID NO: 1180 - DNA, 1050 bp, Homo sapiens
agtgtagtattgtagaagagaatcgaacagttggagaaggataagtattcagaggatcttaccttaagagtcctttctcctttccgtttccatcactgcaccttgaatgtctttgcctatagattttgaaggatttcatcactcttctgagttggctgtattcttcctctggaaggtgtacttattcttcaaagccatttaactgtctgagcccccttttaagaacagggataacatcttaaagccctcaaggtgtggttagcattaaaaggtgaatccagtcagatgagtggctccagagattattgtaataatttaacaagcctaagcaggtgataggacactcctttgtaaattaagcctctaatctttctttatgctcatgccgatttgagagaaacctgggaatttccttttcccccattaagctattacacaacttaatgcttggaaaattcttcacaggaagaaacagggtgtaacagtttttgtgaggcatcttttaaaaatgcacccttttagctgaagtctgactatacaattgcctctccacctctttgctctagtttctttttgagagtcttaatttctccacataattatatactcttcaaagtgaaaatagttaaaaaattaaaaccacttaaactgaaagttaaaacattgttcataaatatgttcttccatttcctgagaaacaacaggaaagattgctttctcaaaataaactaagtagcctgagtatgaagtcagaccaatagagatcaaagattcacgcatcatcacacaatgggaaatttttagtcatttttctaaccacaaaaataagtctaatgctagttctgggggtttgttttgttgcctgtggcatcaagatatgtatgtataattcagaatgtacctttggcatatttgaaattgtcttagcctaatgtgactatctagtgtgtctgaaagagcctattttcaagatatatttgatgagtgtgaacatactacatatacagcaatggaaaatagccttcttgggcattaaatttaggaagaatg

SEQ ID NO: 1181 - DNA, 1027 bp, Homo sapiens
ccatccttggccaagggagtagagagatttgaaacttcatgggagggtggggcagagatgctctctaaggttacacagtgtgtacataccattcagtcacaagctttgtgctagaaaagcccatgcttaaataccacctctgtcccctgctaactgtgtgaccctaggaaagtaagctaaattcactaagcctcagtttccccctctttaaaatgaggtcaaaatgataagaggattatcatgtgactttaacatacataaggcacttggtttagttattccttcccactgactttgtgattctatagtttttcattctgtgccttttttcctttctttcttcttttcttactctccagttcattcattgtagagccattaatggttttttcaccttgtattgtcctcttctttattaatacctgtgccttagggcctactagtggtgccagggattccctgagctcctttggtagcatcactgtccatgtcacatatctggacaagtcagcgaagaggtattggtcctctgtatcctttggacttggcatatgggcatccctgaagacttttacaaagccaagattcattgctactttagctttcctgtgttgtgtactataacaagttctgctccatgaaagcatcagatagcagttggatatagatggagaaaaaggttttgtacagggacttatggatgtagaaatctatgctggtaacatttattttttcttcatctaagtttctgtttttggagccaggcttctaattacaaataattgtatttgacagagaagaagaatatcagatcctgaagggccagaatgattcatcctctttaaggggaacatgtaacataactttggggaatagctatagatactaaaggggcaacataaaacagttattgattacaaagtgtatgaagacccagttgcttggcagagtgatatcatttagaaaagtggtagaatctcattcgtacacacttcatgactaaaagagctggttataccgttagatt

SEQ ID NO: 1182 - DNA, 1048 bp, Homo sapiens
attttgttgttattttcttacatctagtgtaccaccctgactccagcctctggacctgggagtcatttcattgtagctcaaagaaggctatatataccctgttagcccatactgcttactaagttgttaatgaaaaagttattgttcttcataagagatccgtcttttgtccatggtaaatgatgttatgaaatttttggtttatttggttgttctaggttaggaataattgaagtaggccagtctttggacagtttagttctcctgtgtttagcactttttgtatttcttctctgtgctggatgtatttatgtttttcagtctttctgtgagttaactctaggagatgggtataactgtatccatttttgtcagatgataaaaagaggcttgaaatgcttaaacaacttgttccaggttatacagcttataaactggaactggatcccaggtgagttttccagagcacatgttcataattgctgtcttttttttacatttcctgcttcccttactacctgagtattgggggaacaggctgtggaactgaagattttactgtaacaaatgatccaaggaagatcatctggcctgaccccttggcttccagcaggaagggtgttttctcccgtgatttcatggatgagatattcaaggccttgtttttatttattttttggtttgctgtttcaaaataaaaaggcttttagttctttgttattataaaagtaataaattctcatataaagaaaatataggaaataaggagaattaaaaatgacctttgtagttccctagtcagttgatgaagagtggattcagatagctgtatcccctcactagccatttgactttgggcaagttttatagccttttcatgcctcagttccctgtatgtaaaacaagaataataatagtgcctgccttatatagttgttatgaggattacatgggctcttatttgtgaagcatttagaacagtgactggcacacagcaagtgcagcacaagcattggttggataaaataaagggctgcccatgtagtct

SEQ ID NO: 1183 - DNA, 1030 bp, Homo sapiens
aagcagagacaggaagaggcggcctgggaacctcagtttctttttgcctccttagtgatcctaataacctggaatattaataaacttatgtccctcactttcaagatgctgaaaatgattatgcttcttttttttttcctcctagctttcagagagctcatggaaaccaagcctgtttatttgagatttttctgttgcagggtaggccagacatgaatttcctttcatgtgatattttctgtggtctgtgttatttagttcttcctttgttttcttgtgctttggtgtgaagaaagaagatgccctgtttataaagccttggtctttcatgtatcatgcattcttaaactaattccagttgctctgaccctttgagattttaaaattgctttgttccggtttttaagtacttttgaaatattaaaaatgttcatgagggagtgggtcatgggaaaaatttcccagggttgtttgttcttagaaaattgtgaatttgcatggagaggttttatgctgggttaaattctgccaggtgcattggtcacttgaacttgagtctggttcttttgatatttaaatccgtgttgttatggcataaagtgcagagctggaacctcttaaaactaaatgcctgctatgttgagctcttgccccattgtcccatcaaagaaaggtcttaaccagtacttgggtttgcattgaggcaccatgtcaatagtgaggatcaaaagattggtctgttctgttttttgtctttgaaccaagactttccaaaaagaacatagacttgttttgaatattgccgcctctgggtgtgagtgattatgcaagtcagtagcatttttgtttttttgttttgaaaaaactgttcaacatagatgcagaggtaagaaattgcaagaaaaacaaaaacactttttcaaacttgtacaaagccatctttgaatgcaggtggtcctcagtttacaaggagttgtaattcttccttcatctgatgaaagacaccactatccaccagttaccatttgaa

SEQ ID NO: 1184 - DNA, 1046 bp, Homo sapiens
ttacattgatttgccttttctaatagatttcaagccccataagggcataaatatgtctatcttgtttcccactgtatcccaatacccagcacacagtaggatctcccgtgtttttgaatgaatgtggtccagatcattcccttattattacttgtagtagtgcttagcacacaacctgtgaatgaatttcattcctttaaagggagttttcaaaaaccattcttgttgattactttgcttaattgtactaaatatgtataaacatgaaattatatatatatatatatatatatatatatactttctgtgcttatagtttttataaaactattaaacattttaaaatcgcaaatacaaataatatattaaaacctttgaaatttaaattaataagatgaatgcttttttgccaacactaaatcacttatgttgattttttaaaatatgaagttgttccattgggtccaaatatgtacttaaggcatatgagtcttttgactgatagtagtaatgtagagaatacttatttgcataaataagttattcagaagcacattatgaactcgaaagccttgcttgctagctcaggactatcagaacttatcagatcgtaaatctgccagtgaatagttctttagttacaattttaatgattttaatgacttacaacttttttgttagagctgtaaatgtcctgttcattcaaagatgatgttaccatttcagaattactgacatcaactccaaatatatatctaattcaactattggcagaatcaggaacaggaatatgtttgtaaattttagttcttagagatatggaaaatttttaaggttttcagcatgcagccaagtgtcagactgttgaaggaagtcaatagattatagaaatgactcattcagattattttgaaaacaacttgaacagaactttttgttatcattgcctcctctttataatttttgaattgctgaaacaaaacctttgctctacaatacctgcatgtgtagcacataccttcatgtcatttgaccttcccttggtg

SEQ ID NO: 1185 - DNA, 1202 bp, Homo sapiens
ttcccctcagaattcaacctgataatgcagaggctttcacagccatctagtcccaacattgtctataagatgcttcaagatagaactttaaggaaaacacatgtaggaggcagtgaccaggggtacttggaaataggtaccctttccaatttagctttgtgaacatttgttcaatttggtagtttttaagctaactaatagcattgtgggcattttattcttggatttaaatttgggtaatttctgtaggacgctgaaataccttctacctagacatagaattcaactttaaataatcctactttaagttggttcctgggatgaggtacttagtaatacagtattgaagtggtagatggtgaagttacttcctgtggtggtgtttcattcatgtctcaggttgcaaagttatgtaagttgtttacagcaaaatactagtgaggaagagttcatttgccactgctagaaggtacagactccccgcatttagtatgatgactatctttggtcttttcttgcagctgtcttgtttatagagtcaaattatcttatgtctatctagggttaaatgtcacagtctcatgggcaatgtaacaaagtttgtattttgtgctttgttaaagaaagctagtaggtgattacttgcggttgaatcggtatttggagactcattaatgattaattgaaaacacacacaagcacttttttggtaaccgcctgcgcatagcgttcttttggggttcagatatttagcagatacccccttccctctcctaaaaatatacattcattttatattgtgttagacttaaagtatatttgaacagaatatgaagtttatgattcttaaactatttgcatttacatatggtataattactcttaggtctctgacggtaatagatgtccattttttttcattaatactcttgtttctttctactgtttacaggaatactaacaaaataccttaactgtcatctcaaaagttaatgataaatgttaataaacttcattataaaactgttcggtgatttacaatttgaaaatattggcaacccatagtacctggtacctacggtttggaacatatggtgaatggatttatttcaataccttcagtggctcttttctgaaaaagtccattgaaaatcttatgaggccttttttgtacttttgcctgtttgtttgtttgtttgttt

SEQ ID NO: 1186 - DNA, 1058 bp, Homo sapiens
tctgcaacgtaaatgcaagttcttttgggacaagtgccatagtttaaacgtaaattattcattgacagtagcaagcgttgtgcaaactatgcagtgctttctcagtaagtgctcattgagttgccctgtgtgcatgatgaccagctgtgttatctggatgtggaacatagcgttctgctatctgttttcagaaatgtcgcatatcccttccagggcagaccactcattgccaaggcataaggtcgaaaactgcccagtggggtggaaagcaaaggcagttggttagctgttggtgctttctttactctctacgaggatctttcaatggcagtgaccaggacttcattctgttatttgttatagaacaggcaagacatgaaccaacccagtcatattctgtaccaaacacatctgtggtccattctgctttccccagctttggtttcttcatttcacacgtccaagagaattttcttaaggataaccatcttattagaaatatgtctaattgataatgaaatgtctgtatttagctatttaactttgttctgggttctctctgcttacttaatgtgactgcatttccctgagatgaatgctgtgggtttttgcagtctctccccaactttgcccctcccctcttagatgaaggtgcatcactagagaacctgcaccactgtgtctcctacactgtgtcaggtagacagtacatgattagtaatgtgtgtgcaaagctttcatgaatgcttttaagaagttgaactcttaatattttgcttaatttccacatgtttaggataggattaatgtagagttgaaattaagatagcatcttgggaattttagataggaatcgtttgtgacccaaagtgaataaaaattgatattacaagcaggcttttaatccagaaaatttacttattctgtccagactgtgaacagttgttttgttctcaccaaaggcaattttggtgaagtgttcttagaaacagtgtgtacaggcttctgtaattgtacaggggagagatcatagagatccagggaacatcaagatacta

SEQ ID NO: 1187 - DNA, 1041 bp, Homo sapiens
gaattctttccctgcctggttagagcagagaggtggcagggtagtgggagatcagatattaagggaaaatccatgtgaaaactccagagtcatttagaataagggttagttaaccgtggtctacaggacagctgcctgtttctgcaataaagtttctttggaacatagccacattcattggtttatgcattgtctgtggatgctttgcactacactgatagagtcgagtagttgttacaaagactatactgcctccaaagcctaaaatatttagcattcggtcctttatagacaaagtttgttggatagcttaccaaataactacatgaagattgaaaagtttctatctgctctccaatttggtagccactggcccttgaagtttggatagtgagcacatgaagtgtggaaaatgtgaccaggtaactgaaagtttcatattatttggttttaatcaattttaaaaattaatttaaacctcaatagccacatttggctgatggctaccatgttggataatgcagaactgcagaactaaagtgaagctttcagattgggattggctgtaaaatgtcaaatatgacaagggtctgctttaggcctctggaaagagggagtctaaggaaaggaacatctagataggatatattttagaagaaacttcaaacagttctttctctctctctctctttttttttttttaaatttgtgtttattaagagttacttgtagggatccagttctgccacttacagctttttgaccttggtcaagttacttagcttctctctgcctcaatttcctcattggcaaaacaaggataataacagtaccttttaaaatttttatgagctttaagtgtgtatgtgctttaaaaataccttgcacatagtaaaagctttgtgagtgtttgctgttcttaattattgttattattatttcatgattttttgtggcctaatctaagaaaataatccttacatatttgccccactcccccttttctgttttaaggaaagtggattctgaatttcagagtaa

SEQ ID NO: 1188 - DNA, 1034 bp, Homo sapiens
gttctacattctgcagagatttaggttcattatccataacatgagtaataaaatttccccatgagtatgtgaaagttccatgcttggtgccttatgtgtatataggaaggatgtaataaatattagtggatctaaatcagaaaatagaatttaaagcagcaactcttgcccaaccagctagatacccttatatatatttcctttgtatcactcttcaaccttttgaattcaacaccttatttcttcttgcatggactgttgtgctagtctttgaactgatctattcattctattccaaatacagaatgttagattaattttttcaagcacaacatgttattgctaacatacgtatgtcactgtattacataatacagtgtacatattacataatatatgtaatacataatatatttattacataatacatgtcactagcactggaatctaaagctcatcactctaatgccaatgtattttgcattaaacactttgcctcagatgatcctagaaatgactctggaaagtgaaatttttgatggcactccatttcctacagaatgaaaagcaagttcttacctatgggctcttaactattccattattaatctcttctttttactggcctatctcatttccagctccatttctatccctaatcctcccagttcaatgatttctcctttatggttctttacatctttggacatttttcatccagtcatctattcagccaacaggaaggctggtaaaagtgggagtatgtggaaattctccttcgattgcatattctttggaaaatacaaagtgcaaggttttccagctgagggtggggaggagatttctaaagaaaggagaatgtatgaaatagtcatctaaaaaacgaaagaatgatggacttgggaaatatgctaggattgctaggctaaactaaggacccccctgagattagtggtcataagtttaaaacagtacttgtcagtcagcatggtgactgattttctccaaacatgttcagcagcccaggtacagtt

SEQ ID NO: 1189 - DNA, 1090 bp, Homo sapiens
aggaaactagatggccgttccatatgagaaaagaagaggcatgccaaacaccagaaatagccacttgttaggcccaggaaaccacctggggttctggctggtaatgagcctagggcatatggagaaatgtggagagattaggagggaggacgagggcagatagtggatggggcttcaactgccagtcaagggagtttagactttatttagcaggtagtagagtttttaaagaggaattccagagctgggcatggtgatgcctgcttgtagtcctggctactgaggaggctgagacgggaggatcccttgaggccaggagtttgagggtatagtgcatgatcacgcctgtgaatagccactgcactttcaccggggcagcttagtgagacccccatccctcaaaatacgtgtgtaggcgtgtgtgtgtgtgtgtgtgttaagggacagtattttcagaaacttatttcagagggtactttgagaaactacttttgatagcaatgtagtgggcagattggagcagttagatccagttggatcaactaagatccaatctgatcttcgttggattaaaataggattttatttttgagaatgggggatatccaagcatgaccagagggtaaagggaaggaacccctgggttttctgagtgcaggatcacgaccagatggtaagggaggaggagatgaacagcacatctcattgggggcctggtcagcactggtattggaacctctcagtaaagtacctgctgaagagagatgccctggaggagccggcctaggctgtggattctgggcctttaaggctgctgttaaaatcactaactgtggggtttcagctaggtggggaaaccagaaagaaaaaacaggaggggctaatgatagaccccttgcatgctccagaacatctaacatgttgttcaagtggtataattgacatattgatgatcagacagaaaatgcagagcactgaacgttcgtctcttaggaccctaattacctcctttgtaaaacaacccttcagattctgttcagcactagcagcctgtgaatctgtcagtggagaaacatagggactttagaaa

SEQ ID NO: 1190 - DNA, 1062 bp, Homo sapiens
cagtatcatgaatttaaaatatgggataggaggagagccctatggcatggcattcttcttcttattttctttataatgttaccacctcagttatttagtttgttggctaatgacagattagggagccacagggtgggaggtttcttagaagaggggtggactgatcataccctgagtttattatctgatgccacaggagaaaacagaaaagatgtaaaaaggcaccaagggagacgtgacactgtgcatttgtcaaaacccataaaactttacagcacatatattgaacattaatgtatccagatttttaaaagccatttaggaggttggaggatcccaggatgaaattcagactatgacaaaagaatccaactgtattacaaagtacagaataaactcactgaagaaagtgaatgaaaaagggttaccgacttaaataacttaggaactatatgcaagcactatactctattcgataaagttgtttcccatgaggatataagttaatgattctgaaactattatatatgtacactggaattgaataataagtaaatggatagtggatgatgagggccttggtttctcactttggaatggaaagttatagataagcaaggagggaaatgatccatgtggtaatggatttgaattggagataccgatatgaattcatgtttagcttgatatagatacaaaatacaaagaaatatttatagatatgtgtatatacacaagttagtacgcacacaatttcttcgctgtgtcacctgagagagcctaaaagcagcaatatcccagcagcaacaagcatatctggcatccagatcttggtttctaataccattatcctgtgaaagccaccaggtctcctggccgaatgacagattccagattctagagcgggggcagggaatgtgcaagatgaacttggagcatcttgtagtgctggaaagtaaggaagagcttaacaaacccacaatgacgaaggtttatcagagggacacaggagttactgaaatagctcacagtggccaaagatgaaataatttgagcaacaaa

SEQ ID NO: 1191 - DNA, 1065 bp, Homo sapiens
ttgaagttaaataaattgattgcttaatgtgcacggggcactgtgctaagtgtggacatgtatgggctcactaaatccccaccacaacctctgaggtgagtgctgttgtttcccacttattgagaaagagggaaacagagatgttaggtaacacacctgacatcacacagctaataaatggcagagccaggattcttcgctctggcagtgtgactcctgtgtctcttctcttcatcattgcactgtatgttctctgagggtagagttgtgggtgtgctggagacagcatggggaaagtagtagcactctccatttgagttgttggactgattttgagtttctttctttcacagtgaaagttgtttgaattgttaatgagaggaaattttagaaaatgcttcacctttaatatattaggttatatctcttctctgtaacggcatcttttcaattctcttcatcactttttttgtttacctagtatgtgatcaaaattaaagttgtctgctgtggctgccttttcaatgaggtacacagtatcacattgccacatgtaatttccactcaggtgacactgttctcactgctgagagaaatggcaggattagcagaaagggtggtattagatattttatctcccttaatctacaagcaaacatggttacacatattggaatatgtcttttcaggattctggtggactcggttggtttattttaaggatgagagtttcctccagaaggttaagcattattacatctgctgctttaccacacctacttttggggtgtttgctgatgttcataactagcaataactgtgattcataaaaaggaatctcttatttttatgaacatttcaatctggtgtcttgagttgagcccagaaactttatagctggctctgagtttatttctcccaaaacataaatgtatttttgagatcctcttaatacctctggtatctgatattcacacatcattttatttaatgattctagaggcttggaaggctgctaaaagtcattgttttcgcctttgagaataattaccatcctggaatccc

SEQ ID NO: 1192 - DNA, 1066 bp, Homo sapiens
tactaaaaatacaaaaacttagccaagcgtggtggcgggcgcctgtagtcccagctacttaggaggctgaggcaagagaatggcatgaacccaggaggcggagcttgcagtgagccgagatcatgccactgcacttcagtctgggcaacagagcaagactccgtctcaaaaaaaaaaaaaaaaaagaattcagtaaatataccaaatcccctcactgagtaagaatcttggctctaatttaagtcccttagcccctcctttcatgttcttaaaatcatagctaaggtactattcttcttatagtgggtgatcagtacatattttgtacttacgaaccagtaggcctaagtgagttgtttattcttttaagaattatggttacactttaatgaattcagaataaaaaataaatcttcacagcctaaatttagtgaagagattataccgaatatttggtctgactttgttaacaactttttgaaggtaagatttaaaaactttgagactatgacacttactggaggactgttccagcacactggatgttgtagaagtctggaattctcatctccattctgccatttccttgtaacaagtttcttggctataaaataaagttgatattatttgtttgtctcatagtagtttgtgaggatcagattagttggaatccatggaattgtcttttaaaaagtgagattatgataaagaccttaggtaatattgttattaaatgacagttgggttgttgtttcattttttaagactttactccttgtgcccttaggcagcctttgactaccagcattttgtcaccttcactttaagggttccttctagtgattttttttaatttgtagaagcaaatttaatttaatttgagttaatctctagtttaaaataagctgagggggcaggtatgggcttcatagtgtcagtcagatctgggtttgaatcctggtccaccttgtattagctgtgtgatctcggtcgaattactcaaactttcaaaacctgttttctctcagtaaaactgaagcagtaataccactgctcaggatggata

SEQ ID NO: 1193 - DNA, 1032 bp, Homo sapiens
ggggttgcctcttttggcttctaggccaacattctcttcatagttcttgtcctctgacccacccttcttcctctcctctgctgaatgcttttcttctcccagttccctaaatgctagtgatcccctggattctgccattggccttttttctctgtgtatgctctccttggattatctcatcctgcatatgtggattagtcacaaatctgtaaatcccagatctttctcttaggattcaggacaaccaactactagataccttgacttaaatttattatgccactaccagctattccaactgaaaaattgaattgagtggaaatcatgttgactatagagtagttttctccttcatctccctgcctccagtctttcctcccttcaatcttgcttctacattcctggtagaattctttttaaaacggaatggtgacctcattgcctcacttgttaaaacccttcaggggttccttactgtccctttgtaattaggatcttacaatattgaactttccctgagttgtaccctggaaaatctccccatccttcaattttccaaccctcaccccccacccccaccctttggtgttctgggaaaccacaaaggactatcttgttctccaatattctgagattagacccatctctgtccttcctgactcccagatgacttccttgtttacctgcctctatagaactccagaccctttccttttctttgagacagccctcattagtgttttattccagtagcttgaagaaaatcacctccttaattgtctggtgcattttggctctcacaagtcttaccctgttaatttgttacagttatcattctatcatgttatgtttgtttataatataatctctacattgtattatttataataaattacaatatattgttcataaattgttagtataaaatactattttatgtttatacttccactttaagtccttagtgtttataaaatacttgtatttataaacaaggatgaattataaaataagtctgtccaaatctatttc

SEQ ID NO: 1194 - DNA, 1037 bp, Homo sapiens
gggtcgcacagcaccaggtgagcagtgggagagtgagcaaagcttcatctgtatttacagccactccccattgttgacattactgccttagctctgcctcttgtcagatcagcagcagcattagattctcgtaggagtgtgaaccctattgtgaactgtgaattcaagggatctaggttctgctatccttgtgagaatctaatgtccgatgatttgtcactgtcttccatcactcccagatgggaccgtctagttgcaggaaaagctcagggatcgcgctgattccacattatggtgagttgtataattatttcattatatattacagtgtaataataacagaaataaagtgcataacaaatgtgatgcacttgagttagcccgaaaccatccccctcccccgtccatggaaaaattgtcttccatgaaaccagtccttggtgccaaaatggttggggactgctgaccttggtgatgggatcattcatacatcaagccttagcaactagtttacccatgttacaaacctgcacatgtacaccctgaacctaaaataagtcactagaggatcataatgtacttaatatactatattatataaatatgtgttaaatatgctttatacacatacacactcagtatatatgaaaagctacttttgttttcaaagtgcttgtgcatctttaattcagtcgatggttgaaatacccccctggtaggaagggcatatgtcattatccccatttttggtgggtaaaatggtataacagatgcattaattcaagtcctgtggctgacattgctggaaagtactggctttcttccttatggcctgggcactttcttaagcctatacttaacatccatgctttggtttccatactttggcttacccgtgagatgtgatatctgtacaggggtataccagaccactaactgggatagcattaaagttatttgtagtttctctaacgcatcatttatctcatgctatgcctttgcccttgctatttcttcagtcaaaattgttttccctc

SEQ ID NO: 1195 - DNA, 1053 bp, Homo sapiens
attgttgtgtaaatatcagagtgtacttacacaaagctagatggtgtgtgtgtgtatatgcatgtatgtatgtattcatatggaaaaccaaattcccaacatcattactgaatatcagtcctttcccctacttcaggagtccccgggccccaggctgcagactggtacctgtcgagagctgttaggaactgggcttcacggcagtaggtgagcggcgggagagtgagcattactgcctgagctccgttttgtgtcagatcagcagcagcattagattctcatagtagcatgaatcctatcatgaactgctcatgtgagggatctaggttgtgcacaccttgtgagaatctaatgcctgatgatccaaccaagatgaaacagtttcatcccaaaaccatctctccccccaacccccatttctggaaaaattgtcttctacaaaacttgtctgtggtgccaaaaaggttgaggaccgctgccctacttgatctgtaatgccagtgattagtgctctgtatcaggtttctatgtacttcattataaaatggagtctcactctgtcacccaggctggagtgcagtggtgtgatcttggctcactgcaacctcctcctcctgggttcaagcaatttttctgcctcagcctcccaagtagctgggattaaagcgtgaaccactatgcctggctaatttttgtatttttagtagagatggggtttcaccatattcgccaggctggtctcaaactccgcctcaaatgatccacccacctcggcctcccaaagtgctgggattataggcatgagccaccatctcgtatcttatgggaccaccatcatatatgcagtccattgttgaccaaaacaccattatgcagttcatgactctttttaaaaagtaaagaaaaatcctatttgaaagaactattacatgcaaaaaaatctattgttcctattactcatgcagatggccctttaaagccatggtccccaggtatgactgttacgttccttgccagaaataaacctgtgcaaggtgtactctctagtctctg

SEQ ID NO: 1196 - DNA, 1035 bp, Homo sapiens
tctggaacataagactatccaaagtttaacggtatttaatggtatacacagacctttcaattttggcttatacaaaataagagtcatcccactccttgacctccaaatttcagtcttaacctttaatgagtccacaacaaatgccatcctgctgtcataccctccttcaaggtccactaagtaaccactatggacttggtgcagtctgtcataatttcttacctagaatgcaattcttactcattctttccctcttcccttgcactaggagagaaaagctgtatattccccttttagtttattttctactacatttatattggataaaaagataggacctgaatgagaaaactttagttaggagcaggcatagggtttttctcatttactcttttcatttgcatctctagaataatgtcttttgtcttcttgttttctaggaatgtttacccttgcggaagttgcatcacttaatgacattcagccaacttaccgaatcctgaaaccatggtgggatgtgtttatggattacctagctgttgttatgttaatggtagccatctttgcaggaaccatgcaacttaccaaagatcaggtggtctgtttgccagtattgccatctcctgtaaattcaaaggcacatacaccaccaggaaatgccgaggtcaccaccaacatcccaaagatggaagcagccaccaaccaagaccaagatgggcggacaacaaacgacatttcctttgggacatctgctgtgacacctgacatacctctcagagccacatatcctcgcacagatttcgcacttccaaatcaggaggcaaagaaagagaagaaagatccaacaggtcgaaaaacaaacttggattttcagcaatatgtatttattaatcaaatgtgttaccatctggcccttccgtggtattctaagtactttccatacctagctcttatacatactattattctcatggtcagtagcaacttttggttcaaatatcccaaaacatgctcaaaagtagaacattttgtttc

SEQ ID NO: 1197 - DNA, 1853 bp, Homo sapiens
ttgaaaaactcaggcagcacatttcacgcaacgcccaggacaagcaggagttgcatctgttcatgctgtcgggggtgcccgatgctgtctttgacctcacagacctggatgtgctaaagcttgaactaattccagaagctaaaattcctgctaagatttctcaaatgactaacctccaagagctccacctctgccactgccctgcaaaagttgaacagactgcttttagctttcttcgcgatcacttgagatgccttcacgtgaagttcactgatgtggctgaaattcctgcctgggtgtatttgctcaaaaaccttcgagagttgtacttaataggcaatttgaactctgaaaacaataagatgataggacttgaatctctccgagagttgcggcaccttaagattctccacgtgaagagcaatttgaccaaagttccctccaacattacagatgtggctccacatcttacaaagttagtcattcataatgacggcactaaactcttggtactgaacagccttaagaaaatgatgaatgtcgctgagctggaactccagaactgtgagctagagagaatcccacatgctattttcagcctctctaatttacaggaactggatttaaagtccaataacattcgcacaattgaggaaatcatcagtttccagcatttaaaacgactgacttgtttaaaattatggcataacaaaattgttactattcctccctctattacccatgtcaaaaacttggagtcactttatttctctaacaacaagctcgaatccttaccagtggcagtatttagtttacagaaactcagatgcttagatgtgagctacaacaacatttcaatgattccaatagaaataggattgcttcagaacctgcagcatttgcatatcactgggaacaaagtggacattctgccaaaacaattgtttaaatgcataaagttgaggactttgaatctgggacagaactgcatcacctcactcccagagaaagttggtcagctctcccagctcactcagctggagctgaaggggaactgcttggaccgcctgccagcccagctgggccagtgtcggatgctcaagaaaagcgggcttgttgtggaagatcacctttttgataccctgccactcgaagtcaaagaggcattgaatcaagacataaatattccctttgcaaatgggatttaaactaagataatatatgcacagtgatgtgcaggaacaacttcctagattgcaagtgctcacgtacaagttattacaagataatgcattttaggagtagatacatcttttaaaataaaacagagaggatgcatagaaggctgatagaagacataactgaatgttcaatgtttgtagggttttaagtcattcatttccaaatcatttttttttttcttttggggaaagggaaggaaaaattataatcactaatcttggttctttttaaattgtttgtaacttggatgctgccgctactgaatgtttacaaattgcttgcctgctaaagtaaatgattaaattgacattttcttactatatcaccttttttgaggggtcttaatttactttgcttaattggtgcaatattgctttaactccgttcactaaagacaaacacatcaagtccaaacttgtaaatttagatttgctgaaatactgatttatttcctgttttaatttaaagtgcctcaagtaagcacctctcacaacagttgactggtactgctgctcctgagcacctcgtgtcatagattttatactcttacagacttggaatgcagtagaggtatgtggatttttaggggttttgtttttttaagaataagt

SEQ ID NO: 1198 - DNA, 1032 bp, Homo sapiens
gatttaagttaatcagaattttggcacagcaagcatcaaatgtccttcacatttagacctgtacacagccttgtaagtgtttgacttacggattaaataaactgtattttagcaatacttttcagttgtctcagatactaattctttaaaccacttttacagggtcacaaagtaatattaatttggtcttcacttttgttttcaaaccttgcttggaattggtgtcaagataaagtggtatgtagtgacaacattagggagacatgggaaaggacttatgtgattaaactggatttaatcctgagtaaccaggcatgcttaagtaaaaccagttcactaagtaggctgtaaacttttaaccccaccaaaaaaatgatctttaaatgaggtgtgatctcagcatatgtcttactcgatgagcttttgatttttcataacatttcatgcaacaaagaattaaagctttcatatctaggtacagatttgtgaaaggggactggaatagccctcttgtagatacttttcagttactttgaaatagtaagttcagctcttaagagtagcacactctcgtggttttgtttgttttggttggactttaactcattttgatgtagatacctttaaactatgaatatttgggctgggcacgatggctcacacctgtaatctcagcactttgggaggcggaggcagaagaatcccttgaacccgggaggcgaaggttgcagtgagccgagatcgtgccattgcactctagcctgggcaacaagagccaaacttcgtctgaaaaaaaaaaaacaaaaaaccaacaacaaaacaaaaaactatgaatatttgaagtggccagagttgggagtgaaaataaaaaatatattattgtattttcatgctgtagtttgatgataatgccaacacccaaggtatagcagaggctaacaaagtggaggtggggcagtagaaacagttctttccactccccacccaaggcaataagggaatccatttctatggagaattgaaaaacaataa

SEQ ID NO: 1199 - DNA, 1050 bp, Homo sapiens
atgttattgaaaatattatttatgaagctttttcttaataattaaaaaaaatcttttctaatgtggggtgctatgtaaattagcaaagcagtctaactagaatggattttactgaaccagtctaacatttactttccaagaaacattcaggacatattcctttaattctaattttaaaggaagagcatattgcaataataaaaatatttttaaaattatgttcaggttatttattgacaggtactacttacaccaaagcacttgtgctctaggctagaagcattgtattaaagccatgaatactatacctttgactagtcgagattgtatttatattttcctgttactactgtataaagcttaaacctacttaaacaactacaagctttaaggttgaccatatttcaggagaaggggtgtctactttttgaggcacaaaggttcctgctgaatataagtaaaactagttagtagacatgtgaaacagtcatccttctgcataaattgaaggatccggattccttaatgatggactgaatgatgcttactttccttctttctgcttccagtgtaccactatggtttatagtaaagaaaaattaagaaagtgaacagttgcaactattttgcttatgtgatagatgttttgaaaaatgtagttggaaataggaataatttttatatggttactaggattcagaagtaaatctatttagtgatctgtaaataattgaagtaatgtaacacttaatgttttaatatgtcagttattgcccttttatattgtgaatgtaatgtgcataagctatatccgtagatgttattgttttatctcatgtgtaattgtgggcctttataaaattgtgttgtaagatatcaagcaacttttgtaatccatgctttgggtttgtgagaaggaagatgatttatttcttctgttaactctcttaaaacctcgaggagactgtgtgctcccttttttagggtagttttatgtgataatttcctgaaggaaataattttgcaaataattgaatatattataagatg

SEQ ID NO: 1200 - DNA, 1049 bp, Homo sapiens
atttttataaccagagataattccccaaattttgactcctacagacacaatgaagcagtttgtgatatagattattgggagtgcaaaaggatctctctgtgtcacaaataacctacatctaagtagacttcaatttgtgtccctattgaaagccaaaatattgtaaatgttttgtaatttttaatattagggatagattcaaaaaagtttgaatagtttgtgaactttagcaaatgaccttttccaagactagggctgggcttaaataatgacagacaaatcttttcttcttcataaaatagaaaagctgctaagaagcagattttaaagctaagttttactaaactcaattcatatttataatctgactcagatagctttctatctggtctcacgttgaactgcccagccctaatcaaatgtgaacaaaagtagaactgtgcaaaccagtatggtataaatgaattttagttgataaatgtcatctgataatttgtcttttgaattgtctaacattagtaagcttacttttgttttttccctcactgtgcaacttttccaggtttggaccttatgagtcttacgactccaggtcttctctgggtgggcgagatctgtacagatctggctatggttttaatgaacccgaacaaagccgcttcggaggtagttatggtggtcgatttgagagctcctaccggaatagccttgactctttcggaggtagaaaccagggcgggtctagctgggaagcaccttactcccgttcaaaattgaggcctgggtttatggaggacagaggaagagagaattactcttcctacagcagtttttcttcaccccatatgaagcctgcacctgtaggctctcgggggagaggaacgcctgcttatcctgaaagtacgtttggaagcagaaactatgatgcttttggaggaccatcaacaggcagaggccgaggccgaggagtaagtacaacagaatcttttcagattcttttcactagtcactcttttaaaccctttcaagaccatcgttttcaactagaa

SEQ ID NO: 1201 - DNA, 1200 bp, Homo sapiens
actgatacattacagttccactatacttcatgatcataggttaattgaaaatagttgggatgataggctttgggttttgaattgaaaatccattctagtttgaaaatttggaaaacacttaatattttccatgctgtatattattttagacaaagtgtgttttcttaatgaggcttcaaaagtaaatttcgttttcataataaacaagtattcctgtactttgtatttaccattctagtctgaatggacttttctttctttcctcctgttagtgaagtagatgagccaataggacctacattttaaatcttcacttgtacaattccccttgggtccttctcttcagattactcctccatctttatcttctaaaagtaagattagcagaataaatttctgtggacatgtggcctcttggtgtagtagatttggataatgacaagagaagaggaagggacacaaagagtcgtttggttgcatgactcttcatctgtaaacttttgtttcttgggcttctgggtcagaaaatgtttctctaggtaagaatgtgaatggaacgtcagatgcaattctttatctgaagtgtgtcttggaagttgatgcatggttatgctttaactctcctatttcatactaatgttccatctcgccttctcattccctttttcaacagggagaatactaaatgatttctggatcttttttacttcaaactacaaatatggtcttctttgtgtatcttagttttagtaaaataaagatttcttttagggtcttttcatgggaaaacatcaattaggaactctgaagaggagttgtcagagagttgtacaagtggtaacatttggacaggcacatatgttgtctataatctcaagtaattttgaaatgtaaaagtaaaaacatagttagcaaatattcattatttgttctactggaaataaaaatactaattcaatggatttgagtttatgtaataatttacagagtttttcaatgtgttttttcagaatggacatgtaaaatttagttacattccagggaattttcaggtgaaaattagtagatagttaacatgaaaattttatatgaattcatattttttcttggacaatatgctaatatttattgatttcacaaatttacagcatatgggtgattttggaagcattcatagacccggaattgttgttgactatc

SEQ ID NO: 1202 - DNA, 1043 bp, Homo sapiens
aggagatgaggaggatgaagagaagattgatgaacctattgaagaagaggaggatgaagatgaggaagaagaagcagaggaagtgggggaagtagaggaagtggaagaagtagaggaagtgagagaaggaggaatagagggcgagggaaatatacagggagtaggggaaggaggggaagtaggggtagtgggagaagtagagggagtgggggaagtagaggaagtagaggaattagaggaagagacagcaaaggaagaacctgctgacttccctgttgagcaacctgaagaaaattaaatataaggtattagatttaaaaggagctttacatttcggttctaatgtaaaaaagggtaagaaatttaatagcttaaaatatgaattaacacccatgttgcatgcattccacatattaaaatttgttttatataatttctaaatgtttaacatttgtttaataaaatgaaggcaaaactattttagtttagtttttatagctaccagacttagatccgataaattgtttgtataatttttaagcttaatttttattactttattggtgttaaggataacaaatgtgtattgttagtatatctattctaatcattttatcttaaatgctgctcttgggagtgaatattcaagtgtgcatcaattttttgaatacttaccctggaagatataaactgggcaagtattttgtgctctgtgtatttttttactgcattagacattgaatagtaatttgcgttaagatacgcttaaaggctctttgtgaccatgtttccctttgtagcaataaaatgttttttacgaaaactttctccctggattagcagtttaaatgaaacagagttcatcaatgaaatgagtatttaaaataaaaatttgccttaatgtatcagttcagctcacaagtattttaagatgattgagaagacttgaattaaagaaaaaaaaattctcaatcatatttttaaaatataagactaaaattgtttttaaaacacatttcaaatagaagtgagtttgaactgac

SEQ ID NO: 1203 - DNA, 1071 bp, Homo sapiens
tcccacagataatttatctttttgtgtaaaataaggcttttaaaactagactttctgaaccaatacagttttttttttttgaggtgaactaggtttgcctagctttaagctagcaatatctgatagatacttgcatctaattttagggatttggtgccaaataagagaagggtagttgaagactagataaatttggatactatctaggagtctgtatttacttagcaggcttttgaaagccgttttgcttaggagttcaaattttaaggataataggacttgttaccctcttatttctcctttatttttaaaaatatttgtggaagggctaaggtaaaagaataataaattcctctaggttattagtatttggttcttctgatactaagctgagtgattttttttaaaacaatgtctctggtagtctgattgagatatgaaacttttgggaagaaaaccattatgtaacaagaatcctatgtaacaactgggtaaatgttttagaatgagagataggaaagaacatctaaatagtacttttttgtgggacgcatgagcctttatacagcctagctaatttgcaaggtaatgataaataaaagtgtattttgttactgtgcttaattcagaaattcaaattcatgtatttcctattggataatttgtaggcgggcagtttactttatagtcaggttagtttttgtgatccttagtgtttatatttgcattgcttttgtaataaggatgtatataagatcttaaacgcctttcaacttctgttttcaagtatcacttgttttctctattacaaagtgagatacatagttctaaataaccaaagaaatttatttataacctacacagttgtttcagctccatgcctagggactatcctgtattattcgctttttatcactttctacctacagtctaccaaaaagtctgtctgttctacttccaaaatttatctgccgactcttctacctccactgcaaccaacccagttcaagtcatgataatttcttgttaactaatcttgattccacccttaccatgatagattcagttttc

SEQ ID NO: 1204 - DNA, 1029 bp, Homo sapiens
aaaagttaatcagttacttttgcttgggaagtgagtaatgaccctgaagctcatctatctagtaacatttaacacatgtattaatttattcaaatatgtattaaaacacatgcagtgtattctgctagatattatgtatgagaggggcataaaatgaatgaaatacacataaatgtaaaatttcatactgcatttatgaaattttcagtctggaaggaaaagtaagacttgcacagaaagagaatacaaattggaaagtggcagatattagactgttagatccacgaggatagggattatgtctgttttggtttgccccaattttgcccttaccaggcatattcctgtacacagcagaaattgagcacatatttgttcatttgaacaaaagaaaggaacagatagaatgtgattagacttcagagaaggaaagatatattccaatggaaggaattaggcaaggctttgcaatggaagtggtatttaacctaggacttgaatgatgcaaatgatttggagctaaagaactgaagatgatgggagtggtagaagaacagcattcacggaagaagtatcagcaggagcaaggcacagaagaaaatcatgcactgtctctagggaacaatatgtgccttatatgcaggtcacttgaatgcagtagaagaatcagtgggtggcaggtcatggagagccttggatgctagcctagagggtttggatttttgtctgaggcatgagggagacaatggggtgaaatgagcagagctgtacttcaggaggatgaacctgccagcaattttaagatgtattggaatgaagacaagctggtatgaggtggagagtgcagttagaaggctagtgtaacattccagacagaaaaggtgacgccccaaggaaggcctaaacatgggtagctggagaggaggcaacaggtttaaaagatgtgcatagaagaaggcagtacctgccattcatttgaagcaggaggtcagtgagatggaaaaatatcaaagatggaatacgattttt

SEQ ID NO: 1205 - DNA, 1134 bp, Homo sapiens
gaccctcggagccaggtgagggatataatctcgtggtgcgccgttttttaagcccgtcggaaaagcgcagtattcgggtgggagtgacccgattctccaggtgcggtccgtcacccctttctttgattaggaaagggaactccctgaccccttgcacttcccgagtgaggcaatgcttcgccctgcttcggctcgtgcacgatgcgcgcacacactgtcctgtgcccactgtctggcactccctagtgagatgaacccggtacctcagatggaaatgcagaaatcacccgtcttctgcgttgctcaggctgggagctgtagactggagctgttcctattcggccatcttggctcctgccactcaactatattattttattatttaagggcaatgttttgagtagtccatacgctctatcagactatcaaaggggtccatggcactaaaacaaggttcagaaattctgagaaagaggaagtgatctgtaggtcagatactaacgaaaggtcaagtgagatgaggactgcaaaggagacatcagatttggctgccattacaataattatgttagagagtccctattttaggggtgaaggtggaggcaaaatctggattagagtgagatgagaagtgaatccaatagagggcatgcaaataaggaagtcaactatttatttggcagtaaagggaaataactggtagacaaagggagtaacaggatcaagaagaaaatgaagaaaaaaatgaatgtacttataagcagaaggcaagaatctggtggaaagggaggggttgagaggagaggagagaggatgatggaggacatgaggtcttagacaacacaggatggaagaaaatggagaacttggagggattcgtctcagaccagggttgatgggcacaatgggctcaaatttagataaattagaggaaaaaggaaaaggacatgaaggactttcaacttttgctggcttctcccccctctccaacccccatctcccaaaaatgttgagggcagggatgatttatgggctttgtgcttaagagtatgaaggtgtataaaagctggtgtggagtatggtaaggttgctgagtagagatgaggaaaggactgcagagcaggtctaggggat

SEQ ID NO: 1206 - DNA, 1025 bp, Homo sapiens
cagtccccttgtgggtgaaggtctgagtcactcttagatgactcctaggttgctgggaggcaccctagaccagctgaggtgttggtaaagggtgaggcaaaactagaataggggtggaagatgaaggtgacaaatattaattatggcattgagatcagttgtagcagtgaggactggacctcattacattaaccttcctttatgaagtcttgaaggctctgtgaagaaaaataaagcagagtagggagacggagaatagcaggattgggtgactatttaaaaagaatggtcaaggaagctttctccgattaggtgacatttgagcagaaacctaaatgaagtaaaggagcaagccatatgagtacataggacaagagcattccagagagagaaagtagcagtccagatgttctgaagtgagagcatgctcggtgtgtttgaggagggtagtgtggctggaagggggcgagcaaaggagggaagcaggaagagaagtgatcaggaaggtaacggggctcaaaccatgatgggctttgcaggtagaatgaggactttgggtcccattttgtgtgaggtagggagccatcagtggattctgagatgatatgatttattttacattatatagagtcctctgctgctctgtggattggctatatgaagtcaaggaggggtgcggggagatcagttaggccactactgtggtagcgtgtttagatctcatttcagatgggtttctgggtgcatagggtaaaggcatggggttgctggacatcaggtcttgaattaagagtggtattactgttcttcagggttgactttaagctactcctgagtaaaaactaactcttctacttcttataaatctttcctaatacacagcacagccctatgtgtgtagtggtgaatgcgcagaaaatgcctgtgattttctcatttgaacatctacttagtctttgcgaagaatccatagaaacaatctgtctacattacaacacataagtgacatgtggtttccaagatca

SEQ ID NO: 1207 - DNA, 1065 bp, Homo sapiens
tttctcattctgctgcttccccagtcacaactataattacctcgtttgaattattatagtaacttcaaaactggtgccatttttgttttaaaagaaaactttaacacgagaacacaagtcacttgtgtttatattatgtgatgatgatttaagtcagttttctagcaatatgtatgcattgctaaaattgcggtttttaaaattaggcataaagtttcagtccctctgacctttcttctaaaagttccttgtgcatttttccactagggggcaagataatgtcatgggagttaaatactgctttaggaagaatgatcatgtagttattgctatgccatatctggagcatgagtcgtttttggtaggttttaatatttcttgaatttttattagctaaatatttaattgcaaacaatatttgtaactcatttcatttgtaactttgttttaggacattctgaattctctttcctttcaagaagtacgggaatatatgcttaatctgttcaaagctttgaaacgcattcatcagtttggtattgttcaccgtgatgttaagcccagcaattttttatataataggcgcctgaaaaagtaagtatgaagagttactagaaaatatttatcctatttcttttaaaaaacaattttattgtctatatttaaggtattgaacatgatgttatatatagtacaaaagttactattgtgaagcaaatatttatctcagttacccatcttatttttgtttttacggcaagagcagctaaaatttactcatttagtatgaatctcatatacagtacagttttattacctgtaatcttcagagtgtgcattaggtctagatttatttatcctacatatctgctactttgtatcctctgacttatatctcttagatataatataacatactgcaatagccatgcacagattatttctgtttcagtttctttgtgattggaaagggaaatttggtgatgaagaagataaaattgtattagtggaataatgtacattattagatgtactatggttcagtggaaatagcatgaactaaca

SEQ ID NO: 1208 - DNA, 1059 bp, Homo sapiens
ctgaggcaggagaattgaacccgggaggcagaggttacagtgagccaagatcgcaccattgcactccagcctgagcaacagagtgagactcagtctcaaaaaaaaaaaaaaaaaaaaaaaggtgatacagtagcccaaggaacagagagcagataacctggtgatactaggaagtcaacaattaagagagatgtcaactttaagaaaaaaaaaaaagagctttttaacatcaagttgagctagtcgtaatctttaactaccagaattcagaagattaaagtttctatagtgggaatgtaaattagtacaaccactatggaaaacaatttggacgttcctcaaaaaactaaaaatagagctactacatgatccaacaatcccactgctgggtatatacccaaaagaaaggaaatcaatgtaccgaagaggtatctgcactcccatgtttgttgaagcactattcataatagccaaaatttgaaagcgacctaagtgtccgtcaacagatgaatggataaagaaaatgtggtacttacacacaatggaagtactattcagccacgaaaaagaagatcttgtcatttgcaacaacatggatggaactggagatcattatgtcaggtgaaataagccaggcaccgaaagacaagagttgcatgttctcactaatttgtgggatctaaaaattaaaacaattgaacccatagagagcagaaagatggttaccagaggctgagaagggtggtgggagggtgtgggggatgtggggacagctgatgggtacaaaaaatagttataaagaatgaattatccagcactttgggaggccaaggcaggtggattgcttgagctcaggcactcgagaccagcttgggcaacatggtagaaccctatttctaccaaaaatacaaaaaagtagctggatgtggtagtgtgcatctgtggtcccagctactcaggaggctgaggtgggaggatcacttgagcctgggaggcggaggttgcagtgagccgagatcacactaccacactctagcctgggtaacagagccagacccc

SEQ ID NO: 1209 - DNA, 1050 bp, Homo sapiens
caaatttgatgggaagaggttccagaatgttgtcaaggaaggaatgaagtttgataaaagtgagaaaactaaggagagtcatgaagcagttgagaaagaatttgagcctctgctcaattggatgaaagataaagcccttaaggacaaaattgagaaggctgtggtgtctcagcacctgacagaatctctgtgtgctttggtggccagccagtacggacggtctggcaacacggagagaatcatgaaagcacaagcataccaaacgagcaaggacagctctgcaaattactatgcaagtcagaagaaaacatttgaaattaatcccagacacccactgatcagagacatgctttgatgaattaaggaaggtgaagatgataaaatagttttggttcttgctgtagttttgtgtgaaacagcaacgcttcggtcaggatatcttttaccagacactaaagcatatggagatagaatagaaagaatccttcgctcagtttgaacattgaccctgatgcaaaggtggaagaagaacccaaagaagaacttgaagacacaacagaagacacagagcaagatgaagacaaagaaacggatgtaggaacagatgaagaagaacaagaaacagcaaaggaatctacagctgaaaacgataaattgtaaattatactctcactgtttggatcctgtgtggagagcgaatgtggaatttaagtcatttcttttgggagagacttgttttggatgctccccacagtccccttctcccctgcactgtaaaatttgggattatgggtcacaggaagaagtgggttttttagttgaatttctttaacactcctcatgtatgttaaatttgtactattaaactgaccattcttgatgtaaaaccttgtcatgtgtataaaaaaaaaagattcccctcctaaaaaaaaattacagcgtgaaatcgcaaggggcttcaagatagtttaaaatcctctccactatttaccccatctttaaaaaatgcttcagactgtgggaaaactaaagtggctctctgtaattcct

SEQ ID NO: 1210 - DNA, 1045 bp, Homo sapiens
cattaaccatacaaagagtatataaagacttatgtatgtgcagtgcaaaaagtagcttgtttcctttttgaaaagtattggatcaaaagtaacagcattagaaaacagaaatttggccggatgtggtggcttatgccggtgatcccagcactttgggaggctgaggtgggagtgttgcttgaggccaggagctcgagaccagtttgagcaacatagtgagaccttgtctctacaattaaaaagaaataaatatttttattcaaaaaattttttaaatatatttaaatttaagtggcaaaatagtgagttaggttagtattgtattttaaaacatggaatgttggacatgaagcttttaagtagattaagtttctctttcaaattttaggaaagctgaactagaagcagctgtgagaaagaagattgaatttgagagaaaagctctacatattgttgaacagcttttagaggagaatattacagaagagttcctaatggagtgtgtatgtgttaagttgacaaattattagttttgtagtataacatctttaaatctgtgcagcatgaaacttctttgcattattagaatctttgaatttgttctgagtcattagatgcagataacaatccatataattcatgcatttaaaaataaacaactatcatgcattccttgtataatgactttaaaatgcactaatgaaaaataagtacgtaacaaggtgatgacacgtaatgtatatttcaaaattaataagagtggatttcaaatgttctcaccacaaagaaatgataaatatgtgaggtgatagatatgttaattagcctgatttgctcaatgtatacatgtgttaaaacatcacatactaccccacaaatatatacaattattattgtcaattaaaaagcaaaagaggccaggcacaatggctcatgtaatcccagcactttgggaggctaaggcaggcggatcacttgaggtcaggagttcgagaccagcctggccaacatggtgaaacctcgtttctactaaaaatacaaaatt

SEQ ID NO: 1211 - DNA, 1060 bp, Homo sapiens
ataattttaaacaaaagaagtggctaggtacggtggctcacacctataattccagcactttgggaggccagggagagaagatagagaccagcctgggcaacaaatagagaccccatctctacaaaaaaataaaatagccaggtgtggtggcacgcctgtagtccaagctactcaggaggctgaaaccagaggattacttgagcccaggagtttgaggctacagtgagtgagaccctgtccctaaaaaaaataaaatttaataagtgaatgaagtaagataagaatgtataacaatattattccattcaaaaaaatgtttaaaaataggcaaaactgaatattttttaatagggatatgtacacaggtgctaaaactgaaaggaaatgagggaatgattaacaccaaatttatggtagtggttacttctggggaatgcggagggtgatgcagttgggaaggggcacatagaggccttcaaaggttcagtatcttatttcttaccttgggtggtagatctgtaggtttccattttattctttgaacgatacatttatgttttatactctcaactgtatgtaggtaatgtttcatgataagaaaaaaactagatttataatgttcttttcagtctttttgcagcaatttttgttatcaagcatctaagttttttgaagcacaaattcccaaaactccagtatgggttcgagaagaagagaggtaatttaagtcattgtgtatatacatttgttcatatattctaataatttgtttctgctttttgagattagctgagagtaagtctagttttctgtaaaaagttaccattttatatactttatggggaaatggttatattttaagcatagctattaaggattttacacttaaaatcagaaaatgcatacatacaaatgttatttgtttgttgttttagctttaattgcaaaatcagaactttaactccagtgtcctgtgatgctagttatgtctgtgaatcctgttaatataataatcctggaggaagaatgttaaattttttcagaagttactgggtcttag

SEQ ID NO: 1212 - DNA, 1031 bp, Homo sapiens
atttgcaaagcgcagtaaaggaaagcacagttaaacaaggtatgcttgtgtaaatttatttaccagattttataataccaaaaccaaacaatatcccttagaatttataagagtaatatctttatatcacagtaagctcactacctcattggtatagatgtttaaataaatttaagatttagacaaattcataaattctacctccatacttttataaggttttggagtcagaaagggccttggaggttttctagctcctcatctttaaggtatgtaaaatatctggagtagatccgtaatgtcatggagactaacagtggttctcacaaaatgtctcctgataccctgttagagacaaaacattgacctagaatggtctgggtcgtgacgcactgtgatgcttctcatcttgtgagttagaaatttttcacccacttggtggccagaaacagaccacatagagttttgatgctctgagacagtgtgctcacataggtaattatatagttgcagttataaatcctgtttggctaaatgtaggctctgacaagcctttgaaggtgggaagtctcctgcattgtaatctaaaatcttaaatctaagaaggacaaatgtggaaaatcaaattatgattttaaagatgaaattggggtgaatggttaatgctgacagagctaaaagcgccatcatctggtccagagtaggggatttcacacgttgcttcttggcagtaaacagtagaatctcagaggtgcggaagccaaaaacctctgcagaacaactataacctcttcctgaacagccacctctgttgcttggtatgcagaataaaagctttctgaaacagggtttgacatgtctcaaaatagatttgaaaagttctcaccatacctgctgcttctgttggtttacatataacatacatattccaagtgatatatatgcacatatatataaatatgtacatatatccactaagttctttggcataagttatttctagttttagatttactttgctaaaatgaaaa

SEQ ID NO: 1213 - DNA, 1059 bp, Homo sapiens
agttgaaaatgatgagggcagacttctttaataaaggcttacgatgaaatgagtaggggctgtatgatcaaaggattgtttgtttgttttttttaagagattgggtagatttaaacacgattacatgctttaaaaaagagaaaaaagggagaggtttgtagagtaaataccccagagtggagattcaagggattagcctcaaatgcctttatatacagactgtatccatctttataagcccagctgaaatgacacctctctgaaactccttttgattggctcagaagcaagtttttctctgatttcctgtagcagcttatacatctctcatggcatttaacacatattgtcttgaataacagtgtagttattatgagctttactgtctgggtttgattcctggcttcaccacctactagctgtgtgattttgggcaaattgcttattctctctgtactcagtttccttatctataacatggggataatattagtagctacatcgttgttatgaggatcaatatctgtaaagctcttagaacatgcatttttcttctactaaattttaaggtctggcaggcgcggtggctcacacctggtaatcccagcactgtggaaggctgaggtgggggcagtggggagcgaggggttgttactactccaatgtaactgctttctcagaaattaaggcaaaaagtcttactgaccatgtaaaggaaatccaacaattataaacagtctctgcctttaaggagcttatagtctagttaagaaaccagacttaaacatatgaaaagttaaacattggccaggcacagtggctcatgcctataatcccagcactttgggaggccaaggcaggaggatcacctgaagtcaggagttcaagaccagcctgaccaacatggagaaaccccatctctactaaaaatacaaaactagttgggcatggtggcacatgcctgtaatcccaactacttgagaggctgaggcaggagaatcacttgaacccgggaggcagaggttatggtgagctgtgatcacaccattgcactccagc

SEQ ID NO: 1214 - DNA, 1035 bp, Homo sapiens
tttatatttatatatatactttatatatatatttatatatatatatatatttgcaacaacaggcaaatccaaatagtgcagtaggatagcattatcaagttttttaaaaagttttgctgtactcctgtaacaattttaaaataattgggggaaaaagatgaaggaagaatacagaaggagaactatatcaaaaaatatattattaacagatgtactgaaattataggcttcttctgaaatttatatatcagaacctagaaataaggttttgtctggggaataaaaatttctaccttgaaagttacaatgtataaatactatggggtactttacttttctattgttttcgggttttatttgctattttttatttagttattttatttctctttcattctacagtggccattctggagaagaagtacagttatgcagtaaagccattaaaacatcagatatcgacaatcctagccactttgaaaagcaatatgaatctagttcttctagcactcacagtgatagtagcagtgacaatgagcaagactttgtttcctccattctaccaggaaacagaccaaattcaacaaatattagaccacagctgcaccaaaaaagcataatgaaaaagaaagctggtcacaaagctaactccaaacacaaagacaaagaacagacagtagtagatgtcactgagcagttaggcgattgcaaattagatagtcaggagaaagatgctacatgtgaacttcctttacagaaagtaaatactcagagttcttcaaatagcactttgcctgaaagattaaaagcgtcagaaaattctgaaagtgaatacagtaggtcagaaataactctagtaggcataagtaagaaaagtgcagagcattttaagagaaaatttgccaaatcaaaccaagtgtctaggtcagtgtctagttcagtgcaggtgtgtcctgaagttggaaagagaaacttacttaaagttttgaaggagactttgattgagtggaagacagaagaaacattgaggttttt

SEQ ID NO: 1215 - DNA, 1287 bp, Homo sapiens
tgtcttcagctaccggagtgggtagggaaggaccgtcatgggggcagggctatgtgcgtctgaactcaagactccttgggcagggcttgctgtggctgttgtgggggatgggagtgtggttcccaggtcagtggagctattccaggaagattatggctgcctctgctgtgtcatgcaggttgtcagggaagtgggggaaagctggtggcaggcctcacccagctcccatgcaacccaaaagaccagtttcactcccaccatgtcccttcaaacagcaccaagtttgtttacaggcagtgggcaggaagggctgagaacttgccccaggctaccagcctctcacctgtgagaacaagtagggctttcacatctcccagcctgtggagtctgcacaccagattcacaccctcccttgagttctggccaggagacttcctgttcatttggaattgttacaaagttcagctggcctatcatatggtctatctcggagactgttccatgtgctgatgaatagaatgtatatcctgctgttgttgggtagaatgttctgtaaatatctgttaaatccatttgttctagggtataatcaaaattatatcaaatattctctcagaccacagtggaattttttaatttctacttagatttcattgttgacctagtgatcattcaggaacaggtcttgatgacctgtctagtgctgtcagtggagtactgaagtcccccactattattgtgttgctttctatctcatttcctaggtctcgtagtaactgttttataaatttgggagctccaggtttagatgcatatttatttaggattgtcatattttcctattggactagtccttttatcattgtataatgtccctctttgtctttttaaactgctgttgctttaaagtttgttttgtctgatataagaatagctacttctcacttttggtgtccatttgcatggaatatgtttttccaccctttaccttaagtttatgtgaatccttatgtgtcaggtgagtcccttgaaaagcagatacttggttggtgaattcgtattaattttgccattctgtattttttaagtggagcatttaggccatttacattcaatgttagtattgagatgtgaggtactattctattcatcgtgctatttgttgcctgaacagctttttttttttcattgtcttattgttttataggtcctgtgagatttatgctttaaagagattctattttggtattatttccaggatttgtttcaagatttatcgctccttta

SEQ ID NO: 1216 - DNA, 1031 bp, Homo sapiens
gagagccaaactgcagtgattgttattgttcttgtggatctagccacccagcagagctaccaggcttctggcgggtactagggagtgtctgcaaagggtcctgtgatgtgatccgtcttcagctgtggataccagcacctgctccagtggaggtacaggggagtgaagtggactctgtgagggtccttaattgtattttttttaagtgcgctggttttgtgttggttggccttcagccaggaggtggtgctttcaagagtgcatcagctgcagtaggatagggaggatacaagcttgctctggggtcaggcagtgggtagggccatagagctcccaagagattaagtcctttgtcttcggctaccagggccagtagagaaagaccatcaggtgggggtaccattgtgtgattcccaggccaatggagttatgttcccaggtggattatggctgactctgctgcatcacacaggtcactagggaagtgggggaaagctggcaaccacaggcctcacccagcttccacacagcctgcagcctaaaaggccagactcactcccaccgtgcccccacaacagcaccaagtttatttccaggcagctgatgagcagggctgagaacttgccccaggctacaggcctcccagctgagaaagcaagctgactcacagttccttgccttttctggtatgtttctgcggtagttcttggagcaaaagttcatgatgggagtctccacatgccgctctgtctgaccaagtgggaactgcaagttagtcctgcctcctatctgctattttttcccagacctaacatttatttttaatattaaaccaactttgcattcttataataaactcaacttgattgagctataatagcctttttatataatactggatttggtcctcctaatatttgccttagaatttttgcacatattttcagaatgagtgacattagcgtatgaattggtcatggtctcatcataaatcacatggtacaaattaagtaatctgaggaaagtttaat

SEQ ID NO: 1217 - DNA, 1041 bp, Homo sapiens
atatttttattttctctaaatttcaaatatattgcaagattatttatagccaatactcagctggatttattcaattaattactctttcattgtttttcattccttcttctatccccattcttccatctgagatcatttgccttgtgcctgaagaatatacttctcttagtatcagttgataaagaattttctcagtttttctttgtcagaaaattattttactttcacttttgaaagatatttttctatattgaattttagatgagcagttattttctttcagcccattgaaaatatcattcccttgtcttttggcttacatttgtatctcttattgctactcctttgaaagtattgtgttttcttcctctagcttcttttaaggtttttttttgtaagttttggaatgttcccagttatctcttagatattgcttctattccattctgcctcttctctttagtctttttttttactgtatcttgtaggtctcttaatctcctttgtgctttacattatgtgtttggggagtggtgactgtgcttcattctggatattttcttattcagcattctctcttcagccatttctactatgcttttatgtctccccattagttcttacttttaaataccgtatttttctattctagggttttcattttgttattttatgtagtttccaattatctgtcaaaaattttcaacctcataatttttctttgaatatattaaacatgtattttaaataatgctgataacttcattatttagattccctgaggattgatctctgtaggctgtttcagatttttatcatattgtcgtgttttattatatgccaaacattgtatattaaaaattacagagataactggagactcaggatgatgttatcttcctctagaatagatttatatttgcttctgacatgatttgtagcagttccatgtcactgtaatgtaatcagagattaagatgatttcaaggtgggattcactccctgaaagaactagtctatttcctattcttactgttattc

SEQ ID NO: 1218 - DNA, 1344 bp, Homo sapiens
ctcgttagctctctgatgctaacaaatgtgtttcaaacaaatgtggattgttttcccccaacttttttcagttctcagagagagagtcggtttgaattatcttgtctgccatttctagaatggttaggggtcaaatgacataatgactgaactcctcataatatatttatagtatttgctaattttaatattttaatcccctacatttgtacagcacttagcagtttacaaaatctttttgtttacattttattatttaataaaggaggtattaatatcccaattataaagatgagaaaactgactctccaaagagggcaaatgactcaaagaagttcacaacagcctaacaactgagttgatactcaaatttaaatctaattctcaagtctagttattttcctactgtgccacagatacaaacttttgtgttttaatgtttattgttctgcttatcaaagaaagaatgtaaacttatgattctgttttgctttgtttaaaaatgtgattcagcatgattccacctttccactgatagactcaagttcccagaaccagattagaaaacgcatcgtacttgaaaagttgagtaaagtgtaagtatgtaattgccattccagctttgtagtagttttaaattaacttgacatttaagctcataatgtgtaagtattatcctcagattttgaacattttgaaaaataatgtgaaaagttcacatggatttcttcacttaagaaatttggatttttaagatattttatccaagaaatacaaatttttgtgtagaggacacagaggcacatcataaagaggaaggttgagattgtgggtttagaagaccaaactaccttactcccacctaatcagtgaagtcagggaaaaaatatcaaagctagacccatttaaatactgatttgcggtaaatgtgtcacagcagtttcagatgcaaataagatgttattacaaagttttaagggtctgttaagtcactctgcatgcatatccttagaaccatttcacactcagcaacatgagtttttgttcaactcaacgttgcactttagctttaaacttcccgtggtggaaattattgttcttgtaattagcccagtcataaatgacatttaaaaattgctatcttggtttttctttcaaaaagaacttgaaggtttttttttcccagaggtatgagggctgtgttgaacttttcaacctgcattttcttattttagcagaaaacatggaaaagtgtgtcagtcattatttaagggttgtgaatatgaagttttattttgtagcagtttgaaaatacagaaaacatttcacattaaccaaggcata

SEQ ID NO: 1219 - DNA, 1057 bp, Homo sapiens
aagtcccttctagttactttctgcattatttaaagacttgattatatgacatctgagatttgcttcaaaattatctagattagcagtagtgttgaatatggggttgtacagaagaaacatgattagctgggagttggtaactgtcaaagttgtgatgtgtatataggaatttattttatattctctctacttttatatatgtttgaaatttaataaaaagctttgggaaaataagcccaaaaaagtatgctttattttggtaggaggtgttataaaattctgttccaaaaaccttggtgttaattacttttgaaaatctttactccttagtaactgtaagtcaaagtctgtagctttgataaaaattgcttaaattggcttcactgtccttcagaaaagtgtcagttgcttagaatacagaatgacctctgataagacagctgatttgaagtcttcagattccagattctggacaacgttggcaggtctgtgacagtttgtaggctagggctgccaggtgaagcttctggaaaaatgccatattgatgacagtaactattgttgagaaatcttttcaatcaatactgatagtgggaaagagttgacataaataaccatatccttctctctgaagtgacaatcaataataggaacttgtagaacagtgattctcaagccagttgtgcatcagaattacctggggagcttttaacaactatagatgtccggctccaccctagagattgagtttcattcggctagggttgggctcagacattagtattttctaaaagccccccttagataattctaataggtagccagagttaagagcctattttgggacctaaacataaagcagctttttcggctctatgagaatttccccagtgaatagagctgtcttttccactgaattgcattacaaatctgctatctagaatgttacattggtttacctgtcgtagtgtaaagcagtttccatcagaatctgcttgataatgactcactgtcatcagtgttgaatcaagatatttttctaaatttgaattaaaat

SEQ ID NO: 1220 - DNA, 1051 bp, Homo sapiens
acatgggatgtgagagagtcaagtttaaccataagatttgtggcctgagcaactggattctggaaggatagggtaagccatttactgagataggagtgtcacaccatccttagttttgggggaaggatgaggagcccaattttggctctaccaaattttgagatgcctattagacatccaagtagaagtgtcaagtggacccttagatacagaaatctagaattcaaggaggaggtccagactagagctaatacatttgagagttgtcagcatatagtttctaatatttaaagtcgtaagattggataacatcaccaagggaaagagtgtttgtttatacaggagagaagagacctaaggccagaggccctgggacactccagtattaaaaggtccaaggagagtgctcatgagaggtgggggaaccaggcaagtgaaaacctggtaaagaaaatgtttcctggagaagggagtgattgtcaagtgctggacagattaagatgagggttgcgaaatgtccgttggatttggcagtatggctgtctcttgtacagttaatcctcacaagaaccctgtgaggtgggtgatattattgtccttattttaccaaagtaagtttcacagccatcaaacaacgtgtccaaaataaaacactactgaggacagatctggatattaaacccatatctttcagactctaaccattatatactgtacttcctatcatctaggcttttttaaattttggaaaatgatggggaaaattcagattaatgtaacaaaatatatcctccactcagaattaatagattttaatattttctaaaatttgattcaggtatatattttaaagaaaacattataattaatttattcaaaaagtattaattgaatgcctactgacggccagccacttgttctgtaaacttggaatagtgaagtacacaaagactcttgccctctgacaagaaaaaacagaaacaacaattatatattagaaggcaataagtggtatggaaaaaaaagaaaaacatatagcagaataaggagg

SEQ ID NO: 1221 - DNA, 1054 bp, Homo sapiens
gcactgcagcccaggcaacatagcaagaccccgtttctttaaaaaaaaaaaaaaaaaaaaaagagagagagagaagaaagaaagagaggaaggaaggaagggagggagggagggacagagggagggagggaaagaggggaggggaggaattgcttggttaggggaaagcatagagaatattatgagtatgtttgttggggatatgtgtgttttaatcaagcaatttagtttcccacattgttcctacatgcttatcttgtctagtagtaatattattaaaaacatataaaagtggggctggaacacttccttttgagatggccattatcagatagtgactattgagccacattattatactattgactctttcctgtcaaatataacaagtattttaaaaaaaagtgcttctttggcacattattataaatctgatgttatctagaaagaaatagaaagtttatttaaaggtaacactccttggataaattttatctatctttcaggttaacaaatagaaatattatacacaaacctgcggaatggactttaattgctatggtgttgctgtcattgtaagtactctctcagattttaactctaaatactaaatgtgaagcatattgattagggaaaaacaaagtgatccactgattttgtaaactgccttggaaaatatcatacctctattttgtgccttattttcctttcctatgtaagaaaacaatttttatttaaagtgatatgtaattattctctatattttttaccatcttttcttctgaataccttattctttacaaatactatttgttttcatctcttttttgttttttttttttgagacagggtctcgctctgttgcccatgctggagtgcattggtgtgatgtcagctcactgccacctctgcctcccaggctcaagcaattctcccacctcagcctctctagtggctgggactatagtcacacaccaccatgcctggctaatttttgtattttttgtagagacagtgtcttgctatattgcccaggctggtcttgaacttctgg

SEQ ID NO: 1222 - DNA, 1076 bp, Homo sapiens
taagacttctgtctcctgccccatattattttcttatttcctcttttctcagaaattcccctttagcttttcatatttctgcccccactggaaatctgtggctcaactgatagactttttttatctccaactttgtccatttgtcacctttttatagcaaatactactgtacaagttagggataaaattaaaatacatattcatcatgttaaaactccattgacttctataaagtataattatactttaatgtgtatttccacccctcttctcccccttacagttttcacaattacattttagagaaggcattttgtcactggggaaagcaaaaacaggcatgaaggccagcattggataaatagccttacagtgaaaatatggagactttagaaacccagagacatgcacatataaagagaaaggacgaaacacatgcacacgttatttgtggagaagtaaccccacctttcagccttttagcttattgccactaacattgactgtaggcatacatgggtgtatgtcttttttaaaaataattatcctattattcagaaaattttcacatctactctcaaatttccaatggaatttttaagtcacaacttgtagacatttctggaattcatgtttaaaaacaaactgcttataagtctttatagctaggcaaaagattctaaatggcagttgtcacttaagatgaatataagataatatgttcagtagaactgttctttatatatgaatattgctaagttttattattactataatagcatttgtttaatccatgaaagctgttttcagaattcctcatgtgaactcttagaagaggatacatacatacacctatatataattgtattagtatgttgctataatgccacaagtctaactcttgttaaagggggaaaaaaatcaacattttgaccaaaacatgatagtccaggataacataaataaaactgagtcttgaattttcacacctttattcttaaaggaaataaggagttttggtagtaagccatcttctcctggtgactttcattgttctttcacagatgtattaacat

SEQ ID NO: 1223 - DNA, 1028 bp, Homo sapiens
aaagaatcacttttaatcatggtcacagtattcagaatagcttttttgagatttaactggtattttgagaagattttctagccataggacacatcgctcagcttctgtcccatttactccttccctcttccctttgctcttggtcttccccagtcttctgtgacctctgtcagtatatttgagcctgtaacacaagaggtcactgtgctgatggtgacctaaaactgagaaatacagggaaacgtccagaccaaaactggcagccaaagagaagacatatagaaggctatcgagaagcagcttgactggcccgagttcctttatgtgcagcctatgtgccagaagtgggaatcaggtttcctcaagtgtttatacttaaaatgtaacttttcctcccaaatttaatataaaagctttgtaaataagccactactttgtattctgatggtctgtggtcaattgtatcataggagtcaaatgtctcttggtggccagggagagaggtgtgtgttgtgttctgtgtgaattatttggttatccaatgaaggagatgagtactttgtattactcagaaaggatagaggataaagtgacttgtagtagtctaacatggatacatgctattcctagttctatgcccttgatgttctctaatggaaagctttcaagaccatctccaaaaatgtctgctttcattttatttatctgaactggctgtttccagtgaactgtggcccgcttcctaggcagagaccatacaatagtttattctctctaaaagctttgagtattcctgtcgttcagggagtagcatgcaagtcctgggaaatggtatttaaacaagctcaacttgaccatgatcgctaaacaaaagccatcactggacataggcagccactttaggtaaccatcatacagatagatactctggagagtcacttccctagggctaccaggcctgaatggaaagatgtgagtaaggcttttgcctcagcaggctgtttttttttaaagcctgcctatcacta

SEQ ID NO: 1224 - DNA, 1028 bp, Homo sapiens
agctggagacactattctgagagaattgttacaaggcaacaatgataaagaaaagcttttccagcattcatctgccaagctgttctatagatctgtcacaaacaggaattagatataaagttgtaaagtcactgtaacccagccctttaaacaaacctatgtgtaatatatcaccacaaagtgagttacaaagaacttttttcttttgaattagaaatatcagtggaaagcatccctgcttccttattaatgggtaaacctaaagcattaaatgcaaacattaacaggacataaaccatctgttataagaaaaacattttattttatttggctatcatagtttcttataatcaaagtttttatctctgttttctagatagtagttctgaaatggaaagttcatagtgacatacttcttaatattatattcttcttgtctactttttttgtttctcttggaagtcctttaatggtactaacctcacatgcctcttggtttttcaaatttggggacattagctttgtgcctaaaattaaataaatgcaattttaatttatgtaaattattattattattattattattattattgagacaggttctctgtcacccaggctggagtgcagtggcacgatctcagctcattgcaatctctgcctcccaggctcaagcaatcgtcccacctcaacctcccaagtagctgggactacaggcacatgctaccatacccagctaattattattattattttttgtagggatagggtttgaccacattgcctaggctggtcttgagctcaagcaatcctcccaccttgtccttatgtcattaatttttatttaacattttttttaatataattattctaccccatagactacctttaactatacaagggtctcttgaaaccctaaactcagtctcattctggatatatcctatttttgttcctaactatcagtgtagccttgtacaagttacttaacttcattgactattgttggcagtatgagggattggagtaaa

SEQ ID NO: 1225 - DNA, 1882 bp, Homo sapiens
ttttgaaaagctggggaaagtcaaacataattttaagatattaagacaggtggctgtgaagatactgatgccttctgggaagtaggtaggaagaactgattggaagagatgatgcatttgtttttattttatatttatttatttatttatgagacagagttacgctcttgttgcccaagctggagtgcaatggcacaatctcggctcaccgcaacccccgcctcccaggttcaagcaattctccggcctcagcctccgaagtagttgggattacaggcatgcgccaccatgcccgtctaatttttgtatttttagtagagacaggattttaccatgttggccaggctggtcccgaacttctgacctcagatgattcacccgccttggcctcccaaagtgctgggattataggcatgagccatcgtgcctggcaatgcacttggttttatacctgttttgcaagtgctgagacttcctgttcaatttaagatttaggcagattatcagttagatggctccctgacaggagttgaaaatgtggaactagagctgaagaatggtgatgaaaatcagagacctagattttagtgtcagcattgggatggatgaaatggcaagaggcagaggatgttaaatgcagagtcaagatgggacagaactttgtgggacagctggatcaaggccaaggatgcctgaagaatacagagaaagcagaaaaggggagggaggggaaacagacactttgagcaccaactaaatgcaaacactgctagactctacattattttatttgattctcacaattcagtctggtaatttggtagtgttccactcaccaacggaagaaataggctctgtaaaaacatatactttgcccaaggtcagagctaagattcagactcagaccctatctgacttcaaaatatgtactttgcactgcagtgtgcctcagacaggtatgtaatcaaccagaacactgttaaagagtccaaagtaagtttaagtgtcaagaaaaatgtagtaactacctttctagagatgaagtagttgctgtctgctaaacgaaaatgagaataaggactaaggactgtggtcctggcaattaggtggtgtgggtaaccttcaagaaagcagtttctacagaatgataggagtggagaccagattgcaaaggctgctatagtattacatatggtgttggggcactagacggagcaaatgccgactactcttttcttatggttggcaaaagcagaaaggagagggagtttataatccaatatgatatgataaattgtcagaagattctcaggatagtggaagtttgagcattttggtagcagaggggaaggagacgttagacaggcaaggctggaagaactagagggtaactggtggaatgtggcccatgaagagactgggaatgacatcaaaggtgtatttgcctctttttctttcctaactcctttcacccactttcctacatatctgcaacatatttctctctccttgccttaaatgtcagtgttatttggtaacattttgcctcctgttcttaatttcaaaagtgcagaaaccaaaccttgtatatttcagctcccaaaaacccatattgttaattttcattactgttacattcattactgtattattagtttcattctggctctgattgattcttacctccctttctccacaggtcaattattcccctaggagaattaatttaggcatttctgagcttgagttgtacagccactatgtttaattatggtgactaacctttattttctcatattcatgacttttaccttcccctgccttctcaccttccatgacccacaagtcggttttaggaacataaacatgtaatttaccaaaa

SEQ ID NO: 1226 - DNA, 1049 bp, Homo sapiens
ttcttactactgtatataataattcctgttaaccagatgttgtttgatagctcagtaataacaaatggagggtacttgtcctaacctgatttacattctttccttttgatgtgtagcatatgtggagcagtcagctaaataaaggtcttatcaataagatgcagtttgacacttggctttttgcttttgttgttacgccacttaccatatggtaaagaattgttatagaaggatatctgtattttcagaagtgaggtttgaattggtggaggtttcatgagcagtttcctcatttgtgatttatacattgtaagtttttatcatgtgagttgttttcaaattatattcaccagcagatagcctgtgttaagccatcttaagtgtcaccttttgaggtttttattcatacttaaaagcaattgaaagaaataactttcaacagaaatcttttgtttttacttacagccaatcacattctctgctgattattttaataagtatttcctgcataaaacacattaaatatcagctgtagtataaattactgttttttatttacatagaagttatttgggcccaccatgttattatggggttttgcttgtttgttttgtttatgttttagagacaaggtctgtctcgctgtttcatccaggttggagtacagtgacatgatcatagcgcactgtaaacttgaactcctggggtcaagtttacaagttgtgggaaccgatcctcccacctcagcctcttgttgggacttcaggcgtgcacctccacactcaactaatttttttatttttagtagagatgggatcttgctctgttgcccagactggtctcaagttccaggcctcaaacagtcttcctacctcagccttccaatgcactgggattgcaggtataagtcaccactcccatcctggatttatttgatattcactattagaagttgcaagattggaatagaggcttgagtccctttcattgtgtattggggtaggagttgttcattaatgaaaaaattaaacaggtaagtaattagtata

SEQ ID NO: 1227 - DNA, 1048 bp, Homo sapiens
aattaaaatattcagggaaagaaaaaactgcatctgctttgaacacctatggacattttttcttgtcattttccccttaaaaatacagtataactatttacataacacttacatagtattagatgttataagtaatgtagaaatgatttaaagtatacgggaggatgtgcataggttatatgcaaatactatgctattttatatcaaggacctgggcatcctcagaatttgatttccatgggaggtcctggagccaatccccgacagatactgagagacgactatattatatagatctataatcatttatattctgttagggactggtgggggaggagtcttttcagttaaagattaaaagggaaatacaagggaataaataagattaaaggaaatcttatttccttactgactaaactttccaagaatataattatgcagcaacagttaggggtcacgtgttaagaatagtcaggaaatcctgtctccagatgcctgaggattgctatctatttgtttgatgacttgctgtagaaatctctaggccccaagttgatattcttgtctccaccagacaccagactttgtgtgatttctctatcagcacttccttctgcctcccaactacttgccatttttacatctgtagtcctctagttctctaaagcaaatttaaatcattctattccttctgtatgttcattgagggatcagtacgtatgagtcaggcaagtaacaattaaatttatagcactttatagcctacaaagaatgaaagctagcatattagctaagagtttgggctttttgagataaattgtttaggttcaaagccctaacctgctacttactatctttgtgaacttggggaagatacttctattttttatgcctttatttccttgtctgttaaatggaggtgacaactacatccttaggatctctgtacatttaaaggagataattcatgtttagaacatagtacatggtaagtactcataagtagcacatggtaaatgttagttgataatataaccaatactataat

SEQ ID NO: 1228 - DNA, 1059 bp, Homo sapiens
gggccactctgacaattttttttaacctcatttgattgtgtaagggtctaaccacaacaaaaaatcatagtgtaatagaattaatcaagttcagcaaggtcacaggctagatcaatatacagaaaatcaattgtatttttctgttcagaaaactccaaaaatgaaataaagaaaattgtgttcacaatatcaccaaagagaattaaatacttaggaataaatttaacaaaataagtataagacttgtataacgaaaactataaaacattcaagagggctgggcatggtggctcatgcctttagttctagcactttggaggcagaggcaggaggactgcttgagcccaggagttcaagaccagcctgggcaacaaagtgagaccctgtctccacaaaaaataaaaataaaaataaattgaagatggccgaataggaacagctccagtctacagctcccagcaggatggacacagaagatgggtgatttctgcattttcaactaaagtacctggttcgtctcactgggactggctggacagtgggtgtagcccacagagggttagccgaagcaaggtggggcatcgcctcacctgggaagcgccaaggggtcgggggatttccctttcctagccaagggaagccgtgagtgactatacctggaggaggggtacactcctgcccaaatactgctcttttcccacagtcttcgcaactggcagaccacgaaatcccctcccatgcctggttcagtgggtcccacgcccacagagccttgctcactgctagcgccagcagtctgaaatcgacctgggacgtgggagcttggcggggtagaggtgtccgccattgctgaggcttgagtaggcggttctatgctcacagtgtaaacaaagcagcagggaagctcaaactgggcagagcccaccacagctcagcaaggcctactgtctctgtagattccacctccaggggcagggcatatctgaacaaaaggcagcagacagcttctccagacttaaacgtccctgcctgacagctctgaagagagcagtggttctc

SEQ ID NO: 1229 - DNA, 1049 bp, Homo sapiens
tcagcgaatactataaacacctctacacaaataaactagaaaatctagaagaaatggataaattcctcgacacatacaccctcccaagactaaaccaggaagaagttgaatctctgaataaaccagtaacaggttctgaaattgaggcaataattaatagcctaccaaccaaaaaaagtccaggaccagacggattcacagccaaattctacgaaaggtacaaagaggtgctggtaccattccttctgaaactattccaatcaatagaagaaaagggaatcctccctaactcattttatgaggctaacatcatcctgataccaaagcctggcagagacacaacaaaaaaagagaattttaggccaatatccctgatgaacatcgatgcgaaaatcctcaataaaatactggcaaaccgaatccagcagcatatcaaaaagcttatccaccacgatcaagtcagcttcttccctgggatgcaaggctggttcaacatatgcaaatcaataaacataatccatcacataaacagaaccaacggcaaaaaccacatgattatctcaatagatacaaaaaaggccttcaacaaaattcaacagcctttcatgctaaaaaccctcaataaactaggtattgatggaatgtatctcaatataataagaggttatttatgacaaacccacagccaatagcatactgaatgggcaaaagctggaagcatttcctttgaagaccagcacaaggcaaggatgccctctctcaccactcctattcaacatagtattggaagttctggccagggcaatcaggcaagagaaagcaataaagcatattcaaataggaagagaggaagtcaaattgtctctgtttgcagatgacatgattgtatatttagaaaaccccatcgtctcatcccaaaatctccttaagctgataagcaacttcagcaaagtctcaggatacaaaatcggtgtgcaaaaatcacaagcattcctatataccaataatagacaaagagccaaatcatgagtgaactcccattcacaatt

SEQ ID NO: 1230 - DNA, 1077 bp, Homo sapiens
gcgtttaaaaccttttgaaagcaatataacaataattttatacctgttaaatgtaataaattggggcctgcattttgtatgtttcttttattccatatttctctaaggattcatttttattgttttatgaaactactagtctgtgacatggaaggtagaggaaaaagattcttgaccctagttgcttgtgaaacctgggattctacaagtgacagttgtctgtttactcttgaagttcaagtgttactttgttacatggttaatttatgtcaaaagtatcataggctaagacatcaaagttttaataacattcttttttctttaaggggtttgttaaagttgttaagaataaggcctactttaagagataccaagtgaaatttagaagacgacgaggtactgtcacctttttgtgtttacaatattaatctgctttgcagatgcagtggagtatcctttctacaattatttttttctttcagagggtaaaactgattattatgctcggaaacgcttggtgatacaagataaaaataaatacaacacacccaaatacaggatgatagttcgtgtgacaaacagagatatcatttgtcaggtaagttgtattctagacagtcccctttttttattgctagagaaattgtgcttgggaagcaaagcacatggtgtgtgtgttagaagggctgtctagcacctccaaaagcatccagtgaataatttttccttttagtaggtctagaattggaacctgggaacttggtactttaaaaaatgctcttggttgcgctcatgcctgtaatcccagcacttcgggaagattgcttgagcccaggagtttgagaccagcctgggcaatatagtgagagtttgtcttcacaaaaaatgtaagaaaattagctgggcatggcggggcgcacctgtagtcccagctactcagtgggaggattgtttgagccccgaggttgaggctgcagtgaagtgagatcacacccagccctccaacctaggtgacagagcaagacactgaaacctagtttatgtgtgtggggtggggagattagaagtaagtaagaa

SEQ ID NO: 1231 - DNA, 1073 bp, Homo sapiens
gaaagcaacagattactaacctagtttctctcttactatagattgcttatgcccgtatagagggggatatgatagtctgcgcagcgtatgcacacgaactgccaaaatatggtgtgaaggttggcctgacaaattatgctgcagcatattgtactggcctgctgctggcccgcagggtatgtacaagatgattttaattgatgtagtttgtggctgattgcttggagagttttctgcaagatgtttgtacatggataagatagcttaagttgtgcttcaggagagtgcttgcttccagttttctgctttgttaatggatctatctaggtcagctctttccaataaaattttctgcaatgacacaaatctgtaatttgctgtccagtggttttgccactagcgacctgcagctgttgagttccagcagtatgtaaacttgaatttgaaaatccacttgtagctagtgtctacttaattggacaatgaagacccttgctacttaggtatacattctgaatgttggcaaacattaaaaatgcagactcgtgggaactccactctagaccttctggaatctgtattttgatagtatgtaccaagtgatttatatgcacattaaaactggagaatcttggctaggcgcggtggctcacacttataatcccagcactttgggaggccgaggagggtggatcacttgaggtcaggagtttgagactagcctggccagcatggtgaagccctgtctctactaaaaaagtagaaaaaaaaaaaaagccaggcatgatggtgtgtgtctgtagtcccaactacttgggaggctgaggcaggagaatcacttgaacccagaaggcagaggttgcagtgagctgagatcacgccattgcactccagcctgggcaacaagagcgaaactgtgtctcaaaaaaaaaaaaaaaaaaatgagaatcttagtgttttggagagtggccattgacgggaagattcatttttgttttaaacatttttcctggtagatgaagatgggattttgccttgtttttattatctgagttttttaccttgttttgcaa

SEQ ID NO: 1232 - DNA, 1091 bp, Homo sapiens
gaaaaggcttatgaaagatttctaaacctgcaactaggaataagattgtaggccattttgggaagttaagtaggttaatttgtagttccattggtttaatgatattttttgttgttgagtctgtgcatcttgatttattaacttcttaggaatattttagcatttggtgatttaaccaagaaatagtaatttttggtaagcctaaaatacaacccaactgaaattttgcttttatgatgtggaggtgggtggggggagttagttgcaagtacaccaagagcattctcacttgacaatttcattaactgtgatcttggacaaatcacttattcccatgtacccactgaaaattaaaggatttagagtataagttttgaaactccttcctgtgctgatgtgctggatgactaattttgtagtggtggaaagccttggtaatggcttttaaaggtttttgtagcatgaatttcttttctgtcctggaattcagagatgagctgctgaatgatgatatcccactaactgagcagtcagtagttggtcctttggttgcatatgatgcgataattgtttcaagacgggactgatggcagctactaaagtaaattcttactagtaaactaagttaagtgagtctatactaaaatatgaataactttattttagtaccaaacgattccctggttatgattctgaaagcaaggaatttaatgcagaagtacatcggaagcacatcatgggccagaatgttgcagattacatgcgctacttaatggaagaagatgaagatgcttacaagaaacagttctctcaatacataaagaacagcgtaactccagacatggtaaaacatttacctaaaaatgcctatattggttaatttatggaaataggtttattacttgttttgggggcaggtaacattcttatataggtgtgtttcttgacaacatgagctagacttgtcaacattcttttagtaatcttttagatgctcaagtgtgggagacttcaagcatctgaagatttggctaccttttatgctttggctgttctgtatttgtagatgtcatttctgtaatcatagttgt

SEQ ID NO: 1233 - DNA, 1088 bp, Homo sapiens
cttagctggtctcaaactcctgggctgaagtgatcctcccacttcagactcccaaagtgcttgagattacaggcatgaaccaccacacctggcctgatttttttcttgagtaagatggagttctgtagtgataattcacattgcataaggtgaaaattgggaatttgttaggaaaaggtgagttacatttagaagttaaagtgtttaccaacattgatttagtttagttccttttgagaatctggcttagaaggacaagataagttatggttgcattaatatagtagggcacatgaaatgaaaccaagtactgtttgctttcctttgtttcagatggaggagatgtataagaaagctcatgctgctatacgagagaatccagtctatgaaaagaagcccaagaaagaagttaaaaagaagaggtatgtcgtctttttttttgtcttttcaagaaaacaggttgggaatggttcccacgtggggcagactgttggtgtaattgtgcaaactcgatcactagctctgcgtgatgtggcagaagcgaagggaaccaggtttgcaaaagtaactgtggtgatggaaatgtgttagcctcagacactactgaggtggttctttctatcctagtacagtctaagtactggttactgcatttttttattggctgacaagttgctttttgttgatctttcatgttttgatctttaaatggaatagaaagtaatacttaatgaacatgtaagcataaagtgatgtgatggcccacaaatacaatgtatagtaattaaatcaatgtatttaacatattcacctcaaatacttaacactttgtggcaacaacatttgaaatttattctcttaattgtgaaatgtacgatattctatattcatcatgctgtgcaatagaactaaaaacaaaatcatactcctcctgttggagattttatacttgactatcatctgcccattctttgcacccaccagcctctgtaaccaccattctgctctctgcttctgtgagttccattgttttagattctatatgaatatgaagtatttgtctttttgtgcctggcttatttcactga

SEQ ID NO: 1234 - DNA, 1051 bp, Homo sapiens
tacataattcacatgcattctttgaaggtgtacagttcagtgattttttttagtatactcacaaagttgtgcagccatcaccatacctaatttcagaatattttcatcatcccaaaaagaaaagaaaatcttaatccattaacagtcagtccccttcacctatccactatcctctggcaaccactaatctaccttctgtgtctataaatttgcctgttctggacatttcatgtaaatggagtagtacaatatgtggccttttatgtctggcttccttcacttagcatgactatattagtccattcttgtactgctatgaagaaataactgagactgggtaatttataaagaaaataattttgatcggcttacggttccacaggccatacaggaagcatggctggggaggcctcaggaaacttcctgttgaagtggcccccttgaagtggccacagcaggaggattagagatgggggcggctccacatgcttttaaacaaccagagaactcagtatcatgagaacagcaggggggaaaatctgcctgcatgatctagtcatttcccaccaggggcctcctccaatgttgggggttacaatttgacggaatatttgggcgggcacacaaaatccaaactatatcgttaatgttttcatggaacagccatgttgtagcatttatagtcacttcatatctttttagggtcaaataatatttcattatatgaatatacctttttttgtttgtctagtcatcagttgatggacatttgggttgttcccacattttgactattgtaagtaatgctgcagtgatcattcatgtatagggtttgggtgaacatgttttcatttctcttgggtacacatatctaggagtgaaattactgggtcagatgataactcggattagtgttttgaggaactgccaaactgtttttcaaagaggctgtgccattctacaagctcactagcgattatctggtgagtgattatctcaccagtttatccacatcctcactgatacttattattgtctatcttttgattat

SEQ ID NO: 1235 - DNA, 1044 bp, Homo sapiens
aacctgttaggtggttaagctatttttaattctagggggctcaggctgaacttgaggttggggaggagaatttgcctctgcttttagttgcaattttcaagtgaggtgaaattaagtaaaatttgtaagagcttttttggctttttaattctagataaatacataaataaatttgggtctctgtaatagaatatgtgcttttataggatagtgatatttgcttgataaatggaggatttacttactagtgtgtgtattgataaatacagactttgattagtttattcaagagagatttttaagtccctactttatgccataccttgaaaagttttagagttccagtgatgagcaaaatgtttactttcaattgtaattcaaaatgcaaattccacttgtttacatggagttattagattgtaaatttctagaaaattgtttgattctgcctttaaaaaaaaagaaagatggagcctctcaagagtgcagtggtacaatcacagctctcgtacttcactgtatcacggtagcgtttgaactcctgggcccaggatatcttcacacttcagcctcccaggtagttgggactacatgctctcaccgctatgcctggcttaatattttcattgttttagagattgtgtctgtgtatggggatctcgttatgttgcccaggctggtcttgaactcccagcctcaagggatgttcctgtctcagcctccccagtattaatagcttgattttcctttttttttttttgagacagagtctcactctgtcaccgaggctggagtgcagtggcgcaatctttgctcactgcaacctcagcttccagagtagctgggatctcaggtgtgcaccaccacacctggctaattttttttcttttttgagatggagtctcgctctgtcccccgggctggagcgcggtagcacgatctcggctcactgcaagctccgcctcccgagttcacgtcattctcctgcctcagcctcctgagtagctgggactacaggcacccgccatcacgcccggctaattt

SEQ ID NO: 1236 - DNA, 1528 bp, Homo sapiens
gtctttatatcagctgtaggttattcacttggtgaatattagctataattgttagtttatctctgatgactcagtataaaactttttcttttttttttttttcttagattttatacgtttatatgctctgtctgcagttctggaccagaatacctcaaacgtctaccattacagtggtaagtgtggacctttctgttaaaagaaagaaaagccattttcttaaacctacaagttgaaactttctatatacatttacttggcttaagtaaaaataggttatttatgcttggctttatttcttttatttatcctcatgcctgatgtcatcttcactaagtaacatccacttgtattgctaaattaataaggctgttcagtgttgaatgttataaatgaaactttcagatatcctttagacctaaattcttactcatatttctagttcttttgaacattcagaataccatacagtagaagagagataggtataacaaatatgctaatttctgcttcaatgtagtaattcttgtgtgttggaagtgtgatgaattttagaggtttactaataaaatgcttacagtaagtacttacaaatctttgttgtattttacatattttatcaacagataggatttaacccatgaatcaaatagtttggttaagtatggtatattctgtagcttatatccggaagtgaaaacacaaaaatcttgattttaagttatatttttttaaagccagaccctctttgaatgcacttgaagaagtaatttgtggccaggtgcggtggctttcgcctgtaatcccagcactttgggaggccgaggtgggtggatctcctgaggtctggagtttaagaccagcctggccaacacggtgaaaccacgtttctactaaaaatacaaaaaaatttagcctagcgtggtggtgggcgcctgtaatcccagctactcgggaggctgagggaggctgaggcaggagaatcgcttgaacccacggggcggaagttgcagtgagctgacgttgtgccattgtactactccagcctgggcaatcagcgaaactctgtctccaagaaaaaaaaaaaaaaaaaaaagaagtaattcatatatcttctagtttatagttgctattcagaataagtgaatgtttagtcactattttctagttatttttatgtgtagtgatttattgtattgtgaatatgactatccacctaaatatttctctttgcattttaattactgttttataaggaaaccgtgattttttaacagtaaccaaaaacattgttttgtgtatttgattattttcggattccagggtagatatagcacacctatgcctttacaacctaagtgttattcataagaagaaatactttgattctgaacttgagcttatgacatacattaatgaaaactgggatagattgcaccctggagaggtaggtggtctgagaactaacttcagtagctacttgatgtcttttttgttttgttttgtttttcaaaaaacaactgagaca

SEQ ID NO: 1237 - DNA, 1032 bp, Homo sapiens
ctacatcaatacatcattatcatccaaagctgtgacttcttttagtaataaaaagaagtttcaaaaatattacacttttggagataatatcctgtcatactgaaaagccaaaatgtaacattcatgtatcatatttttttcttagttgaatacggtataggattgttatgaagagaagataaaacttttgaatcattttagaagataatggtagtattacattgtttccttatgtagtttttgtacttcttttggcttggtacctaatgattatcatatagattgagtgtagctgtttgaggaactactatgttttggattattttctttgagatagtaaaaatacttaacatttgaaaccatgataaactttcttaaggtttttatgtaaaatgaagtctcatctgttgtatcagattgttttggggagtttaaaatgagatattagtactttttgtaatcgcttattgtcatttgtgtttgattcttaaagttatttgaaatcctagttctgtaataaccactcttctgtggtcttaaattttagaaaccctgaggttgataccagaataatttatggagtgctacttcacttctgagggaggtagggagaaaagcaaagatgaaactcaagaaatactgtggtagaaatgatactagaggaaaatatacaatagaggtggaataatatttataagtggaaattataagaaatctgaacaaaaattccttggggcttagagtgttataattagcatatagtatggtggttagcaacaaattacctaagttgttgggatacttaagcccaggtggcttggaacttaatattggtagttgaaaggaagagttatactgtaagtattagtgtgagattagtatctggagaggggggagcaaaaaaaaaatattcttttggagatttatataataaacctcatggtcagatggaaggtgtagaatatgatgctcttctaatgtagattatctgatttacactataatggttgtacttttagtttgcaaaacact

SEQ ID NO: 1238 - DNA, 1875 bp, Homo sapiens
cttagatcttctgactaccaatcagtacacttttcctctgcatcacattgcctctatctagcacctgtatattactaattgatgaaattgtagtgcgttaaattgtttcttgatacttcacagctggcagacacaccaaaatctgaaagatatgagcatgttctggaggcattaaatgattacaagaccatgtaagttgatttattttatgtatccctatgagggagacatttagtaagtataaggaataatggcattgtttaagaattgtgggattgatgtacagaagaagtctataccattttaaactttataatgtcctattctattttagttagattaaagcagtgattctcaaggattggaggagggaggagtaatccttctcctgggaatggtgggtgggagacatatcggtatctctgggagaatttagcctgttccattgaaaaagcatattcagtaataacttccttctataatgtaatgtactgaaagtaaaataaaatcttgttagctggtgggaatattcaaaagatagagaatattgtagggaatacgggtttttaaaaagattgagatctgtggttataatagttaacaccattagttacagaaaataatatttctagctgagtagtctaagataattaagtgatattatttgatatattctcatacagatctacaggtcttccccctaccttatttttactttttttttaactcaccactatactaacaaggattcccttctttttaaaacaatgtatctacatttcttagaaacatttttaaatgcaacaaattttataaatgtatgtgttgactccagtgaaattttatattataaaatttttgttggcaataagttggtgttttgaaattgatagtatttcttcattaaataatgtaattaccagtggctggatctttacaccagctcaaaaagccatgaggtacctgatatgaccttgaagtataataaaaaggaaaaaagactgtaaaaaagtcataaggtacctgagcagttattgtgctggtaaaaatgtttcatgggacagtgaattctgaatttcagtttagggtaccagaaatatatctgttcctgttatggtagtaatgagggatcccctttcttaaacctgcaaaaaagtagaacattttggttgggcgtggtggctcacacctgtaatcccagcactttgggaagccgaggcaggcagatcacctggggtcaggagtttgagaccagcctggccaacatggtgaaaccctgtctctactaaaaatacaaaaatagccaggcatgttggtgcacacctgtattcccagctacttaggaggctgaagcaggagaatcgcttgaacccgggaggtagaagttgcagtgagccgaattgagccactgcactctagcctgggtgacagagcgagactctgtctcaaaaaaaaaaaaaaaaaaattaaaaagagagggagaacattctaaacaactgatggaggttcttgtggccaggcaagtttcagtagagctgaggtagatggagttgcttgggaataaggaccatagagactaaaagaaaggtctaaggagcatattttgcagaggcccaagtccataataaactggaataacccttctttgccccaggttatttccatttccagatccggcactctagatactccttttattttctgggcctctaggatttatctcctgctttctttttcaatgctgtcacctattatttctgactaaggtttttctctttataaatccactctgagatggaattcttttttccctaaatcccttttgaaatatttctaacagatgacactaaatatgggaaagcatattgggaccaa

SEQ ID NO: 1239 - DNA, 1050 bp, Homo sapiens
aaggcagcctttatgactactacaatgttaacatagatatttcctgactccatgaagttaactgctaaattcatagtcatttttagtagtaaatccttgaaacatcctccaagttgtaaccacctaaaattaaactatataattgagcttttaggagttttgaaatcttccatccagtataattgtctggtttttgttgttgtttttaaatctttaagtggtatatattgttcagaattatattaaagaggactttctttaaacctttcataatgtaaatatctttaaagtcaagaaatatttatttggattagaatatattatctgtgcacttgactaaacttgtggattcaactaatatttactttttattaccattaatataaaataataaaatatatgtatatgtgtctagttacatacatagagtcaatgtctttgttttctttatgcagagattaaatgcataatggttttccatttcagggaagtaagcaatggcatagaaaaaaaaggaaagaaaaaatctgtaggtcgtccacctggcccatatacaagaaaaatgattcaaaaaactgctgagccacttttggtaagaggatatgttggtatatgttctcaagaagaaggatgcatgaaataactgagaagctagtatttttttcagcttactttagagacatgctttaagtatatatttttattttccaggataaggaatcaatttcagagaatcctactttggatttaccttgttctatagggtaaatagaaagttattttctccctttctaggttttgtcttttgagtagatattaatatttgtttgttatataatatagtcgttacacaatttaaattcttttgtctcaggagaactgagggaactgcacattcatccaatacctcagatgtggatttcacgggtgcttccagtgcaaaagaaactacctcgtctagcatttccaggcattatgggtagatattttacattcttattttttttactttttttactctagatttcttttctttgtaaagtgttgatt

SEQ ID NO: 1240 - DNA, 1072 bp, Homo sapiens
ctgagttttgttttcaaaagcagtgatggattgtcctaaatgtcttcttccaggcctcttactgattttgcctattaactgccactggctcccttatagatgtttatgtttgatcctaaatgctttttttgagaattaaataaaactagtttatattttattatttaattctataaaggtaattcagcccatcattaattatgccaagtgctgaagaaaaaaatgaataatatctgaattaccagtaccctagttaaaattagtttcccatattagcgaaagttaaaagcagggccaggtgcggtggctcatacctacaatcacagcgctttgggagtctgaggcaggattactgtaggccaggggttcgagattagcctgggcaaaagtgagaccttgtctctacaaaaattaaaaaattagccgagtacacacctgtagtccaagctactcgggaggcttggttgagcccagtactttaggctgcagtaagctatggtcacaccattgcactctggcctgggcaacatagtgagaccttgtctttaaaaaagaaattacatttaaaagaaaaagaaaaagcctacttaagaaaaaccagtgacatactcagatgtttgctgctcttacaaaattaatatagctaaagataaaagctttgtttaatgtttaaaaaacagatttgtaggccgggcacagtggctcacgcctataatcccagcactttgggaggccgaggcaggcagatcacgaggtcaggagatccagaccatcctggctaacacggtgaaaccccgtctctactaaaaagacaaaaaattagccgggcgtggtggcgggcgcctgtagtcccagctactcaggaggccgaggcaggagaatggcgtgaacccaggaggcggagcttgcagtgagccgagatcgcgccactgcactccagctgggcaacagagtgagactccgtctcaaaaaaaaaaaaaaaaaaaaaaatttgtaaatctggtatagtgattaatagtgagttggactgcctgaatgtatatcctggctttgccgttcactagctgtgtaa

SEQ ID NO: 1241 - DNA, 1034 bp, Homo sapiens
gcagtatttcttaaaagaatccttgtaagaacagaaagtcattgatgctgggctcttaagctggttgtacaattatgtagagccagtttactttttctcctgttttaggaatccaaaactttgttgataatgtgaaatgctatgtcagggattttgaagttagatttcctgtcttatataattaaacagggagcagaaatgcttttaagacagtagggctgtccttccctaccatttactgtgagacactaggaaagttatataacctttttgtgcctcagttacctcatctgtaaataagaagtaataatagtgccaaccatataaagttgtgagtgcctggcatgcagaaagtaggtatttagtaaatgtgagcaggtattattttagaattaagcttcaaaaaattttaaaagtgagattaaataaatatgattaaaatgaatgcatatatattttattttcatttttattctcttttcttcataggcagttaaaagaagaaaataacaacggaaaagaaaaattaaggatcatggcagtgaaaaattcagaagtcatggcacaactaactgaatctagacaaagtattttgaagctagagagtgagttagagaacaaagacgaaatacttagagacaaattttctttaatgaatgaaaaccgagaattaaaggtccgtgttgcagcacagaatgagcgactagatttatgtcaacaagaaattgaaagttcaagggtagaactaagaagtttggaaaagattatatcccagttgccagtaagtatgtgtgattacgtaatggaaaagaagaattttactaaagtgttttagaaaagactatcattttgtggttgctttattagcttctaatttctttttctctatacttttagtcatgaatttctcttctgtctaaatctctattttttttcctgcacttaccattctacacttttccccagtttctcagatgccatatataagaatggcacagaattttttttaaacagctttgttgaagtatcattta

SEQ ID NO: 1242 - DNA, 1029 bp, Homo sapiens
ttaaactagaacataagatcttagctcctctgatatctgctttcccaggatgctgtttatttgcttggatttttaatgtactgtttgcttttgaaattagaaagtaatcatatacagataacaattttaatttggcattctcatttgtgtatcaagaattatttcatatatggtcaggcacagtggctcctgcttgtaatcccagcattttggcaggccaaggtgagaggaactcttgaagcaagagttcaagaccagcttgggtaatacagtgagaccctgtctctacaaaaatgcaaaaattagctgggcatggtggcgcatgcctgtggtcctagctactcgagaagctgaggtaggaggattgcttgagtccaagagttcgaggctgcagtgagctctatgatcataagctccagtctgggtgacagagtgagaccctgtctctcaaaaaagaatcatttgagatatgattccgaatgtggtaatgtatgcttgatcgtttgtttcttgtagtgctaagaatgacacgattagaaaatgtgatttttttctacttctaggaggtgtgattcggttatagtttgaaggtagaagtcattaaatgctaaccttgctcctttttataactgtcttttaaaattctgtattatccaaacatacagaaaggtgcatatgctagtgtagcaccttatttgtaaaatttgggacacatattgtcttatcaactctatgtttttttagaataaaattttacaggtaaatcttctttgtgtaccttgtcagatcccaattatcttcctctctcctcagaaatggcaattattctgaaattcatgtgtatccttctcgtccatgttttaaatattgtcacatatcgatgcatctagaaatatatatatgttgcttagtgtttttatgaaaatactgtttgccactataatttgtttttcactcaatattgttatgagatgtatccatactgatttatgtgactcaggtttatttcttttaactattgtagttttc

SEQ ID NO: 1243 - DNA, 1035 bp, Homo sapiens
gaacctgcttctgtgtgcagtacataaaaatgttcttaatgatctcaaactgtccaaataaattttatgattaccttcagtttaaggaaacagggcaacttaaaaaaaatttttacaatgatttctattaaaaaatggaatttaaaaggtggagaaggattcttacatttctggtacaaaggaatagtcttagctacctagaaaaatgagtgattcagaacttttctcctctttgttacgtatttaatttagagagcacattacttattctttgatttccttaatgaatgtctcattctctgtcccttttagtactctttagatcagaaactaaactttgtttatgactaaatctttcaactatttaagtaggtttttattcttgaagtcctattcagaacaattttccttttatgtttattagcagaaagcgtaaaagatcaaaatcaacatactatgaacaagcaatatgaaaaagagaggcaaagacttgttactggaatagaagaactacgtactaagctgatacaaatagaagctgaaaattctgatttgaaggttaacatggctcacagaactagtcagtttcagctgattcaagaggagctgctagagaaagcttcaaactccagcaaactggaaagtgaagtaagcttggaattagcttggtatatatgttaatttttgaactagaacaaaaggtattattttagggttttataaaaattatatgtttacatccagatttaaagtttttaaaaaatggtaccacataagttataaattgttttaaaattatatttggaaacctttgtattttaacttattaaaagttaaagttattaaaagtaggaaaaactgtagtgggtaaaagtctcaaatttggtggaaataatattgcattgcagcctattatttcttccatagtataagttaatatggttaatatacatttataaataaagactttggattatgctgttggaagaaaaggagtgataataaaggatttcaaattttagcaaaccccaaacc

SEQ ID NO: 1244 - DNA, 1050 bp, Homo sapiens
gtagagaagccaaacagtataccacagtgactcagagattattataagcagggacccgctaccattgttaaggttagaggaacatcaggaaaagatggtgtgatcatagtctagaagcagggctgcctatctggagctggggccaaagaaaaaaggtctgtccaataggaactggggcaatagaggaggagcactgcagctactggccattcccattggccaaacctatttgtaatctagagggcaaaggaggccaagaaatgcagtttcctgcaatacacagagcagaacaggggaaagccataggtaaatctaagagtaaataatgtagttgaccagcactccagacttaggtgcatcaagtaattatatagccttagaagtttaaaaaaaaaaaaaaaaacttcagatttaatacggtcatgtcttcttctgtctaccttcccttatgaaggtttttatagcatctttgacaggcatatatttttctactccaatacatagaaactaaatcatctaaactgtatgtacttggatttttaaaaataggaatgtccttttttttttttactatgatcatctttaaagtagtatacaaaatacattattttggcatttattctactgcccatacccacactccgcttcataataaatagacttggcagagatggaatctacctggaggtaggcagcatttgtaacaggagaatctgttgagctttagactttgcattcatagaaacaacatcagagactagggtggataacagatatttacacacaaaataaatagaacgattttttttttctttttttgagacagggtcttgctttgtcacccaggctggagtgcagtggtgcaatctcggctcactacaacctctgcctcccaggttcaagcaattctcctgcctcagccttcccagcagctgggattacaggcatgtgccaccacacctggctcatttagaatgatttttacaactggaaatacatacctaggctcaaactgaattagaaaccagaagtggtaatcaggtatatttg

SEQ ID NO: 1245 - DNA, 1045 bp, Homo sapiens
ctgtatatgatttaaataaattacttacgtttagtgctaataaagcgttttttctaatacggcaagggttgcaaatatttatgttaaactccattcaagggagtttggtgacatttttgtgagtgattggtagggcttgtggggaccatgtcttgcttaaatacatttagaatcatatctctttgaaagcattgtgcctgccaaacaaaacatatttacaagctgaatctaatcctaaggctaagaatttgcaacctttgatctttagcgacaaacctgaatgaatgctgttggactcagcataattatataattgttattaacagctcagcttagtaactatcagtaataattaggcgctttcaagtgtttgcccttaactactcattacactttcattatatggcctctgttctgtttttaagtataattatccaattgtttcttttagttttataagccacctgaaattataaatagattgtacataaaataaattgtaaaattagttcagtattgctatctttttaaaaaagtgatggggtctgtgttgctcagactggcctcaaattccagagctcagataaccctccccactcagcctctaagtagctgggagtaaaagcacacgccagccgggcgcagtggctcacacctgtaatcccagtgctttgggaggccaaggcaggtggatctcttgaggtcaggagttcgagaccagcctgaccaacatggcaaaaccccgtctctactaaaaatacaaaaattagctgggtgtggtggcgcatgcctataatcccagctactcaggaggctaaggcagcagaattgcttgaacctgggaggcagaggttgcagtaagccaagatcgcgccattgcagtcaagtctgcgtgacaagagtgaaactccgtctcaaaaaaaataagtacatgctgctgcattttaatatttaatattactatttaatatttgatactaatattttgtctataatattgaagtatatatttttacctgtttggaagttgataaaaatttacttt

SEQ ID NO: 1246 - DNA, 1070 bp, Homo sapiens
ttgttaattgtgattttaagaatgtgaatgtaggatttacaacaaaaaattggcactctagccactttaaaccaacaggctttaaaccaacaaagatcaaaagagaccaagaaggccattacataatggtaaagggatcaattcaacaagaagagctaactgtcctaaatatatatgcacccaatacaggagcacccagattcataagtcaagtccttagagacctacaaagagacttagactcccacacaataataatgggagactttaacaccccactgtcaacattagacagatcaacgagacagaaaatcaacaaggatatccaggacttgaactcagctctgcaccaagcagacctaatagacatcgacagaactctccactgcaaatcaacagaatatacattcttctcagcaccaaatcacacttctgccaaaattgaccacatagttggaaataaagcattcttcagcaaatgtaaaagaatagaaatcaccacaaactgtctctgagacaacagtgaaatcaaattagaactcaggattaagaaactcactcagaaccacacaactcatgaaaactgaacaacctccttctgaatgactactgggtacataacgaaatgaaggcagaaatgaagatgttctttgaaaccaatgagaacaaagacacaacataccagaatctctgggacacatttaaagcagtgtggagagggaaatttatagcactaaatgcccacaagagaaagcaggaaagatctaaaattgacatcctgacatcacaattaaaagagctagagaagcaagagcaaacacattcaaaagctagcagaaggcaagaaataagtaagatcagagcagaactgaaggagatagagacacaaaaaacccttcaaaaaatcaatgaatccaggagctggtttttagaaaagatcaacaaaattgatagaccgctagcaagactaataaagaagaaaagagagaagaatcaaatagaggcaataaaaaatgataaagaggatatcaccactgatcccatagaaatacaaactaccatcagagaat

SEQ ID NO: 1247 - DNA, 1028 bp, Homo sapiens
ccctccatggttaaaaatagcttggattggattttctttctttttttttttttttttttttttgagacagagtcacgctgtcaggctggagtgcagtggtgtgacctcggctctctacaagctctgcctcccgggttcaagcaattctcatgccttagcctcctgagtagctgggattacaggcgtgtgccaccacgcctggctaatttttctgttttttgtagagacaatgtgttgccatgtgggccaggcttgtctctaactcctgacttcaagtaatccccgtgccttggcctcccagagtgctgggattacaggcatgagccaccatggtcggctggcttggatatccttaatgtctagtatagtaactatggtattttgaagggttgtctctccattgtgttgatttgttaattttataaatttgatattttataaatatgcttgtccagcttgtatttaaatatgatattgtatagctatacatttatttaggtcctgtacacttatgagggtactcttttaaatttaaaataaaaaatacagatgagaaatacatagtctgagttggttaagtgattcttaggtgctagacactgtcaaacgccttatattaattacctgttgattcctacaaccctaaaactaataacaatatgatatttattgcttcatttttaatttttaagaggcagggtcttgctttctcacccaggttggagtgcagtgccacagtcatagtttactgtggcctcaaactcctgggcacaagcgatcttcctgcctcagcctcccgtgtagctgggactacaggcgcctgccaccacgccggccaattttttttgtatttttagtagagacagggtttcaccctgttagccaggatggtctcgatttcctgacctcatgatctgcctgccttggtctcccaaagtgctgggattataggcgtgagccaccgtgcctggccatgttggtgaatttgatatacagaacttagaataatgcctttctgaagtttttag

SEQ ID NO: 1248 - DNA, 1062 bp, Homo sapiens
acctgtgtagttagaaaaaagcaatctctaattatatttacctatagagtttatgttctccagatgtgtgacaattacatagtacttggacagtatccaagtatgataataaactgtctgaaattggcctaatctacatttaaccaaagtgtatatattgtgggtttgtaaaaaattgttatttttttttatgttttgggtgtttaggctagacagcaacaagcagaattggcccaacaggaatggcttcaaatgcagcaagctgcccaacaagcccagcttgctgctgcctcagccagtgcatctaatcaggcgggatcttctcaggatgaagaagatgatgatgatatctgaaattcaccagctgagtttctatttcttctataaatgtttttccctgcacaacaaaaacagtgaaagaaatgcttatctgtaattttgtatgcatcttggtggacttgtcattggtattctagggatgtctgctattaagtttcatctattgtgtgctatacatgtaaaaactgtctctttgaactattgaaaatttaaggttcagtataatatcaattttgaatttttaatggtgtttatgaaattttagatagcagcgagtccttcgtttgatcaataaacagtgttacagataacttcaagtttataaaaatacagtgaaatttctacaaagctctaaatctgcatttgcatttcctctgcccttttaactaaactaaaacttgtgaattttaaattattaaggggggggtgctgtgtgaatcagtagacattggattgggttggtgaaagagttcagttctgtagtatctgaatttgtcttttaaaatgagtacatatataggcaataaatatatatgctcagatcaatatacttgtttagaaaaacttcaagacattcaaaaactaggaaggagtatgtttaatagtatttgtataaatttggtggttatgtttttttattttgtttctgttttgtgtagaggtaaaaactatagttttattacagcataattcattttgagctccactatgacatttcaaaga

SEQ ID NO: 1249 - DNA, 1335 bp, Homo sapiens
ttgttatacatttattaaatatacttcccccatgaagtgaaaaggttaattttgctgaatgttttaagttgaagttacttcatggatgtcatacccatgaagtgcatttggatgagatagaagaaattgttttttaaaaagtttaagtaccaaaggtagtctagtctagaacgataagttaatacgtgttggcttttctaatttgtactgtaacatccttatactttctattttaagtatatctgtttcttaagtaaacaacttagatattttccacacctttttttttttttctgatgcagagttcaggttaatattttactgcatctgataatgtattatacgtttgaagcctagtgacttttcattttgacattcttgtgatttcatatgctgtattcttcaagcaataaaattgtgatgtgttttataaatggtttttatatttaatgttctatagagagatttctattattaccatttttactattttcaagaatcttaggcccaaaagacattttggtcatttggtatgtagtacctgccttttgtttttgtttactgttatttcaaaaaatgtggttttacttgtatttttataatttacagtcctaagatcgaggcataacaaagcttacttatgcaatattttatttttaggttttttcttttttttttttttttttttttttttttagcatttaagagtcactattatgttttgccagttaaaattttttaaatcttttgaagagagaaacaaaatcttcagcgttcttgagaaataaaattattgttcagtaagtatttttccatccccttgaatatatgttatatattctttttcggcagattatcagattagtaagtgtttaaaaggcatcagtttttaaaactgcatataccacacacacacaaaacagtacacaaataaaggttttcacaaattaaacaaactcacatactagtcttcagatcaaaacacagagcattatgtgtaccccagaagccctcctctttccccatcttaacactgtcttctttcttgctgaaagttactatcctgacttctaaaatcatagattagttttgcctgttttttattttatgtaaatgtaatcatacataatacactttttttcattcatcatttttgtgaatattttagtttcttgttgccactgtaacaaactaccacaaacttagtgacttaaaacaacacagatttattcttttatagtcctggagatcagaagtccaaaaatcagtttcattaggcctaaatcaaagtatcagcagggttggctctttattgaggttgtgagggagaatgtt

SEQ ID NO: 1250 - DNA, 1048 bp, Homo sapiens
aatttcgtctgtctttattataaacatgttgtaagtgaggaaactaagattccaagaaattaagtactgttggccctctgtgtctgggggttccacatctatagatcgaccaaccatggactgatggattgaaaacatttggggaaaaaacaaaaaataacccaacaatgaaatagtataaattttaaaaataatataacaatatttatatatcatttacattatgttagatattataatctagagatgattagcatccttggattttggattttggtatccttggggtatcctggaaccaatccctggcggataccaagggatgactgtaatataataacatctaacaagtgaaggatttgaaccccaatgtaagtaattatgaaaactatttttcttccactagaacttttttccccaaaaatactctggaaatactggaacaaatactaaaataaatgacctttatttgaagatcttttaaaaaaattataagcctgcctgaggatagcaaaattgtgtgcttttgcaaggtaattgtagaactcattctaaggaagcagaggtaatgtctgttactattttcagctccctttttctgtccactgttgtctaaatgattcactcagtgttatgcagaatatgagaagttattttataaagttgatttgtggtataggctttacatatgtcttttcttttggtcaaaatactaaagaaagcttatagaaaaagtgacctggtgtcaggttttagtttcatccttatccaaatgttgcagaattttggaatcttttggagtacactttctctttaaaacaagcccatcacctttagtatagtggtgagtaaaaataaaataaaaacaaggccaaattgcgtttttctaaattgcaagttccctgttttccatatcccagtaacaaacctactgttgtgcaaataggaaataacatctagtagctactttagcaatggacgtggcaaaataaataaattagtagctatggctcattatttaggatttaaatgagccataactactata

SEQ ID NO: 1251 - DNA, 1425 bp, Homo sapiens
aagacaggaaggaagaaaagaaggaagaccagaaaacaaataacaaaatggtaggactatggccttacttatcaataataatattgaatttaaatggatgaaaccctccaatcaaaagacagagtaacttaatggattaaaaaaaaaaaacaaaacaaaaaaaacaaaacaagaccaggctggttactgtggctcacacctataatcccagcactttgggaggccaaggctggaggatcactggagtgcaggagtttgagactagcctggacaacctaatgatacctcctctctacaaaaaatgttaaaattagctgggcatggtggcacatgcctgtggtctcagctgcttgggagactgaagcaggaggatcactggagcatgggaagtcaaggctgcagtgagctgtgatcacatcactgcactccagtctggggaacagagcaagaccctgtctcaagaaccaactcctgccagccccctcccccaacacacacactagcaaaaaagacccaataatcttttgcctacaagaaggacatagaatgaaaataacgatgcacatagactgaaaataaaggcaccataggctgaaaatataaaggcacacatacagtgaaaataaagggatgggaaaagatattttatgcaaatggaagccaaaaagcacaggagtagctatacttctatgagacacaatagatttccagacaaaaactataaaaggagacaaagaggtcattatataatgaaaaagggtcaattcagcaagaggatataacaattataaatatatatgcacccaacactggagcacctaggtatataaagcaaatattattagagcttaaagagagaccgcaataaaatgatatctggacatgtcaacacccccgctttcagcactggacggatcatccgacagaaaatcaacaaagaattattggacttaatctgcactatagacctatggacctaatagatatttacagaacatttcatccagtgcctgcaaaatacattcttttcctcagaagatggatcattcttaaggatacatcatatgttaggtcacaaaacaagtcctaagaaattcaaaaaaattgaaataatatcaagcatcttctctgatcacaatggaataaaactagaaatcaataacaagagaaattttggaaatggttatacaaacacatggaaattaaacaatagtggccactatgaccaactatatgccaataaattggaaaacctagaagaaatggataaactcctagacatatataacctaccaagattgaaccataaagaaagtcaaaacctggacagaccaataacaagtaatgaaaccaaagccataataaaaagtatcccagcaaagaaaaatatgggatccgatggcttcactgccgaattctaccaaa

SEQ ID NO: 1252 - DNA, 1671 bp, Homo sapiens
gtatttgatagcacaacagggtgactgcagtcaacaataattatacatttaaaaacaaaagagtgtaattgtattgtttgtgacacaaaagataaatgcttgagatgatggatacccatttactctgatgtgattattacatattgtatgcctgtattaaaatatctcatgtaccccataaatatatgcacctgctatatacctgcaaacaaaaacaaacaaaaacaaaaacaggaaccctgccggcaacagagtctaaggaaatttctgtgttgcctagcccctgcaatacagtaaaagggtaggcggagatgatgctgaacacatcacaatatctggaacacagcattataaatatagtttatgaaagaaatatagagacaaagaaatttgtctctaatgcttttaaatatttcacacaataaataagatcttaggtaactttcagccttaatatttttactaataaattagaaaagctagagggaacttcctcaacttggtaaagaacatgttcaaaaaaagctaacattacgcctagtggtaagaaacctgatcctttccactgagatcaggaagaaggcaaggatgttccctctcactacaccttttcaacattgttatggaagtactagctaaagcaatgagacttttaaaaaattctttaaaaatattagaaaaggtacctgacaaggcagtctttcaaaggtacaaaagtagatctttgagcctatttgacagaggaggaaagtgtgtatgtgcacatacacatatgtgtgtgtgtaagtgaatgatacacacacattatatatagtatattgtatgacaaaaagaatactgtggtttgtgaaaatggaatttgtttgtttttgccaaccaatcactctatgattttgatagaacactggtagaattctgaaagttgaaatacagcttcattaatgtgtattaggcattggcactgtgctggaaactagggacacacagatgcaaattatacacctcaattcagtaaatgtttattaattatctctgcactaggtactgggtctaccaagatgaattaaggccagatttctttctgcgaggtcctcataatccagtgagaaagactgataagcaaatgattataagattgtgataagtatatcgataaattgaaagtatgaccacaagaaaaatattgaacggtaaaattttaaaatttaagtgacaagaaacttggaggttacttaaaattacccaagaagatgtcatatccaggagaaaaaaacgtttgctctggaatgaaaaacatcttgggcagttacagttgagggatttggggttcttaagtgtgtatagaatggtcactttgggaaatacagaaagatttttttttaaaaaaactcatctgtaatctcaccacacagttccccgtaacattttgatatacccctttcttaatccaacggcatctctttttaaaaatggaaataatgtaaaaaaacagaggcctaaaagtccacaaaaaagtgacaggttgcatgttacatgtatgttagaagttattcagggaaaaaaagagagagagagacccatttgggccaggtgttttaaacttcaaaatacacacctgaatgcaatagcttttcccaattctcatttctttactattatttgcccttcacc

SEQ ID NO: 1253 - DNA, 1038 bp, Homo sapiens
aaggtagtggctttgatttataaactagcagtactcttaccagctagcaaagtaatgaagagtcctgtgattctgggatattttctatttgcatctaatacagaatacagaatgtgaatgtgcttagagaaggataagaagtgagacaatcagggtcttgtattagttacagggaaatactctagctccagttctttagaactatgccaagagctaccaagattgagtagaagagataaaaaacatctggaataaatggaaagattgtcacatctagtctctaacacataaccatgattctaaaaataatacatacaaaattcagtcattcaccttaatagaattatcttgtaggccacggataatttttcatcatcatactgtaaacaatagacacctttactcttttcagagtggcactgaatcctttgtaaggtgtgtcatccacactgccagttagattctatagtctctataacctggataatctttgggtataatgacctatgaaatgaattgggagggccatctgtgggtctgtttttaaacaggtgctgtcccaccctttttctgaaagtcccttccatagaggataagcgtgtaccattcgttcaatcagcttcttccaaagcattcattctgaggtcacttgctgccattctttacataccagctctgctgcacacagagacctggcatcgaaataactttttctgctatgtgatctaagccttgatctggtaagtggtaaagtcctgctgcaacatgggctttgggtaagagttaatacacccatactgatagtgacaaatttgtgaactaagatgttccaaatagccttagttggttgggcctttaatctgggacctattaatccactcagagttttaaaaaaattggtagaacagccgctgtcttaaattgatacattgcctccaggctaaattttagttatcctttgtcattccaaacatttctcaaatttgtctttcactatttgaggttgagaagaagtagttgcctctttcaactctacaa

SEQ ID NO: 1254 - DNA, 1070 bp, Homo sapiens
cggccgggggtctagggggccgctagtccgtgctcccgcctttgccgccgtggtgcagctcgggcggcgcccgggacggccgggggagcagcccgcgggctcctgcgtgcgccgtgatcccctcttgttccttctccctcctccaccttcacttttcccgacgcctggcttcgcgcccggcggctcctctcttcctttgtatctctcctcccggaggcgggggagggggcccattgtccccaaggggcgctgttcgagggcggggaggggaccggccgcgattcctcgcccgggccaggtccgcggggctagggcgtcgcccgtctggggcggcgccgcccagagccctcgccccaggtatggggacccaggcggctttgttcggagcccggcctcgggccagccaggcccagcccacacgcacatttctctctccctgcctcagtgcttcgggcgggcacagcttcgagggactccggtttggccacccccggctgcagcctttgggctggtgggttggttttgggggctgaattaaatcgagtgatcgatgaggaagctaattttaccaaaaggagcgtacggtctccctgttgctttacttccctttccgttctttattctcacttgttctttctccttcgttctctcctttcctttcctccttgcctttctttggcacaggaggctccagacaatgcccagtgtctggccaaggtacgggcggagggtaataggtcggagaatttgctcctggcgccggcgcggaagggtcgaggtgtggagggcagtgatttctcaggtgcggagggcagtgatttctcaggtgcggccgggagaactgggggcgtgggggcgctgtcccgagagccgcctggcctcagccactcccctttttattccacctgtgcctgttttccgtgccttttgttcgcgaggatctcgtgaaatcactgcagagaaaggggagaaataacttttgagtatgtgtgtgcccagctagggtgggagtgaaagccaatgggttaattgaaaggcaaaatgttttcttatttttcacgtctactcat

SEQ ID NO: 1255 - DNA, 1046 bp, Homo sapiens
acacttaccatattagttcgtttaatccttccagtcatttaagatacataaattgacatctctccattttactaatgatgaaacaaggcagagaagttaaatggcttgcccaaggtgacacagctaataaatggcagagtctatatttgaacacaggcagcctagatacagaatcagtgcccgtaatatttgtaccatattgcctgacatgctcacttgcattttgaaaagatcactttaactacaatgtgaaaaatagattagaggataattagaaagcacactgagagatcagtcaagaggctattgcagtattaaacaaatggtaattgtagcttggagtagaatgatggcaatagagatacagggtagtagatggctaattattacaaagtgagtgtatcctgtgtgaataaatgaaaaacgaatgaatgagctgagacacatgtataatatggcagtgtgctgtcttactgtacagtgtttataagcaacaactgctgaattatctgttggaataaaaacgaggtgaatgtaaacctatttagatttgtgttaccaccaactaaggtttttgtcttaaatagatggtagaaaaatgtgttaatctataaaatagtagcttgtatatgttcattctgcaaactttcgggtgcacttgatgctgtaaagctcttctatttctcattagacctttaaatactcttcagcacaaaaatgaattgtagtacaaagctattactgcttctcagaaaatgaagaatgctctaaagataaatataaatgaattaaaaggaagagattattcactctaaaattgaaaatcataaccttcctgaacagtaaaggcagataagcagaataaatacttgagtctaatttgaaaaatccatatttctatttcagatgtcctactataaccataccctgcattagtgcattttgtggttaaaacatttttattccagaaagctaaaagatgtaataagatacaataattgtttttaattctgccttttctgtttctttaacagtcctcttacttt

SEQ ID NO: 1256 - DNA, 1066 bp, Homo sapiens
ttatagacctccccccaggaatgcaattcttttccttcctagggtcttagtgttatattccttgctaggaaaagaatttagcgatatctctcctacttgcacattgatttataggttctctgcaagaagaaaaatatggctctattctgcccaaccccgcaggcagtcagaccttatggttgtcttcccttgttccctgaaaatcgctgttattctgttctttttcaaggtgcactgatttcatattgttcaaacacacgttttacaatcagtttgtacaatagtggtcctgaggtgacgtacatcctcagcttacgaagataacaggtttaagagattaaagtaagacaggcataagaaattataagagtattatttgggaactgataactgtccaggaaatcttcacaatttatgttcagagattgaagtaaagacaggcataagaaattatgagagtattattagggaagtgataaatgttcatgaaatcttcacaatttatgttcctctgccgcggcttcagctggtccctctgttaggggtccctgacttcccacaacaatccctttccccacaaagcatgcagttcttcattttatgattttactgaacctcagaacaatttagtgaagagaacaatttaacaaagagaaatgagtaaacctctagtggccacttgttccatccgcataccaacctaagtctgaataccttggacacatcaacaatgctgttgtctttttcttgccatagcgagtggaaagactctccaaaaattttaactttcacaaatgacttaatcttttgagaacccattcctctatctataaaaccaccaacttcatagggttgttgtgggtgaagattaaatgagaaatgcatggaaattttctctagacattgatgcattggagtgtgcttcccttcaagtgtcttcctactttcttgctgatgactctaggggtcctgtaagttgggtctcttagagtctcttaatttttttttttttaattttttttgagagggactctgtcgcccaggctggagtgcagtggcacaatct

SEQ ID NO: 1257 - DNA, 1031 bp, Homo sapiens
ggggagctagtagaagagcctgggtttttccttttatacctcattgcttctctgtacaaataccagaagctgttaaaaatatctgtggataaaattttagacttttgaaaatgcatttttatcttccttttccaggatcagttcgacagcttagacaagcatacacaatggggaattgacttcttggaaagatatgccaaatttgttaaagagaggatagaaattgaacagaactatgcgaaacaattgaggtaagttaatttttttttcagtttttagaatgaaattacatgtttaaacagttgaatattagaggaatgtgatagtccagaggttaaattctatgtttttcatcagaattagattgaattaggtaaccggtttgttttaatgattaattaagtcattggctagtacagtaccacaaggaatattgactagctggatcacaaatagctttcattccagaaagacacttaaaaatctgaaaactggggagcaaaatgccgggaaaaagaaatatctgcgtgttattctgtgttttatacttttattcctctctaactttttgctttagtcatcttttcaaagtattgaatatttcttcagagtttttttcttcagagtttgtaagacttggaaatagagtgtgtgctgagctgagtttctttctgtcagtattcagttacatattatgaatgaatgtgattttagaatatgttttggaagataaaagttttaaagagaaaattttagtcttaaaactaatggactttgttgacaagtagttgctggaacttattcagtaaaaatggtgcttgaagtctgaagactagacaccagtataaagttttagctgtagggtttaggataaaaaagtgtcctgaagtgacaaaaaatccaacctaaacaggcatacatgactacaaagtccaggcatattttgattcaggggtcaaataatcttcaggccccatttcttggctgtgctccctcttgttctttttattctcaggttccattcataccat

SEQ ID NO: 1258 - DNA, 1048 bp, Homo sapiens
agtctgtatgataactgtaggcatgcctataatcacttctaaaagctctgaacacttgtttgaaagactttgagaaatcatatttgggatttctattgcctgagttacaaggctagaactcattcccatgttgcttccctatggcagtttatttattacttatttttaatttaaaattgttttaaagagatgtggtcttgctctgttgcccaggctgatctcaaactcctgggctcaagcagtcctcccacttcagcctcccaaagttctgggattacaggcatgaaccactactcctctggcaatttagactacactaaatattatattgttacataaatcatgagaaattactatgtagtagtcacgtttttgtaatcatttgtatatcctatataatgagtctaccaggcccagttaaaatagtcatattttacactatatagtcatagtcatattttccacatgtagtcatagagatgcgaggtaagtgtaattctaaggaaaaaaaaaactcaggcaattagagctatgaaccctggagagaagcttaaatatgtgtcatcttattttttttttttttgaataagtttgtaggtagaattttataactgtaaaacttaaaactatttgcttattgtttctcacaaattatagatattcataagttatttacgtaagatagcataagttatttttgtagggatctagttttagaaggctgaaatcccctcccagatttattattagctataccactccagagaagaaagcagtgtgaaagagaaaatatgacaaaccaactaggggtttagaggacagagcagggaagaaagtggattacaacttggaggttgagaaatttttttcttttgattaccgtttggtatttactagatatttatctcaaaaattaacctatagagattttttttccacataagaattttctcaatatagaaaaattcaaaaagaagaaggtaagctttagtaagcctgcttatatgtttttacatggaattttcagtctattaagattacaaaataa

SEQ ID NO: 1259 - DNA, 1047 bp, Homo sapiens
aatgaaagaaggtgaagttctctacattatagaggaggacaaaggtgacggatggacaagagctcggagacagaacggtgaagaaggctacgttcccacgtcatacatagatgtaactctagagaaaaacagtaaaggtgcagtaacttatatctaaactaaccaggcacctttgtgccatgtgtgacataggaagagtaacataaaatgaaaacacattcaacaggttgaaaaaaataaggaaacttaaagggcatccaagattaattgttcactatgtgagctgagtgtaggcttgatcttgtgaatattaccacaagaaacattttgtggcactttactgtttgagtaacgttggtgtgaagcttaattgatgccttttgctttatgtcccgcttaagtctgtgtgaaggatttgtgtttttctgccttacaaatagaatttgatttattgggcaggaattcatggatagtaatgctctctgccccctttacttcagaaaacacagtgactttagtgaatttgaatagtgaaactgctctgaaatgctatggaaagccgactccccaaagagtggtttcttctagaagtttgaatttgtagctacagtttccaagaagaaaaatagtagttggataatttagtaaaataataacatcattttcattttcttacctattcttaactttggtttcctaaaggaagaaaatgagcaggtagcacataatctatttaagtagatttaaagagagtttcaaaataaatctcctggtctagctcttaggtgaataaaatagattttgtttgagacctcaaaatattttgaggttagctggtaattttcaataatttacaagcttccttccaaactaatctcatacttttgtatgtttcatcttgaaaatatcttttgggaaataccactttagtgattatttagcatttagcagttacacataggaaaatacacagttacatagaaaaatacacatttgaagatagaggaaaccttgaatggaggggaagtgttgacaaattttaatttt

SEQ ID NO: 1260 - DNA, 1139 bp, Homo sapiens
taacttcattagcatttccatacattgtttttaaaaatcataataccaacccttaagttcctagttcacagttattcccacaaaagaaaaagccaacaatagtgtaccatttttctatttattttattgctgtctaatcaataaagaatgcagagctgtcaaaaaatgtgtcttacattagctgtcccaacaggattgtcttccctcccagctctgttttaattggcttttagacccactatctgtcagatccttgccatctgtcagtgtctgcctgcgccacctccgtgcttgcttaacatcctgttgcatgtctagcgtgattgagctagatttttcaggcatgtctttagattcccttgttcttgtcaaagccttgttttgttttacatttgtagtgcaaatcactttgtcaaacatctccagcactaatgtttccatcttagtatttgtgcacactgctataacttccccactgcaaacattccagttttggcattacgaagaagtagctgtgaacctgaagtatttatgataagaaaaagaaaacatctctgctgtagcctacagcccagttgaaagaactctttgaaacgtgatacatcttcagcacctcagtctgggaagaatctagtcagcactgaaatcctggcataataaacacagaagatattcaccacctcaagacaaaggactattgtcaaaagtcagctgcttccattcaaatgctgccttaaacttgagtgcctaaatctgttgattgccaacactaccactacagtatcccacaaagggctttatgtgtcagctcagtgcgacctgctttaactctgcagcaccgctgcagctgccgatgtagcctcggtaggtggctattagagctctaccatatacagtggtgcatcttcaaatttatgcatcaaactaaagacatgtccaagtccattttaatttcctcagtggttttatgagaagttttatgggcctcccccaattgtctttttattttgggttatgacgatcatgtttgataattacaatgatagtctctttccacgtgatgcttttgtttgaacctgataaaatttagtgaaactttgtaatgatctatgtgcacttttacttgtaaaatggaattt

SEQ ID NO: 1261 - DNA, 1058 bp, Homo sapiens
acctcaggccacccgccttggcctcccaaagtgctgggattacaggcgtgagccaccatgcctagccaccacattttctttatccagtcaaccattaatgggcacctgggttgattctgtgtctttgctgttgtgaatagtgctgtgataaatacacgagtgcagatgtgtttttggtagaatgatttcttttcctttgggtatatacccagtaatgcaattgctgggtcaaatggtgtaattttagttttttgtttttttttttttttacttttcagtagccattctgactggtgtgagctgatattgtggttttgatttgcatctctctgatgactaatgatataattttttcatgtttgttggctgctagtatgtcttctgagaagtgtctgttcttgtccgttgcccactttttaatgtagttattttcttgctgatttaagttccttatagattctggatattagtccttggtcagatgtgtagtgtgcaaatatttgctcccattctgtagattgtccgtttaatctgttgatagtttcttttgctatgcagaaactctttggtttagttgggtcttagttgtcaacttttgttcttgttgcatttgctttagaggacttagtcataaattctttgcttaggccaatatctagaagagtattttctaggttttcttctaggctttttatagtttgaggtctttcagttaagtctttagttcatcttaatttttgtatattgtgataagtaggggtccagcttcattcttctgcatatggttagttttcccagcaccatttattgaatagggtatcctttccctattatttattttgttgactttgttgaagataagttgtaggtgtgcagcagctttatttcaggggtccctactctgttccattggtctattgtgtctatttttgtaccagtaccatgctggtttggttactgtagccttgtagtatagtttgaagtcaggtaatgtgataccttccactttattctttttgcttaggattgccttagctattccaactcttttttcgttc

SEQ ID NO: 1262 - DNA, 1050 bp, Homo sapiens
cgtctcgcagcccgaggggaggccgctcggcctcggccgctcacaggcgcgacgtaaaggcccggcgtcaccggcccggcttaacggtgcaacggctggcctgggcctgcaactctggggtcccggccgggctggagcggccgccggagagacctggtaggcggggcgcttggggcaggaagggagccggggagggaaaagcgcgactgtgattcgtacggctgggcccggaccgtgaaggggaccgggttgcggctgccctcacaccgaccaggtgggaccgtcggactgcggccgcccttggctcaactgggtcgccgaccttgttgaggggcgaccactgcggggagaccgagagcctgcggctggcgtttgaggcggatggcagtgccctgagcgcggcggctgggtctcggtgacactgacgacgggaggcgcggtcggaagagcgcggggccgtcgcctctggcttaacatagcagatgcgctgagactccaacaggtggctccgtggcgcaatggatagcgcattggacttctagaggctgaaggcattcaaaggttccgggttcgagtcccggcggagtcgtaacgcttttttccctcccccctacaatttattttctgcctccatcatgtctcttattttttttttttgctaaacggtttaacttctctctcattccctgctctcgcagttcactgcattcggttcttgcggtcctttcttaagcggctcgcagggtcccgagcccctcagctccccgggcctcggtggcccagggcccagctcagccgactgggcagtcgatgtaggtcctgagaagagcggcggcggcggcggcggcggcggcgaaggaaaagcgacactgaagcgaaggctcgcggtttcggcctaaaggaaagtgcaggggaggcccgggtctcgggtgacacccccacgccttgagcgggactgtggttgcgagggagggacgagaaaacacgcctacgccctgcgtgcgctgtgctgactacctctccagcatggaggcttccagatgagcagac

SEQ ID NO: 1263 - DNA, 2078 bp, Homo sapiens
tacacagtattttgttggaggagattgcagattctgagcagataatcatgaagtttaaattgttgaggtgaaatgattgaactattttgaaaccattaaaaatggtattgagtgtatttttgtagatattgtacttccagaagcttacaaatatcttttagtcaccacctttggtatcacagtttgaagattagaagattctaactttatatttgagtgggcttttgaatatctttggtaacagaactgattaattttaatatctggtgcttaattaaggaaactgtggctacttggccttcttttgtctatgttgttaatagtaggttggttttagaatatatattcccttagaattggataggtaatagagctagtaaaatcactttaaaagttacagtgtaacattattccaaacattgggagaatgagtaattaaatgttctgggttacttttaatttttgttaatgtaatttttttcactcagttaaatctcatatatatgtgtgtgtgtttctgaccttttattgtggaaaatttcacacatataaaaaataaatagaataatacaaggattgcccaatgcactttacccaaggagtaccaacaacattctatattcttgtttcatctatttcaacctgcctgtcaccccttatttttataggttttttaggtaaaatttatatacattgaaatgtacaaatattagttgtacattttttaaacaaatggatacactatgtaacacatccctatgacaaattagaacatttctatcccaccagaaagttcctttgtattcattcctgatcagcttgtattcactcctgattccagcactgctaagctaactttttcaccttagtttgcctaatcttaccttttattttattatttatggggaaaagaagaatctttttactcatggataaagagggctatttaaaggaagtgtctatttcagaatgttatattactgtactgggagctataagatgtgtgtgtgtgtgtgtgtgtgtgtgtgtattacaaaaatatatgacttgttttctcagggagcttaccttcttgttagggaaaagaaacttaaacactgatagcagaatgaaatgtacagatagacatgtcttagaagttttgagaaagacaagattaatgtgtttgggaagggttggggaaggcttcatgaaggatgtgtgttaagcctagaaagggggtaggagtggataactggaataaagtgactgttacagcatcctttatcagatttttgttgcatttatgttagaaagaaactttgtggtgccctttcaatccatcttccactgccaccagagctctttttaagaagctcagatatgatcataatattccttcattaaaatcattaatctactctaaaatacaaactttctgtattcatggtgtggtccttccctacttttcccactcatccaaccataagtgctgggattacaggcatgagccaacttgcccagctgatacttctttttcttcaagactcagtcaacactttgtcttaggtgttttctgtctttttctgatttccaaactgatgtaagtgtcctctgcttttatgatactgtaggccaggggtccccaacccccgggctgtggactggtacaggttggtggcctgttaggacccagctgcacagcctgtgcaagcgagcattaccacttgagctccgcctcctgtcagatcagcaggggcattagattctcataggagcgtgaacctgttgtaaactgcacatgtgagggatctaggttgcacacttcttatgagaatctaatgcctgatgatgtgaggcaaaacagtttcatcctgaaaccatcccccaactcaaccccaatttgtggaaaaatcgtgttccgcaaaactggtccctggtgccaaaaaggttggagactactgctctaggtatcccctactctagcacttaccattctgtattgtactagtttgttttcttggcttttgcctacatcagatcctgagtttcttgagggcatgaactgagtcatctttaattccctagttcggctctgt

SEQ ID NO: 1264 - DNA, 1034 bp, Homo sapiens
tgtacatgaccttcataactatacttttaaagaaatacgtaaatattcctctgtgtgacaatatcttagtttattttcctgttagctattgaggatctagactgtctctggaatttttatggattatactggtgtatttttgcaagtgaacattttcatctctgctgaataacttccttggaataaattgccagaagtaggattaatgaatggaggcttatgaatttccttagtgtttgtggaaactgtgggcattcttaaactacacaggttgatgtattacttttcatgagttgtgccaatttgcagtactatgaatgaatgctgacttaattacctactcatcattaggggatatttaaatttttttctactttacggatgcaaaatagtcttgaaagattattttaatttgcacgtattttataatttgcaaaaatgaacatttttttgtgcagctacttgatctttattatggaggtagtttggcatagtgttaaagaatagtctttagagtcagatgtaggttcaatttttcctttggccgtttgtcagatctgtgaccttggtcaatttacttaacctctttgaacctcagtagaacagggatagtagtatttactcactcactcagcagttaagtgaggattaatggagaaaacgttttaacccagtgctcagtaaataaaaggtagctctcatttctatgcttgctaaaagaaaactaaaaggacaacaaaacatacctttgttagcttcttaaaaactcccgagccttcctaatttcctcagatacacccatgaaaatctcccaaaggaagcctttttcaattgatagaatcatttactttcagagttggaaagtatcttaagttagttttatgtgacatggttttaggtttctgtattttttcagttgctgcttcctgaatatgacagtctttatttctccaccttttaaagaggcattgctaaatggaattcggcattcaaagtgtcttctcactggcacactagcagagaactgtgaccta

SEQ ID NO: 1265 - DNA, 1065 bp, Homo sapiens
tacctcggcctcccaaagtgctgggattacaggtgagagctaccgcgcccagcctgaatttttttttttttttttttttttaaacctgggtgcaggtctttatacttatttttggttgggcacattacttcttccctctgaaactttttgatctgcacaattaattactattccttctgtatgttttcctaacaaacttaaaaaactgattggacaggactgagtatagaacagtatgtttacaccactataatctttctattaattgacaccctttggttattgtattggctctcatttttaacttaccagcatcttttcacacatttccttctggtagtagacctggcattctgacagtatccataacctgatgcatactgggccagagtcctcttttgggatgtttctgctggagctggtgtggggaagggtctttctttcctgtcacagaggtgtgaaggtagaccctagaactgtattagccttggtctcttacatggaaagggcagaaaccctgattttgtttatcatcaaatgctttgtagcatagtgaacaaaatttacaaaaatttcgtggtccctttcaaagaaaagaatgaccttagtctgacatagttttttggtgaattcatattttctcctaaaagttaccacttccttctaagtacccatgccatactgcccatttagataagtaagttgtaacttttttcctaggatcaacatcacactcatccatgacctgatgaatatcaccttctaatctgtttcaatgtaatatgaacttgaattatgaaggagaaagataggatcttcctacattttctttggaattttatctgctaaattaagtaaaattttacgggaaatggtatttcactatgttgaccaggctagtctcgaatttctggtctccaagcgatcgcctgccttgttctcccaaaagtatcaggattacaggcatgagccactgtgctcgaccctattagttcttttggaaagatttttatgtaactgttgtttaaaatggcatttatattatttctacataaaattaggcat

SEQ ID NO: 1266 - DNA, 1049 bp, Homo sapiens
aaaacaaagaacccaaagatcatgccaccaagtcaaagtcgagtgcttgctatgtaccagatgctgggttttcagatgttaagctaaaaagtaaattagacaagagttttgctgttaagaaactcatagactattgaaagagagaatgttgtatcttgacattttatatgaaatttctagttcaaaaaaaaccaacaaacattccctgataatattttatttaaaatatggtttgttgttgctttttgagacagactcactctgtggcctgggctggagtacatggtgccatcatggctcactgcagccttgacttcctgggctcaattgatcctcccacctcagcctcctgagtagctgggactataggtgtgcaccaccatgcctggctaatttttaatttttttgtagagatagggtcccaaagtgttaggacgatataggcgtgaaccaccatgcctggactaaaatatagttctttatttacctgtgaatacagttatgttgcatcaggaaattagatttaagatattttcaactgtaggactcgtgactttttaccccatcaacagtgcccaagatatattgtttagtaaagaggtggggtggaggaagcaagcatgggacagaataaatgaggtgatcccatttcttaagtatcatataatttctaatttaactgttactggttgaatacatttctgtatgtattttatgactggttcaagaaaatatctattctctcttcccccactggaggaaacaggaatgtgagaggaaataacaacatttatccagtacgttctgttgagcgctatatgtcaataggctaggctttgagataccaaattaaataaacgttatttttaactccagtcttgtggcactattactacaaatgcatagaaaatttgtacaactgagtatgagtagacctgtggtagtaacacagtttaattcttctggttgttacctgggagggtttcatactggagcttgaccttaagaaatatatagtgttttgctaaggggtaaaaggcattccaggt

SEQ ID NO: 1267 - DNA, 1038 bp, Homo sapiens
gtcattatgaaccttttgatttaattatttgtgcttcagtttattacagctcttgtccttatttttgctcaattgtcccatcttggaccaatgggagcctctttaagctggctccttagtgcttttgacatggctttagtgatctttgatagcttccttgctgtctgtagtaatatgttccaggctcctcttagacatttcctgacccagatctagaatcagctttttttcctaagaagaggttgcttccttttattgggaaatggtatttcaagatcacaattggaatttagggatgctcattgctactaggttggcagttgtttctaggcttttcttatggacagagccacgatatgcatactgacacttccaatccacatacaagatttcaagattttttaaattatcatcttctatttacatctgtatctccttgtatcccaaactgataatcctgattctcaaagacacagttgatggtcaaattagagtatcacggaaatattcagttgcgttatcccactttacacactcagtgttctccaaataataatacaaatatctctactattaatatgattactgaaaatagttaaatttttttcacataggctctttccattcttccttattttttggttgtactgtatctgtgttgtcagagcatattgatataggcatgcctcattttattgcactttacttttttgtgctttggcggtaatgtgttttttacaaattgaaagtttgtggcaaccctgcattgagcaagtctattgaagccattttaccaacagcatgtgctcacttcatgtctctgtatcatattatggtaattctcgtgatatttcaaactttttcatttatcatatctgttatgatgatctgtgattggacatctttgttgttactattgtaattgttttggggtgccatgaaattcaaaagctaggtttcttgtgccagttagccaagttgtgaatgcaaaggaaaagttcttgaaggaaaactgctccttcagtaaacacaagaatg

SEQ ID NO: 1268 - DNA, 1049 bp, Homo sapiens
cagatagaatctactcttggtgaagatgatgtgaacattgttaaatgacaacaaaggatttacaatattacataaacttggttgatgtgacaagatttgagaggattgattgactccaagtttgaaagttctattgtgtaaaatgccatcaaacagcatagtatggcacagagaactctttttgtgaaaggaagagttaatcactatggcaaacttcagtgctgtcttattttaatacattgccacagccaccccagccttcagcaaccactgccctgtttgttcagcagccattaacatggaggcaagaccctcaaccagcaaaaggatgaacattttttagcaataaagtattttaaaaaccaaggtatgtccattgattttttttttagacgtaatgtcattggatacttgagagactacacagtatagtgtaaacataacttctatgtgcactgggaaaccaaaatgttcacgtgacccactttattgcctgttagctttattgctgtggtctggaactgaatgtgaagtgtctttgagggtacactgctatgtattctttcccttttaactctcatttattcctagttctgcaagtaaatccatattgagtgctcactacctctttttaggtcactggctttatagtcattcttcttgtccagagcttgttctgtagtaaattcctcaggaagagctcatggaacaataatctctgaattgtttcatgttgcaaacagtttgtctgtgacctttgtacttgaaaatttgtctggatgtaaaatcctaggttcacattttctcttcttgaatatcttaaatatgttactctattgttttctgacactgagggttgttaacaaagtctgtggctaatctcttttgcttttcccttttaaatgacttggtcttttgtgtatccaaaggatttttttttcacattaaaaaaaaattctaggctgggcgcagtggctcatacctataatcccagcactttgggaggctgaggtgggcagatcacttgaggtcaggagtttgagaccagc

SEQ ID NO: 1269 - DNA, 1034 bp, Homo sapiens
ttatatcaggacaacagatgtaaacaaggaccattctgggcaaacttaattcagatggccactccattccaggaagataagtgctgaattttaaagacgagtagtaatcaaataagttgattgatgaagagtcctttaaagcaaaagagatagtatatgagcaaatagtggggtgagagagagcgcagtattaggttgaagcatgtgcagttgccattttataagtgagaaatggtcaaataattcagtttcacatagtttaacctgatagatgaaggtaacttgagcacagagtgtgcctcgtggcaggagatgaacctgaaaagaaggcaggagccagatcatgaagttctttgagtaccattttatggaatttggattttattctgaaagtcattatgtacatatttatttttaaattttaatgataaggtatttatctaatttttgaataggcagtacattcgcatggtctgaaattttaaaaaaatgttggtgtaagtgggaatagtttgtagttttctttgtggaatttgattttggtgtcaatggttttttttgtttttttttgtttgtttgtttgtttgtttttggagacagagccttgctctgtttcccaggctggagtgcagtggcacaatctcagctcaccgcaacttccgcctcccaggttcaagtgattctcatgcctcagcctcccaagttagctgggactacaggcatgcaccaccacgcccagctaatttttgtatttttaatagagacagggtttcaccatgttggccaggctgttcttgaactcctggcctcaagtgatccgcccgcctctgccttccaaagcactgggatccacccgtctggccttccaaagtgctcggccttccaaagtgcaggtgtgagcccgcccaagtttgggtgtcagtgttttacttgcagcaaaaataatgtggaagcttcttttacctgtgtcctaaaacagttaaagcattggaattatctgttcactgggggttttgttagaactccccggtaaa

SEQ ID NO: 1270 - DNA, 1043 bp, Homo sapiens
aatactgccatcttgctgtgaaatgtgcacaccgattttatttccaacactgtatttttgtgctcgttgttccttgtgcttcactccctcccctctgctacccactttaaataatcacatggcttttttttatttatgtctaagcttaaatgtcaagagacttttcagaccatcctgtgtgaactgttcttttttttcccctcatgaccctgtctagtctgtctgtaataatttatttattggtttattttttgtctatgtttctcccgctagaatgtgagctgcataagtgaaagaaccttgtctgtctttgaattttatgaggaagagagagtgaattgacagactgtatattggaaatgttaaatggtaaatctaggaatccaaaagtttcctctatttaatatcaggcaaaattctgttcaggattttttttttttaaatatggtgttaatcaggaagtggctaatacaaaactcagtaaacccttgaccttttttcagctgtctctctgacctcgtcctctgtgatggtaccttcctcacagctccagccaggttggccattttgttcttcctcaagcacgttgcaggtgttcaccttggtattttgcagttgctatttcttctgcttgcagttttcttcacccagataattgtgtggttccagaactcacttccttattcagtttttagataacattgttttctcaaaaacatgtttgaatatgaggagcagtgtaagtatgcaagtctgtgttttgtaaattcagtttttatcttgatagctgtttatgttgacttagatgaaacatggttctttaattttatgatatgtttgttatagctatcttaaaagggcttcttttttttaatgcagaaagaggggaaaaaggagcgagctgtggtggacaaggtgtttttctcaaggctcatacagattctgaaaatcatggtccctagaacattttgtaaagaggtaagtcttatgaaattataatcttaagtatattgggccgttctttaataaaatacctgaggctg

SEQ ID NO: 1271 - DNA, 1097 bp, Homo sapiens
ttaaggctaaaatgactcagttcaggaggagaatcctcacctcatcttcttccataggcttaggtgtggagaggagatagaaggaagtttttttaaaaagtaattagaggtatagaattgtaggcttcttatactcttgagtctctgtcattgtgtcaaggaaaccatgaaacgcgtgacaaatgtgtcatatcttatgggaagttaattttacttgaagtggttgaggtaggtggtaccttgtttttatgaaaaacgcaggtccatttcaaaatagaaatataaaacataaattgtttaggggaaaaaagagactttaaagaaatatttcaaccttgccttctagacttctctataaatatttttctctgccataagaggtactttgctgggaaagcttacatcattcctgtgtaatagaaagactataaatgttagggtcagataggagttatgatttcagctccctgacctgctggctctgcaacctttacaaatttacttaactacactgaacttctcttcatctataaaataccttttttttctagtcgtgatccctgtggcccttgtggacccatgcacatctgctcaggaaacgtggaattgttgtgaggatatgatggggttccagggtttcctcctgggagctggcactttgaagccggtgggacttagcctgcttttctgtctttaaaaggctgtatgtcaagtcatcactatccatctttttctagctgttgctttttcatctctttcttgtttgggcctgtactttaacttgaagtctgcaatgttggtcccagccctgcctttctgtacatcacagcaacttctttctctaatttcgaatttctgagaattcgtgcagtatgtcttttgcagccaggatacctatgccataggttgcagtccagcatatgattcagtcaggagtgtattcctgtgctccgatcagctgagctaggaacagaatctcaggtatagactgtggcttgagatgcaccagataagctcttagtcacaaaatgtccatttaaatacaaacattcagccatcatatactgtatttcaattattttccaagcataggtaac

SEQ ID NO: 1272 - DNA, 1066 bp, Homo sapiens
aagggatagatatgaagggggctattgcccagctactttagctggaatggccaagatctttcttgaggaggtgacatttagtcagaaatccacatgaaagtgaaggagtcacaaaatatagataccttagaagaatgtattcctggcagtgagaagagcaagaggaaatccttaagaaggtacatgtttgagaaaccgttatttctggagcttggtgaggaggagcaaagtagaagcatatgaccttaaaaatagagctcagtgccagatcatgcaggaccttgaataatctggtagatggacagtttgagaacactacaactccagaataaaaaagcagttttagacttgtagttttaagacaatgcgtgctcatgttaaagctaaaactgaggctgtgtggcactgatttacattagcactcagttcagattgggtgtaatacaattcttagataaagcacagaccatgtgtctccactgaaagcaaagcattcagtgccaatccggacagctagtgtttcactcaaactagttaatctctgttctttttgctttcgttgttgtcctcttttgggatatgtgtatccaaaagcatggtgactacaatagcattgtgctattgcatgcaagagaaacagcattgttaaaattgtttatgtaatttccatgctgtttgcataaaaatggtttcatgaagtgtttgtttggcacccgctctgtgaagagcattgtcctcggtggtgtgatgtacaatataaacagaatataaacagaaatcacgggcactcagtaaatatttgttgaataaatgaactatacagtttgttttatccttatagtagattcagttttttatacagagaaaaagatggttttttgtttttgttttctgccaggtggaacacctacataatttcattttgtttcggttttcaatgggcttcattgatagtattattgccaaatgtaagtatattttgaaagagatgagatttgtggaaaaggtgaaatactgttactgttttaaatcttacctgtttggtttcagaccttgccactgttgt

SEQ ID NO: 1273 - DNA, 1034 bp, Homo sapiens
ttataattagccaggagctattaatatttgagtctaaggaaatgttgattaagtatatgttaatttgatttaattacttcacagactgatttttttttttttttcaggttcgatctggggctaatgttctaatttgtggtccaaatggctgcggaaagagttcacttttccgtgttcttggtgaagtaagtacaagttggcctcaaaattttgcagtcttattttgccatactgtctaccactttgtaaattttacaattgttcttctcccttctctctctttaatagttatggcctctttttggaggacgtctaactaaacctgaaagaggaaaattattttatgttcctcaggtaagacctagcttgagttatctttgatctaaagatctttttgtttatttattttttcatgttgcttctaattgacttttgctctactactgtcagagaccttacatgacccttggaacacttcgagatcaagtgatatatccagatggacgagaagatcagaaaaggaagggaatttctgacctagtaagggaatgtttatatcctagatccactgaaaatactccagattatttattttaatcaattaagtattttaaatgccaggtagtttatcttaagctgtaaagccttccaaagctgtaaattgtgattttctaagctgaggtaagatgttaatcccttggcttaaaaagagtttaatcttaacctttacaccattgtttgttttctcattgccatcatccttttactgtgtacaatagtgttattctctttaagctactagacatattttgtcaagtttggtgtagatactaggagctgaaaggttcagggctaccttgtgccacattcttttctgaaatgtatcttttaagtggtacagacaatagaattatagtgattccagtttaaaaaataaaccactattaagaatgttggcttatattaagtttaatttcatctttaatcattttgctgaaaggtactgaaggaatacttagacaatgtccagttgg

SEQ ID NO: 1274 - DNA, 1052 bp, Homo sapiens
ccttcaccagatatatactgagccccccggcaacttgatcttggagtcccagcctccagaactgtgagaaataaattcctattgtttataaattacccagtctcagatattttgttattgtagcataaatggactaaaacaaggaaaaaaagaaacaggaaaaaaaaaacttcaagaaacttagctacttaattattttcagaaagtataatggttttatatatacagttgattcttgaacaacatgggttttttaactgcatgcatccacttacacatgtggattttcttctgcctctgccactcttgagacagcaagaccaactccccttcttccaccttcccaacctactcaatgtgaagatgatgaagatgaagacctttgtcatgatccacatccacttaataaatggtaaatatattttctcttccttataattttcttaaggacattttctgttatttagctttctttattataagaatatagtatataatgtacatcgcatacagaatatatattaattgactacattgttggtaagaacttcaggtcaacactaggctattagtagttaaggttttggggagtccaaagtgatgcatggattttcaactgcacagggggttcacactccaaatccccatgttgttcatggatcaattgtacatatgatttatttccctctgacatcgtgttctctggaacatattcttaatgaaagttttgaaatacagtaggcagtacagggtagaagttaagaaaacagccttgagtttgtctgctgtggaccttaggtagattatttacatgatctttgtaagcttcagctgtttcatttgtaaaataaggttgtgtgggatttaaatgataatatgttattatttctaaatatatcttcccaaggtgaaattaaacttgctttaaaaaaaactgtgagctaactacacgtattttcttcatattttatccagtctgtagtattctgttatagcaacagaaagatgaagtttactgccgggagcagtggctcatgcctgtaatccccaaa

SEQ ID NO: 1275 - DNA, 1028 bp, Homo sapiens
ctttaacttgaactctgttatgtactcttggaggagtaagggctgaagaaataggaaatagagaataaaaatataaaggataccctttttcaaagttcagtattttagtcgacagggaggaaccatagagaaatcttttctatagccatgagcaattccttgttaaaccttaagtaatatcatttatctttgaaagggagtgtaacaggccaggcgcggtagctcacgcctgtaattccagcactttgggaggccaaggccagtgggtcatctgaggtcaagagttcgagaccaacctgaccaacatgttgaaaccctgcctctactaaaaatacaaaaattagccgggtatggtggtgggcacctgtaatcccagctactcaggaggctgagacacgagaatagcttgaacctgggaggcagaggttgcagtgaaccgagatcgtgccattgcactccagcctgggcaacagagtgagattctgtgtcaagaaagggagtgtaacttaattatatgaacatagggcttcttcacctttcctagcttggtcttcttttcctcccatttggttcaatttaaaaagcagtaccatgaatattagaggatttatagaaattgggttgacttttatgcagctggcttcctgtagacttttacactcacgataatggttctttaacttgatgctcagaaaagaaaaagaggtggaacattttcttcatattatcctcctaagtctttttccctatatgtctcttcacatacaattaaaacaacaaaaagcaaaaactataactgcagttagctgagagctttatatacattcttttagatgcttaacaatttttacatgatggaaaagtcgaaaatgagtagttgacattctttttctttattttatttaatttatttttttttgagacagaatcttgctctgttgccaggctggagttcagtggtgcgatctcggctcactgcagcctccgcctcccaggttcaagggattctcctgtctcagccttccgag

SEQ ID NO: 1276 - DNA, 1039 bp, Homo sapiens
aggtaatgggggaattaacctgttgacagagctcagagaagacagctgaagaaccatggatgtgaacttgggagtagaggggtatggaagggagttagggaataggatgtgcacaggccttgtggaagaagggaacatggcatctttaaggaagagaaagaaggccatgttagctggaatgcagtaagtgagggcaggtgccaactgaggctggagaagatggagtcctcgtaagagcattgagaaacaaatgaaggttttaagatgagggtgggtaaggaagtgacatgatcagagatggcttttagaaaagattctcctggagccctccaatttgttcttcactctaaggagaccagtttggagacagtccagaaatgtgatgatagtagcttgagaagaaaatgcatctttttgatagttatttaagaagtataatccattggacttggtggtagattgaatatggtggcagagttggaaggtgcagaaagcaggttatcaagggtgactcctgggtttctggctgtcagatctgaatgtatggtgcaataggttgactatggtttgtccccatcaaaactcatgttgaaatttgattcgcaatgtattgatgttgggaggtggggcctagtgagaggtgttagaatcctgggggcagatccctcatgagtggcttggtgccattcttatagtagtgagttctcattctggcaagagtggattagttcctttgagagtgggttattataaagctgggacgccacccaggttttgtctctttacacatacctgcttccctctttgaccttctccactatgttatgacttagtacaaaagtttttgctagaagccagggccatgcccttgaacttctcaacttgcagaattgtgagctaaataaacctatttttcctttataaattatacagtcccagatgggcgtggtggctcacacctgtaatcccagcactttggaaggccaaggtgggtggatcactagaggccaggagttcgagaccagcccgaccaacatag

SEQ ID NO: 1277 - DNA, 1039 bp, Homo sapiens; identical to SEQ ID NO: 1276

SEQ ID NO: 1278 - DNA, 1033 bp, Homo sapiens
aattttaaaaattactaaaattacaagacatatttcttaaaataaaaaaattactctaggtttattatgagacaacaatttatagctgtcatttatcttaacaggttgaagaaatatggagatcaacacaaaactgctcatcagtgttacctgtatcagctttttcacctttcagcttcttttctactttgtaagttactggttttcagcaaaagtttctccaggtttcaatagtctcagcttcaaaaagaagattgaatggaactcaaggtaaagcatatgaaaatgtaattgatgacaagaaactagtttatgagataaaattatttaaaatatttcaaaaaagtatttcatttaggatctaatgtaaggccaaatttttatttgatcttagaaataaaaggaaaaacaagtagatgatctcatgcaaaaaaaagtttaagaattcatatattgaaagatgttaggagaaatttacttaagtttctgaggaagtgtgtgaagatgaagtagactccagctgactgtggatgaatactagtactttcgtgttcttctttgaaatatttataacaaacatattctttggaaacaaagatggaagaaaaaattagttgtacttttgagtagcttataccatacagcattggccaacttagccagacctggggcagttagactctacacatcagggaacaaagtgtacagtcagtgcatatgaatcttttaatgaactttgcattataatttagagccctccagcatttattattttgttatataattttaaagtaaaaatttctttttagttttttttttttaaacagaaaagtaaatggagaaagaattagacatctattgatatagaaatctgctggagttttattttttatttttattttatttgtttatttatttttttgagacagagtcccgttctgtcgcccaggctggagtgcagtggtgaaatcttggctcgctgcaacctctgcctcccaggttccagtgattctcctgcctcagcttcctgagt

SEQ ID NO: 1279 - DNA, 1061 bp, Homo sapiens
caataatattttttgtttattttaactctggaaacaagttattcatttatgctttcaacaaatattatattacatatgattaggttggtacaaaagtaattgcagtttttgtgattaaaaataatggcaaaaatcacagttacttttgcaccaacctacatgccaggccttgtgctagattctgagggtttaaagatgctcacaacctggcccttgtcttagaggagccacaggagtgtggatgagacaggcatataggagcagagattttatggtaaagtagataatcagactaactgagggatgaacaaagtgctgtgggctcagagtggacagtgatgagttggcaggagaaagagttcaatacatttgaaaaacagtgcaactttcttcttatgtaataccttactcacttttctttcttacagatttgtccattataattttgtattggaaagtgattggtgacaaattttttataatgcatcattgtgcgtccctgtatgcatactaccttgtactggtgagttccaggattttctgtagcctaactagcagacaagattgggaatagtgatgtaaaggtgaacataaatctaaacatacaattcttagtttttaaagaccatctccagatgcattcagggattgcttttgtggtatgctatcttctgtattaactaaaataatacctttatgtgtgtctgtgttggtgttggtgtgtctgtttgtattcatagattttgagacagacaaatgaccctaattctttgaatttccatttaaaaccttcaggattgttgtagctatagatatttgtctgtatttctagatgcatttatgatttaacagcaaagagtatgagccagcgaaaatatttcttttctgtttaattccatgtgcaattacatatacataattacatttaagtaggttggagcagtggagaaatcttgctcagactttttcagaattccaagaccaaggttaatagaggattcttccaacagatctcaggcagtaaagcatattaaattatatatctaaaatttctacatata

SEQ ID NO: 1280 - DNA, 1081 bp, Homo sapiens
ttaaggtattataggttatataatgtcttgattgctatttttgtatctttctactatatttactgacgttttgaaattctctggcaaagtaatttagagcttaatgaatcctcttctgtctatatagagaggtacaaatcctacagccttttttcctgatactcatctttcacccctggagcaggatactaattatcaaataaacctgacaagctgatctcttattctaagagaaatgaacacatttatgctttaatcctcaatttttaaggacaaactaccatcctttgtacaccctttctgactacattgatagccttcactttttgtgtatgtgttccttgtgaatcacttctttctccaattaaaccatgcctttagataatgagttagaatatatttggaaaacatttaaacttgaaaatcattcaatatgcatcaatttccaagcccaccatattattattatttattttcttttttttttgagatggagtcttgctctgtcaccaggctggagtgcagtggtgtgatcctggctgggcagaagggataatggggaattactgtttaatggtacagagtttccatttgggaatatggaaagttctggagatggatggtggtgatggttgtataacaaaatgaatgtacttaatgccactgaattgtacacttaaaagttgtcaaaagggtaaattttatgtcatatatattttgccataataaaaatgttaaagcaagcttatgagataactgaaacaaagttaggaaggagaactaataacatattggacaatgttattacatttttagaaaggcttcatcctaactataaactgaaacaaatgggtggaacttaatagtgataaatgttaagttttgcatttaggttcaacgatgcataaggataaagaatgacctggaggtggtagatgattgcatctcagttatgccaatttatcacatctgctaaaacagaaagctttttcaaatttagattctattagaggaggcctggtatccaattcacacgtagtttgcccagtcagaccacatccaagaccatcatcatctgaag

SEQ ID NO: 1281 - DNA, 1081 bp, Homo sapiens; identical to SEQ ID NO: 1280

SEQ ID NO: 1282 - DNA, 1081 bp, Homo sapiens; identical to SEQ ID NO: 1280

SEQ ID NO: 1283 - DNA, 1081 bp, Homo sapiens; identical to SEQ ID NO: 1280

SEQ ID NO: 1284 - DNA, 1016 bp, Homo sapiens
tttcttgaataggagagaaaaggataaagtaacaaggaattatgcataacctgaatcttatctaatggccacctatgctgatggacgtatgtgtcacatgtgatgctatctgtcattggattaaatgggcccagagtcattgatatattgacgggtacaggatcagaaaatatagactcaagattactgaagcatagttctgcaccccagtgtgactcacagaggttttttttttttttttaagatttttttatttttctttttttcctactggcaggatcaaccaggtattacagagattttgagctaaggagggtgggggataggggataacaataggatagaatgagtggtttcaattagggatgtaagatttaaatataagatactatttaaaaattaaagtgtcatccagggatcaatcagtaatactgtagtaatttaaggaatggaaagatcattgtgttaatttctgttaatttttcttctgaatatagatgttggtaaaaaaaaaattgagtttgtagaaatactgggcttagtaagtataatgttttctaggtctgattctccagagataactactgatagtacttgatgtatattcttgcagtttatataagttttacataaatgttcatatgtatatttatgcctttttgaattttctaagagagcttttgagatagatgggatttaaacccagccttcaaaaatatgcatatttaggttggaaaaaaaagtagggaaggctttctaggtcagaaaacattttgaggaaagtcactgaggagatgtcagatcttcatgggtgatactgaggacttggggtgtcagggtatgggatttgtgtagacatgggtgatggttgtacatatggatgagtaagatagggccagctgataggtggagtgaaaattcagactcaccagccctgcatttttgcttttcacggaatggttgtaggatctttggccagaaaataacttgatacaattggcatgttagaaaaataa

SEQ ID NO: 1285 - DNA, 1016 bp, Homo sapiens; identical to SEQ ID NO: 1284

SEQ ID NO: 1286 - DNA, 1016 bp, Homo sapiens; identical to SEQ ID NO: 1284

SEQ ID NO: 1287 - DNA, 1016 bp, Homo sapiens; identical to SEQ ID NO: 1284

SEQ ID NO: 1288 - DNA, 1050 bp, Homo sapiens
tcctctgataccaaaaaaaatcacggcagctatgatttgcagttcacaataatggatcatccactgatgcaacttaagtgtgttgtaattgtgagcagtaacagtctatcattgacattgcccgttggattaactgttttgatttgtattgacatagtgttagtttaacctaccacactgtgaatactgtgactgtattttctgagagttcagataatgaaaatgagaacagttatgatatcaacaccagagtgtcccagacatcactgagaaggaaagttattattgtatatggaaatctatgttattttatatatattagtatataatgatatgttatagacagagggaaagacacataaaatttaattagggagataaaacagaacatattgcacaataggcaggaaagaatttgggattgggcattgttacagtttgaattgtgtcccctccaaaattcataggttgaagtcataactcccagtaccttagaatgtaacctcagttggaaatagggtcattgtagatgtagttagttaagatgagtttgtattaaaatatggtgggcccctaatccactatgactggtctccttgtgaaaaggggaaatttggacagacatgcacacagggataatgccacgtggagactggagttaggctgccacaagccaaggaactgcaggaagctggcagagagtcctagaacagattcttccctagttgcctgcagagagctcatgaccctgttaaacccttgatcttggacttctagcttccgtaactgtgagacaatacatttctgttgcttaaaccacccactttttggtactttgttatgacagcgctaacaaactaatacaggcttggtgaaggagatgtgtaagcacctaaggagactgtgtctctcaagtctgggataagacaggcaagcacatctaaattaatctgcacttcttccatcttgtttaaataaaagcatttagtataacagaaaactagtatagaataataatttcaaataaatacctattcttcatatttgtgt

SEQ ID NO: 1289 - DNA, 1050 bp, Homo sapiens; identical to SEQ ID NO: 1288

SEQ ID NO: 1290 - DNA, 1050 bp, Homo sapiens; identical to SEQ ID NO: 1288

SEQ ID NO: 1291 - DNA, 1050 bp, Homo sapiens; identical to SEQ ID NO: 1288

SEQ ID NO: 1292 - DNA, 1699 bp, Homo sapiens
aaagcaagcggttttatcttgttcttacctttttgcaggaaaagtggctttaaaaaaatttatataataaaactattttggaaattcattcttttagaaagagaccttgagataaatattttttgactctggatatttctatagttctgaacacagattttaaacccactatcaaaatgaaaacaatataaagctatattagtgagtctccatgtagcagtttgtttttatagttactgtttcatgcttaaaacttcattcttactttcattaatgttacccttcactggtatagccactcactaaataagtatatttaaaacatcaaaattttgaactaaagtttgtgattctcttattcagcaatccttatcttatgctggctgcatgagttaattcaacatccagattaaatatcctgaagtaggttctatatatttcctcatacaacagacatggaatggaaatgccactagaaactgccctgctacttttaagtctgacctttgcaggaggtacactttgctgttctatgattgtattcacctacctaaaatacaaatgaagacagaacatatcatttactgcacgatgaatttttcatttattaaatgaaaaacgtttgctagacattttaaatattaagtattttgactacacggattaatttaaatgattctatcaggcattctgatatttaacaactctattaaaatatttatagaaaaataaaagcaaattgatataaatttttgagcaattctatttttgtagaaaaaagataacctgtaattataaagatgttttttgaatgtgtagtatcctagaaaataaaagttcttgtgaaacttaaaaaatgaatgaaaaccaactaatagcatgcaagatcatagatcctgcattaaatttttatttgtgaaaatttgaaaattatgagctataacttataaagtttgccttcttatgtctaaaatcttttaaaggattatttgcatttatgtaaaactggaaatgaagttatatatgagtgcaaagaaattgacttctgctcaaatatgtgttgataccctacagtaaattgaattaaatttttatcccaactgtttgattttattatttcatggactagccttacgttaagtgaaatactatttatgttgttaccacccctaagagtgactctgatatattatggatgacccaggacggtcttaaaggtctagttttaaaaactgcctagtttgtaagtatttgaatccagttcttttctaaattttaataatttgactcaaaatttttgctacagggtcaacttttaaattgtatatttcctctgaggcacactgggcatttggagaatggttcttcactggtgtagagagccaggtttactgttggttgcaccatctgttatcaggcatgcagaaacatttttcttctggagaaacagaggggaaggtgttgttacagtgtacatgtttcctctgtgtcgtttttaagggaaataaacatgttccaaaagatgctgttaaaataaatatttgaacacgttttctgtttctaggttgctcttaattccaaacatttaaataaatgtgcatttgaatagctttaggtggtttagtctattagctgaaatggaaaagttcatgtattgacatcatcaataatacttcataaaggtttatgtatttttatg

SEQ ID NO: 1293 - DNA, 1050 bp, Homo sapiens
agttgaactggttgaattaaaggccacttttctttcagattccatcattcagtaattatgggctgggcacggtggctcatgcctgtaatcccagcactttgggaggctgaggtgggcagattgcctgagctcaggagtttgcgaccagcctgggcaacaaggtggaaaccctgtctctactaaaacacaagaaattagccgggtgtggcagtgtgtacttggaatcccagctattcgggaggctgaggcaggagaattgcttgaacccgggaggcagaggttgcagtgagccgagatcacaccactgcattccagcctgggcaacagagtgagactgcatctcaaaaaacaacaacaacaaagaaaacacggtaattagaatcaaggttagggacatgtagcccagggtatggtagggtatgagcaaattcctatcagacagcaattccagaatactagtttcaagtgtgtaagtttttggaggtggtctaaatttcaattttgattgtgactgtatgctcttgaatgaggccacttgtttatgactccatctgcctcacttgtaagaggagacagtatcagttgcaatcaatgaacctagccaaaaaggctaactataaatatttgctgaatgcttcaacattcttaggggaaatagataaagttttaatgatgtactttcccactgtacttgcagccaagttgaattttgtcatattcttcctagtgttaacatttaaaagatgtaaacattttcatcatagtatctaaatatagaactcattttgtttcccacaattaaatataatcatcagaaaggaaaatagatgattaacagaaatgtaaatggtaagttatttagtcccctctcaccaaaaccaatctgaatcctctatcttgagaagccagtccatcactaatgggtcatttaccttgattgactcagtgttaggacttgctgtgagatcaggactttctataagatttctgtgttctttgtgactctatatgtacactgctgggattatttgatgggctttgtggagagtc

SEQ ID NO: 1294 - DNA, 1061 bp, Homo sapiens
gtcagattaaaaccaacattttcaagctcccttttaactggcagcagtcatggggactgagtcctagtcaatgaaattggactgaatcccattcttctgactcgtgatcggagctccaaaagccaccctgaaccacagcatgaccatgggaatcaaatctgtgcagagcagagccacaaaatagatggaacttatatcctgacaccggggagcaccaaagctctgcctacctccacacttgaacgtttaagagaaaaccaattgtatcttgttaaagccactgcactgttaggctctgtgctttttttcacctgaactaatcgtaaatcatacatctgttaaacacatcactttagaacctgtcatcttctgtctcttaatatcatccaccaactctattcactccatttggccccggttttcctttttcttccctattttcctgctttatttttgtcctttttcccttaattgagcattaggcaaaactcaaatatcctgatgtattatctactgaacacattttaaaaattaacatttattaaaaagaatatgaaatacacaaatgtagagggaatgaaatactgaatcttcatgtacccatcactccaccccaccaatcattaacctatgatcagcttctgccccactcacactatagcctcttcctccctcctatattattttgaatcaaatttcagacctcatattgttattgaatcaagtttcagacttctttatttaagaagcaggcaagtcaatcttttttactttttccttacataaagacaaattcctaactcatgacttcttttgcctcataaaaatcaatcttttctttccctatttctcctccttttcccccttcccctcttcctcctacctctttttttttctctttctctttcccttcctaccttcttccctccttccactataatttttaaaaaggaaatccaagtctaattttcccagttttacctgtggttccttgatatacatctgtctttccattttcaatcacttttgctaaaatggcagagtttactcatggatagtcc

SEQ ID NO: 1295 - DNA, 1075 bp, Homo sapiens
gtatgaaatttccagtccttccacatcctctttaatgcctgttatcttctgtttttgattatagatattgtagtgtatatgaagtgatatttcactgtggatttaatttgcattcctctaatatctatgatgttggacatcttttcgtgtgctttttgtcagctgttatctttggtgaagtgtctgtttatatctttagcccaattttttatttggttatttattttaaattgagttttgagaggtcttcattgtggttacaagtcctttatcagccataaggcctgcaaatattttctgccactcatcttcttattctcgcattgtcttttgaagagcaacagttattaaatctgatggactccagtttaccaattttttcttttatggattgtagttttggggtcttgtctgagccatttttgcctgactgtaagccatgaagatttttttccttttgtttgttaataataataataatttttttttagagacaggacctgactctgtcaccccagctggagtgcagtggtgcaatcgtagctcatgataaccttgaactcctggacacaagggctcctgcttcagcctcccaagtagctaggactataggcacacagcaccatgcccagctaacttttaaattttttatagacccggggtctctctgttttgcccaggctggtgttgaactcctggcctcaagcgatctttctgcctcagccttccaaagtgttgggattaaaggcatgagccactacacttggccacctttgttttctaatagaagttttatactttggtttaacatttgggtctctttcattttgacttaatattttgaatatggtacaaagtgtgggtcagaagtatttggttttgcatggggatatccagtgtttacagcatcatttgttgaaaagactatcctttctccattcacttggctttgcagcttcatgaaaaatcacttatgtctgtatgtgtgattttatgtctgtactcttttttgtattgacccattttcctttatctagatgctggaaacatactgtcttaatcattgtagctttat

SEQ ID NO: 1296 - DNA, 1030 bp, Homo sapiens
atgaaatctcattttccattattttataaatttgctgtattcagcttttcttgattttagacttttttttgttagctcagtgagactattaagaaagaatatttgtgagtttgtaataggagatttgttgcatttctttaaaatggctttttatattcttcgtaatttgtaatatcaggggtgtcatttctgtactcttaaccattttgccaatgtgaaatccttgcaaagtaatcggcctattacttgggaagacagaattgtatgaaatgactgtagaataattcaggatggtccccaatacggtaaaatgttaactttttagatgtagattttaagtatggtgaaatttgtagcagtgttctttagtaagttaactattaatatatcaagacctataactggacaactaataaataacctgtttcttaaaatgttagctttttctaaatattctgaaagtactggttgtaaattgctgaactcacaatttaaattatgatatgactattgaattcatcctcattggcttgcatagaaaattacaatcaaataatgctaaatgtaacttttttggtaatagttgtgtgtaactggttgttcattatagatgtgttattcaaaactttgggtttttaggttttgacttttcttaaaatacttttcttaaatgctacttaatgctttctctagggtatttttattagaatttcaattaacagatattttgatgtctgcgaaatgacagtactatgttagaaattgatgtattggctccttgagggcagtgaccctatttgttatgtttgttcctcaatcattaatagtacacatattaaatagtacatatacacttaatatttaataactcttagaagtgtcataggctttaatatgctcatactctaatgagccatttatcaataaaaagataaataacaagactatgtcttttaggactttagttagagaaataaggactcaaggttttaattaagtgctatatggctacagtaggaaagattggttt

SEQ ID NO: 1297 - DNA, 1116 bp, Homo sapiens
gaggataaatgtttaaattacaaattaatgaagtggcaactgaaacaagttttaacctattctcaagaaagggctttgctggaatggtggctcacacctgtaatcccagaacttagggaggctgaggcaggcagatcacttgagcccaggagtttgagaccagcctggtcctcatagcaagaccccatctctacaaaaacttttaaaaattagatagatctggtggcatgggcctgtagtcccagctacttgggaggctgagacaagaggatcacctgagcccaggcggcagtgagctatgattgtatcactacactccagcctgggcgagaggagatccagtctcaaaaaaaaaggaaaagggctttcctgagggtcaaatgaagtacagttgacccttgaacaacatgattttgaattacacaggtccacttatgcatagatccacttatacagaattttcttctccctcttccacccaagacagaaagaccaactcgtcctcttcctccttagcctactcagcgtgaagacagtcaggatgaagacctttattatgactgatctccaaaaagattggcttcagtatttcatggagtgctatgaattagaatcctgagtctctatattgttaattattttagtctcttggtctacgtgtgttcctaaactgtagtagctttcttaatttagttctaggcatactacattaggggataaggtggttaagtgatattttcactttaaaagtaataaggtgtcacagaaagttatcacgagatttttttgagcagtacttcttttttaaaactattataatgaattttagacacaatagtatcatgaaccattgtgtatctatcattcagtccccaaaaccattagtaacccatagctaaaatgatgatatccacactctgcttttccacttctgttattttgagataaatttcagatattcatattgttttatctgtaaaggcttcagtgtatatctttaaagaatagggactctcctctcctttttaaaatataatcaaaagactgttaggacacacacacaaagttacctcatattataaaatgtcaaatttgtattaaaatttctaattgtct

SEQ ID NO: 1298 - DNA, 1961 bp, Homo sapiens
gaacagggatacttggactaatatttcaatatttctaaaattattggtttattgagtacgttcctagaaaactgttttattgaaagcttcaaatttctcagaattgtatagcatttttgaattctctcttttattactaatatcaagcacctatgttttctcctatttcttgatttgtcttgtcacagaatttattttactggtcttttcaaagaaccaacctttttacttgttttcttttttgttgggggcagtggagggattcactttaatttgatcctgaactcctttattttcttttaaaatgcattcaaggttaaaggtaatcagctgatagctttggctttttttttttttttttacttttagagttctctttttattgtaaacttcatttaaaggttttaagctacacaaaagtagagggaatggtatataatacacttttttctgttggataatattaatgcaaatctcagatcatttcatataatctgcagatatatcagaatgtgtgtctctctattaaatgtgacattggtaccattataaagtttaaaataatttcttaatgtcgtctaatctccagtattcagaatactttcttttcattattttatttttcttgccttttcttttttgttgttgttagataaagtgagtcatctgtacaatttccactttctggctgggcgtggtggctcacgcctgtaatcccagcacttcgggaggctgaggcgggcagatcacgaggtcaggagatcaagaccattttggctaacacagtgaaaacctgtctctactaaaaatacgaaaaaattagccaggcgtggtggggggcacctgtagtcccagctactcgggaggctgaggcaggagaatggtgtgaacccgggaggcggagcttgcagtggcgccactggactccagcctgggtgacagagcaagactccgtcttaaaaaaaaaaaaaaaattccactttctggattctgctgattgtaccgctgtgttgtcatttcatatgttcttcatgtaaacaagtttacctgaaatacaggggtttgatcagactctggtgtaatttttaccaagaatattttgcagatgtactctatgtaattcctgttgtatgtcagcttgctccatctattacagagcgcatcatcctttcacctaatagtttttagtagctaatgattgcatacttttattaggtattgcaaaagtggcgctattctttttttctgtgtatattagaattcttaagaattatatccatcaactgtttggtcatacgtaagtacctttttataagaaaagcaggagagaatttgacttcttaagttttctgatgagttgttaccctaaaacctccagtataatcaatatgagttcctttttgttgctgttagtatcgtcgcaacagcaaagagtttaataacatttattttctagtgtattgcagtaatcattcttcttttttttaaatttctaagctgttttattaaatgaaaagagaacaatgctaagcagcttgtatggtgtgtgtgttgtgtgggtttttattttgtatgaatgttaaaaacacggtggctaaagcctgtaatcccagcattttgggaggccaaggtggttggatcacaaggtcaggagcttgagaccagcctggctctactaaaaataaaatgtggtgaaaccccgtctctactaaaaatacaaaaattagccctttgttgttgcacgcgcctatagtcccagctactcgggaggctgaggcagaaaaattgcttgaacctggggaggctgaggcagaaaaattacttgaacccgggagacagaggttgcagcgagccgagattgcgccactgcactccagcctgggcaacagactgagattccatctaaaaacaaaaccatgtatatatgtaagtttgaggaaaagagttgtatgaaaattcag

SEQ ID NO: 1299 - DNA, 1935 bp, Homo sapiens
tgtcatgtattaaaaatcatttgtagtctttcagagagcatcttatctttcttgtaggtgatagtattggctatctatgtagtgtcttaagttctttaaattatccttattcttactttttgtgtacattgtttataaaataatgtgatcatcttaatctaccattttgattatggtttgatcattcttttactatttccacttgttagcaaagcctttatacttactaaattatgataaaaatgattattataacatgcccggttttacttaaatgtcttatttaaacgttctgattgttattctttcttattcaggtttcttattgtcatgttttatgtctgttttcaggtgtaattgtcctctcacaaatgtatcccattttgggtgacaaaatacctgatcaccttatccttatagttttctccctagaatcttttttgttatattaatcaaagtttatttgtgagaatgttatgaaatataagaaaatgaacatcatgaacctgtcactcaaataaaaaaacttgaatgttaccaatactattgtatattccatatgcagcaatattgcttttttttttttagagtcttgctctgatacccacgctggagtgcagtggtgtcatctcggctcacagcaagcttcgcctccctggttcaccccattctcctgcctcagcctcccgagtagctgggacttcaggcacccgccaccacacccggctaattttttgaatttttagtagagacggggtttcaccctgttagccaggatggttttgatctcatgacctcgtgatccgtctgcctcggcctcccaaagtgctgggattataggtgtgagctactgcgcccagcccaatattgctttttaatcccccttcttaccctgccatgggtaggtggctgccacaacttttgccttattttttcaatatggatttttcatgtaaatgacaaaaatatatttagtttttttttagtttatggaaacggtatgcctatataatgttttccatgtcttgtgttttaattcaataatgattctaataaatagccgtattttttggatagttttataatactcattgctgtgatatactcttttgtgaaaatacccattttatcttttattggacatttgggttgatggacatttgaatatttaaagattttgacttaggccgggcgtggtggctcaagcttgtaatcccagcactttgggaggccagggcgggcagatcacaaggtcaggagtttgagaccagcctggccaacatagtgaaacccccatctctactaaaaataccataattagcggggtatggtggtgggtgcctgtagtcccagctactcaggaggctgagacaggagaatcgcttgaacccaggaggcggaggttgcagtgagctgagaccgcgccattacactccagcctgtgtgacagactgagactccatctcaaaaacaaacaaaaaaaaacaacaacaaaaaaagattttgactttaagaacaatactgctgtgaacttctttgtacttgtttcctggtgcatttatgcaagcgtttttgagagggtatatttaaaggtataggtatatattactagtgtgtaaaataaactttatgagacagtactagattattttccagtgtattgttcctatttatgttctcaccagtagtgcgtaggagttcttgctgtttcagatccccaccagcacttggctaggtatttaatttcttaatttttaacaatttggtgtgtagtatattctctggtcttcctttgtcttaccctgattattaatgaggtcttacatcttttttccccccacatttatggccatggatgtttctcttttgtgaaattctgttaaatgcctatttgtgttttttgcttgataaaatgtgagcttattatttaactga

SEQ ID NO: 1300 - DNA, 1029 bp, Homo sapiens
gtattctttagtattttgattctaagtaccactaatttgatttgtttcaacagtcattaatgtggggcagtcatcaatcactaccattgatcatttatttcatatacattgtaagttaaatgaccaggctgaaataattcagatgaaattattctgtcagttaatgtggtaatgttaacatttatcagtagtgctgaatcacttcttttgggcataatagtggtaagctttttgctcaatgcaaagacaggcataattgcttttttcaaataaaaatgtaatttgtaaaaatactccagtaatttttgtaaaatctcaaaattgcaaataatttgacgttattctcagtaatgaaggctgttaaatctcctctcttaacggcaggtatgaaatcatttgaggaagaaaaaagttcataaatacaaacttaaaaaaaaatggaaagacttttccatgcaaaaagatgcattgcaggaaggaggaagagtgtccttcatagcacaccacaagtcagtattagaggcttgcttttctacttgagtagacccaagattccccacctatcgtcttccaaagttacttgtgatccactgcaatcacaagttttacagtgtgtatactctaggtgtatggaaggatttgaattcacaaatagtcaaacatcagaagaataagctgataataatacatttgaaaagaggtcaagtatatttttgaaaactaggagagttaaagtgtttttgtgaactaaggaacaaataaggcattgacaatattttacttgattaggaattttgttcaggtgagtaaaactttaagcatcacttaagttttgtttttgtttcttacttttagaatatctgatctggacttctgtggatttatggaagagctggctttatttctctatcctgtgggaggggcaaactttgattttgtatgtggagtaacttgaccttcagtttttttggtctgagaacaaaggccaaaaaatatgtaacagttaataacgtaattcacttacttagt

SEQ ID NO: 1301 - DNA, 1077 bp, Homo sapiens
gggatttttttttttaaacctggggtttttagatcccaccctcagagtttcttattcagtaggtctgggattggacctgagaacatatactgtcagtaagcttccaggtctaatcttaggattagggaccacactttgagaatgattagagtattcaattagatcttagggactacactgtgagaatcagtaatgtatacaattctgctcatcatgttcttataaaactatgccatgccagatcttccatatcttgattagaaattggttaagaaattaggcttggtgtaaatacagtatcaatgtggcttgaaactggttgtatttttctgtttttttttttctttgtgcatttgatgctaataagtagaaagctcttaaaatatttaagggagacaacctatggatatctgtttactcttctcatatttgttgtaatacagtttattcattatgagtttaaatacaaattagcgtaaagcttatggttaatttggattttttggactttctgaaatgctttgataattcattgcctcctttgcacatttttttcattttgatggttgcatttaacttctttgtactgattttttaaatcagccagtattaatttaacctattttcaatactaatatccatgtatgtaaatatccataactaaggcaaaacagttgattttagctagtttaaatattagtccattcatatttttgtaagtacataacattttcaaaatagctaaaatgtcactggctggtttgaacaactgtgcagttaccgaagagatgaatgtataaccttttctgtaaagaattttaagacatgaccttatttttttgcagaaagaaatctcttcattccaaagattttgcctttgctttcggtgttctagccactgaagtatatacctgtttaattttaataatgatgaagatattgatatctaactcaccagaatgaagttctaattttctaaagacctgaattatctggatgaataaaggaccattgggatggaggatttatagaacgtttctgagaaagtctagctgttgtggctttggtttgtttgta

SEQ ID NO: 1302 - DNA, 1150 bp, Homo sapiens
ttgaggctttgccaggtctgtcagaaattgtctgctctggggctaaatggtgattccataggttgcacggtactctgaaacattggagttctgagaagtcagaatgcagacatattgcagggtacttcaaacactccatttagactacagaaagcctggacctgaatagaaaggatcacaccctataggaagtgccatctataagactgagataaaaaccagaaacctagcccgataggaagtgaaggattcaccagttaatctaaccagtaactgatgaaggattaatcagtaatttagttgccttccaaaacaaaacaacacccccaagaaagacatgatatagttttcctgcaactatcttccataatatctagtataccatcaaaaattacaagtgatgtgcagaagcaggaaagtaacccatgaaatataaagaacacatttaataggaacagattccaaaatgacctagagttagaattagcagacaaggacgataagtattttaagctgtaaaggaaaagattgaaataatgagtgatggaggagtgtgttgaagagataaaaaactataaagaaagcatgtagaaatattctaattgaaaaatacagtttttgaaatagttgggactgattcactggttggaactagtagcagattggagacaatagaagaaatgttagtgaacttgaatactgttgaatacagtgattaaatctgtcagagaggagaaagtatatctaatggacaatgaagcagtctgacatgtaagttgaatttcagagtgagaatgtgggggaataaaacatctatctgtttgagatagtaatgactgagaacttctaaaatttgaataaaatatatcaacttacattcctaagaagctcaggtaaactcctcatgtaggctaaataaaaagaaccatacttagacacatagtagtcaaaatattgaaaactagaaatgaagagcaaatctaaacagctgcgaaaaaaacgtctaacaggagaccaacacctcgtattaaagggggaaaaaaagcgaatttctttagactgaatggcataacttggctctacaggggataagaggagtactgggaatggttaatatgtgtataaattttaaaagggctctctcttttcc

SEQ ID NO: 1303 - DNA, 1029 bp, Homo sapiens
aatacagaaaatcttcgtgactttggattaagcaggaatgtatttgatatgaccctaaaagcacaatctattaaaaaatggaatttgacatcagaattaaaatcttctgccattcaaaagaaactgctagggaatgaaaagacaagccataaactggaagaacatcataacaaagcatatagctgataaaggacttctatccagaatattaaaagattcagtatatgtaaaatcagcagtcaagcaacaaactactcaatgaattggccaaaatatttgaacaggtagtacagcacaaaagatacacagatggtaagtaagcacgtgaaaaagctggtcagcatcattagttattagggaaatgaaaattaaaactacagtgagataatattacaaacctattaatagtgactaaaattaaaaagagtgccatcttggaaagcatgagttgggaagaatgtggaagaatgttaatattcacaatactgctgatgggaatgtaaaatcgtagtactttggaaaacaatctggtagtttctccatgatccaggttatttgtctcctaagcatttacccaagagaaaagaaggcatctattcattaaaaaactctcatgttaatgttcatagccattttatttgtaatcaccaaaatgtgaaacaaacattcatcaacagatgaactaataagtagattcctgttttggcatcatatgcttttccatacagtggaatacaacagccatgtagaatgagctattgatagacacaacagcaagaatgaatctccaaacaattatgttatgtaaaagatgggagaaaaaaagactacatcctgtatgattccatttatataaaactctgggaaatgcaaactaatctaaagcaaattcatggttcttaggagtttaagagtgggaaaggacaggcaggaggggtggcaaagggacacaggaaaactcgggagtgatggacatataaattattgtgatggtggttttatggatgtatgcatatgtcaaaacttgtc

SEQ ID NO: 1304 - DNA, 1047 bp, Homo sapiens
aatttagaataattataggatacaagttctatgtacagaaatagtctccttatacttggcagcaaattcttagaaaatgaaattttaaaaaatctgtttataaaagtatcagacaaaatatcaggaaaaaaatttgacaaaagatatgtaagacatctacaccaatatgaaacactgctaagagaagttttaaaaagacttacatgaagacgtagaccatgttcatgaattagaaggctcaatatgttaacatgccagttctccctaaattgggatggcattgaatctataaagacttataaattgagagtacattctaaaatttatgtggaaataaaaaggagctaggacaattaaaaccattttgaaaaagtaaattttgccacagttctcaagactcactacaaacctgtagttaatccaaaacagtttactactagcatagttagtgacacagaatagcgttcagggaataactcatgcattaaagttgccttgatcactcagtgaagaaagagaaggcctttcaacagatgtgctagaacagctgaatatacatacaaaaaagcaaaagaaacttaaaccctacatcattctgtataaaacaatgagattaattatataaaaactaatatatagagtttttaggaaaaagcataggatatacttgcaactttgggataaatgaagatttcttaaaatagaaaaatcttaaaggaatatataaacttgactccatcaaaatgggaaatttctgcttcatcaaaagacattgttaagacattgaaaagacaaggcacagacttggagaatataatatttgtgtatcaatacatgcatatgactgtattagtccattttcatgctgctgataaagacgtacccgagactgggcgggcaatttatgaaagaaaccagtttaatgaatttacaattctatgtgactggggaagcctcataatcatggtggaaggcaaggaggagcaagtcacatcttacgtagatggcaacaggcaaagaaaagagagcttgtgcggggaaactctc

SEQ ID NO: 1305 - DNA, 1055 bp, Homo sapiens
gtgagccgagatcgcgccactgcacttcagcctgggcgacagagcgagactctgtctcaaaaaaaaaaaaaaaaaagaattcctggtaccagcagggcactttggctcatgcctgtaatcccagcactttgagaagctgaggtaaattcagggcagcagtgaactggtcacaccactgcactccagcctcagcaacaaagcaagacacagtctcttaaaaaaaaaaaaaggaagaaattctggttcctttaagggagatttgttgttgttttcttcttttaatggtgagggtacaagttggtcacaggagggagaagagaaatttagctcttttgttaatgaactagactttctgttcgtctgtttttcacccactccctcctcctgtgaacctgccaatttctgatttggttcctgtggctgctaccagtataacacctgtttgctgtgtgttcactgtgtctccagtccatttggttccattcattttctgtgttccaggaatttgataaaattattctcagctaatgataaccttccctcccttcagtgtttgtttattttatattcattcacttctaggcattttaatagagtttcataatagaagacatgcaaatgagtatgcattaaccatgaattctttcacatccgttcatgaaatcaccaggtcctattagttcacactttttaattatctgcctggttttctccatctttcctgctacttgtattgctcaaacacactcacctgttggctatattactacgacagttctctttataaactactttctttttcttttcccttctggaatttttttctcgctagtacagccagtacgtatctttctcaaatgcacatatctaagttactcccatgcagtaggtcctgttcatgctcaggctaaaggccctttctgagcttactactttttgtcttgtcttatgactactcccaccctatttgcttatgcttctgtcccaaaagtaatggtgcatcctgtaacctggcatgttttctcttgatgtcagtcgtttgctgccattatgtc

SEQ ID NO: 1306 - DNA, 1048 bp, Homo sapiens
tagctatttcttctcctaaaagctatcccctgataagcaaagagtagattaggtttggattgagagtgttaactccgaatgagatactgctatgcacataaccagagtggctaaaattaaaaggataggtaataaaatactggtgacaaccatttttgaaaactcgaaatatctactaaagttgagcatatagctattctttgatgtagtaaactcgctcctagttaacatacctgagaacatgtacataggtatgttaaaagatatgtacaagaaagttcatggaacactgtatgtaatagcccaaaaaactataaatcatccaaatgttcaacagcagcagaatatgttgtgttgtattcatttagtggaatattgtatagtaataaaaatgaacaagctactgctgcctgcaaaacatgggtagtgtacatcataattattggaagaagccaaaccaaagtagaatacatctgatatgattccatttatgtaacttggaggaagcgtgagtatggcttctagagtgttgataatatactgttttttatctgggtaattatttcacagagatgtccaatttgtggtattttatggagctttatacttaggttttgtgtccttttgtgtgtgtgtgtaatattttgataagaagttttattaaaatctaggtttgcaagccaacactgctccatgaattataagaaaaaatatatgaagtcattaaaaatgaaatcataaagaaatgtatgaagtaatttgttactgatgtgagagaacatgattgttaagccataaaaggaagatagagaacaatgaatagtattaaataaaagtatgaatagtattgaataaaaatatgaatagtattgaaaaaaatacagactaagtataatatttatatatatatgcttgtagatgtagctagtatctctggaaggatatcgaagataatactgtgaggggttggtaggggaaaatagactgggtgacagagttgcaggggaatttttaatctttaataccacttttataccatgatcatgga

SEQ ID NO: 1307 - DNA, 1084 bp, Homo sapiens
ttttattactaaaattatactttcactaatttttattttttgtttaagattgctgatatgctttattcacttttacaggccctagatggtcagaatatttataatgcctgctgtaccctaaggattgatttttccaaacttgtgaatttgaatgtaaaatacaacaatgataaaagtagggattatactcgacctgatcttccatctggggatggacaacctgcattggacccagctattgctgcagcatttgccaaggagacatccctcttaggtatgatttttattgtcttaaccacttttctcccattttgccaaatggaaaagtaccagtaagtataatgaatccccccattttggaccttaccaaattgtgttaggtttcgtgagttttctttttctcaagtgagaaggcatatgaatactgttaagaaaaacccaaagtattctttataagtctaattaaaattatatgttagttttgttccttttaataccttcagcttctcttccatgccactctcccagaacaaaagaagaaaagctctaatgaagaaatactgttgaattcttaatgccatatttacactttaaacttgatgtcactatgcctgagtctaggcctaaagttcttgtgtgtgtttttcagtgctgatctgattgttttaatttagcattgcatggaaacagtgaaatgttaagagacaaaacatacataatgggtggaggcatatgggattttttttgaagcatattgtagtggccttttaaaaaaacaatttaaactagaagaaattttctgtaaaattaattttgctatttctttgcattttgtcttaatcatttatattttactttgtaccacaatggacttgagccacctaataaaaatacagtgcaaacatatgcaacttatagttgatagcgtggaatcaagatgaagaaaaaaataaggaaaatcttactttgtaagtaaaatgtgcaaagtgatttataagttaagatggaattttagagtttccttttatttgatgtatttcttgatttctagtattggtaagattatctttaagtcatgattttt

SEQ ID NO: 1308 - DNA, 1065 bp, Homo sapiens
tcaaaaatttttaagaacacaaatataaggtgatactcttttgctaaaatttgtggggggcttcactttaccttgtatgatttttatattagatctagctacttgactgaatttaattactttagaatcagtactataaattttaattgatttattttacacagtaattttttaagactaacatttatgtctggcttttctgtttcctttaatgctaggtatcacagtgtctcagaaaatgtaatttgttcaaagaaaggagactgagtgctttgtaatgagtttaaaatctgacatctaaaatacataatcacaaatgtggccgactattagtcattcacatattctgtttcaaagaacacagtgatcaaaaatccttcagattataaattgagacatcattataatggatcattttatcatgttaagaggtgtagttaatttattaaggggtagatcacttttagaaaaattgctggaagtaatttttcatgatcatgttatctacattctaaaaattaggagagagactgtgtacaaagagtgtttattttagagctttccttgtatttcaaattgaataacaggcattctcatcataaagtttttaaaagaaaggcaaagcagactttctgtaggaaatcattgacgttaaaatagttataattgtgaacagatacaacatttattcatgaaggtaaacatgtaggtcttatagaatattgtttctcaaaattttgctgcacgttgaagtcaccagattctaccccaggctgagaatagttaaagagtgggtcacaggcattcctatgtttttaggatctcaagatggttttactatgtagcaagagttgagaattactgctacagaaaagagcttgtaacttaatgtcatttaaatctattttggtacagttctcctggcacaattttaattagctgttaaactgaatttataattttctatatgtttgtgatacataaaattaactggaaaactttgattttctttctttgttacatttgtatgggttattcatttggtaatatttattaatttattat

SEQ ID NO: 1309 - DNA, 1066 bp, Homo sapiens
ataccaaaaatgtgtattgttcatgcattgattcaaaattgggtacaaaacgggtagatatgtaacatgcaaataataaattgaacttatatttttatctttttgacaaacaacacgttaaaatttatgtcaatcttattttttcaaaatccttttctatattttattaagactaattatagcaaataatagccataaaattaaaccaaaaaactcatctactgcagacatatttgaaagctgtcccccaagaaagaccaaagtaatcacacatacctaaacatgctagtatttcccagaaatattaaaaatacatagattttgaagcacattgctgaatgccatagtaacaccaaactaaaaaatacatgtaaattaaaaattaatattttattttcaacataaatcagaaatacttggttagaggtcacatgataatacctgtcctaactgtcccataacttcggctttctcatttcatgtgttttaatatctaagaagtaaaaaatagttggagcatgcctctttatatgtgcaattttaaattatgttgacttctttggattattgaactgtcctctgctttgctatagctgaatttttaaaatgttaattttgaagtcttaaaatgtgtcttttggaaaaaacattggaagagctaaagtagatagagttgttcatttaaattgtttattttttattttattttattttttttagttggagtactggctctgttgcctgggctggagtgcagtggcgggatctctgctcactgcaagctccgcctcctgggttcacgccattctgccgcctcagcctcctgagtagctggggctacaggtgccctccaccacacctggctaattttttttgtagttttagtagagacaggctttcaccgtgttagccaggatggtctcaatctcctgacctcgtgatccgcccaccttggtctcccaaagtgctgggattacagtcatgagccaccgtgcctggcctcatttaaaattttttaacactgggtaaaatttttatttttgagtcacaaattaatttgaagctg

SEQ ID NO: 1310 - DNA, 4700 bp, Homo sapiens
catgaagcttatcagagacagaaaacatatgagttagatctaattggaggcaaactgaaatatatagtggagttagtgtggttatcagcacataaatgagtgatccatcaacaaaaggagaaattgggagggttttatgggccaaaaacagcatgattaaatgtgatagagtatatgtcatgttttaggtgtgatgaacattcagttatgtgtgacgaataggataattgaaaaaatatgaaaggctatgatgccagaaagtattatgggacaagatcttaaaaccagtgttacccagggagtatgaatttaatatgggaattcttaaactcctttatgactggaagatgagcatcagagtgtctgcgaccatttgatgatattatgtaccaagttttagatgtttggcttttttcaggttatgaaagcgggggatgagttaagaaccactgctgtgaaggattcatcaactatttttaggcagttgggtaaaaatgaccaatttagttttaagaaactgactgtggctccagagtatgttggagaagtgaaaatggagactaggaataacaggtgggagactattagtctaattaagatgtaattataaatctaagctaggaacgtaaaatgagaatgcaaagtaagaaacaaatatggggaaaattatatgtaaaagtaataggacttggcatcttactgatgtgattgattatgagaaaaatgaagcatgtggaggagtccactggacagtaggaaattcagcctaagacttgggtaagagttctgtggagttgtgaattcagaggccagagatgtgatatttaaaattttggttcaagatttcccaggtataagaaagcaagaggattaaagcattgtaattaaactttaagcagtgcatatttatgttatagataagataaacaagaaatctagggatcaaataggattaaaattagtagtgatcattcagtacagtagttacgtactgttattcacaagagtatataaatcaaattacaaggaattaaggatataaacgtgataagaaagtatgcactgtactctttgaggaagtttgccatagaaaggaagaagaaataggatggtagatcagaagtaaagcaggacccagtggggggagtgtttgcagtgaggcagtatgtataatcatttaaaacatgggtttggagtcctctcaggttccatgtttgtaatggacataatgataataatccctttcatttaaggctgttgtgaggattaaatgtgttaatgtgcaaataactttacacagtgcctggtatataataaatgcttgctacctattaactagtatttgtttctaaggctaatttaagtcctagaattgattgcaaggattagatcaggagtatagtggacatgttgggatttaaatatttaaatatagagatgctttttaggaccattgttagaaccagaagagattttttaccaagttcacacagaaatgtaggtgcattggctgggcatggtggctcacacctgcaatcccagcacttgggaaggctgaggcagaagaactgcttgaggccaacattttgagaccagcctgggcaacatattaagaccccgtctccaccaaaaaaaaaaaaaaaagaagtaggtgcagagctggaagcagaaccgaaatcatcagtgttacagtcattattctttcctgtcaccattatatgtctttatgaagcaagggagaaagaagaacagatgaaagaagtgaggattttgaagttggttgaaagatttgattgaattctgatctaaaaattataaggcacttgtttaacaagttgaaagtaggaaagtagacataagactctactagatttggggaaactctcaaaaatggactggaaattcagctaaaagtggataacaaaatatttctagaattagcatttgtggggtgtgtgtgttttcactctagtatttgtcaagcccagatgaaagcatagacagaatgtaagactggatttatctaagtctggaattgtgtaacattaaaggaatagtagcaaatgagcagagtgttggctcaagcctaagcttgagcctaagcttgactctatggtaaagtcaagtcaagggagaatagaaagggggtcaccataaaggtcaaaagtgggtttagtggttgtgtgggaataggcagatcaagaaaagaatgaagttaggaaaggagatataagtgttgaatgaccattacaaaaagagacagaggaaagaaaaatgaagatgtatcaaaagaagttgctaatatggatggcaaagtagatgtttttaagaaatcatgagaccagagtcttggaaaagtcataggatgatgcagggaatggagaagagggaaataaagccaggtgctgaagtctttatgtaatgggaggagatgttccagtaatccaatggctattttgatgggaaagagtgtggtatgattgggtggcattgacatcggaagccatcctcattgatggtggtggaacagcagtttgaaagtaacattgtgcggtgaggtagagtggcacatgatgcatccttattcttacctttggagaaaagttgagggagaccaaaaatgactttttgagggaattgtagaagtttcattagaagaaaagtaagtttttaattaaaaagttaatctgaggaacaggtagaataaaagtgtagttgttagtggtagaagagaatggattccatagggcaaaataagaactcaagggaaggttggtggaagaggaagaggattgaattgtttcaagaaagaatagcagttgtcatccttatgaaaagtaaaatttttattttcaaatcaggaaatgtaaaatgtgccttccagaccccttggtggtatacatgggagattggttctaggacacacacagtcccatcccccaccctctgaccccatacaccccctggatactcaaatccactgatgctcaagttccttgcataaaatggtatagtgtttgcatgtgacctatacacaacctcttatgtgtactttaaatcatctctagattacttatattacccagtacaatataaatgttatgtaaatggttgttatagtgtattgtttagggaataatgacaagaacaactttctatacatttgcagtacaccattgttttacccccaaatatttttgatccaaggttggttgaatcggaacccagagatacagagggctgactatactttaagaattagaattagctgggtgtggtggtgggtgcctgtagtcccagctactcgggaggctgacgcaggagaaaggcgtgaacccgggaggtggagcttgcagtgagccgagatcgtgccactgcactccagcctgggcgacagagcgagactctgtctctaaaaaaaaaaaaaaaaaattagaaggggctgtcaggcgtggtgtctcatgcctataatcccagtcatgcctgtaatcccagcactttgggaggctaaggtgggcatatcacttgagatcatgagttcaaaaccagcctggccaacatggtgaaacactgtctctactaaaaatacaaatattagccaggtgtggtggtgggcgcctgtaatcttagctactcaggaggctgagtcaggagaattgcttgaacccaggaggtggaggttgcagtgagctgagatcatgccattgcactccagcctgtgtgacagagtgaaactccatctcaaaaatacaaaaagaattagaaagggctttagagtcccaccactaatgctcttctgttcagtagtacacaagactaataactacgagatgttatgaacagggaaaagaagtaagaccaaaagaaatcataaattactttggatggaacttttagaatggcagatggagggataaatttgacattgttcaaaatcatagagtaaactctcaaaagtaaggggaacctaaggagacaagatgattaaatgtaataggagatactggaacaacaaaaaagggacattagatgcaatttgaggaaatctgataatggacttttgttgatttatcgatattggttgattaattgcaagaactaataaattgtaataccatactaatgtatgatgctaataatgggggaactgcggtttccaggttatataagaactctgtaatgtcttaaatttgtttgtaaatctaaaccttttaaaatagctaaaaattatagatacaatttctaaatgatttaattaacaaaaccagtttaattcttcagttgaaatgagcaaggttagggatacctgtgtgtttcagtgtaatatctgaaaggaaaagaatagatacataatttatatcacttctctctggacttagggtctcttgtcatatacatgactgggcatccatcagcttcagtggaggaaaggttaggaataatagtgtcagaactaacatgagaattttaggagattactgagtcactcaaaatgtctgggtgacccagctgatgagggccatttcacatgaaaaagattcctgcaacaccttcttttctttagcacatgatcgtttatgaagctcttttacattgttttatctttatagcaatcctcagaatagatcaagctttttttttttttttttttgagatggagtcttgctctgtcgcccaggctggagtgcaatggtgcgatc

SEQ ID NO: 1311 - DNA, 1071 bp, Homo sapiens
gagcctaaaaaaaaaggtacaggcaaaaaggtgtgaaaagaaactcatcaagagcaagagtattaaatgagaaacatatgccactgacagagttctcagaagagataaaggctgaattaaaaagagatggaggggaaagttttataagtcaaaaacttaggttaaggtttgtgaatattaaagagcgcttcagattgccaatgaaaggtcatagtagtttctataaagtcaaaagatcaaaaacttgacttaaaagagtaagatctctaaaaccaaaggtaacagcagattcttatgaaatgcaccagaaagctggaaagaaagaagaaataaaatgtgaacttatggaacaagagtgctaagggcctgttctacccaggtatgttatgaaatcaaattcatttagtttgggtgtttgttcctttatgttgggaagataaaaaagaacatataattcgtttcttgagtgaaccagtatttatgagaaataagctgggtgtgtaagaatttaagggatgaaaatattccaagttgattggtaattgaaaagtagatgaacggtgctaacacaaaagggaattctgtctagaataaatgaaaatatggtgacttaaagatagtaggacagcaataagactggaaattagaacaataaaataagaaggaaatgataacatagattgggaaaggataggaaaatactgaaacaaaatctgtgttgtatagtgatggtttcttgttctttcaaccgggagagtgttgtgttgaaggaacttgtattcattttaattacttgagtgtataattaagaaggcaagcacattttgctaagattttctttatttgcatgaattaaataatgatgttcagagtgatttgtctctaggagctgaaagactactacctttgtttcataagctgtaattatttgatttcaagtgtgagtttatgaagaagatagcacttgcggaaaaaagtgaattaccattatgtcgaaagtgatacttttttacatttggccttttactgtaaatcgtggaagtgaattttccaagcctgtgacttggaatt

SEQ ID NO: 1312 - DNA, 1031 bp, Homo sapiens
ttatatatttgatattttaacataatacaggtatgtactttagttcaaataattaatggttttgttgaaatcaattatttttctttactacacatcagcaaacaatttttctaaacactataaaaattaactttcaggaaccatttggaatggtcagccgtaagccatgcagccatcgtgcttaaattggtttttgtaaacgacttgtgtgtgtttcgtaaaatatgctttattttaaaattagggcttcctgttgcagctgttccaggagctctgagtcctttggccattccaaatgctgctgcagcagctgctgcagctgctgctggccgagtgggtatgcctggagtctcagctggtggcaatacagtcctgttggttagcaatttaaatgaagaggttagtaaaataatctctaatgtttattctttaactccatttcatttgtgaaagtttttcatgtttatttcattttgcacttgcctttctttttatgtacattcattagtcaaagtattttctgtatgtttctacttctgaataaaatctacatattgtttaggtaatactttatttccttaaacagtcatgtctctttatatctatatctatatatgtatattttttaacctaacctatttttcctaagaaaaatatggtgaagtactgtagtttggcttatctttttgttgttctcaaaggcaaatgtgatctaatttgcaaatttaactgtaaaacaattttgctctttgccttttctaattatttgcttgttcatttcatgcttatatgtcattgcattttttttaaatcttattttatgtgaactactctaatacatttttctttgaaggttcttccaaagatcttgacgaggcactcttcccgtctttcttagtaattttttctttgcagttattagtcattgtcttctaaaaatattttttaactttattcccccaccccttccttccttaccaccccctccacccagttaaataaaatttattgctaagttattttctttagtt

SEQ ID NO: 1313 - DNA, 1029 bp, Homo sapiens
tgtttcagaagagatcacaaaatggctcttcttcagatggcaacagtggaagaagctattcaggccttgattgatcttcataattataaccttggagaaaaccatcatctgagagtgtctttctccaagtcaacaatttaaaaatgggaagatgaagattgggggtgaatcacattgttcaatgtcatcacctatttgactgttcagaaaagtggggaccagagtttgattttttttgtttttgtttttttggggtttcttttttttttccatgctgttatcattccttggttataaaatgaaatggcatatgtaaaggcagagttgttaactgctatatttcatctgttctatagggaagccattttgtctgtttaaaatttcagtttaattttgctttttttttttttttttttttcctttcaacttagttgacatacgtgccttaaaaaggaaaactagtgttgctattgtgcatttactagaaaaaaggaattggttgtttagggcacactgttatatgggaattaaaatatgtttaggcaggggtgtgtaaaaaggttaagtttttgtttctcctgcttggaacttattttgaattactggcttgtcacctttttttctatttaatcaaataagatacatgatattgaaagaataaagcagcatttttagtttttactaccttaggctttattgctttgaaaacaacattggccttttgtatctcacaattctggtctagattcagttatgaatgtaggcattagttaaaattaacaagatgcagagtattaatttcttaagacaacaaagtgatttctgtaagtttgagccctatgtggaaagcattgtggaatcttaaccttttcgtacacactcttgtgggacgtatcatataaatgtcagcactaagtaatgtcttgtttgtggctgaatatttttcgtagatgtttttgaagttgacatgacttacgtgcatttaaatatatattgccatccttagtttgtaattaagatttggaatat

SEQ ID NO: 1314 - DNA, 1048 bp, Homo sapiens
tttgagtaataatggatcagggctttttaagttaggataaaagtccttattaaatgggtagatggatgaatggagatggatggatggatggatggatggatggacggacagatagataatataatctccttacttttcctttaattatctaagtgggggagtgtctaatttctaatacagaaaccttatccattctacttgttttttcttttattctataaagctataactctgcaagaaagataccagacaggacaaagggtcaatattaaacagttactggcaaatgttgagttttatatctctcagttgttgccagtggtagaagctaaaaagtggttcatttcaatcttgacagatagtcctctatggaagccctttgtgacttatgtgaaatgaatatgcggcctgacttcagaaccttagaagctgttagaaatattttctacagtcaacagtttcagtaacagcttgccagttgtgacgtgagctgtctctgataatgtttactctatcaaatgaggctgtagcactcttggatggatgtattgcctggtcaaggatggcatctgttattattggcacaaaagaaatcacacagaattggaaataaacaagtttactttgtatgtattctgcaagatattcaggaatgaaaacctgaaggaagatagacaatgtgttatttaatatttgggtaaataatatataatatttttatctgtaaattaggtagtcagcagtattttatttgatcatatattttattcgatcccaagcttgtgtctcaacaagggccacaatgattattaaaatcccttgtccttttttgtttgtatttgttcttttaacttatgccatacttctcaagggatatgtttctgtgcagtatattcttttataggatgttttctattttgcaagtctatagtcgtccctcctaggttaagtatgaaataactagtttcgtatcttattacaagttttctcagctgggcgcggtggctcacgcctgtaatcccagcactttgggaggccgaggcgggcg

SEQ ID NO: 1315 - DNA, 1033 bp, Homo sapiens
cttataaatgggagctgaacagtgagaacacgtggacacagggcggcagaggtggggaaagagaacatcaggaaaactagctaatgcatactaggcttaatacctgggtgatgggttgataggtgcagcaaaccaccatggcacatgtttacctgtgtaacatattcccctctcaggaaaaatagttttaactaaaaacaattcagaatgtattcctgcctttttttttttttagaatgaacaaaagaaaactccaaagtataggaatactgttttttataagaataaaaattttttaaaaagtataagaatactgttttatttagcttcaagtgcctcaaggaactatgtgcttattggattgtatctctcataacatctaccatgtgactggcccatagtagacaggaagaatatttattaactaagtgaatgaacttcatagttttagttcataattctcacaaagtagttttcttggtgagcatgagctgcttcagaattccctcatgttgccgtctttgtctttggacttcagtagaaaaattttcagttatttttcatgtcaaactttccataactcaattactatacagtcatatgttattaaatgattgggatatgttctgaaaaaatttgtttttaggctttctcatcattgtgtgactattgtagagtatacttacacagccttgagatgtcatactctgctgcacaccaaggctctgtggtgtagcctgttgttcctgagttaaaaacctgtatagcatgttattttagtccattgaaacacagtggtaaatatttgtgtatctagacatagaaaaagtacagtaaaaatagcatatgattatcttatggaatcactgtcatatatgcagattgtcattgactgaaatgttgttatgtggcacatgactctacaaagtttcctgaatttgtttgcatttcttattaacttgattctgctatgggtacatcaaacttaaagcttttatgtaattaaatgtaagttttcagatagccctgaaag

SEQ ID NO: 1316 - DNA, 1044 bp, Homo sapiens
ctgatgggagagaagaatagagcagattgcagtaggaacagatgtgttagaatttattaatcctttaacactgaaagtaaactattgttgattgcctcatggtgtgtttccattattcagtgccttgctacgtgggagtcattccttacatcacagaccaaccttcacttggaagaagcctctgaagataaaccttaatcccattgaggacttctgtttgatctttgggagacagcatttattaaccaaagttattctttctggatctgccgtgtccttataaagtggatgaaaaatgttttgtacccatctggaaaaccaacaacttgaaatctcaggtattccaggtcactgacatgaatttgaagatatatctatctgtatggatatatatctatatgtatatagatatataaatacagagagatatctggcttggttttaattatgttcttaaatttgtgtgccaataattgcatatagattttttttcttaaatatttgactgtggaacatgccattttaaatatgttgtaaggactgttttaataaaaagtttagtatgaagtggttggctgcagtgtattcttttcctcctagtagctcaagcctcttaaacattctaaaatgagttcagcatgtgttaacaagtatactgcgtattcatttttatttcattatcatttcctctgaaatactattcagtttaatattaggaactcaaagtaatatctaaaaattgacattattaaaattgataactgttcaaaaattaatttgttaaaagttaagtaattgttttccacaattaaaaagtttccaagatttaaattgttatttgagttattagttagaaatccttatataattatattcccactagtagatatatttgggctttgtaaaatttgtgcatattctttacaattcatacctagcttttatttgttaagatatacagtgtttatccagtttattttcccattcatttattgtctactccatgcaaggcacagttgtaggtgcttatgttctgtagtgatg

SEQ ID NO: 1317 - DNA, 1043 bp, Homo sapiens
cttttgtttaagtagattaaaggatttaatagcttcatatgcaatgcttaataattttttaacacagttaatgttcttctaaatactttgtatgacatattctaatataactcagtctatttttatcagtataaatttctactttggggtaagatacctcatttcaaattgaaagaccagtaggatgaactgaagactcactaacaaaaccattttttgttgttgaaaatatgcaaacctgtttttcatcttctactgggagatatgatgtaatgtttagatgttttataatcaattttgtatagcttacatcccagtaaacaacatatgttcccttttccttacatgagccatttctccagttaagttatggggaaaacttttttgtcacttaaactagtagacatttgtttaaatccttaaagcagttttattttttataatattgatgtggtctttattttgaaaatcatttatgagaagaaatctaacctcttcctggacataaataatgaagattgttaaaatattctgtaatgctctgcagaggcaatgagtgcatataatagtcatgaagagggcagattagtttaccgatatggaggagaacctgttggatcctttgttcagccctgtttgaggcctttaatgccagctattgcacatgccctgtttatggatattacgcatgataatgagtgtcctattgtggtaagcacctaatctttttcatgtacttattttgctaaatgctttgatatttaactctctgacacttggtcacaatcatacccatatacttcaaaatagtgtcttagatttataactgatttataatacatagttttcagaatgttttacttgtttaaaagcaaattaatttaccttatgaatttatttatgtaattatccttttacttcattatgctatagaatagcactttgcatttgaaagaaagcaaacttttgctttgttgttgttgtcttctagcatagatcagcgtatgatgctcttccaagtactacaattgtttctatggcat

SEQ ID NO: 1318 - DNA, 1069 bp, Homo sapiens
ttttattgtggtaaaatagacataatgtatatttaccattttaccataaaagttacaattttagccattttaagtgtacaattcagtggctttaagtacaatcacattgttgtgcaaccatcatcactgtccatctccagaactttgtcatcattcctaattgaagcaggaactcctcattatctccttccccagcccctggaaccactatcctactttctgcctctataaattcaattatcctagggacctcatataagcggaatcatacagtctttgcccttttgtacctggcttatttcacttagcataattattttttatcaatacataagagttgtacatacttagcataattcttttgaagttcagccatgttgtagcagatgtcataattttattcctttttttgtcttttttgtgataaaaagcatgtaacgttaaatttaccttagccattttcaagtgtacagttcagtagtgttaagtatattaacattgttgtggaacagatctctagaacttttttaccttgcaaaacaaactctatactcgtgaaacactagttcttcctcctctatccccactcttcccaggccttagtaaccacctgtctgctttctgtccctgtgattttgactactttagatacttcatatgagtgaaatcatgcagtatttgttcttttgtgactgattttttccacttagcataatgccaaggttcatccatctcatagcatgtgacaggattcccttctttttcaaggctgcataatattccattgtatgcatacattttctttattcattcattgtcagtgggcattttattgcttccatctcttggctcttgagaataatgctgcagttaacatgtgtatgcaaatatctcttcaggatcctgctttcatttttatgtatatatacccaaagtggaatgctagattgtatgttaattctatttctaattttttgagaaacttctataatattctccataatggctgcaacatttacattcccacaactattcaaatttctctgcaactttgctaacacctggtatt

SEQ ID NO: 1319 - DNA, 1044 bp, Homo sapiens
gaactcctgacctcaagtgatctgcccacctcggccacccaaaatgctgggattacaggcatgagcctccacgcccagcctgcattcattttttaacaatagtttcactgcgtatggtatttttatctggcagtttttctttctttcagcactttgaatatatcatctaattctctcctggcctataatgtttctcttaaaaaacctgctgctaagactgatggagattcccttatatgtaacttgatgcttgtctcttgctgtttttagggttctctctttgacttttgacttttggtagtttgacttttggtagaaaaaagtatatattttaatctttattgttgtttcaaaactttatttattttgtgtggagaaatatggttctattgattgttgaaaccaacaaatgtttttccccacaactaacatatgttttgagggcatcctttgtgtgacatactacattgggagtgtaagtaatacagagaaattaatcaaaataaaatgtactttggtgaagatcgttttgggttgactctatttaggctttttcattcttttttctcttttttttatgtgactggcttatttcaaaagacctgacttcaagttcagaaattctttattctgtttcatctagtctaacattgaagctcttggttggattttttatttcatttattgaattctttagttctatgatttttgtttagttcttttttatgatatctctttgttgaaaacctcatttagatgatgaattgttctcctattttgtttatattgtctgcttgtgttctcttgtatctcactaaactttctagatatcattatgttgaattctttttcaggcctttcatattttcttttcattgggatgtgttactggagacttattgtgtccctttggaggtgtcatatttccttgctttctcatgtttcttgtttccttacattgatatctgtgcatctggtataacaatagcttcttccagttttgtagatagctttcatagggaaagacattttctcacagatata

SEQ ID NO: 1320 - DNA, 1068 bp, Homo sapiens
tggtatttatatcataaataactttttaattttttttttttttttgagatggagtcttgctctgtcccaggctggaaggcagtggtacaatctcagctcactgcaacctccacctcctgggttcaagcaattctcctgcctcagccttccaagtagctgggattacaggtgcctgccaccatgcccggctaattttttgtatttttagtaaagatggactttcactatgttggccaggctggtctcgaactcctgacctcatgatccaccctcctcagcctcctaaagtgctgggattacaggcgcgagccactgtacccagcctaatatttttcatatttattttaaatgagtattacaaaagtttaagtggcatatcaaattcatattttcataaatattgcttagggtaagctaaagtaggcattgtttcaaacagttaggtattttaaattagaaagttattaatagttcaggtggaacataagtttgacaaaaccatgaaaatgataggcaaataactgaagcttcaggaacacagacctataggataaagctcagagtgattagtgtgacacactggaccttctgaaatgtacctacagttctagactcatttctgctgctgcatacttcacactctgaattgctacaactgagctgcttgtaggggctattttgcacagctgagcatttatccattctttctcttgtgcctacaatgccttctcccctttctttgcctggctaactcctacctttaagactcagctcagtcttaaagtctgcctctaccagaatatcttcctaacatcacaggcataacatttaaacatttgtgccttcttctgtaccaccatagtactttgtacatatcttttccaaagtacttatattatagttaaatgctcatttatatgtctgtttacacttacaacttaagttcctagaaggcagcagctgtgtttcaccgctcttccattcatagtgcctaattagcaagacttaaacaaatgatatttgtttttatgtgattggttgtcaactgattttatatcctgtaagtac

SEQ ID NO: 1321 - DNA, 1035 bp, Homo sapiens
ctgggattataggcatatgccacttcgctgaactcatttgtgtttttgagagtgaaataggattatggatggaatttggcactataaaaatataatatcctttttatattttttatattgaacattgacggttttaattcttttctagcaatctagacaataggtctggaacatacatgttgagatctgtagttcttatgggacaaaaatttaaaagcatttctgttttcagcttggtatggaaatgaatcacttagctagtgagactagatgaacaatgaacacttgtgtcttaattttgtaatcttaatcatattccctgttcataagatgaggaaatcgtatgctttaatgtactttgagaatgtttgcaccttgcagatttttagattttacttttaaaagcataccttttttttttttttaaattgaaccttatgtaaggccgaggtaattaaatctttgaattatgcagagaataaacaaataaatgaacaagcaaaccatcagagggacaaaagagtagtagtttggcaatgagatgtatgcctgcctgtaaattcacgtttctgaggaagtatataaggtttgtttagttgaagatagaaagagaaaagacaatgatactgccattattgaatgaatgaatgaatgaatgaatgaatgaatgaatattttgagaatatgctcaggacactaagccagatggagaagatggattctttttcctaaaataggtaactaagccctctatctttatgcatcttacctttgtggagaatacattttcagtaataaatctagtgacattttctcaatcttcattcaattctatcctaaatgtaataatatatttgcctttagcctcattccatctcctgaaactgggtttttgtttgtttgtttgtttggcttctctgaaatggtacgcctatacttgcatttctgattgtccctttggtagtttgtcaatccttgctcactctcttggctatctcatccactgccatgtcatatctgtcttctctaggaaga

SEQ ID NO: 1322 - DNA, 1033 bp, Homo sapiens
tgagaaggcctggcgcagtggctcacgcctgtaatcctagcagtttgggaggctgaggcaggtggatcacaaggtcaagagattgagactatcctgaccaacatggtgaaaccccgtctctaccaaaaatacaaaaattagctgggtgtggtggcacgcacctgtagtcccagctactcgggagactgaggcaggagaatcacttgaacccgggaggcagaggttgcagtaagtggagatcacgccactgcactccaacctgggcgacacagtgagagtctgtctcaaaaaaaagaaaaaaaaaaaagctactgagaaggagccaccattttgctttaaaatagtgggtttttttcctttttaatgaacactggagctgaggatgcagattacatgagttatttaataagttgattcaagagagagagagtatattagaaatggtaagatgatttggtgggcaaaaatgctttctataatttgaatatgggtttaatttaattattaactatagacagaattacttactgagtataagaagtattttactgtctgggcacagtggctcatgcctgtaatcccagcactttgggaggccgaggcgggtggatcacaaggtcaggaattcgagaccagcctggccagcatggtgaaatcccatctctactaataatacaaaaattagctgggcatggtggtgcgcgcctgtagtcccagctactcaggaggctgaggcaggagaatttcttgaacacaccaggtggaagttgcagtgagccaagatcgtgccactgcaccccagcctgggtgacagagcgagactccgtctcaaaaaaaaaaaaaagaaaacacacacacacacacacacacccacagtatgaatgaaaaaaataaaatacttctttttttttttttttgagacagagtctcactttgtcgccaggctggagtgctgtggcgcgatctcggcttactgcaacctcccactccctggttcaagggattctcctgcctcagcctctgagtagctggg

SEQ ID NO: 1323 - DNA, 1363 bp, Homo sapiens
ctaagttcaccacattttgaacatggtagttttagactgcaataatatttagacttacattattacttactgctaagtaaaatctaaatcctgcaaatgcacagaattcaagctgaaatataatgatttatgtttagctcacattgaagtattggttggttacttatgtattaatgcagtgtgcattcacatttaatcaggtttagtctgtttctattttaataattttaaaaaattatacaagcaaattagatattagacatgttagttacaatggtaacacatttttaggtgtcgaaacacaattttcaaaattcctaatgaaagttataaaaatgtaaacaagaattgtaaaaatggacaaagtagtcaaatatattttcaaagcacaattttattagacaggcataatttacattttgcttttctagtgggtttgaaaatgtttattggagattgggctatgtagtttataatttttaattcataaaaaagtaatcatacatgagaaggtagacctgtgccctaggatcatgtcacatatacagataatgccatttccttgtgtgtgtgatgtgtgttttgatgacctccacaggccttactgtatcaagcttttataatgatgactccttcattatttaaattcctatactttttatttgttatcacgcaactactttgttcaatgtgaaaatgtgctaactcatgggagaagagtgccaattgatagttcttttagcaattaagaatatggtatttgggaagaaaagtttgaaatgcaacaaatggatatttcaacacagtagtattatattatcagttctttagtaagtgattttagagatgttgtaggctacttttacggtggaatatatagtatagagatgcaaaacttaaatgtttacatcaatttatattgaatgtcacataatttcatggaaggaaaggtagcttgatatttagattctaagatataatctgaaaggaaactaattatgttctctacacttactgtaatactgattattcttacatatcaaattattgaactttaaaaatttcattgtatagtcattaaactgagttgggttttttcttaaagggtttagcatcactcatttgatttacacattcacattataatatttaattatcatgggtgtatgctttacataaaaaaggtttataaaagttatttatgctatattgaaagtcatcttaagaatctccaggttatttaaagtagttataggagcagagaacaagcacctttatcaaaatctggtcctatgtgccttgctttaccaaatacctgatttttctggagggtgttcctgtaattcacaactgtagacacatg

SEQ ID NO: 1324 - DNA, 1093 bp, Homo sapiens
accctgtccgagctgccggtgcctcggggtcgcggacccgcatgccgccgctccgggaatcgtcctccgctgctcgggcttgcggcctccggggcccgtcctctttctttcccgcacctgccgccctctgctctggccgcctctgcaggccctgcggcctcgaaccccacgtgcgcctccgccgcggggaggaatgtgcggggctcccccggcggcccgcccgccgcgcccctcgtcgccgcagcctcgcctcgccttcgccgccaggccccgcggagccgtcgccgcgcttgtcaaggggctgggaaccatccctgctctcccatatgttgctaacggggtggcgtctggcgcggggatcccgctgcggccccgtagtacgttcgctttctgtttccacgtctctctgcgtcggtgctccggctctgggctgcttacagtaaaccctgaccggagatgggcttccctcacttcccggagtcggaagcatgacggcagacacctggggcctacattcgaacctgctagttttcaaagaaaagtcatcactgtgtgtcttaagatcaaaagtattagaatcagtcatggcctaaggatcggaggaggacactttgaagggaagaaaggtttgctttttagaaacagttgtcatcacagtaaactttatgcagtgtgtagttaaccagctggggacgtaggatttttaattgaaaaacaaaacaaaacaaaactgttttatgctaacatttctccgttgctacactgtgtggtctttgttgcatccgctgataccgcgttctgaaatagaatggaaaggtgatatatatgtttcacttacctgaagtgtgcagaaattgtaccattaattccatttctgtttatatcttattggagccgcgatcaactgctagcacagtagtaaatgtgtaagtaggccaccattgaggatttgctgaattcagttgaaaaacgtgacaaaattttatgacatttcagaacacggcccagtcaatatgccaaagtttagaaaacttgagacatatgtaatgactttggaatatatttttagtttaacgtttattatatgttatag

SEQ ID NO: 1325 - DNA, 1033 bp, Homo sapiens
aagagcaattgttctgtttgaaaacagcataagtaactaaagaataagttccacatattatattcagtaaatatttaatcatatactgtatactacttcactgatgaaagtaaccatattagtgaatttgcttttaaagcatccatatatagaaatagtttttaggccaggggcagtggctcacgcctgtaatcccagcactttgggaggccagtgtgggcagatcacttgaggccaggagtctgagactagcctggccaacatggtgaaaccccatctttaccaaaattacaaaaatgagctaggtgtggtggtatgtgcctgtaatcccagctacccgggaggccgaggcacgagaatcacttgaacctgggaggccaagattgcagtgagcctagatcacgccactgcattccagcctgggtgatggagtgaaactgtctcaaaaaaaaaaaaaaagaagtttttagttacaggttttcatgtatgtaacattcagtgtaggtatttaagacagctgaaataaaaataccttctgacattttcaaatactagaattctgttttgttttattaaagcattaccacttgtttttaagcattcctgttagaggctaagagctaaagagttatttacagtattcaaattgaattttccttatcttttaaaatgctcatcttaaaatatgatctttattgttttggccatacaattgtggaactacatctctgacagtggaaaatgtatagttctttcagaagtttgtggtaaaatgactttaaagatttgatagaaagtaaggcatatctgaattgcatggtcggaagtacctgaaaaaagtaaaattgatatatcatttgaaaatgaaatgcatatccctggataagcagagcaccagattttttttttcttggcatccctgattttaattaaataggagtcagcaaccgtttcaagagcaggacccaagctctgaccctttgcactcttcacctgcaaggatggctgaagtagtggcaggaaagctctctgg

SEQ ID NO: 1326 - DNA, 1052 bp, Homo sapiens
ctataagtattttgctttatttctgggttatctgttgtgttccattggtcttcatgcctatttttataccagtaccatgcggttttggtaactgtagccttttgtataatttaaagtcgggtaatgtgatgcctccagatttgttttttgcttagtcttgctttggctatgtgggctcttttttggttccatatgaattttaggattgttttttcttgttctgtgaagtatgatgctggtattttgatgggaattgcattgaatctatagattgttttggtcagtatagtcattttcacaatgttgattcttcccttccatgaacatgggatgtgtttccctttgtgtcatttatgatttcttttaacagtgttttgtacttttccttgtaaagatctttcacttccttggttaagtgtattcctaggtgttttgttttttttgcagctattgtaaaagggattgagttcttgatttgattctcagctttgtcgttgctggaatatagcagtgctattgatttgtgtcattgattttgtatcctgagactttactgaatcgtttatcagatctcggagctttttggatgcgtcattagggttttctaggtatacagtcatatcattggcaaacagtggcagtttgatttcctcttttccaatttgcatgctcgttattcctttctcttgtctgattactctggttaggacttctaaattttttaattactatgggtacaaagtagatacagatatttatcaggtacatctgatattttgatacaagcatatgttgatacaggtatacagtgtataataaatcagggatactggggtatccattacctcaaacttttatcatttctttgtgttaggaacatgccaattccacttttattttattttattttttattttttgagacagagtctcgctctgtcgcccaggcgacatacatagtacagtagtgtactccagcctgggtgacggggagactctgtctcaaaataaataaataaataaataaatctgttcagactaatgtcctagagt

SEQ ID NO: 1327 - DNA, 1050 bp, Homo sapiens
agctcatgtttgcataggacagcttactacactttgtagagctgatagcttctaaatattaatagtttttaatgacattgctataaattgctagtgtctgataagaagcttgattttagattaagtgatttcatatttgtactggttctaaggtagggaaaaaaaaccaggtagtttactaagtgataatttgtttaaacaatgtaggtgtcgttcaaggaatgataacaggaattcgaggattatgcaatggtctgggaccggccctctatggattcattttctacatattccatgtggaacttaaagaactgccaataacaggaacagacttgggaacaaacacaagccctcagcaccactttgaacaggtaattctcattcaacatgatcaaattgtatggttcatttggctagattaaaggctactggtttttggtcatgaaagcttttatgtgagattctatttgagattggataaaatgcttaaaaaccagagtttaagggactgtgttcttctacataccaccttgtgaaaattggctgtgcatattttttttccacttgagaatgaaaaattttaagtacctagtttgtcaatggcatatgtaacaaaccatttctctttactactagtctcttttgaaacttttctaatatcacagttgtgtatgttaactaacttttcatacaaaaggcaggcttatggtaaataacctttgttcactgtttgctatatttccctcttttcaactgaaaattaatgccaaacaatgctgatcattttggccaatattagcagctcatcagtttcctggcttatttagcagagttctgtacttatcttccaacccactaagactacttttaaataaaagaatgtttgtgggctatacacaaaactggcagtgcaagcttctgctaagaatgaatgtaattttgggctaaaacaaaggtctctttttcttggtaacctgtgtttttctcacttccagtcacttgaaattataattaccttcttgaaacaaagaaatggtaatttattttgct

SEQ ID NO: 1328 - DNA, 1058 bp, Homo sapiens
gccattcttctgtttatttcacagtctccttccacttctgtccttaaaatactaatattcaggccaggcacagtggcttatgcctggaaacccaacactggaggctgaggtgagatgattgcttgaggctaggagttcaggattagcttgggcacataggaagaccccatctctacagaaatttgttgggcacgatagcttgtgcatgtagtcccagctattcaggaggctgaggtgggaggatcacttgagcctaagagtctgagtctgcagtcaactgggatagcaccactgcactgcagcctgggtgacagagcaagaccctatctcaatcggtcaatcaatctcagacccatctgctacacaactaatgtgtctttccctttaaactcttcggtacttcctgatatagtccaaactctttgacataacgttttagtctcaatctggcttcagccttcctctctttacattccctgtctcctactttgctgttcagcaacatcaaaccctgtgtgcttttccatagactgtactatttctactatatctggaatttcacccccattcacctactcacccaaacaaaacaactggtcaatttttactcatccttcacctcagttgtcaccactctcagggagctcccttaaataagatatgcctccttggtgttatcataataccctctgcatatttttaccttgtggtattttaattatctgtttatatatctaattcttccaccatgctctgaattttttgagtatatggtatatacttagtacgatgcttgctatataacaggaacacagtgaatatttgaatgaatgaataatcttggctaccaatttgctgtgtttccttgtccctttctgcatatgtggctttgtcttttaagttctttataaaagatgaattgagataaattgctaaagctccttctaattctgaaataacttaattcttttttttttttcttcgagacggagtctcgctctgtcgcccagactggagtgcagtggcgcaatctcggctcactgcaacctccgcctccc

SEQ ID NO: 1329 - DNA, 1064 bp, Homo sapiens
aaaatatttcaaagccaactttagttactaagtgaaaaatgtgatgttaagcccagtacattaaagatgaaggaagatgttaatcaccaccaccacccctcctccccacataccttctctgaactggatcttttgaacgatatatatagggaactaaattagcaagaaaaaatgtaaagaaattaaagggtaatttgtgacttgacaagataaaagtagaaatgtttcagaaaaattttagggcatagggaatacagttgcattaaaattaccatttgaggtttcaaaattgttatttgcctaagctgtacatctgagctttctgattcagtgtgcgtggaaggggcccaggcatatatatttggacaaaactcacaggtatgtatacctctgaagaagaaccatggttgtacaatgaaatgtgttatcttgaggctattaagtttctttctcatcaatcatttgatctttgtgtctctgtaggtttttcaataaaatgggcttgacattaactctctgcctacataagttggagttgtgggctctttcctccatctctcttcgtattacttatatactcctcttctgatttcaggctaaatttattgtgaagaaatcagaagatgaagaagacgccgctaaagatacttatattattgaatgccaaggaattgggatgacaaatccaaatctatagagtatttgcctcttaaatgatacctcattgatatattgcactatttcataaatactataaaataatgactaggaagtaacttattaaaggctatgacttaaatttgaagatgaagtacagtgttctaggtttgctgagaaggcttcattaaattaatctcactttgaatatctcctgagagatggacaatgaaatatcagttggtggatatgtgtgatagctgatttcaatattgaagtattgaaataaaatattctttacacctgaagtaaatacatttttcttttttatgtaattaattaaatcagggatatagatttgatctgtaatttgggtataattctaatctttgctgaaatcacatctc

SEQ ID NO: 1330 - DNA, 1032 bp, Homo sapiens
ccacagaaacaaactggtatacgaatttgaaggagaaggcagagagctttgagaacataaggcaggggcctgatcttattgggttgccaaaaagactgtctcactttagagctgtgatcccaaggaaacggaggaggtggcatctaaacactgcgatgatgcaaggtaggctcaggttgagtctggtcacttcataggccattcccagccccctttagagtccttgaagtcagtgtctttaagctccataatggagatttcagactatctctgtgccctcgtatatgtgcaggttcctgtgcaaattgtaagcgttaagtaaatatatatgctgattgaattacagtcatctgtggtgatttgtgctctgttccacctcctgctggctgcgttgtatcccatgttggaagtggctgagtgtggcttcagaatagacacagaggaagtgggagagtgaatatttggatgagggagtatgccttgactaaatactttctataagcaaatacaaatcatatgacctagagcttttattttttaaaatcagtctattgctttctcttgaagcacatcattggtgaattgactctatttggcttgatgctttcatacaactgggctgagaaagttcattttacccctcttttgggcattcccactatagttgtagtgatatagtcttttaaaatctcattcaccaattattaattaagctgaattaacccttttgggtagatgcattcttatccttatatgtttaaagtagctgttcattaaacataggttttttgctgagcatctatctgacaggaggcatctgaaggtttataaaggtatgggaagcttggttacttgagctccagaagctttccactttagtctaaaggaaactaattacaaaagagctgtgaggggcccatcaggatgtgcttatgagtttctatgagggagccagactgactgtgtgaccttgagcaactaattctcagtgcttttcctgtaaaatgaaaatgggaataataatggaaccta

SEQ ID NO: 1331 - DNA, 1049 bp, Homo sapiens
tgctggaacaagaaggtgctttggtgatttgtgttgcgaaaattcgctcagactactttttttttttttattcctacctttagggttccagatcagttttaccaaacttagtgaagtagggtaggtgccaaagtttttgtactctttacggtatatttccagtagccttagttgataaatatggttttgaataagattgcagtcatttaccttaatgaacatagtaatagttattattttgttgaatgttatgaaaagctcttaaatacctgagttaaaaccaatttgccattatttttatttttaaagaaaaattgttggccgtgtgggtggctcattcctgtaatcccagtgctttaggaggccgaggcaagaggatcacttgaacccatgagttagagaccagtgtgagtaacatagtaagacctggtctctacaaaaaaaaaataaaaataaaaattagtcaggggtagtggcacacatctgtagtcctagttgcctgggaggtttaggtgggaggattgcttgagcccagcagtttgaggctgcagtgagttatgatcgtgctgctgtgacagaatgagtccctgtctctgaaattaaaaaaaaaaaaagaatagaaaaattactggttaaatgggtgtcagtcagatgttgatgaaatgcccagagtacaggtcttggtctgtttttctggtgttattgctagttctagacagattttattctgctgatttcaggtgaccttttaagccatgactttagaattgaattttcatgtatctctgtttctttagatgagtaaaatgattcctgtatagccttatgttaaatctgaaaagctgagattctgtttttttgttgttgttgttgttaggtacaggtcacgttcaactttgggccctgcctcctgaggcatgtggttttgctctttcatgaatgggagatggttttgtcctccctactaattctcaatacagtttcgtcttgtaggtctcaatgatataagctctttcttttattgtagctggtacatatatgtcatagat

SEQ ID NO: 1332 - DNA, 1025 bp, Homo sapiens
tattatatataaatatactatattatatatagtatatataaatatatactatatattatatataaatatatatattctctcatcaaatattattaaggacctattaagtagaaatattaaggaagaaaaaacagtaaaagatgcagggtttttttggggggctaaatatctccctatgataaaaggaagacaaaaactcataagaataattgatttttcttctcctaacaaagaagttaatcactatgatctattctgtcatagttaggtctagttcccaacaggttctaactataaatttgttttatttcattttgtatacatataattttacatacaaaactgatgtaaattagaaatcaaggcatcttttgtggggctttttcatgttattctaagtgtttttttagttccagtaagacagtcttaatgcaatataaccagttttataaaaagatttctagatatgcattaaacatcaaaggtttcaagctgtctcttcagattagtgaggatcatttctgtaagtaggagttccagaaatgatgagtagagtttatcaatttagcatggaaaaactaattcaaattctgcttttagggattacaacatggattttttgactttgagacatttgatgtggatgaatatgaacattatgaggtttgtacatttaattttttttacaaaacataatttcatgttgattaattttttccccctgtcacactcatgtattgcaaatcgagtgggtgctaaataaaagcattctggagttttccatagtggtcagttttgtcctttcagccttggttatttcctttgaatcaggagtcaccaaaattttattttggaaaaacaacatatctatatatattctctcatttatatacaatcactttgcacctttagtttataagaaaaatctagtagggtagtaaaattatgttacttttattttagaaatcaggttttatttaaaataaaactgaatttgtaccttttatttatttatttttgaggcg

SEQ ID NO: 1333 - DNA, 1028 bp, Homo sapiens
atagtgggcagtcattatttgtggaatgaaagaactaatgagtaaatgtgtgaataatactaaaaacaggagtatagcacatttcaagatattttatatgatctgttttcagtggaaagtgcctaaaacatgttgattaagaatccattctgattttgcagtaatattccaagggacaaatttaccatggtagacaacttcttcaaatgatgtttcttttatcagcagccaatctatgctgcaagagtgaggttttttttttttgtttctaagtcagttatttacaacacagattgctagatgttttaatctaagaccagttctgtatggaacatcaatttagtttaatatgtgagtggggacctatctccaggttgactctgtcatccttcactgcataagtaaattttcagattgaccaggtggtgtagagtcctaacaattgctctttagcacctaccttgagaaatagtaaagtttgttaggcctcctgtctctcagcaagtcacattgggtcaagagcaggagtcaatattgttgaacactgaagttatgatgcttcaagactttgtttggattagaatttgtacagcaaactaaaatgtaatctggatgctgcttggtctgccttctttacatgttggtggattatggaactggaaataatgggactgccataggactggggtcaagcagtcctcagaatgcaagtatgtgggcatgtcctcaccacctggagcagttatggaagtacgcctcctgtggcaatttgaatattggaagaactattagaagaagcattctcctggagctgtctggtagtgttcattacaccactccaaagcctcaagtttaaggaagcaaaattacttcctggccaccgcaactgcaaaagtgaggggacccagtgtttccgtatctgttacacccattgctggttcaaagctcacgttggttaagtctataaaatgttttgagacttaccctgacctaaacaattccccatggcttttttttcttcctcttta

SEQ ID NO: 1334 - DNA, 1040 bp, Homo sapiens
taagtgataacttgctttatagttttaatttgctttttcttgatgactaaggtcaatctttgtatattctagatactagtcctttgtctggtaaatgtttttcaaggtttttttcagtctataacttgtcttttcatcctcttaatagggtcttttacagaataaaagttttaaattttgatgaaatcccttttatcacttttttctttttgatattgtctgagactcttagtttagccctagactcaatgatttctcatatttttttttctaaaaagtttatagttttacattcacatttaagtctgtgatggattttgaggtttttgtttatttcataacgtgtgagacttaggtcaagcttctttttttttggcctatgcatgcccagttgcttcagtaccattttcgttgaaaattcagtttctccactgaattttttctatagcagcatcaaaaatcatttggatatatttgtgttgatctatttctttgttctctattctgttccattgacctatgtgtctccttccttcaatgccacactctcttgattactggacctatatagtgagccttaatattggaagagtgattccttccactttctccttgtttaacaaaatattcttagcaattccactttcttttccttttcatatacattttagagtaagcctgtctaaatctacagataatgtttctgggattttaataggaagtatgttaatcctctatatcgatttggggagaattgacatctttactattgttgagtcttctaatccataaacatgatatgtcttttcatttatttagatcttctttgatttctttcatcagcattgtgtagttttctggatgcaagtccttttttgttaaatttacacctaagtacttatttttttttagcaattataaatggtatttatgtccatatgttcattgctggtatgtagaaatacaattgatttatctttttctttctttctttttttttgagacggtgtttcactctttttgcccaagctggagtccaa

SEQ ID NO: 1335 - DNA, 1040 bp, Homo sapiens
atgctttcagaaattctctaaacatcttcctagtgaatcttccacttgtaccacagcatttgaagaactccttgaatacctgttgccttcccgccccctgcatcttggttactgcttcccatctgtcttcctttgatagcaaggtagaccattttgttagcccacttctttaggccaggaactgtctctgtttccataatagctctgggctggtggaatagaaggtacacaaaacagattggtactcaagtcatggctagagtaggcctaggccaagctagagagtgggttatgtttctatttggagtgaccaaacagtggctttggatggactttggggtcagggttgagttttttgggaaaattgtccaggatggaagaaggataaagataaagagttcggttggtgtggagatgggattgggctgggcttagggaagtgaaggaggacaggtcagccacacacagaagcctgcacaacagcttccattgtgttctggactcagaactaggaatattcactataacagtgtgactgacttgaatttcattagaggaatattaaaagcagatgtaaaaaaagacctgtgaaggctctagatcagaatcaactgtaacttggctcataataagccaagttatttcgttattttcttatgtcccatgcctggctagcctaaacccaactaacccagggcaaggacatggctgaaaacaaggaccccagcactggctatacttcttaaggctctattcaaaccaagacacatctcttcctgtcattttaaagcacatgccctttttagcagagggtcagtaaatttcatgctgtcttagaaaatgcactatattcttggagaatgtactttgagctggtgtgttggcttcataagatttgatttttaaatactaaatgcttaaaaatacatgttttacttcttttgtttgagatgaggcttttagggagtaatagacaccacaataaaagctagcatggtttgcattttcaataaaaaggaatttgcgtgaagtgctgcttt

SEQ ID NO: 1336 - DNA, 1030 bp, Homo sapiens
gtatttttatcctctagtgcttaatagatacaacttatgttcagtaattatttgttgaatgaattgaactggtgggacagaaggtcaattcgttggccaaatggtgtcatcatttgtttgcagaggcctgcagggccagttaggcaacataagagagcaaactagggggttggaaaaggaaatagtggggcttgtggtgagctgtatctgagcctagattaaacaccagccagagtttttgagctctgtggaagtaaaggctttggatagaagactaatgaatatattctccatatgaataatagaaatctttaaaatgttctagactatttctgttttccagttcactgggtactgtgattcactaaataaatatgtaaataaatgaatatatatatgtgtgtgtttatatatataaatatatgcacacacacatatttgcccctctatattgatgtacatatgaaatactttaccctataaaaaagttggtttaacaaaggtcgcttgtctaatgtttatttgctacatctctgtttattgataattgatggagcttgcaaaaacaactttgttctaagttatatgcagtttgaagaatttctgatttctgttagtgataacatgcacaactttactaatcggaacaaaagtaaaagttaaatattctcaagaaagcactagctgagctacacacacacacatacacgcacaacatacctttgtggcattcttatagctgggggacttaactggctctgccctctgactgcttgccagacttagaagaaaccgagaaaaagcaggtagaaaaatgtttatgctctaattgcgagtgtggtagctggcgtccctcaagtggaatgtatatgggcttcaaggcttttgaccaacttcactggactttcttagggtcttacctcttttattcgcactgtgggttcaggtatatttatagtatagtgctctgattcttgatcatctcacacctattttgaagtattagcatgaaccacatacaagaaagtca

SEQ ID NO: 1337 - DNA, 1041 bp, Homo sapiens
tgtgtaagcagagctcaggatgcatactctgtttctttctcttccccacccctttgtctttcctattccctctctcttctgctttcttactaattcttcccctctgtccttttcctcctcttctcttcatttcccctgtgagtgctcttttacattctcttccttcttcatctgtctctcatattttctgtctctcactcttgttcccttcctcagcctcttactctctcttatcttctcctgaactcccttttccttctcttgtctttgcttcttgtcgcttgggcttgtgctcatgctcttttttcctctctcttccttcttctgtccccctatacctttcctgtcttattctttgttttctcctgctcttttcctttaccttttaaccctttatctgtcaggctcaatctctcctcctcctcttctcttaacttctttagctctatttcttttttgtctccctttccaagtctctctttccttccttcactgattctccttccctgagctctccctttccggtgcagtttctctcactctctccctgtcctttttacagccatcttctttcatgtactgtctcttaggcctcttgttatgtcttttactctctgtccttaactgctccccctttctccctggcttggcttctttctttagcaggcacacactctttctttcacatgctcttgttctgtttagatatttattgagggtccatatgagtcaaatacttttctagttctaatgatgtaaaaatgatctaatgatgtaaaaacatgcctcctgccttgccggaacttgtctcttgggcaaacagttctgtaaaaatacaataatagctatatattgtgacagttgccaaaaaggagatgtggagttctgtggcagaacttgctgattttagttataagcaagggatatggttatttttgaaattataaaaagtgagccaaaaaatactcattgtacattttatagtatagagcagtagatcctatatatctataaattcaaacagcttgacagctcagataa

SEQ ID NO: 1338 - DNA, 1992 bp, Homo sapiens
ttttttgtcaactatgacatttttgaagaatcagctggccgggcgcggtggctctcgcctgtaatcccagcactttgggaggccagggtgggcagatcacgaggtcaggagatcgagaccaacctggctaacacagtgaaaccctgtctctacttaaaaaaaaaaaaaaaaatacaaaaaattagctgggcatggtggtgggcacctgtagtcccagctacttgagaggctgaggcaggagaatggcatgaacccaggaggtggagcttgcagtgagctgagatcgtgccactgcactccagcctgggcaacagagtgagactccgtctaaaaaaaaaaaaaacagcaacatgtcaatgctttttgtgtttatttataaaagttttaaaatattcaaataaaaataccagtaggtccttttattctgaggaggaagtagtaaaaattgattttaaagtttataaggaaaaaacaaacaggaggaatagccaagtaaatcctggaaaagaagatgtaaaatataaagcctttgtaatgaacataatgagatacctgaaagagcaagaagactaatggagcagattaggaggtccagagatgggtttatatatatatagtggcttactaatgataaagacagcacctcaaatcagtggaaaaaagatggcttccctaaaaactggatagccatttggaaaaagataaatttagagctctatgttatactatatacccggaaacatttcaaatgggttagtgttttaaaagtaaaacatgaaaccatgctagtattaaaagaaggcatggctgaaatatttacggtagcatgagaatattaaggggtagctgtggctcaaaactagaaaatcagtaagagaaaagattaatgaattaagctacatttttaaaaagaagaattttggcataagaagaaagcatcataaggaaagtcacaagacacaataaattagagtaagtattggccacttagatcatgaaggactaacatttctaatataaagagagcttctaaaaataaaaatgtaatttaattaagagactaacttcctgatagaaaactgggtaaaagtataagtttatttaagttacaggaaaagaaatacaaatttaatgtgattaattaatttatttttaaagacacattcagtgtcatgatcggactataacatttagcaatcaacagcatggatgcaaaaaataaaatcttatattaaaacccttcagtggactgttttacactttccacagaacataaactaagataacctgttattaattgttacataattaatcacaaatatagttttcatgttttttgcccatatacacaaatactgtctaaaacatgtcttctttgtagcagctaggccctgccaccactgtgcttggctgaattcacaaatccgttgtaacctgtagtttccctgtcacttctctggctcttctctcctgctaaactttatttcctagcagtaattaaaatctgctactgccatagcttctgcagctattggaactgccacagccaccttggtttcatagtttagaaaagaatttgcctccaccaccataggggccagatcttctgccaccaaagtttccttccttcatgggttcagaatttgaagactgttgtaattgccaagatcattgtagctttcagcacctccaaatttgcttccattattacaaaatccattttaaccatcccactgccaccatatccaccaccaccagagctaccaccaaagccaccatgaccactaaagtttccaccacaaccaaaattgccattcccaccaaaaccacctccacaaccaccaccaaagtttccagaagcacttcacccttttcggctagatgaagcactaggcatctcttgatttgacacagcttccctaatttcacaattgtggccattcacagtatggtatttcagaatgacagtcttatccacagtcatgcttacaa

SEQ ID NO: 1339 - DNA, 1033 bp, Homo sapiens
ctcactatgttgatgaaatcctattttagtttgggttgccctagagacatgattcatgtccccctgtgacatggattcaagtgcaagtagtttatctgggaggtgatcctaacaaacacctgtagaggagtggagaagtgagacagggaagggaaggagccagcatcgggttcagtgtcaattaagttaccactataggcaacaggagcttaagttgctgagtaactcggggagccagcgtaggagtcatgtttcagagttatcccactggaggggaagaagggaaatgggatttatagaccaactcctcagtcgttggaagacagctgctgaaaagtgagggagtgtgaatcagattttttccacttggcagatatgcaaagcaagctttggggttagagaaagatgttaggtgaaatgctggcagttagaaggaaaaggggtgcgaagcaggggaggggtatgtcagggtactgacacaaagtacccctttgtctactacaaagctagaactcatttagaaaaagcaaagcaataacaacaaataacagcgaaaaagggaatcaggttaaaggaatcagaaaagacagaaaaatgctaatcagaaaaaaaagctttgttatagaatcttagttaatccattcctaattttcagcaaagaagatccacaaattatactaacatgttgcttgtgaaaaaggaggcactaccctccaagtctcgtagttgaagaagaatggaacccaacttttccacagcattacttcccataatgctccaaggtgcacctcttttcttcagttagcactgtctccctactgcccagtgtgctcatgccaggctcgtggtaactgctgtgcctttgttcgtgctgctcagcctgcctgcaatcctctccatgttgtgaaaagtcttcccacctggaggacctaactcagaccctcctctggccagtgaggtcctgccaacaacctcctgatttctccctccttacccacctggctagggtaagaagaatggctgggcagaagaa

SEQ ID NO: 1340 - DNA, 1044 bp, Homo sapiens
taaactacagggtgagtatcgtcttcctttccctaggtaaaattgaggctcaccttaggtccaaatgctagcggctgaatcaggattctaatccacgtcactctgactctaaaggtcatcttctttctactgtatcacactgcccttttcatctgtaactacactgtcctcccattttttaatttgtaaaattaagccagtttctacaggaattattctttactttgtgttttaagataactgcagtcatgtacttgtactgccacatatggaagtaggagaaatcttttcaaccaggttatttcattaacagtggagctcagcttaaggcctcatccatgaggatgccatgtagaaagagtggagggatatctggctaaaacagctatgttgtcagagtccaaaaagaggaagaaaaagtacaccttgatctttttccccaataaaagcagtttttaaagaaggcacggtagatactatctcagtttcctatcaactgtcttggagtttatagaaaataatgactacattcatcaaattctgacaaaacataaatatttttgatagatataagatcaacattttcttaacttcccaggtagattatgtaaaaatcagaatctcagaactgaaaaagatcttattgtgcatttggcccagccttctgtctgttgcaaaatctcctctatgccatcaagttggtattacagcttcttgaccatttctggagataggtagttaacaccctcacagagaagctccctctttctttgtaaactgctgtaattgttataaagatcttttcacattgagcttttttcttttaacttttggttgttgatcttatttcagctcctccagatcaatatggggatgcagaacaatagcagtgatttgggtatctgtctttttcctgatcttcagggaatacatctaatgtttcatccgtattttctgtacatttttggtagttagcctatattaagttaaggaagtgtccttctaatagtttttttccaagtcataaataagtgttggacttta

SEQ ID NO: 1341 - DNA, 2327 bp, Homo sapiens
ttggggagaatttagagagcagtatccttgagtagcaagttcatatccaaaacagaagagagaacttggagtgcaaaataattccaatagatggttatacttgctaaattgtttactaatcatttatcacaggaggatttagacagggttgatgtatcaatttcaactaggagccaaccagtcaagcatcatggtgtcctctaacagagtaactgtagaaggtgaactgcatttttctaagtatcacctggatatctggatagggtgtgtgactgttaacatggctcttttttttttgtttgtttttttgtagtggtaaatggagattattttttgtagcttatgaatatatttgtttctgaaatgattcttttctttttttaaaaaagtgagatttgtaaaagaaaaaaaatactttcctgaaatgtgtagggtgttattagcttgttagattttctaacttttttttttcttacttttcaggctggagtgagacagctctacgtacagattgactttgcagccatgtagtgaatggaaagaaattatgcaccttttatggaccaaatttttctggtactgtacgatccaaaacattgtacccagctttttaaaagagagaaattatcactacaactcccgagcactaagtagacggggtagagtcagccgttcatgctttgtggggagttcacagctaagggatcagatttaagaggatatctcctggacttttggtcttttcttttgtgctctttcctccaaatctttttgacttctgaggtttttagcttaggatgttaatttgtccttttgtctttctttttttgtttttgttttctgtttgtttgttttcatgttgaatgcccacaccaccatcctctcatcccagccagtaagaatttcagttgtgggcctccagtcttctggaatgtcttcactgcagctgctggaaatcactgctttcattcccacaaaaccagtattacttttttttaaaaaaagaaagaaattggaaatctgtgctatacgtaatgtcataattgttgacgttcttcagtataatcatgtttgttaaattgtttgtaccttgcaaacttatgaaccaaaccatattgggttttcaaagtgcctttgtatccaaaaatgtatttgccagcatagaaatgtaccatcaagagtcatgtatgttttatttttgtttttattttttattttttgagatggagtctcgctctgtagccaggctggagtgcagtggcataatctcagctcactgcaacctctgcttcccgggttcaagctattctcctgcctcagccttctgagtagctgcgactatgggcgtgtgccaccatgcccagctaatttttgcatttttagtagagatggggtttcaccatgttggccaggatggtcttgatctcttgacctcgtgatccgtccacctcagcctcccaaagtgctgggattacaggtgtgagccaccacgcccggctatgtttttttttttttttttttttttttttaacaatggatattctgtaaaatatcctgtacaaaacaagactattgccagtaatgtatacaaattgtctttttgtgtacttccagcataggtttggatatatgaacatttttcttttattgttttatcttcacagaaaataaaaggtgttaatttgctttttaaaacaaatttaattatcacattttaaattactttgtggactgtgttttcaaaactttgcaaattcatctgttacacagaaaattttgacttaaaacatctgctgaattccaaatttctgtaatagctactgtatctgtgataaactttcctatatctttccttgccatttctatggattttataatgaaagaaaaaggcattggagactgaaggcagaaatggttgtgacagtgctgtttggctttttcattcttcaaatgccaagtcatccactttgttttcctgtttaggctttgcacaaatacaattgctttcaggaatcctaaagcagcattttattgagtttgaattattaaaggtacagaggaaatgtggtgatgtagaacttttcctaacacaggtatctaggaagtaagtgctgagttgattttctaggttcttacgtatttgaaaaataaaattgcaattcgagataagtgcttgagcactctacttaagtattctctgtgttttatgaagagaaaatgatctgattttcccttatacttcattttacaatacatattcccttttaacttaaaaaaattgtaaatgtgggagaaaaaaccctgcaggatggaaacaattattaaga

SEQ ID NO: 1342 - DNA, 1049 bp, Homo sapiens
ttacaggtgcacgccaccacgcccggctaatttttgtgtttttagcagagacagggtttcaccacgttggccagggtggtcttggactcctgacctcaggtcatcctcctgcctcggcctcccaaagtgctgagactacaggtgtgagccaccgtgctcagccactagctttggttttttaaacatagattatattcctcaagatgaagggcttaacatatccacagcttcctcagtttgctaactccccatgcatctttgtgaaggacagtatctagtttatctgtaggtcagtgttccttgtgctgtcatttcccttatatctggaatttgtcagcattcctgaaaacctacacgtgtatatcagtaaccaaaatgctatgccttttttgcacctttgtacagcagccaaatcatgaactcaaaatgtatttgatcacagttctataatgtttttacctacctattatggaataatcagtttttacagagattattaatatggtagaaccctgttatgtaattccaaaacttaagaaccatatttacattgcttaacacagaattttacatctaagcaaggactggctttagaagcagtgtagttctacctctcattttacagatgagaaaaccgaagcccagaaaaactctcatttgctcaaagtcacagagaaaattagtggcaaagccaaaaagattcagatcttctgactcgaagttgagagttctttatactctattatgctgcctctccagtgtaatatttgcctttctgtaaatgggattaaatatgatttgtaaataaaggacatctgacctccttttttggtacattaaggcactttataaatggacttttattgtctcatttttcgtatataattatttccatcatattctttatggaagatgcaattaattttaacttttttactcttataaaaccagttcctgacattttaaaaaacaatatctgtaaaatggatccttttatgagtgaatttttctgctaattgcccaaggctaaatccaatttaaggattgct

SEQ ID NO: 1343 - DNA, 1113 bp, Homo sapiens
gagaaactgaatttctatccaagagaccttaatttagtttattagggaattatcttccccaaaagtacaagtaattttgcactgcaggagaaggataagtagatttgatttacatcacattttatacacacctttcaaaaggaagaaatctgtttcataaatagtagtaatctatgcttaaacttaacatttaatgttgacttcttacaacagccttgaaaattatttgtaattttgatcatgatgttggaaagcttgtaataaagaatatctttctcttctgcatccttttatcctcaaacttagcatggattcacatgctgagtaaatgtttggttaactagtgaacattttagatagttgtgtcaaaaataagggttagggataggtaaaaccagtaatttactgttttttacagaagacatctcagcatttctttggcatttttgcacaaataaatgactatatattcaccttggccatttttttttttaagtagccctatgagctgctcattctttttcatatacagtggaagtatacagatgttatccattttacaaattgttggatcggaatttgacagaattgggactgtggaacctgggtcacttgaattttctatattttgtatggccaaatcaggaaccagacagtctccatagtctcctttgtttttatggaaaattgccatattcacatatttcatttatcctaatgtattgtcatccaaaatgaaagaggtctttcttgaaggtgctttaaagacatcactacatgtattcaattactgatttaaatattcccagaattattttttacctttctctttttcctctcaaacacaaaattttagtagtacctccctctatttcttcactgatttttcatctgttttcattgttatttccactatagaacttctactttatactagcggggaaaatttttttatttagaattttaatatttgaattttgtttatgtatcacatactgtgctacagttagcctcaatgaagattctattttgaactagacatcctgtcaatagtttgtcaagtaacttcattgcttcctttgatagcaattcagtgaaattttttcccaagtg

SEQ ID NO: 1344 - DNA, 1028 bp, Homo sapiens
cagagaaaaggcccacgccgccggcctcacctacggtgccgcaaaatgctggtgcctttactgcactttacgactagcgggagggggccgggctagcgggctactgggctgcggagaccagagcccggctccactgaagaaacccgccggctgctggggcagggcggcgaaaggtcagtcggccgagaggagtccgtggagccaccgtttcatagcctcagggaaaggatcgggcgtgctcacgagccctctaacccatggcttaaacacccgcttcctaagcctgggtaagtgcagtagctcttcgctcgagaggagccacgtggaagagagtcgggaggggccctgcgccctactcctcctctccagaaacagggagggctgggaaggattttcctgatttgtccccggatttggccgagtgcacagattttaattccagtcttctcatcctcctgtagttcaactaggtgtcttcctggtgaagcgtgagattggcaaacccagcagtgagtgtgcttctgatttcccaacaaggcaatgactccttgggtttgtccccaagaccttatgcctggagtgccccaaggatgtttcagtcaccctcagtgtcaggaatcccagaccttcctgtacctaaagaagtgacctttaatagtgctcagggatttcagacctctcaagtgtttctgccgggggaattcttataaagctgttggttacatgtaattagaaatagggaagatttgttttgactgaaaatgctcttcccaaggtgacctcatccaagttaaaaaagacagctgtcattgcttttcttagcaggcagtgttggttactcagaattttcctgttgcctccccgacaatgcccaactccgcttccttgaaccttggctttttttcattcccaggttccatccacctttttgcacttcctatctataaactcttcgtggctgtgttttatcccctctcattacgttgatctattcctcacaccacatacacaccccaaaaaactcaaaa

SEQ ID NO: 1345 - DNA, 1035 bp, Homo sapiens
tcctcattttgtcactcttgtagctgataataatgtctccttcactcaagggggtcagagagttatagttaacaatctgaaaatattacaccccttctagatccttctgaggccaagagaaagtccaggtttgttaacataccccacaagatcattcgtggtgtggccactgcctacctttttagcatcatctctctccactccataccatgagctttctcgctttctctccagcaatactgaattgcttgtagttctctgcccacaacatgctgctttgttcctctacgctgctgcctcatcatagaatattgtctcccattctctcctgcctagatcactaatacccattctttaagaccaagttcaggaagccttcccagagaccctcacccccctaagctaatttaggtttctcctcttcattacagtattactctacatatacttactaaccaatttatgagattttatatttgttcatttgtatttcttctttaccaaactattgatttagttaattcagggactgcatcttatttgtatgctcatcttaggtttagcactatcccttgcacataataggtattaaataaatgtttgttgaataaatcattattatccactagtagctgagctacgtatttttccatctttattaatacagagggtggtatgttttaaaaaactaccaaaaaaatcattaatggaatatcaaatataaatatgcctgtctcatgccactttagaaggtcatttgtattgaaaggcttgcaacacacaaaacatatagttcatatgcatgctattgagtaggtaaacacattttccaatgtgttgatcatttatgttttttgttttcagatttaaaaaaataataatttcaggtagattcacagtgcaaggacactgccaaaaaggatgattaagtaatctgaagaaggtgtggtttatctcctttcaggaaatatatctatattgaaaataaagttattctgggtaatcaaggaagtgaaacattgcctgaaataacag

SEQ ID NO: 1346 - DNA, 1049 bp, Homo sapiens
tagaacatagtgataatatttcttttgaatgaagtagagtaggcacttgacattctggatttaatttcctagcttgcaagcaaccttgaagattcatcacttgtactaatttgtattataatttgcagaggcataactttgacgcaagtgccctatggggttggtatgtaggaatgagtcactaaccttgtgagaattctagccagctacttgatgctgccctttcagagtggctttgcttttttcattatggaaattgtcaaggttcttttattagttttcatactgctataaaaacatacctgagactggctaatttattaagaacagaggtttaattggctcatggttctgcaggctgtacaggcttttgcttctggggaggcctcaggaaacttaaaatcatggtggaaggcaaaaaggaagcaggcatggccttcaggtggccagaacaggtgaggggagtggggaggtgccacacacttttaaacaaccagatcttgtgagaactctattatgcaacagcactaggggaatggtgctaaaccattagaaaccaccccccatgattcagtcacctcccaccagaccccacctccaataatggggatcacaacgcaacatgagatttcagtaggggcacagagccaagtcgtatcattctaccctggctcttcccaaaactcatgtccttctcacatttcaaaacaatctggcttcccaatagtcccccaaagtcttaactcattccagcattaactgaaaagtccaagttcaaagtctcatccaagacaaagcaagtcccttccacctatgagcctgtaagatcaaaaacaacttagttacttccaagatacaatgggggtacaattctctcattccaaaacagagaaattgaccaaaatgaggggctacaggccccatgcaagtccaaaacccttcagggcagtcattaaatcttaaagctccaaaatagcatttgattccatgtctcaaatccaggccacactgatgcaaggaatgggctcccaagggattgggcagctgtg

SEQ ID NO: 1347 - DNA, 1024 bp, Homo sapiens
gactaaaggcatgtgctaccacacctggttaatataatatttttcatatttttgtagagatagggtttcaccatgttgcacaggctggtctcaaaatcctgggctcaagtgacccgccctccttggcctcccaaagtgctgggattataggcgtgagccaccatgtccagccaacacttttgctttctgatgtttccatgtacacaaactttatttcatgtacaaaattattaagaatattgtataaaattatcttcagtcttttgtgtataagttgtatatgaaacttaaatgaatttcgtgtttaaatttgtgtctcatccccaagagatctcacgtatatgcaaatattacaaaactggtatacttctggttccagccattttggataaggggtgctcaacctgtactattcatttattcagccaataattactgaatatatgcctagcactcttgtagaggcttggtgtactttgggtcagcaatttataaatatggacatatactttgaataactaaattttttcataaagtttttggtaaaccatggttttttaaaagggtttaaattacagcatatgttttcatttttcctcagggaaaaaaggtttaaagcttatttgaacaatgccctccttcctctcttttgtattttgttgtgtgtgtattttacaaataccaccctgagaagtagagctgggactagcggtttccaagttcctgctctgtagatgatacagaaatgcctagacaagatctatctttaatattaaatattcatattcttaatagagaaaagctatgtacaggtgttgtcacttcctgaaactacttcagagcatagtacagtatttgaaaacagttctcaggtaatttaagttaccttatttatataatgatttgcaacagttattcacaaaatgcttttaaatgacatatttcagtccaggctccgtttaataattagaatatgaataaaaatgatttaagaacattaatattatatcgattttattattgt

SEQ ID NO: 1348 - DNA, 1046 bp, Homo sapiens
gctgttaccttcagatgtatttgaccaaccacaacctgtaggtaacaaaagaattgaattccatatatctaccgacatgccagctgcatttaagaaagatttagaaaaggaacaaaattgtgaggaaaaaaatcatggtaaggatattctagttatttcacatgctgaaatcaacttattgtgttagaattaagttttacatataatgtttcatattttagtatttgtcaactttatttaaaatatgcaattagtgtttcccaaaatcatggaataatatccgctttcaacttttttatataacagaaattgatggtaaacggtgagattgtcactgttaccctttgctaataatgacctctagaatgaaatttagtgctttttgctgatgtttacactaaaaatataatggagtttcttttattgactttttcatttcttgtttcatgccgtggcctatggttttattagtgtaactatattaatactggttagaaaacaagcaatgtgactattttgtgagttgtagacttaatgtaaaaatacatatatatattttttaatccaaaagacatggaagattgtttgccaagaatactattcttaagtttaaaacaaatgtattgaaattacagattttttttacttgttttaaccatgaacttgatgatataatggtgttcttttgttctttaagtctttattttgaaatttctgaaataatacaagttgatagaaatgtaaccaaaacaaagtaaaattgttaaaaagttaacacctcaaacctcactctcctgtgtcctactacctaaaggcaaatactgttagcaatttggtatgtgtatatacatacatgtgtgtgtgtttgtgtgtgtgtatgtatgtatccttccagaccttatcctgtatatgtatgaacacatttcactcttattttttaaatgaacataatgttttgacggtatttatcattcactcattaatgacttgttgaaagtttgttatctagcggcctccatggagaagtttgccatggtctctttttt

SEQ ID NO: 1349 - DNA, 1059 bp, Homo sapiens
ctgtgtttacttcattcttgcatttaaatatggaggtggctgatggtttgggaaattcactttaagcaaaataagtacccaaatcaattaacatatatactttgctcttttttataacatgactcatcttaacggacctttaatagtagatattttattggacaaattgtagttactctagaagtctgaaatttttaaaacaaaagttatatatatataaagttttttatataatcaattcagattttcagtgagtatatttaaacccatttgtaatattgttactaattttgttactaattttatgtaatattgttactaattagttcatatgaaaatgaactaattttcattttatgttaaagtgaaaattttaacattttcataaagcttattttgtctatttaacaattaggtttcaaaattgtaattatctttaaaaacttgcttaaaatattttaattttatatctttgttttttgttttttaataagaaatggaaacactttcagttttcagaagttatgaaccgggtgaaccaaactgtagaatttatgtaaagaatttagctaaacatgttcaagaaaaggtaggtataaattgattttttttcatgtaaatgaaaataatttgaaggttttatagttgatgtgttaaagtctgtttgaaactacctttaagaatgtggttttcttactgtgcttcagggcatgacaaattattgtttagtattttcaggttaattttttattaaaataatactctcatagcttgggttctctggcagtaaatactgagacagagtttgtggtatgtattaatttcctagggctaagtggctgaaacaacagagatgtgttgtctcacagttctggaggcaaactgaagtcaaaagtgtggcaggattggttcattctgagggctttgagtgaaggatctgttctgtgcctctcccatagcttctgctggtatgcagaagctggcgaactttcaccttccttggcttgtggaagcatcaccacaatttctgcctttgtacatagcatactccctttgtga

SEQ ID NO: 1350 - DNA, 1078 bp, Homo sapiens
tgaaaccccgtctctactaaaaatacaaaaaattagccgggcgtggtggcgggtgcctgtagtcccagctactcgggaggctgaggcgggagaatggcgtgaacccgggaggcggagcttgcagtgagctgagatcgcaccactgcactccagcctgggcgacagagtgagactccgtctcaaaaaacaaaacaaaacaaaaaaaacgataacaactatattataagacatcatttgtgaattccacattctcatatgtaaggtaaacacaaagtttgtatgaggttctctgtccgggcaatgttaactattgaaaaattacattctaggagtttactctgattgaggaaaataagatacaccttaaaataaccacaaaacaagaatatgagctaaggcccttggcagttaatgtacctaagtgctgtttacatattttgaagctaaacgttacaaagactttttctgatttatatatttacattaaaagtcttttacattaaaagtcttataaaggtatttttcaaagccgttacacatgtagtaacacaattagtaaatcacatgaaatctgaatgactttagaaagacagggacacatgagtggagactgggaggacgactaggttcactacttagggaggccagaatggagtcttttgtgggtaatgagggcagttcagggagaagagggcagtagaaaaggtattttgtcacaaaagattaaaatgtgtcagggagacaagcatagagatttattttattgttataaaacagaatataaaagtaggttggggtctaactattgtggacttcgagtgatcaacgaaggagtttatattttttctgatattttatgccattgaaggttttagggcaagggattgccatgatcaaagtagaagaatcagtctggctgcagcccacataatcatggtgacataataaattgtaatgactcaaagcagtagctggaaattgagaaagaaatacatgaattagaaggtgttgaaaatcgcttatgttgacttgagacaatggtattcatcttttctgtgagtgtatttgtcttctgttt

SEQ ID NO: 1351 - DNA, 1245 bp, Homo sapiens
tactttatatcccctccaacttaggtaagataagaatagattttccattgagcacactcccatacctacttccagaagtccctaaaggagatcatgaaaccagttttaaaagtgttggtgtaatccaagttctcattgtacagatgaggaaacggagtaacagagcaattgtgtgactttactcagtatctttgtccagaatgaagatgtaaataactgctggagggcttcattctaccattgtctgcttttgtctatctttaaatttttcatgatataaattgttttaaatttacttgagaaacaggagtatagcagatccttagtctcaagtttaaatcctagttttaatattttctgagcagaagatctgtgacatagattgtataattcttctgaagcaccaattatataccataaggccagaatttatgaagaagacagctggtaagtcagcctaaccacctaccctaaactttattgcatagttctctacaactcatcaaacacccaccaactcttgtaaaagaatgaaattcactctgaaaagtgctaataaagaaaaaagatattttgagagagaaagtgtatactctgctggcatttgggaatgtggtggcaaagcagatctaggggtgatataagtctcttgaatagcaaggttctgacgcgttcatattccaaaaggaaggaaattatcatttgtgaaaatgatttcatgaatgttactgtctctcaattcttaaaactctgtaatataaatattatccatatttttgagtgaggacatcgagactaagaggttaaggaattaattcttccagggtcccaggatgcaatcattcattcggtacatgtgtattgattgcctgccacatgccaagacttaacaagctagaaaagaccagcccctgctctgaagggattcactgattacgtgggagacaggcacacagcatacagtgtcactggggcacacaggataggatccctagccacagttctttgaaagccagggaaatctttactgagaaggggacactgagctaagtttaggggatgactaggaatttactaagcacaggaggtaggtagggacaccccaggagagaaaactgtgcacaagtttatgccatcgttacagggcattgagtatttaagaaatgtcaaataggtaatgttgtcgttttatgaggtcatttttcacatattcttaacattactataaagcaatcaaattaaagt

SEQ ID NO: 1352 - DNA, 1048 bp, Homo sapiens
ctgtcctttggagctcttaatagctgcttttttgtgcttgtatttttgtacttaccacattgtataagttttgcttctacctctaaactctaagcatgtattttgtcttattttgtacttcctataccttgtacagtattaggcacctgactgggtaaaatattaataaatattgattgaatgaataaattttgaaaaccagaagatatgtggatgacttaagatctgggccaaacccagaagtaaagagcgctgcataactcgatatgaaccaactttttgagttcagattttgctgaatgtttgcttttggaccacttatactctgtccagaaatgagaaacctttgcagaaggaccaggttactccagtattttccttgttttgcagcatttgttggtccaactgcatgcagtatcatttatagaatagctgctataatagctatgttactcaattgctttccttctgcttctaagttaaaaacagttcttgtttccaaatatgattgtgccctagggaaaatggtcacagttctgcattctctggaagaagcctggttctgaaaatatgtaattggcacctggaacatacacatgatcagaaactattagaaatggctttgacactgccttttgtacatttactttgaatatgaatactataatcactttcttaagaacttttactctcagtgctacgtcccatgctgtgttgatttaagccacagacattgcccaaattatagcctagcactaacaacactaacattaaagtaatagagtactctttagcttgctgttgtgatggatttttaaggaagcagtatttccttagaaaccacattaaaacctaccaattttgtgaacatttataagaatacatctgagtcatttttgttagagaaatactgaacactaaaactgtagcagttttaagatagagtgctgttaaatgttttgaacaacaggagtttattgcatagactgaactaataaaggactgaaataattttttaatgttatgaaaaatataattcttcagcgaa

SEQ ID NO: 1353 - DNA, 1032 bp, Homo sapiens
gaatttcctcttaaaatgccattaaggagagacactagtcatggtggttgcttctgggcttactaaactcaggcacactcatggtaaaatgacaagtagtagggtataccctaacatcttgacaaattgggaaatgggtacctggtgataacttcaggcagtaatgggccaggcgtggtggctcatgcctgtaatccagcactttggaaggctgagttaggaggattgcttgagcccaggagttctggttgcagtgagcttcagtcatgccactgcacttccatctgggcaacagaatgagaccctgccatgaaaacgccacaatattatgacagctgaagaccatcatcattaactcagtgcaagtcctgatgcactgccagagtcaacatatgctcttggatgagacctattttagaatgaatagataaacatgtttgaagagcatttcttgccaccatttgtcgataggtcaagaattggggaattctaatagattattgtgggaataagtgtgagagaatcaggatctaggctaatccaatgtattaatgataaacatttaatatttcacatagtttctatccgtgatgcctttaaacgttatggaaatcaaatctagtagaaaaatacccagtgccccatctctccaggggtaaggttacttggaacagtttcaaacactgcagctcaaaattttgaagtttttttccactgctgttttagggtggggtctggagcttatgaacaagttgtgatcaaacgctagaagtcaagtcggtgaaaacatttccttgtggatttaagatgtgagtagttgatgtatcaaggcattttattcaagcacttaatagaaaatgaacctcaactatcaagaggaaagccaatgctggtttcttctctggaaggacccaccgccatcctgtaccagccaccaaaggggaacatctacatggcagtctccaggcactgtgccactgtgtgccttggaagcacctggcttctgtggtcactgcacatcataatgaaaag

SEQ ID NO: 1354 - DNA, 1031 bp, Homo sapiens
aggtatgcactattaatcatgctcaatcgccataaatgcatttccctggttaaatgaacgactaattagatttttgtgggtttttttggccattgcttttggtccttcaccaattaggtaggctttttccacttccctgcaaattatgtagtataaaaaataccttccaggcctccgaaagttaatttctattttaaagaatattaataatagccttagtggtctttaaaaattttatccggagcatctaatacacaatccatttttgtctatattcactcttaaaaacttgacagaccgcacaaagtgttttctatcatttgaacgtatgtgtagagatggtaacaaaaggacattctcttttgtcttgcccaccttttcccccagttgagtaattaggttattgaaggattttgagagattagttgctttttatagaaaacatctcttgaatacagttcaactttgggttgataaagtacacaaataaatttggaatcctcttacgagagtaggtctgattgtaattctatgaattagtttttttagcttttaaaaggtaagacctttttagcatggatacagtatggtgaataacatttaatccttagctttatttatgcagtaaactttaaacagttgaaaattgggttcctgctctttctgcggcaggttctgttttctaacataggcaaaatgttaatgtaatagaggaaagtctcgtttttaagtttcaaatgtgttttgaaacaagattctaccaggaattgtttttaaattccgttaaaaaactaaagacccagtttttttactaatattaagaagacttaagactttcagatcaaatactcactgaaatttataagtttccaactttgtaattttattttgtatgcatccagccctgcctttggctagcttttaaggaattgaaacatcttttacatggcaatctgtggggaagaaaggaaacgttaaagcactgcaaaatagtgtagtgcttaaacttacatgcacgcttttctatctaa

SEQ ID NO: 1355 - DNA, 1074 bp, Homo sapiens
cacagaaataaatacatagtaggtatgtggaatgtaaatttaagtcaatcgttccgcatagtttagaaatgtaaggggctttttcatattgttaactgagtgagatcagttccctttatgcctgtgaggctgcagggtttgttctcacttgcatgcacacactaagcccaaatatttctgttcattcattgtcagatcaggatatgaaaataaaatttttctgttagttttttttgtattgagattccaaagatggtaatatttttataatattcatgtatatatggaaatactttttttgacggctagggtatcttttgtgtttctgtaggacctagatgtgaaggctggtggaggctgtgtaatgaccattggagaaatgctacgatcttttctcacaaaactggagtggttttctaccttgtttccaagaattccagttccagttcaaaagaatattgatcaacagattaaaacccgacctagaaaaatcaagaaagatgggaaggaaggtgctgaggaaatagacagacatgttgaacgcagacgttcaaggtaatgtcactcttgaattatgcttatttttcatatatgctttatacaaaattaatggttctgagaaatagcaagttcttaggaatttgtttttactgttcattttattagtttgtcacttttaccccccaaagattattttcttcctttcagggctttttctataaaattatgcatctgtaaatgagaacaataaaattttttgctttaatgattcttgacatggccttaagcttgaggacatgaataaataatgctgttgaaagttttactgtgaaaagaattgcatatgttttattcattgaaattttctttctccctccgccttccttaggtctccaaggagatctctgagtccacggaggtccccaagaaggtcaagaagtagaagtcatcatcgggagggccatgggtcttctagttttgacagagaattagaaagagagaaagaacgccagcgactagagcgtgaagccaaagaaagggagaaagaacggcgaagatcccgaagtattgacc

SEQ ID NO: 1356 - DNA, 1031 bp, Homo sapiens
tgccctatgttgaactcccttcccactttctttgtttagctaattctactctaagatacagctcggagattatctcctcctggaaaccatttctaagctccatagttaggctctgtggcctccgtgtgctcatattacaatctgtgcatttttctttcttagcaccaactgtattaaaattaagttaatctgtttttatggtgctcccttcctcctcacctctccctttgagcattagctcctcagctgtggtcactcctcagcagccatgataattagcatgttgtctggcacatattgaacttcaatggaatatgaacgtaataagatgtttatctgtcttgctaaatgttttgaatagtattgtgctttctaatatggtaagaacagtagataagtaggaatggcttgtacctctgcctgttggaagatcttagaattgtcctttttctgtgatacagtctagatcaaacatggttgcactttgctataggacttcaccaagggaaacttaaaaatctgtactgtctgtaataggactataccaaacaaatctctggctttatcagtgctctaagaccagcattctgtatattgattggattgtcgtataattgggggtaatgatttgaactctttatgttaggccataggctggtataagttattcttctgctatagtaaatccttatgaaatgttttatccatctggttcttccattgtggaggtcctcctctatccctggaggagtttctgtggcacaatgaatttgtaattttgaatggaatgtttcttggaacactaagtaacctcctaaggggacatcagaatgctttattgaaatattttgcacctatttcaaaaggtagagactgatagcaagtacaatttaagttaaaaaaaaattatatggttgatttttaaggaattattaattttttatgtgtgataatggtattgtgattgtattttttgaaaaagattaatcttttaaagatacatactaaggtatttacaaattaaatcatat

SEQ ID NO: 1357 - DNA, 1031 bp, Homo sapiens
tagagctaggatttatgaaagaagatcacacaaccacagaaatggaaagcataatagagaaaatggagagtagtcttattttgcctcttaagtcctgaattccatcatttattcttaaatagtatgtaagccctttgaagcaagagtcaaatctggacaaaattgatgttattaagtcttttagaaagatgtagcatcatggttttatgttttgcattcactgacgtcctgtgaacacgaaacaaatttaaggaggtaaagaggataatagtcaagtgcaaaatctagtgtggaagagaagttaaaaattaaaagaaaaattgaaatgacatgagtttgcacagaaaatgagaaattctagctaaaatgttcactctattagcaaaaatgaaaacacgtcagttaaggatagtagtactgtgtctatttgaagtttattagaaacatattttctttgattatacagctagataggctctcagaagcataaaggaaactttgtatgtgggatgaattttaatggaggggtatgttcttggtttttcttctacatgtgggtatgttctttgttttcaacccaactggtaaacaaaggaagtaattctattctctcatagtgacagagaggatatgaaattactttctctgttactatttaatgatcttctaaaaaatttataaaccaagctgccctattttgcaggcataaatctatatttgattcaggtgttagagatttttgccagaatattaacttattttctaataaaatacaccagagcctgaatctatctaagaattaatcataaactagagtgtttgggacattatttcaggtattagtcactggaataacttttctaagatagtctctcctgtagggcattctcactacatggacttcaaggacagccatgtagccagcaagcttccagtttgctagtattgtttcttatgacaattatgtaaaatgcctttttaaaaacgtgtaacacttacgatgccattcaatctatagctaagttttgtgg

SEQ ID NO: 1358 - DNA, 1039 bp, Homo sapiens
gccttttaaaatattgcctaatattttaaaacattgaatggatatggaaattctctgtatttaataactttattgaaaaaagtttaaggactcgtttacttgttttctgactggcagtaagtctgtcatctaatgagatcttaaaatagaaaggggtaacctagaaaagagtaacagcatagtagtggggatgctattttgattcttttcacgcaattgaaggcctacagccttttccttctgttataaggaataaactgctctacagattgttatttttgaaactgtgtggatagtataaaaccagttgttataaaatgcctttttcaaattaaggggtaatgtagtaaccagtgttagtttccaaccaaaatgtaacttccttacatcaaagcattttagaggggaatgtatattctatttttgtgtagctggtatagaaaattattattcttggaagaatacatatttgtacaggttttctcgtttcatatgggtttgtgtatcagattttagaactgaataatgtaatgatgctgaacttgtactcttaagggctccctggtttatttgaattaattttttttaaacaaaggtgtacgccccaagttgggacgccggcatagtatggaaaatatggaacttatgaagttaacaccagaaaaggtgggtggcaggttttatgttttaaatttcatgaactattataaaatgttttagtaatttttaatttaatgaaataatttaaataaggcttgccctatataggtatcactttaaaatttgcctgtaaaaaaaaagtcagaaaaagtatagtgcaaaaagaatgagtaccgtatgctgccatctgtttaagaaaaatacatgcatatatttcctttgtagattcctaaaacattctggaataagatataagaaacgggctaacaatgatttcttctgggaagaggactgagtgtctgggttaggctagaaatactttatataccagtttgaactgtttgaatcatttactatgcaaatgtattacttttaatta

SEQ ID NO: 1359 - DNA, 1030 bp, Homo sapiens
ctcccctgtacatttatttcaatttgtgtctcatggggcacttttctggattggtggaaatgttctttgtattgattggagtagggtttatatggcttccaatcatagacttaaaatctgtgcatttgactgtaattttacctacgaaaaaatgtgtgtcactaaaattattacatagcatgaacctttagacttacttgtaaacatttaagactgaatgttaaagctgcaaatgtcagagctattgtatgtagtgcatatttttccactgtactcaataaatgttattttgttatttgtaggctgtcatgtatttaaaccagatctagacctttataaattggtttcgcctattgagaatttagtatggtattagtaaaaacagtaccgttttattttttaaaattactatgttttatatattaatttttatgtttaaaaattctacatacatccaaaaattccagttgtaacagatttttaagtaactcacgtctagagtaaaactttggctccttctctgaccattcatattttatttttacagagttttggtaaaccttgctttcttattcgtaggttcttaaaaaccagcattttaatgttttgataatgagaatccacagtatgcatttggtacaagtcttgaaaatagtgcaatatactaaaaaggatatttttaaagagatctaaaattcttcctctctcccccaatagtaaataagtgagtacgtcaggttaatattatgggaaaccagaagagagctggggatttgggggtgtttattcacctgccttccatttataattttgtaggtacagaactggaacagtgaaattcttgctaagcaaaaacctcttattgccaaaccttctgcaaagctactctttgtcaacagactgaaggggaaaaaatacaaaacgaattcctccactaaagttctccaagatgccagtaattctattgaccaccgaattccaaattctcagagggtacgtttaaactaagtttttgagtattgtgttttga

SEQ ID NO: 1360 - DNA, 1389 bp, Homo sapiens
agcgagtctccatttcaaaaagaaagaaagaaattgaagacaaattaaagtcacgatcacagaaaaactaaagatatgtatataactatgtagttatacaaaggtcaaaaggctaagtgccgtggccatcgcctgtggtcccagctactcaggaggctgaggtgggaggatcacttgatctaggagcaatgagccgtgttcgcgctactgcactccagcctgggcgacacagcaagaacgggtctccaaaaaaaaaaaaccacgattctgtaaggtggaaattagtactgccttttcctgggacctatgttcccctccgagccacgcgagggcagcaacgcgcgcactctgaggaacacccccttcctcaggactcgtccgcctgtgctcggtggtttctcccagaatcctccaaggcgcgggagggggcggagagcttaaaagtcgcggggggagcggacttccgctgttttagggagggagagcggcctgggtcctgggtgttgtgtgcggagctgtggcgtcgcgtgtgaggcgcgtgcagggtgagtgtgagtggacgcgtgagtgtgtgagtgtgcgcgcttggagcgtgttaggcgagtgcgtgcgcccacccctgcgcccctcctcccgcttacactttgatcttatttgatcggatcgtgaccccagccccgccgggccgacccgaaatgaaaagctctcctcctgcgaagccccctcggggcgctgtgcagcgaggccccttaggcggcggccacgctgtggtccccgaggtcccggagctggccctgcggggcccggcgctcagaagtgatgaattgatcagatagacgaggccgggcttgtccccggccactgattatcgaggcgattctgatctgggcacggccaccgggctgcgggctgccggtggcgtaggggcgagcacgtgaacggcggcggcgggcggggatgctgagcgcggtggccaagggtaaatgagccgctgcccctccccctggagctggaaggtcgcggaggcctttttggccgctgatatactttcctcccactttcccatttctccttgtttttcttttttcttttgttcctttttttttttttttgagacagggtcttgctctgtcgcccagactggagtgcagaaccgcaatatcggctcactgcaacttcgacctccttggctcaagcgatcctcacatctctgtctcccgaataggtggaactacaggcgcgcgtcaccacgctcggctaatttttgtatcttttggtagagacggggtttcaccatgttttgccaggctggtctcgaactccagcctcaagtgatccgcccgcctcggcttcccaaagtgctgggattacaggcatgagccaccgcgc

SEQ ID NO: 1361 - DNA, 1048 bp, Homo sapiens
cttttgataacctttattagctccaatgacaacctgccctgggccatctacatttccacctagccgcattatgacctgttttagagatcgcagggaacagtatgatcttatcagtgactggctcactggccttgatggcctgtggtctaaccaaccaaaataatgagaccaagaaagcccacttgcctaagaatcaaacaagggagtttcctgagtggaaggtaagaatcatacagtttaactaccaattcttgttgagatctttgtcaacaatggaaaatatgagacatttcagaaattaagcacttctattatcttggtttggaggaagggaagaatattgatacttgagaactcgaacttgtgtacgaattttgcctttggtcctgtttgaataaccaatatttgcctaagcaaaaggtcttgccacaaagtgtaagcttaaggtagtggaaagctatggagctcaacctaccagggtttcagtcctgttacttaccacgtggtttttggatttgtagaatgggtatcaaaataacacctacctcagaaaggattgctttgagtattgaaatagaaaatacattggaaacacaaaagagagttacccaccctccttctctgttcagcttctttcccattagatccacaccccatgccagattggaaatggcttaggaggcatgcccatttgccacaggcgtcagcaagtcctgtttacattctccttgagcaaacagtggccattgaacaccctcaactccaaaacaatcagggagagaataaacccattattatagtattcatttggcaatatgaactgatcaaacaagtttgggggcttccaaccccaaatggtgaaaaaccaattcaaggtagaccagctcttctctgttctttttttttttttttttttttggtgagacagagtctggctttgttgccaggccaggctggagtgcagtggcatgatctcggctcactgcagcttccacctcccaggctcaagcaattctcctgcctcagcctcccaagtagctgggattac

SEQ ID NO: 1362 - DNA, 1034 bp, Homo sapiens
tccacccgccttggcctcccaaaatgctgggattacaggcatgagccaccgcgcccggcatggcttctttctttcaagattatgtctgtaagattcatccatgttattaacatgtagcagtagttggttcttttcattgctatataatactccattatgtaaatatgccaatcaattctactagcatatttactgcatgacatttggataaactgggttgttaccggttgagggcattatgaataagcttctagagactcttttttaaaaaatgtttgattggcaattaacagattatagttgtatatatttatagggtacaatgtaatgttatgatttatgaatacaatgtggaataataaaagcagctaattaacatatccatcacctcaaatacttatattttgtgataagaacatatgtacattcttatgtgtgtcttttggtagacattaacactcatttctgttgggtatgtaccaaggagtagaattgctggatcatagggtgggcacatgtttagatttagtagataataccaagtagttttccaaagtggttgtaatgattgatattcccaccagcaatatctaagagttccagttgcttggcattcttgccagtacttgacattggcagtccttttaatttagccattctggtagatatatagtggtgtctcattgttattttaatttgcatttttttggtgactaaagatactgagcgctttttcataagttgatggcatttggatagcctattttgagaagtatctgttcaagccttttgaccaatttttatttgtccttttcttagtggtttgtaggaattatttatatcgtgtggatagaagaatacctgtgagatacagataccacagatctcctctcccattctgtggcttgccttttcattctttcagtcttgtgatgaatagaagttcctaattttaatgaagtctaatttattgacttttcttctgtgatttgtctattgtgtttccaaaacacaatagataaatcacagaattt

SEQ ID NO: 1363 - DNA, 1033 bp, Homo sapiens
tctgtccatcctcagcgtcgaacctctggctctacaccagccgctgcagggatgcgggcactgagctgactggccacctggtaccccaccacgatggcctgagggtttggtgtccagaatccgaggcccatattcccctaccaccagctcctgaaggctgcccctggagctgtcgcctcctgggcattggaggccacctttccccacagggcaagctcacactgcccgaggagcacccgtgcttaaaggctccacggctcagatgccagtcctgcaagctggcacaggcccccgggctcagggcaggggaaaggtcaccagaagagtccctgggtgggcgtcggaaaaggaatgtaaatacagccccccagttccagccccccagctaccaggccacagtgccggagaaccagccagcaggcacccctgttgcatccctgagggccatcgacccggacgagggtgaggcaggtcgactggagtacaccatggatgccctctttgatagccgctccaaccagttcttctccctggacccagtcactggtgcagtaaccacagccgaggagctggatcgtgagaccaagagcacccacgtcttcagggtcacggcgcaggaccacggcatgccccgacgaagtgccctggctacactcaccatcttggttactgacaccaatgaccatgaccctgtgttcgagcagcaggagtacaaggagagcctcagggagaacctggaggttggctatgaggtgctcactgtcagggccacggatggtgatgcccctcccaatgccaatattctgtaccgcctgctggaggggtctgggggcagcccctctgaagtctttgagatcgaccctcgctctggggtgatccgaacccgtggccctgtggatcgggaagaggtggaatcctaccagctgacggtagaggcaagtgaccagggtcgggacccgggtcctcggagtaccacagccgctgttttcctttctgtggaggatgacaatgataatgccccccagtttagtga

SEQ ID NO: 1364 - DNA, 1051 bp, Homo sapiens
ggccgttgcaccccgggtgtctgcaagaatgggggcacctgtgtcaacctgctggtgggcggtttcaagtgcgattgcccatctggagacttcgagaagccctactgccaggtgaccacgcgcagcttccccgcccactccttcatcacctttcgcggcctgcgccagcgtttccacttcaccctggccctctcgtgagtggctgggcactgggggtggggagtgggcctggtgggcatctgaggtgcctcctgttctgtggttgaagtaagaggtcaggcagtgaaagcgtggagcaggctgccggcagagccaggtctgctcttggagttgcctgtggttctgccagcagatctccctcccctgcgctggttaggtggcgggggtgctggcatccaggtgggtaccccattccctgcccccatccccaactcctgttcaggtttgccacaaaggagcgcgacgggttgctgttgtacaatgggcgtttcaatgagaagcatgactttgtggccctcgaggtgatccaggagcaggtccagctcaccttctctgcaggtgatcacagttgccccccatccttgcccatcttccaaaggccccaagtcttccagcccctgaccccaagccacatactctatcagccaaatctgggcccagccccagccactggcaccccaaaccctgccattcctagccctcgtcaggcattccagctcacctggtcctttccccaggggagtcaaccaccacggtgtccccattcgtgcccggaggagtcagtgatggccagtggcatacggtgcagctgaaatactacaataaggtgggtgtggagggcacagagggttgggggttctgttcttgcctcaggtgcttacccagccctgagtggcattgcctccaggcttgggtgggctggtcagggcatttctggctgagaggaagggagcggctgggaaggtgccaccttgctgggcattcccaccccactgggcactgctcgatgctctctgttccactaggcagccgcaaacttggacactgagga

SEQ ID NO: 1365 - DNA, 1029 bp, Homo sapiens
tccgagtgagtgtggccgggtgggcgggacggggtgcagcccctcggaggcctcacctgggcccagagctgcctccgggcctccccaggtgactctggatggcatttggaggacaaatgggcagaactggcccagctcccttactatgccgtgcccacaaaccatggtgccttgcggggagggccacccctcctaggctctacgcggcgcagcccagcctagggcagagtgcgggaggatggggagctgggggtgctttcctgtttccttcgtctggtgaaagctttcactctctcctctgtttcaactaaccctctgtctgccttttctgccactttcctttcctgcctctccagatttctcttctttaacttcctgcattaaccctgggccgtggttcctacgcccgaggctcccttcccttccccagccgcactcatgccctgctcctgtcttgtgctttatcctgccccgctccccatcgcctgcccgcagcagcgacgaaacgtccatctgaggagcctgggccttgccgggaggggtactcaccccacctaaggccatctagtgccaactccccccccaccattcccctcactgcactttggacccctggggccaacatctccaagacaaagtttttcagaaaagaggaaaaaaagaatttaaaaaaggatctccactcttcatgacttcagggattcattttttttatacgctggaaattgactcccctttcccttcccaaagaggataggacctcccaggatgcttcccagcctctcctcagtttcccatctgctgtgcctctgggaggagagggactcctggggggcctgcccctcatacgccatcaccaaaaggaaaggacaaagccacacgcagccagggcttcacacccttcaggctgcacccgggcaggcctcagaacggtgaggggccagggcaaagggtgtgcctcgtcctgcccgcactgcctctcccaggaactggaaaagccctgtccggtgagggggcagaaggactcag

SEQ ID NO: 1366 - DNA, 1029 bp, Homo sapiens
tctcacctccttttcttttttcttttcttttcttttctttttttttttttttttggcggtgggcgggagagggacaaggtctcattctgttgccaggctggagtgcagtggcacgatctcggctcactgcaacctccgcctcccgggttcaagtgattctcctgcctcagcctcccaagtagctgagattacaggcatgcgacactctaccgccaggctgatttttgtatttttagtagatatggggtttcaccatgttggccaggttggtctcaaactcctgacctcaaatgatccacccgcctcagcctcccaaagtgctgggattacaggtgtgagccaccgcacctggcctctcacctccttttctaaccaaagtgtgtttcccagaaagaaatctgaaaatcataggatgaggaaattttatttcacttgagagagaaggtgtagtaaaatgtgaggaaaggtggagaagaaaacaattcgagtgacctgagacacctctggatcttaacactgagaaatggcagcatcaacagatgacaaagggaaataccagtggggaaacagtggagactgataaggcaagtggagggtacttttctctgggcttgagccaagattgtcacattggcccagccagcactattgctagaaggccatgtgccttttggggaagaggaattaggctgtcagtactatgggacagtagtatggcccatctggggtggcttggtagaagctggcccctccagctatacctccaccaaggcaggaagccactggaagttagcaactaggaaacaagattagatgactagttcaaaggagaaatgaaaagcgttctaggcatgtctgatctaggttgatgcaggggaatctttttgagtgtgtctctcccttgggaaggaaattcaagtctatctgtaagctagaagtttcctaaagcctgaattgcagaggttttgtgttagtcatcttaaggaggctacctgtggtccccaagtcatgcccaatggagagatctgg

SEQ ID NO: 1367 - DNA, 1047 bp, Homo sapiens
tgaacagctttggtgagcatttattatagtaaaggaaattgaaattgtaggcatccttatctggcaactcagtttgtagtgtttgctgttggtgaattttaaaagtgtagtttgatttacattggattaaatacacctgtagaaacgtgccctatgctgctatcgatgttagagggccctaggtagggaggaatatgatttcaacattttaaatcccaaaattttacaattttgggatataggtgctttgataaatgatttagcattgcaattaactttggaggacatctgcagtataatgaatcattatttttatgggttaaaatgaaatatttggattatttgtgggttacagttgcttgtgtcagttctgttcccttttactctaaataaatatagttttcagtcatgtcatatataaatactacgtaatttaatgttagcatcaaaatggctttttgctgccctgctttcaaataaggagaaggaaacttaccaaagtccaaaattagaacactgagactgggcacagtggctcatgcctgtaatctcagcaccttgggatcacttgagctcaggagttcgagactagcctgggcaacgtggtgaaactccgtctctactaaaaatataaaaattagccggtgtggtgatgtgcacctgtggtcccagttactccagaggctgagggggaaggatcgcttgagccctggggcggggcagaggttgcagtgagctgagatcatgccactgcactccagcctgggtgacagagcaagacactgtctcagaagacaaacaaacaaacaaaaaacgttgaggcagccagaggatgatccctgtccttgctcacaaatgactgctcccttaagcaatcaaaggcaaggaaggaactctacgtacttctccccctttaaatgataacattttgaggagagctgcttagctgagtgagctgccttttttttaaaaaaaactcaagccaacccttccttagatgatttatgaatgtaaaatgcttgttaactttctgctttatggtttatg

SEQ ID NO: 1368 - DNA, 1022 bp, Homo sapiens
atattctgtggttctcatcagatagaaataacatatttgaaaatgctttgtaaatgttatgatactcaggattatactgcacagaaaaaaaaaaatcctaaggcagcaccaacaaaggtattcaacgtagtgggtggtcttttacagcattactttgcccatattcattttgaagacctgaaatgaagttgaactataaattgctctaaaattcgtgaagcagggtgaaaaggtctttgctttgttttacatttaaatccagctgtctattttctgcttatactagtgctttttcatggcaaaaagacagaaaagttcccttctgcagtctccagtgtcttctgacctcacagaaatgttttcatgcttttacctagcaggaccaccagaggctctgtcacacttgcagtccctggcccaacaccgaaatccttctggaatctgtgctctgggggctgtgccgggtagagagggcagtgggaggtaagagctcttcacccttcaccaccttctccacccagcatggccggcacactttggtctacggcacatctccaagtatagagtgggttttgaatgctgttatgtctcaccgtggggatgggaaggaatactctgttttggactatttggaggtacatgtgagtggattttattaccagagtaggaactgtttcaagttaatgtgtcttttatgttgcttttaagacaacttttgtgccgcttttatccattcttccttttatccacagaaatacaaatttctaattatagtatattttttctatttttaaaattgtgataaagcatatataacaaaatttgccatcttaagtgtacagttcagtggcattaagtacattcacactgttgcacagccatcaccaccatccatttccagaacttgttttcatcttcctgaactgaaactctgtacctgttaaacagtaactccccatgccccaccttctttcagcccctggtaaccagcattttcctttgtctctatgaatttgactatt

SEQ ID NO: 1369 - DNA, 1023 bp, Homo sapiens
tgccccgtatgagttccccgaggagagccccattgaacagctggaggagcggcggcagcggctggagcggcagatcagccaggatgtcaagtgagcccggcaggcagctgcttagtctccctccatacccttccagaccctttcagagccccttttctgcctctttccctcgcaccctgccttggggggtctgcacagggagcatagagtgggctttggagtcgggctgctgggttctgttctgtcttctagccgccggtgtggctgggtcatgttgcttaacttatgggtctgctttctcatctctaaagtgagtgagaacagcacagggttctgcagctctgcctttgaggatcacatgtgacaacatgtgcacagcacctagtgcggtgctgggacctgggagcaagggccgtccctcgggatctgcctgacttctcacccctcttgcctctaggctggagccagacatcctgcttcgggccaagcaagatttcctgaagacggacagtgactcggacctacagtgaggagggcagaggggcacaggggatgcggagctgcagcctgcccttctgccggctctaaacccctcccttgaatgcaccccctgcaggctctacaaggaacagggtgaggggcagggtgaccggagcctgcgggagcgtgatgtgctggaacgggagtttcagcgggtcaccatctctggggaggagaagtgtggggtaagtatggggtgtatgttgggtgagtcgccatcacctatgtcttagtgggttcccccagcctggagagctgggggtgggggctggaaagggcgtttctctttccagcagctggaggggcggaggggcagaggggctgcctaggagccacttgatgtgctggaccagggtgatctgagtgttcctgggggtcagggcctgtgggaggtggggatagtttgggttctaagataaggccttagggaggaggtctctgagtccaagactgaggagagtgatcgcatatcctcatctccag

SEQ ID NO: 1370 - DNA, 1061 bp, Homo sapiens
cactgttgataagacaaagtctatatcgtagattgtaaaaactcattaaggcagggattcttgttcacctttgtatccagtgtgcctagctttgtacccagcatacagtaggtactcaaatattaattgctcacctggctaactagtaactgagatgtccatgtggccacctaccatgaataactatcccttttcctctcttcttcccaggaggaatattactaatgtgtattattgtcaggccaagtgctgatgattttagacttatattgcattagctaaaagaagcaggctctgccaggaatgtgggaagaccctgttttaagtttccatttaccagtaaatgtgccccaccgtgtttcttattaatctttctcttctaagttttattctttagcatttacgtagtactttgtaataaagtgtttcatgatgactaattaccctttccctagtgatgataaaagacatttattaagttaatggatcagttgaggactagtcaaggtcacatagcaagtcctaggcaatctgtttttcagaactgctgaattgaacattaagacttaagtcacttttgtacctctgccatgtgttgataacgtgaaagcatgggaaaagtaagagggaaaaaagtaacttggcatggtacttaatggtgtgagaaaaagacctcttcaaatggtgcagtccttcacctatgagaattctaccctggctctagaccagtaatccttggattattctgaagccctgaggcccctcaggaattgaggatgttcttgatgccagaggatataggttacttcagggtgaccttgatggtcctcagttagatcagatcccagtgtcactttctggtcagcttttattcattttgtttgctttgtttgagacagagtcagcttttattcattttgtttgctttgtttgagatagagtggatgtccatcaattaaaagcataaatatctagattcttcagctataatcatgacttactcagttttgtatgccaaggtctatcacactgctatgaacaaaataggacttgttggtttg

SEQ ID NO: 1371 - DNA, 2412 bp, Homo sapiens
cttctaaatactactcccttctaaaagaaaggctcctgagagaaatggttgattccaggtttggagaagaggaagaacaaggtgagcctggtatatcttcttttgtcaaaaagagtggaaggactgtaatggaatcatgtcaaaggacagaagagccagcttgaaggaggctcccactggcccaatttgagacaatatgagtattcagtgcaattaatgtataattaagtgtaatctgttaaatacataaaaatctgaatgacaaagggagaagatttttctttacaaaagaatgccagctaatgtggaagcattgatagaaaaatagaagttgcgattctataaccttcccaatataattggttcaggcaaggattattaacagatggtgaagtcattagggaataggatattaacatgatgaaaaaagtattgccctacaaattaacttttacttgcaaaagagaaaatgtacctttcaaagaagagatctgatgttctcactttaaccaggactcaatcttagcattgctaatagtggaacaacccgacatgtgcctcctgataatgatgcaaggtgaaatatactacataatgcaggaaatattcttgccagaattttaacctttttcaaataaaacctcagaactgaacttccagtttataggaaggaaaccctctgaaaaattcaaaacatgagtgattttataagacaattagtctggattcctcaaagaaaagtcagtatcacaagggggtgggagacattggagagactgttctagattagcagaggctaaaggaacctaacaaccaactgcatttaatgaaccttgaatccatgctgggttggcagggttgaggagactgttgggatataaataaatattcttgagaaaattggggaaatttgaatataatctggacagtctggatatatgaatatatagaataattgttaatattaagtgtgatatgtcatcatggttctgtaggagaatattcttattcttagaagatacattctgaacaatttattggtaatgttcatgtttgcaacctttatttttacaggaccatgtgaaagtatgcatgtgtatgtgtatatatatagagagagaaaaaacctattatggaaaacggaaagatttattctaggtggagagtacaggtgtttattatactatgcttttgaatttttttatgtgctgaaaatgattataataaagttggaaaagtaaagtacaacaatggtgctagcgagtggggatggagggtagggggtgggagaggagactttaatgttgtcactaaagtagtgggtatgttccaggaaccaggatttcttcagtcacctgtactgatttttttttttaaacctagaattgatgataaatcaatatcgggagaaacagagatgactggcatgtgtttatataatattggtggtgggactgagaaaagaagtatggacaggtcaggcaactaggtaggtagtagatagctaaataggcattgaaacagtctgggtgtgtgttacattctgttgcaaattgtggtgttcaaaagattgggaagcccttttctgtcctacttactgccttttttctaacttcttatgtttacttctagttggcagttgcaggcctcgattactcattgactggagcactttaggagataatagtgaagtgaagtcagtgaagtgtttagtcttacaggaagagaggggagtagctcacaagggtcaaactactctttggcagagtttttcaagctgtgtgttccttaccttttaagtgactcagcagtttggggcctggtattgcctcacctcttctcgccgcgagcattgacagaagatctagttgagtcctactttgaaaggagtattgcttctgactgtggaattggattctagctgtgtgtgtgttatatcctgttactgttgagacacagaggcgggagtcggcgggggaagatatgtgctgagattagtcagcctgccctccctctcccccaagaaactcaggccccatctggggagagtgagaacttaagaaacttgagacagggaaggagagccgggagcagccaaaacctgctaagtctcagaagactggtttctgcacaagggaatggaagaagtgactggaggtggctgtggattcaactctggcctgagattgattcccttgagataagttgttttctggtgggtgtgtctgggagcattgtgttgggaagggaattcctttctttgggaaacacttttttttttacttgaagtgaaaggtattcagacttgtgtatttcttgtaccaaggagtgggtgtttattgataactgtttctttgggttcatctgaagtgggaatcagactggtaaatatcaagaaaaactgggcatggt

SEQ ID NO: 1372 - DNA, 1112 bp, Homo sapiens
cactatgagattctgttttctgaaagatttgggaagaagggtaaagagtttaatctgtcagggttataagaggggaaaaaaacttgatggaatgtgagaaagatttataaaattgaacatatactaaacgaaattggttcttaaccttagcccctcctcccaaatcctgcagaaacaattgggaagagacagtgattgacgtgttgggagaagtcagagagtagcctcggccttcccccatttctggtgggaaagttgctggcttagtaggaaccatgtgattacatggcttttagggaaagacaatgtatccttaaaaaaaaaaacatttcatggattttccttataagttttcaactttttgtcttccttttgtatagcaaatccagtttgctgatgacatgcaggagttcaccaaattccccaccaaaactggccgaagatctttgtctcgctcgatctcacagtcctccactgacagctacagttcaggtaggtgtgaatgaactccatgtcctctctaatctctcttccctgtttgctaccagtgctcttcacttagcaatctgaaaatacctcatgttatgactgcccacctttgtgctgaaaactgttagtggctgggcagtgggaatgttctgcagccaagctagtagctggggaagcttttgtcgactcgagactttcttccccctggctgtctgtgtgtgtggtctgtggccagtgcccagttggtaggactgggctagttcccattcccacattgatccgcccatttcaaaaggaagaaatcaatgctattttggctgacagaattggacttaaaaaagaagtgcattttgaagcacgatttctttgtgtaaaatataccctgtcacctatctctttctttcttgtctccaagactgcttagattgtaacaataaaattagtattttggcttctcttatttattaggttattctttctgttggaatatcctcccctgttagactctggagcaggaaagattcagactactgtaatgtaactccagctctgtttctttttagttctctcctcctgtcttaactctctgtaaataaagtctttttctgttttgtattgtgtct

SEQ ID NO: 1373 - DNA, 1006 bp, Homo sapiens
agagctgcaacatggaagtacccacaacagtttcattcataccacctattagaacctagaggagcagaactgagagcgttgtaaaaggtagctccaattaagggtgttcccttaacttaaatgaaagtcccttggggactgcactctgtagagttggggaccactgaggtttttctatccttgtttttttctttcctggctctagctgcatcctacacagatagctctgatgatgaggtttctccccgagagaagcagcaaaccaactccaagggcagcagcaatttctgtgtgaagaacatcaagcaggcagaatttggacgccgggagattgagattgcagagcaaggtaaagaaagggagtgggttaggggaccagaaacaaccctcttgttggccatcagaatccacaaacaacttaagacttgaaagctgacttgaaagtgtactgggaagaaagacagtattatggactttcggataaacacttctctctctatggaacttaagtcttgggattttgttctctcttccttctgttctcagcatgtggtgattacacacagagtagtttctgttttcctccttgccccaccccaccactgtattcaaagatctacatggcagaattgacaagtcctagatcactacgtggtagttggttatatgggatcttactatagctgccaatggcagagacccagattgcccagaagcagctgatgaggaagggttttaaggtaaggatgtggtgacctagagtcttgtttggtcctgagcaccctctgctggagcagagtaaaagtgactgacagttaaatcttggtttctctaccccagccactcccagtaaggtcctctttactcttgtgttgtttacacattgaaggcatgttctatactgagagagaatagagaaaccaaacagactgacaggacatggtaagacagcatagaaaaacagaagttagtggtttcggctgagggtacagtctttctggtctga

SEQ ID NO: 1374 - DNA, 1025 bp, Homo sapiens
ctggatgatgggggagacttaacccactgggtttataagaagtatccaaacgtgtttaagaagatccgaggcattgtggaagagagcgtgactggtgttcacaggtaacagattctggagtagctgccccttgtgtccttgcctcagcaaactctcctggtctctgttaggctttaggactgtgtttcagacttataactaaatgggaatatcttcattagataaaattttgagtttttacttttgaaaaatcaagttgatcctagaaggaagttatttcaggttctagttcatacatttttctctcccatttactccattgagtgattctcaactagtgttgaggggcgggtagggaataaatgtatcttgaaaaactgtattcaatattgtattatcattttatatttgaaatatgaaaaacaatcctattgtaaaactacatgttatacacactacaaaaagtaaaactgggcaaaatattcttggcttgttggaatactgaaaagatatctgaaagagtgtttcttgggggcacattgcgcatgcttactcacacacacacggaaccatatcagaatcattgatagtctttgtttatcagaagtaggcatgggtttctattgaaaaatgctgatcaaaggaaataacactccctataaagggaagagaagtacatttcttcaattgaaaggcttttttttttcttccaaaaaaggggtaaagggagaagaaaatgaaaagaagtgtggagggatgacaaggaaataatcatgttttctaatatccttgggcaataaatgagactgggaagggcagcatggaacttgaagagaattaggcagattttgccacaaattatgttgtgccagctaacttggtttttgtttgtttttgtgacctcttctctctttaggctgtatcagctctccaaagctgggaagctctgtgttccggccatgaacgtcaatgattctgttaccaaacagaagtttgataacttgtactgctgccgagaatccatt

SEQ ID NO: 1375 - DNA, 1066 bp, Homo sapiens
tgttctagcttgtgatccctcaaagttgggtcatacgttagtgctagatactagaaattttcacttttccactgatcagagagacagacattaaaaacaaaaatagaagaaaggaaagctttcaccctgcagcttcttagcagggaacaattgtcttgccaaaacttttttcccttttctctcccattttcttttacccaatcccttcttactccttgccagtgtgaccatgctttcttctctgtagatgttaacagttaaggcctattttcctcgggcacttaaccaaccaatcagaacaccacatctgttaggggaggtaacctggccaacagtgtatccatcacgttagccctgctggagggaagggacccacattcacctgccctctgacctgccccttgatcccatatctattaccgtgtccataggaataataggtaagggctctgtctctgtcaagccatgtaacaaaggacactgttaaaaaaaaaaaaaagtctggcatcagagggagcatgtggagagcaacttgggaagaacaagttcattttgtattgaatgatttttaatgaatgcaatattaatccttgcagatgagcaataatcattaaaatcgattaaaatgataagaccttattggcagtccgtatgtgtcattctttgttaaacagcaaaacttcattagaacctgttttctagggtgtgacaagttataggtcagtagcatttaatagagatttgttgagggcctaatatatagaggctggatacaggattcttcaaagtaatacctgaagttttgtatgcctgctctgtgccaagcaccgggcctgggtactttcactcctaacttccttcaggaagcagacttgctgcttaagcctcagggttcctcatttgcatagtccttctaagacctaatttctgaagaatgcccccaaagttatgtaagcttcagcctcctcccacacctgtatccatttctgaagtggtctcagtgtcttttttttttttttttctctttatttttttgagacaaggtctcactgtcacccaggttgga

SEQ ID NO: 1376 - DNA, 1027 bp, Homo sapiens
agggcctgtaaatatctatatataattctgtgtgtattctgtgtcatgttggggtttttaatgtgattgtgtattctgtttacattaaaaagaagcaaaaataattcccgttggcttgtctacaggaaatatggcctctacgtatctcctccaggtctagaaagtggttttttctgctagcattgctggtcaacgcttgtccttgtcaagctgcctgcctttcccatcctgggggaagaggagagagagttggcatttatccagtgtaagttaaccccacagtaatctgggattgctctagcccaactccagggcactaggttactttactgacacattgtcctgcacccctgggtttgctgtaatttcagtaggagccccaggtttctctggatcacatcactgagctggcctcagccaaaccagtgtcagtgctatggagggaggggctaggtcaaagcaagggggtctgctgctctaggtcctccctggggcaggtggttgggactgaggggaaacttcagtactcagagcctaggaagcagaccatcaggagtcaggttcacggtgggaaaaagtgttggagggcccaggagccccctgtggctgagagaaaagcaaggaaaatctttgtagtaggtgtcagtggacacctggcgcctccactttggcctccagacccctggtttcatctgcctgagaagatattagtgttttgatgctggtgaaaggagtgtttcctttttagaattcctggaagctcttattttacctgtaggcagttgttttgtaggttgttaaatctccaaggggtcttgacttgtaaaggaaacatgttctggggagcatctccccttctttgggtcttgtgttcatgcctgcctggcctgggacctgctgagcctcaggacaggccttttgatgtgccagcatggttagggacagcaggggtggaaggcagcagtgtactcctgatggtcacacagctgtgagatgggaagtcccatctgtgactgatgggccctgt

SEQ ID NO: 1377 - DNA, 1007 bp, Homo sapiens
taacagacgtctgaagggcttaccacaggtcccactggtcccagcctcttagtattggaggagagattgctgggggagccagcagtcgctaagtgggaaggaagggggctccagcatcagaatcaagggctctgacagctgacgcttgatgctcaccaccttccaggtgaaatgcctgggatgagcctgtggaggaggctggggcaggggaagtctttcctctgctggataaaggaaatgttagggtcttcccagttcctggccatgctagactcttcccatctggagctgcagagggtctgcactttggggttgtaattcaggttgaagtgtaaatgggagaggtggggaaggaggattgaatgccttgcatgagaagcatttccagctgctgactgaggtgggcagactagactgatgggccccctggctgtggccctccagtcctgacctggtgtccgtgtttctgccaggaccaagatttagggctctggcatcttctctgggggagacaggagcctcagcaaaatgagctgggatttcaggaggggccacttcccctttcccttcccagaaggagtggccagagcacaggcctggccttgaggaaccactggcctgggcggaggtctgaggttagctctggagtgaggctgagggcagggttatctggagacggggccgtgtcttaggggtgtgtgggaggaggagggacacagctaatgagaagcaggtggaagggctgctcatgccccaggcaggggacaggctggctgggatggcccagtaagtaggaggacctgtcacctcacagacaatcccacaaaacaggctccgggatacccattcatattcattatatgtgaagtgggcggttgtaaagttagctttctcttcatttagctgtcactggacagaaaaatatgagctgtgggcagatgcccctggatgagagccagtagccagtctctggcctctctgtgccctcccctaggagcccccgaccc

SEQ ID NO: 1378 - DNA, 1065 bp, Homo sapiens
tcagctggggtgagaggagaattaaacacgaagggcctagcgttctaggctctgcaggctcccacggccagtggccagccacaggcttcctggtgatgataccagatttttgttgccgcttcttttctttctgctgcagcacaaactgtctttccagaaagccctggttcaggttactgcttgaaatgggtgtatgagggaagggggaagcacaggttgatttaggcaagacctaccgcctcctccccaagtaaatccagtttccctaactcctttaggtgaaaggggagaacgggggaggtgcttcccccattatgcttcgacagctaaaaaaaaaaaaaaaaaaaaaaaaaaatccctgaaggatggctttagattctttaaagaaagaaaactctgggggctggtgtcggatctcatggtcagcagcctaaagcctggctggagtctgtctgggagacaggaaagagcaatgtaacttgttgggtctggggactgctgcttgctgtggaacctggttggttcctccagcatcccaaattgtcatgttaatgagtctcagagcaccctccctttcccagcacccctgtgctggactccttcctagtcatagaagaaggcagggtagggaattggggaacaggcctgcagggaaaagccaggctggcataaatgccaggccagggcagatgcatcttctgcctggaagagaagggaggagcagaggtctcaggggccatggcataccgggctggggctgcaggcagccacgagaaggcagggatctttctcaggactgacaacaaagctagaggcaactgtctgggtttctttccttgcagccctgagactggctaagaaggtgagggcatagtgatgcccctggcctgggtctgctgtgagttctacagacttctcatgtaggtcactaaccttgctagtgttagcacttggctgtctgcattaggggagagagggcaggcacacatcattcagactctttcaaagttgggggtcggggaggagagatagagatagagatggggaaaggggacaaaccaggga

SEQ ID NO: 1379 - DNA, 1050 bp, Homo sapiens
ttcgtgcgcatcctgcgtatcttcaagctcacacgccacttcgtggggctacgcgtgctgggccacaccctgagggccagcaccaatgagttcctgctgcttatcatcttcctggccctgggtgtgctcatctttgccaccatgatctactacgctgagcgcattggggccaggccctccgaccctcggggtaatgaccacaccgacttcaagaacatccccattggcttctggtgggctgtggtcaccatgacgacactgggctacggagacatgtaccccaagacgtggtcaggcatgctggtaggggcactgtgtgcactggctggcgtgctcaccatcgccatgccggtgcctgtcatcgtcaacaacttcggcatgtactactccctggccatggccaagcagaagctgcccaagaaacggaagaagcacgtgccacggccggcgcagctggagtcacccatgtactgcaagtctgaggagacttccccccgggacagcacctgcagtgataccagcccccctgcccgggaagagggtatgatcgagaggaaacgggcaggtgagattaggggttgggaaggaaaatcccttttcccccagtggcctagggagtttccaaatggacctcagaccttgggatttggcatgtgttttgtgtggggcttccctaagcataaagatgtgcctttatgagggcaaagtgttgaggccgaatttctctgtcctctggctgggtctccgatagcttcccgaacatcagatctttggagtgagtattccacccagggtagggtgtgatgggcagtacatggggctgtatattagatgccctggttttaaatccaatcttggccactgtgctgtgtgccctgaggccagtcactcaccctctctaggcacctgtaaaatgggaataatatcatatcctaccctcaagactttgagagacccaaatgaatgacagatatgaaagtactttgggaagtcagaaccacattacaaatgtcaggtactgtcaatattagccagtgagcagggcagctg

SEQ ID NO: 1380 - DNA, 1044 bp, Homo sapiens
ctgctccttccatggtcagcaaagataggatggcagggcagcgtcggggctgggcagaggctgggaaatctgaggctccccaaaaggcggactgggcagagcaaattattgcatggggttgggggtgttgtgtaaagcctgtgcccggagtgtccccatctcggcacctccctcagtcttgggcagacacagaaatgtccttctggaaaggtctgttcagagtgggcactgggatacccccaccctgcagtggtttgtggggcctgcctcccacttgctctcagaatgaagtgacctgacccataagaagtgagaagaggggatgtgggggcctccatgcaactgcccttcaggagggagcaggcccttgaagtgacagggatggggaagcctgtggaacaggatggagatgcgagggcccctcccccaacagcgagaggactccctggcatggagggcctgggctctgacagggacacaacgagccgggtgtgcaggttcacagggatgccaccactgttttctcctctgacttgcctttctggttcagggaaccgaggccgctatttctgtggcagccctcaagttgtcaggagcccaagtttccacggcacccaccgcctccttccctctcttccctcccacagggctgggtctggctcatggcacccctacggtgggcacagatgtccctgggcgacaagatgcagcattgccaggctggagccctaatgcctcggggagctggctcccacacatccctcctggctctctggcttcatctgggagagatagaacccagatagcaggagggctgagtagactgtctgcccttacaacctctcagcacctctgggcctgcccagggccctgggaaagggcagggtgagcccaggcatttgcagaacccctgcataccaggcactgccacaggaagtggctgcctgtacaggcgtcaggctcacccaggccttgagcctccctccttgagagaaggctctctcccacccaccatctgagagtagagtttgttttccttgggct

SEQ ID NO: 1381 - DNA, 1030 bp, Homo sapiens
ggtccctttctccactgcactggagctttgaagacctaagaggctagtggttcctggagctagtggttacctgaacaggtatggcgatgagctacaacatcacctgagtcaccagagttgggttggcagaggggtgaagggttcaccccattccctgacccatccatgctcttcctggccttttagccctgggttcctcatgccttccagctctgctcctggtctactccttagcccacaccctgtgggtcagcagctggcttccttctaacgtctcattctttgtttctccctttcttttgctgaactccctgtccccccaaccccagaaggcaatgttgagccgaaagcgtgcgtcccagtgtctcacacctgtgctctttaaacacagagacctgccaagacgccctctcgtccaactatgcccaggctgaagtcctcaccctctcttaaagcggcaccaacgtgagagagacaggcagacagacagaaagccagaggcttagggaaactctggaacccagacaagaatcttttcgctgggaaagactcagatatccttgtttgcacaggactggtggaaaatctcccatgcgaccctcggggcccagagccatctgggtctgatgttctgttccattgtacatcgaagagatatatatgcacatatagtatctatattcatacatattatactcttgtgtgtagtgcacgtgctattggtggtttgtcttctttgttaggctgtgtctccctaagcccttgccccacccagagtttcccgtccccttcactgatttctgttgtttctgctgactgtgtgggtggaatgtcccaagaaaagtgcatctgggaattgccagtccagctgggtagtcccaggctcctgtcttggggatgtttcccctgtcagcaagtaacctggtgaagtctattgaaggccagactgccccctagggtcactgcttcactagccgcaccccaccccagattggggttctacctcccaccccacatcctcgttgtgggg

SEQ ID NO: 1382 - DNA, 1269 bp, Homo sapiens
cacttggggtccagaaaacatttttagctaccaaccatgagtcagacttcatccccatttacaaccgtgtgactagagggtagggagttggagaagattcctccagccacagaacagctccttgaacaagcttttgctaaaagacaagtctcctcatgcccttccttttccgaaaagtcttctctgactccctgctggataaaggttagaagcttgagcgtggcttccccagaaccttcaccgtctggtcccagcctctcttttgggcctcagtcagtccctgccctccctcccacacactcgcactccaatcccatgcacatagaagtgtttgaatgtatgtactttcctgctttgggttacacgcttccctttgcttggagtgtcccctggctttcctccacctgtgaatctgctcatcctttgtgaagtcttttctttctttttcttttctttttttttttttggtacacatttattgggtacaagtgcaattttgccacatgcctagttgcacagtagttatatcagggcttttagagtatcggtcactcaaataacatacattgtacccattaagtaatttctcattgtccacccctctcccaccctctctccctctgagtctccattgtccgtcattccactctctacatccatgtgtacacatttttaagctcctacttatgagtgagaacatacttgtctttctgtgtctaacgtatttcacctcttgttccggctgtgttgctgtaaacgacataatttcattctttttatggctgaatagtattccacgtgtatgtgtatcacattttctttatctactaatcatctattggtgggcagggcatttaggttgattccatgtctttgctattgtgaataatactgcagtaaacatacgagtgcaggtactttttttttttttttaggcaagatctagctctgtcaccgagactggagtgcaatgataccatcacagctcactgcagccttgacctctcaggcccaagtgatcctcctctgagtagctgggaccacatgccatcatgcctggctaagttttaattttttgtagagatggggtcttgccatgttacccaggctggtctggaacttctgggcttgggcagtcctcccgcctcagcctcccaaagtgtagggattataggtgggagccaccaggcctggctttcttctagatatattgatttcttctgtgaagtcttttcttttttctttttttttttttttttttgagatagt

SEQ ID NO: 1383 - DNA, 1048 bp, Homo sapiens
attactaaatttggaccctcggctgtttgaggtgactggggcaaagtctagagggtgggtaaaagcaggcaccatcctgtgggaacacagaaggaaagagccctggagcccagacggaggatgggctgggggaggtggagtggagagagaaactgatggagaactgggatgacttttggtgggatctgaccctttcatggagtcacagtttctctgagttaaaagtatctttctagggcatctaatccagccaagcagtggagcaggcacaagtctccagtctcagccagaggccttggaagatgaagaattccatttcctaagactgggggcacactgcattaaaataaatgacacttggtaggctggagttgagggaggttctctctggcctcttgaagaaactagacagcagggatataaggtccagatgcctttacacctggcctcaatttggtctcatattctgttttcaggaacaatacaaatctgtagcagaactacatgagttccaagctgatagcacactgataataatagctaatacttatgagggattcccatgcactagatgcaattctgaacgctcacttgtgttagctcatttaatttttacatcattgctttaacggtattagccccactttacccaggaggaaatggatgcactgggaagttcaaacacttgatcatcatcatgcagcaagttgtgatcaaaatcagaggatgagaaccagaccctctgactccaggagcagtattcttaactattataaaaagccagccataggcggatcacttgaggtcaggagttcaagacctccctggccaacatggatggtgaaactccgtctctactaaaaataaaaaaattagccagtcgtggtggcgggcacctgtaatcccagctactcaggaggctgaggcacgagaattgcttgaacccggggggcagaggttgcagtgagctgagattgcaccactgcactccagcctgggtgacagcgagactccatctcaaaaaaaaaaaaaaaaaaaaaaacccagc

SEQ ID NO: 1384 - DNA, 1042 bp, Homo sapiens
aagttggatgaagtaactcgacgcatcaaagtagcagggcccaatggttatgccattcttttggctgtgcctggaagttctgacagccggtcctcctcttcctcagctgcatcagacactgccacttctactcagaggccacttaggaaccttgtgtcctatttaaagcaaaagcaggcagccggggtgatcagcctccctgtggggggcaacaaagacaaggaaaacaccggggtccttcatgccttcccaccttgtgagttctcccagcagttcctggattcccctgccaaggcactggccaaatctgaagaagattacctggtcatgatcattgtccgtggtgcgtcctaaagtccatgtgtaacttgtatttactactttgacatggttcctgttttgtgatgtgtaatgggatacagcatcagatgcaattttctttttagttgttagttgtagcattttcttttttatatttttataaacgtctttaaaatagaaatcaggacagtttagctatttttttgtttgtttagctattattttaagtgaaagggatgccctaaaggtagcaggcaggcagacagatttgctttaattaggagttcccacccttatgagtaattttttttctctattcagttgttttttttttaatcttgagcttaaaaaatcctcagagttacaaaaccaaaattttgaaaagtcagaatttggagaaaggagtccactgaccatataaagagagtaatagccacctaaaaatgactcgattggtgtgtaggtaaataattcttttaccagaaatgtgtgtgactgaaatttgatcagggatctcaaagatatgctggtaaattgtatagcaatgtaattattttaatcaggtatttgagtatttcttaagatacagtttattcccagagagtttgctttaacatgcattttttaaatcatttgttctagagttctgtatcccatatatgcacttttggtttgtagcagtaactgttcagtaaaaattaaggactatgttacaaaccat

SEQ ID NO: 1385 - DNA, 1702 bp, Homo sapiens
ttttttgttagtgtgacagcgtacagaagagtactgtgtttttgctccatgtttgtttgaatctttacctgacattgccgcttttgttaggtctgggcaatttgtgcttcagtgtttttgaaacaatggcttgataccatttctaaatgtatgtattataaaaaactaattatgtttagttggtcattacctacagagtgccatagtccacatgaacctcatatttgtactgcccattcttttgtgcaggttcataatatccataaagtatctagttaaaccttaagaattcaaatgaaagcaaaagtctaaaaccggttctacttctcattagccaggatttaataatcccaacgttgaatgttctttgtaacaaccaatttttttctatctttcttctttaattattttaatgtagttgatttttctggaactcagttaaaatgaatggaaagaaaacttcaggatatcatttaatgactattaagtattattggtaaaaacgtgaagataagacttttagatcacagcttcaaattttatggaaaattaagcaagcaatacctagccaatagttctgcttaactttttggttaagtattttgttgggattcctataaataatttttcacacaaagttttaaatttctggtgtactttgactctcaactgagagtggatagagtttttcttttgaggattacatcttaaaatgtccatcgcctggctggttataagcatttgtcaccttttgaaggtaaaatatactctggcccttcttgactcagttacaggtcattttaggtccagtaataagagtcaggtgtttggttattgctttcagagtcagacattgtttaggtttatttaaaaactattagcaggttttcactgacaatgcttttttaaaaataaaaaatgtaaatccacttttttaaggcagattgttcattatgcatatacagcttgaactatagtttgggtccatataggaaccaatcaccaaaaactctggtaacagaattaggaaatcctcttgagaagagggccttaatgaccttttatgtgaaaaaaattttggagagaatttctggacatttttttttctgtctctctcacagggtttggttttcagataggagttaggtatgagaacaagaagagagaaaacttggcgctgaccctgttatagtggttatagtggtgtccctaaagggaggaaatgatttcaggtaaccacagtgaaatgttaagctgaatgaagagttttatatgtatggtttaaacagagttgaaaagtgagattcctgaagtgttctttggctgtttaacaattatttgtatgagtgttttattaaaataacggctgctgtctttggtaacatagatgagggtggatttttaaatggctttgtatcgacccctttctacaataatggagtagtctatgttgctccatataaattacagaatgaaaatagatggggcaaaagtttgactaaactttacctttttatagtttcactttttaagttatatttagaatatattgatagattataaattgattgtgaaacttttttctgaattttttcaacatgttttactcagttacatgagttaaaggatattttcagtcctgttatcttcaattgcagtctttaaaaaaacccaccctattgttctacttgttatatgtcta

SEQ ID NO: 1386 - DNA, 1087 bp, Homo sapiens
attcaaagctctaatggacctttttgaagagaagttgtggcttatgtggagtttacatgggcctctgatggaagaaagctaatctgtttagtatttgtgcattttactaaaatggcagcttaaagttgtgtatctgctattgtgatgccaatgccggtgttttaagtggaaaaaaaatgacctctttgatttgtgctgtgtacacaagatttctggaaaagtaaagaaaaaccctttttatggctcacacagcttaagagtagctgtctctcaaacgtgcgctcacagttgagctgcttttgttttattctaaataaattgtttcttttgaggaaaatgtttttctgcctggaagtgaattgacggcaaacctttgacccctttgtttgcagccgagggggtgcttgctgctgctcagatcttgtatgtcttgagcaagaagcagggagaccatcaatttcattttgactatcacggtgtgtcaattctgaaggatcactagtgttactgttgaccccctttgtttgcagtgaaggggatcatttgcttctcggttctcaacgtgatgaggaaatggtgctgtttgctggcacgcaagaagccggggcaggcaccctaagcctcaccacagtgcctgagtcgggggcttttgctggtttgaagagctggagttgctgaaatttaagttttgatttattttgttcacccatcacgtttggccttagtttcatttttaatttgaagaaaagtttgaaattgctttatcttgcacttaacatttgcaccaaattgccaaaagaaggagaaatgctccgtttgctttttaaatgttaatgatgatgttaataaagcctttcctgacacatttgaggagctcctccgtctccaggggcttcttaccagagttatgcagtgatgggtttagttctgaatggatgaagagttcctgagagctagcgtttgtaattagaaccgttacttggtatctgtgccttatttgacctttggttccacatgccttggatgtgcatgcaccgtgacggtttcataggtacgaacgcacactcaggcccagtcacttcggttg

SEQ ID NO: 1387 - DNA, 1088 bp, Homo sapiens
gcgcccagcctacgataagtatcttaatatatgccatttgtgtatatttatgtacagaaacacttcagtaaactagaccccttaattgtaatttttctgcattctatggcagaggtctcaactctggctgtacaatggaatcacctgaggaactttaataccaatgactggggcccactctcagagattcatataaattgatgtagattgagtgggtttctgcaaaggcccagttttgttttcattttgttttaagtgctcccaggtgattgtaacgtgcagtcagggttgacaaccactgctctagagacacattttatacctacaaacacacacaatcagccttttaaggattgcttgaaaatcaaaacacaaaactttgagaatgtaatttgggttcagtacagtatgtatattgctcggtcttctagaatctgttattgaagtgtggtcctcagaccaacagcattagtctcagccggaagcttattagaaatgcagaattgcagggccttatcccaaacccactgaatggaacaagatcgtcaggtgatttgtacatatataagtttgagaagcagtactttagatgtagatataaatgttctatgtgataaaaactgataattagaatcttcttccatgtgcataggattctcagatttgtgcattagtcagtgacatttactataaagcatttttaaaaatactttcaacaagaaaagtggaacaaagtagttcttacttagtgagcctcaggtgaccagaaaattaccagaggtctctgtcaccaaggtaggggaaagggttactattttgcctatcctagttggttggttcttgattactttgctctgcttatctcttttcttgccttcccattctatcctcgtcacctgtcttctttatgagatagaaaatgttacttttttacaagtacaggtgcagatattggagacactctgctaataggtgccgcaggatttaggaaatttggtagtggtaggtttagagctttctgtgaggggatagatatgggcaggattgaggaatggttcctaattgcctttgtttcttaagtgtagtat

SEQ ID NO: 1388 - DNA, 2479 bp, Homo sapiens
cttgtgactgacttcacatttcttgaagcagtgaattcaatgtcaattcgcactttgagctatttttaatttgggggtcagaaaattgttttttattatcttagatcttattctcttgtacttctctggtaagtgaaaattggaaggacattttgaaagtctgcatggattataaaatcttgttgtagcgaagtctgattcttctttccattataaagtactatactactgatcagtttttttagtctctctactctcttagccaagcaagatgagttcgtctgttggggcacatacatttgttttcacctgggcagacacccattatttgtagaacctaagacacctgccagttggtgagtcatcttattgctatggcttcagaggactgctgtacagctggagtatttaggcttgaaattgtttgattaggtatgataagcacattcctctgatttacaggttgccatatataggtaacttatattgaactgtgactagttttgaggtagtggaaggaaggtaatatttgctgttgctctttaaaagttgtctcacttatttccttggtcctggcgtactacccttaagggatggacttacttttttcctgctaaaagacataagattggttgacagaagtcaaagggtggaacaccttgccattacttctgctcaatttgtcacttttaaaaatagtttaaaagctggaagcttgtcaataggaaaagtaaactcatttttaaaaatttattttcacaaggcaaataatgccttaaagtggcttcttttttaaaatttaatttaattaattctattctgatgaattctcattaaaagtgttgtatgcctcctttgttggtttctgttttgctcattagtgcttgcacgaggtaaaaatagaaatgaatttgtggattttttgtttgtttgtttggaaggtggctagaaaaaactttagtctttcgttgtgtgctatcaagtattcagatgtattctccactacttaataaggagtagccaactcatcctggctttaaaactgaaagttctatgtctcaagaactcctttgtttctgtctagacccagacagtcaccctaatcctagttcactctctgtatccctaaaaaggcctcactaagttgttattgattatcattttgaatggaaggagatttcataatatactagcttctgttggaatgtatcagggattaggttgtttatttttatttttatttattttttgggggttcggagtctcgttctgtctcccaggctggagtgcagtggtgccatttcggctctctgcaacctccacctcccaggttcaagtgattctcctatctcagcctcctgagtagctgggattacaggcgcccaccaccatgcctggctaatttttgtatttttagtagagacggggtttcaccatgatggccaggctggtttcgaactcctgagctcaagtgatccacccgcctcggcctcccaaagtgccaggatttcaggcgcgagccaccatgcctggccccaggtacttttttcaagagatgacttgtctctgatcctaagtcatgctagtctaattctcacagaaataaaacatgaagaattttaaatggattttaaaagttgctttcaagcactttagttattttttgtttgtgtatatgttaagaccatagatgacaaatgtgaaacaattgagtagatatttgtggcaaatgagtagccacatgaggcaaatatatagatataaagcctcatacaaggtgattctggcttaagagaaacactcaaggcttttaaaaagtattgggctttgggccaggtgtggtggctcatgcctgtaatcccagcactttgggaacctgaatcgaggatcacttgaactcgagttaaagaccagcctgggcgatgtggcgaaactccgtctctactaaaaatacaaaaattagccaggtgtggtggtgtgcacctgtagtcccagctactctggaggctgagggagtatggggcaggagaattgctcgagcctgggagacaggttgcactgagctgatattgcgccactgcgctagagcccaggcaacatgagtgaaaccctgtctcaataaaaagtattgggctttggttttatatgaggtcttcagagaaaccaccgtccaagttttgcactatgtctctcttaaaaacaattaaaataatagtatatgatttttttcctcacatggaaaaagctgattttacagttagacaaatgtatttactaaacatattttgcaaacaggacataacacatacctcaattatttgaaaaaaatcacaaaagtatcatttcagtccatataagtataattgcttttaataaagttaaactcctagagaatcattaaagaagaaaagccaggggccatgagctaattaatcagcaccagtaattaggttttaaaattggctttgttaagggctag

SEQ ID NO: 1389 - DNA, 1031 bp, Homo sapiens
aacaactacattattattgcattgtagcagatgtattttgtggttttaattttgacggaggtggaggatggggggtggttcttaggtactttgcatatttgcattctttttttttttttttttttttttttttttgagatggagtcttgctctgtcgtccaggctggagtgcagtggcacgatcatagctcacggcagcctccaccacctgggctcaagtgatcttcctgcctcagccccccgagtagcttgactacaggcgtgtgccaccctgtccagctaattttaaacaattttttgtagagatggggctcactgtgttgcccaggctggtcttgaactcctgatcactcaagtgatcctcccaccgcagcctcccaaagtgccaggattacaggtgtgagccacctggcccacattctcctttttgtttcaatacagacattaaaattttaggccaatttgagttagatttttattataactgctttcaattaaatcagcttcataatctgttgatactgccaagaagccagagtaatgtaaaggagaaagagtagggttttgtgttagattgtgtttgaattattactccactactcactgggtatttaatttctttgaccttcaggctgggcacggtggctcatgcctgtaatcccagcatttggagaggcccaggtgggcaaatcacctgaggtcaggagttcaagaccagcctggccaacatggcaaaaccacatctctactaaaagtacaacaattagctgggcctggtggcgggcgtctgtaatcccagctacttgggaggctgaggcatgaaaattgcttgaacccgggaggtggaggttgcagtgagcccagatcatgtcattgcactctagcctgggtgacaagagtgaaactccatctcaaataaaactgaattattttaaaaaataataatttatttgaccttcagtttcttcatttgtagaatgggcatcatagtatggtatctctatctgcttctgaaggttatcatgaagact

SEQ ID NO: 1390 - DNA, 1047 bp, Homo sapiens
caggaagtagaggctgcagtgatctgtgattgtgccactgcacaccagcctgggtaacagagcgagacctggtctcaaataaaaattttttgaaagaaaattatttttttaaaaaaggtatgtgtctacctcagtaactggtgtattattagatgttgaagtgaagttattcaccaccctactgccccaagcgcacttactcatatgtaagttgtgtaatatttgtttcctctttgttttatggaatctcttgagggggaagaaaaaatcagcaactattatgcttttcttgaaactccatatatagctgggatgatattcctgcattatggattcctagaaatgttttatatggcatcttattgtccacaaaaatgacaacatagcagtaaatgaacaggaacatcataagttaattgttaatatgatgaacgcgttagttatagaagtcgttagctttctgtagtcttgggattcaggctttcttaattcacaccacccaggtttagagggcctattactattgagtaggataaagaacttctctgttgcatgagattcataaaacctaagaattcaatttggagttctttagttggtcccacttaaaatgtacagcttgcttagctaggaggaaggatcaggttgctctaggtagttgaagtcccttttaaaaataattgctactctaaagagaagaaggaattaatgaaagtggttcataaaatcattgatttcttttattttttgttttgacatgaaagcagaatggacattagcagctactatatatgaagggcattttgcctggtataagtatattttctttttcttttttttttttttttttttttttgagacggagtcttgctctgttgcccaggctggagtgcagtggcatgatctcactgccacctccacctcccgggttcaagcgattctcctgcctcagcctcctaagtagctgggactacaggcgtgcgccactgtgcccagctaatttttgtatttttagtagagacagagtttcaccatgttggctaggct

SEQ ID NO: 1391 - DNA, 1065 bp, Homo sapiens
cctcaagtgatccacccgcctcagctctcaaagtgctaggattgaaggtgtgagcaaccatgcccggcacaagtatattttcatgggtttagtcctcacagtatatctgtgaggtgggttggtggtattttcattttacagagcaggaaattgggtctcagataagttaattttaagtaactttcatgagggcatatggtaacaagtggcagagctgatatttattattagttaactatttttgctgtttgtatgtgtaaggggtggttttttttttcattttttttacatgtaaaatgtaaaaatattagacatccacatctaaatgtaaaaatgatatttctttttttttaagtcagaaaaccagttttcttttttcttttgctttagtcagaaagccataaaaaccatatttaaataggatcaactactgttttttaacataactgagatttgaaccgagattaatttggttccaaagcttatgctaggccttggagaatacaaagatgaatgaaaccccattcatcttgttgatcttgcagactaatggaaaggattgacatgtgagttcatgtagtactctgttaaaagttagataggattccagatgagaatgacaatgctggggaagatttttccaaaggaggtagcctttgagtgagtcagatagtgaaaagtgaaatggtgcctggtagagaaggcatacataggcagtgacagggtatggagctaaaaccagtcttctagagtttttctctgtaagttgttaatagacattttaaagcagagaggaatggaagagtggaataacgatgatggtaatagtttaagaagcattttggaccaggcatggaggctcacgcctgtaatcccaccattttgggaggccgaggcgggtggatcacttgaggtcaggagtttgagaccagtctggccaagatggtaaaaccctgtctctattaaaaataacaaaaattggctgggcatggtggccgatgccggtgatcccagctgcttgggaggctgaggcaggagaatagcttgaactctggaggcggagtt

SEQ ID NO: 1392 - DNA, 3207 bp, Homo sapiens
aaagcattcagaaggagatgctaagggaggttggtggtataagaaacatcttttaatttaaacatatttcccattaaaaccacctattcaactttcatgtaaatcttgtaaagagacgtttcaatatttagtgtgaatattttgttaattagatgtagcagaaaaataacgctttgatgggcaaaattgctgttcagatgatcttgaaataaagaagtttttaaagcaatttttatatactttttattatttagcaatacatgtttatcatagaaatttaagaacctaagtaatacaaagaaagtaaggattacctttaattaagaacctaagtaatacaaagaaagtaaggattacctttaatcaataaacaaagataaacttttggagggagcatataccattccagtcactaagtaaggttttaatattcagattccagaattctgatcaatcaatggctatgtttcacacttctttaaattaaaaaattttctatctttacatattttagtgactgaattaccatggcgtaattgagagtttggatttattatggtacattccgatttctatttaatacataaggtacctgattaaaattttagcctatttggttaaatactaacaatacaggttgctattactcttgtcttactaccaattagacatttctcagaatgctaaagcaagaaggaaccttaaaaacttatctggccgcgcccagtggctcatgcctgtaatcccagcactttggaggacaaggcgggcggatcacgaggtcaggagatggagaccatcctggctaacatggtgaaaccccgcctctactaaaaatacaaaaaattagctgggtgtggtggcgtgtgcctgtagtcccagctacttgggaggctgaggcaggagaatcccttgaacccaggaggcggagattacagtgagccgagattgcgccactgcactccagcctgggcgaaagagcgagactccgtctcaaaaaaaaaaaaaaaaaaattgttttccttctcatgttacaaatgtagatgcgatgtgtttctttcaagcttttgtttccaatgacattagtttaggttttcttttgtttagctctcacttgattgcagtcttctttctttcaggtcagactgtttttccatctttcggccaatggtacaaaaaaaaaggaaactgaagagaggagatagcatatgccagagaagtagaaagagccattgtatgtctgggtataatcatataaccagcctggaaggaaggaatgatttctgttagggaaggaaattttgccattagtaactctcagccatgaatagctcctcaaagcaaggagcctcctgtattgtgacccatttgaacttagtgaagcttcttagctgccctatttttcactgatgaagttgaatcagctccacctgagttagggacttacaccatctccaatcttacagtggaagttggagaaaattaggaacacataccgttttattttaccatgaattttattagaaggccgctattatgaagaaaataatcataaattattgttttccagagaaaaaaagaagtgataataatcagttttcttttttttcctttactaaacaaagacttgagtacttactatattcctgttaatattgctaggtgttgaggatacactagtgagccaaaacagatacggtccttgccctcacagaactttagtggggagataggtaccaaccacataaatgatatgtgataagtgctatgaagggaaggtgcaggaggctatcagaagatatgagaaggaactgactgcttgatcacgtgggttaaacaatgacaagttcccccctgaaatctaaatgctttttttttttttttttttttgagacagaggcttgctctgtcacccaggttggagtggtgtagtggcacgatctctgctttgcttactgcaacctccacctcctgggttcaagcagttctcctgcctcagcctcccaagtagctgggattacaggtgcccgccaccacacccggctaatttttgtgtttttagtagagacggagtttcgccatgttggccagggtggtcttgaactcctgacctccagtgatccgcctacctcggcctcccaaagtgctgggattataagcgtgagccactgcacctggtcctaagtgctttttaaaagcataagttggagggtcttcaaagtcttttggctaatggcacatactaaaacttaagcgaaacacttttttttcttttttttttttaactgagtaggtgatagcaaagaatatttatgctaaggcacatcattgcaaaagtcaacactgaaaaaagcaaataatgtccttagtattatcatgacaataattttggcctcctggacttcctaaagggtctcaaggatctctgggggtctgttgacctcactttgagaagttcttttccaaagtatagtatgtatattatatctgatcacttattcaagaaatttcagtgctgtatggcagcacaggtctgggtttcagggatatacccctgaacaaaatagatgaaaatatctgccctcatggagcttacattgtgtctttgatttttcccttctatcttagatcatgatgcctcactggatatgtagagtataccctcccccacctttttcttctggtctgcttgtttcatctcctctttgttctgttatggacacagaggagatgagacaagcagaccagaaaaaattgacttaatttatttttgttttatagctctgtgtttcctattgttaatgtaaaaaataagtgaatagaatgttttataacctcttaagttcaactaactttaagttgctttttacttactgactcctgtttgattagtgacctctattaaatgtttcttggagttactggagtgaaaacaactggacaagtctttgtgttatgttgattgttattgacctatagatctctaagaaataggtgactagtctctgaactcttgtagacatttctagaaaggaaggagtatagaaggtagcagtccttaccctcccatcccttgtcattcttgccttagtcctgccaacacagcaaatgtattagagtgtatgtgtctgtgtatgtatatgtgtatatataaaacctgtgaattataaaatagtggtctcagaagtaacaccctggggaaagact

SEQ ID NO: 1393 - DNA, 1045 bp, Homo sapiens
atagcataagcattgtgaacgtcagagaaagacaagattacataccagttataatctaggataatgtgcatgtatctgaatgttcactctatgcctggtattactgtatgtagccagcactctgaggaataaactggcagctgatgcagaattattaagctgaagacctctgtaagcatttccttggtgtctacaggctacctgcgtcagatttacctgagatgcatgttaataatgcagattcactggattctgtcaagcataactccatcctgggtggcactcagttgattcttacgcacagtaaaattattatttaacaataataattattgtatttgaagttactagtccagactcttttcttatatctatggctataggacttgttttaggcagaaatgtctagtaatgtttcctgtgataatttaaaacaaataggaagattgggctgagcttctttaaatactggtgcaaaccattttttttacagtcagttaaaaaggaataagaataatcattcaagttagatatttaatataggattctgaactcattttttaagtgttaatattttaaaactattccacattattttatgtgttaggccatacatgtttcaaaaggaatttagcatcctgtctaaaaagtattcataccttcagacatctcagaatctcagaacttgattgttaagctaagttatgaatcttttttttttttttttgagatggagtctcgccctgtcgcccaggctgaaatgcagtggtgcaatctcggctcactgcaacctcctcctcctgggtttaagcgattctcctgccccaacctcccaagtagctgggattacaggtgcacaccactacgcccagctaatttttgtatttttagtagagacggggtttcactatgttggtcaagctggtcttgaactcttgacctcgtgatctacctgcctcagcctcccaaagtgctgggattacaggcgtgagccactgtgcccagtcatgaatcatttttattaggattactatgtaagtttact

SEQ ID NO: 1394 - DNA, 1023 bp, Homo sapiens
cactatttttgtatttatattgctttttgcaggtttacttctgttaacaggggtctgtgagaaataaggcttaaaatatcaatacttctcatttttccacagccttccaaggcttccatctttgtgccagtgtgtggctctgggtgccatctaaccgcaaaagcagcagttgggtttggatgagctgtgtgacatttggcctacacgtaggtctactcaccaccctggtcagggaacctggaacaatcctaaaactcacctactctaatgcaggccatattttttaattaaaattgaaattgtcactgagtattggaataagaagggactttggggtggagtgggtgagcagggcattgtcttacagaggaggtgtggggaccggtaagttttaactttcatcctttcaatctctcagtttcagcaaagatcttataaagaattttgttgctttcttaaattcatgaaagaaatgtaagcaattgaggtgtgtaattttcttgcccgtattctctatattaaaaaaaaataagaatatggttctatgaatttcttgtgctatttttgctttccttgaattattaaaatatgttgcatagaactaatattgttttcttttttatttttatacaggaaggagagaaatattgttcatgtaatgtgttacctttttttgtctgtgtgatctacaagagcatggctgaaatgttaccatttttaactagtgttttgactgaagattattatgaaaagttttacttttgttagattcctaattaaaaatgcctatactcttttataggagtttcaacttttgcaatttggtaataacagatttaggtaagtaaaaaatgagaatctcatacagttctgaagatctaagtttggttgagaatttaatgtttcatcaccagtaaattcaattaaagacttttgattcaattaaagactcagttctgcctacacctgcaagaactgagttgatctgtacatcaacatttctgatgtttctttggtagttgc

SEQ ID NO: 1395 - DNA, 1100 bp, Homo sapiens
ggtgtgttcataaatgcaaataagagagttggttgcatatttatgtaaattttttctttagaataagtatgccttaattgaacctcagctattggcatattttttgttcccagtaataattttttttttttttttttttgagatggggtctcactctgtcacccaggctagagtgcagtggcatgatcaaggctcactgcactcattcctgggctcaagcaatcctcctgcctcagcctgccgtgtagctgggactacaggtatgcaccatcacacctggctgatttttaaaatttttttgtagagatggtgcctcactatcttgtccaggctggtctggaactcctggactcacacaatcctcccaccttggcctccctaagtgctgggattataggcgtgagctactatgccaggccctctcagtaacaattcttgttatccttagtttatagtctccttcttttaatatttactttttctgagtctttttttgagatgaagtctcgctctgttgcccaggctggagtgaagtggtgcaaagtgaagtcggctcactgcaacctctgtcccccgggttcaagcaattctcctgcctcagcctcccaagttagctgggattataggcatctgccattacactcggctaatttttgtatttttagtagagaccgggtttcaccatggtggccaggctggtctcgaactcctgacctcaggtgatccacccacttggacctcccaaagtgctgggattacaggcatgagccactgcgcctggcccctttctcagtcttaagaggtataaacttaacatcattatgaaacttaattttttaaaaaatgatagtaggacaagattaactcccttctgtcttacttcaggactaaaagaagcaaaagtaagttttaggctaagttcctttatgtggatgattagaaatgtcatagtaatttgtacactgaaatacattgagaacctgtggtgtgtgagaaactaaagtttaggtctgttccctagaaatacttctgtgtgagtattcaagtttgtaatagtattagattaaatattcagcaagtacagaatgtctaattaggta

SEQ ID NO: 1396 - DNA, 1012 bp, Homo sapiens
tgtaatatgcttcccttcgcacagatctccccctgccccatgaaatgctttaaaggtaacttaactctttgttcggggctcagtcctttggatgttaatctgactggcttggtgcacctaaataataaataacatatatcctcctcaacccctcagtctctctgattcctaaattatcccgctgtaattgcagggctagatttgccgacctgctttataaagctatgttaaatcagtatattttattctttttattagacttttctatagcataaaaatgataaaatacagcaagaaaaaaagtcacctgaaactctagtcctaaccctaatatgaatgtgaaggagctgggctagaatggaatagggtagaatttgcataaggtggaaatggggacaggcctgtcacaaggatcactagagtcttgctggcaaaagcatcttactgcattcatgctgcagcacaggacccagatgcagaacaggttggggacacagccctgccttctaatagtggacaccatctgagagctgagccatagattcaaagcctaactcctaatagcgattggtagtaatatcatcagcagttcatatacatggagtgacaacagcgtgccaggcaattcaaagggtctctcggtcctcacagcatttttgaagtagctaacatcactatcccccttttacagttaaaaacaacaacaacaacaacaaaaacacaaaaccctgaggctcagaagataaatatttgctgaagatcactgtgcttgtaagtggtggagcctgaccattaacttccccacgacactgcttcaatttctatcacttcatcaaccacacaacccgagaactgtgaggggatttagcaggcccagtccagatctcttattgtacagagaagaaatctgaggctcagagaggggaagggactaatttggacctttaacttcggattcttaactttctttctggtgttctaactatactgtactacaagaggctgtcttaga

SEQ ID NO: 1397 - DNA, 1020 bp, Homo sapiens
tagatgtaaaatctggtttctcctcttttttttttttttgagacagggtctgcctttgtcacccaggctggagtgcaatggcactgtcttggctcactgcaatttccacctccagggtttaagcgattctcctgcctcagcctcccaagtaactgggattacaggcccgcaccatcacgcccggctaatttttgtatttgtagtagagacagggcttcaccttgttggtcaggctgctctggaattcctgacctcaggtgatccaccaaccttggcctcccaaagtgctgggattacagtgagcaactgcgcccagctcccctcctctttttaactctcttcctgttgctcagttaggatacttaaaaaacacaaaccagtacattatttaaatgtgtccttggattctttatcacatatcctttaaattgtttcacttggggcttgtctgagaatttgactgctactcccagaagggtttggtccaaatcacacaaatcattagagatatagtagaacaacagggaggtggattgattccagtggaagacctccagtactaaactagttctaggatggggatcaaggagtgagagcaggttcaaggatagttcagccactaatagtcatttatggaacaccacagagtatatcaggtaatgtgttcccctgtaatactttttcttggcctctgttcttaagtgatttggaatgtatgaataacccaagaattagttaaatctttagggagacttccagaatggaagctattcttttcactagttgtgatggttcagaatggctgctaggaggaatcagaatatgactgagctgctgcttgttgttctgcaagggaagataatgtcctacaatggagatgcctggatgcatttttagctacgaggtagctatccttattaggctcaaagcagaatgcatttaaataggtcttggttgttttctatgacaagctgttatctctgtgatcttcagtaagataagtaaattttctaagtcacc

SEQ ID NO: 1398 - DNA, 1491 bp, Homo sapiens
ccaggctggagtgcagtggcgcaatctcggctcactgcaagctccgcctcccgggttcacgccattctcctgcctcagcctcccaagtagctaggactacaggcgcccgccactacgcccggctaattttttgtatttttagtagagacggggtttcaccgttttttagccgggatggtctcgatctcctgacctcgtgatccgcccgcctcggcctcccaaagtgctgggattacaggcgtgagccaccgcgcccggcattcttttacaattctaattgtttcagtgagttcttcattatgtagcacttggatcttctctcccatagcttccaactagctttccaacctgcaggtaaaaatatgttagtcaaacatggtaactgtgtgtctgaatactcttgcctttcttattttatttcacaggcacctctgtgggcatatattgcttgtgcctgtggccttttcatttaccagtctttggatgctattgatgggaaacaggcaagaagaaccaatagtagttctcctctgggagaactttttgatcatggctgtgattcactatcaacaggtattgttgatttttttaatgttattgattattaacaatggttaaaccagtgtgctaagcagtgttagaatacatgtttagtcatgagaataagtaattttgtattaaattttagtatttctcaaaagactatgaacctagttaatatttgttcattattggtagtgttaggaaatttagaaattactttctgcttgttatttttagccccaaatattgttttggcatcttttgtttttaaaagcttggggcataattgtcaccatcaaaactcttatgaactaaatgagagtacagtggtgggagactagttaggtaatttgtggtcttcatatatttaaatgaatgttatgtagacattcagaattatgttaatggacttggattataactacgtcataagaagctcagagaaagactatgacaaattaggagtatcgttaatattgcattgtgtactggaaatttgctaagagagtacattttagatgcttttaccacaggagaaaaaaggtaactatgggacatgatggataggttaatttgcttaactatagtaatcatttatatatatggcatgttttacacctcatatacaatttttaaaagaaacactaaagtgctagcaataactgagttactctgtttggattataagtgatatctctttatttgcactgttttgcaagtttttaaaatagtagtttattatgtttttagagaggaaaaagacacttaaaatctaaatgacagtttttcagctagtctttctgacaggaactcatccctcccctcttttatttttgttttatttagtttctcaattattttcttgtttgacatggcacttaaaatatttaaaaagaaactaacaaaaaccccttatagttttacctcctgaatccacatttacaggta

SEQ ID NO: 1399 - DNA, 1010 bp, Homo sapiens
ttaatttttagtgtttctactattttcaaaaatggcagaatttataatatctggatttcacatagtttatgtttcgttggttattatctcacagttcactttcaatacctattttgaaagcttatttatctgtcagccctaatgtattctctttccctttcaaataatacatcaccaaccatatggtgtgggaactgaaggaaggaaagaaaattaaccatggatgtaggagaagagtaaatagtgtttttagaagtgatttgatatcacagctttctgtcttccagtctttgaatttccctcatgatgttgtcctgtgatgaagtatgtatttagagaactgtaaacaactccatatggttggatgataagatgcctgcctgtagggagtggcaggagataaggctggagaagatccagaaaatcaaggtcctgtgctctgccaagaaatatgagcttttaccctgaatctgcagggaacttttgcaggacctaaagcagggaaatgacaaaagtgccttttagaaagatcagtctggcagtaaggcagagggtaaattgtagtaggctgtgacagaagcaaggagacccgttagaggaagcatcagcataattaatgtgaatgatgaagcatgcactaacacaatggcagtgctattgcagagcaaggaataaattggagagagacttttgaggtagaaactataggacacaatgtgtgtttggatgtggggaatgaatgagagggcagagactgaaatgactcctagttcccttccttgggtggctggatgaaggtagagaaaggcactacaggaagaggaacctatttaaagagagcagtctacccagaaacatatgtgagggattttagacatccaaataaaatgagaacaggagaaaacttagagaacaagcttagaaagaagcccatgaaatttattgaacagccagagtagtaggaggcgtactggaatataaagccagaaggatgcatttcacaaaagaac

SEQ ID NO: 1400 - DNA, 1057 bp, Homo sapiens
ctgacctcgtgatctgcccaccttggcctcccaaagtgctgggattaggtgtgagccaccgcacccggcctatattaggttatttttaattctataacttgtagacatatatatatagaatcatttctataagttaaatgcttagaaatcctaatcaatctttaataaaactatacttacataaaacatcggtctttttttttttttttttttttttgagacggagtctcactgtgtcgcccaggctagagtgcagtggtgcgatctcgactcactgcaacctccgcctcctgggttcatgccattctcctgcctcagcctctgagtagctgggactacaggcacccgccaccatgcccggctaattttttgtatttttagtagagacagggtttcaccgtgttagccaggatggtctccatctcctgacctcgtgatccgcccgccttggcctcccaaagtgctgggattacaggcgtgagccactgcgcccggcctaaaacatcggtcttaaaaaaaaaaaaatctatgctgtaaaggcagaactcacttaaattatttcaggagcaaaatactcttcaattattttttccaagacaaaaaataataaattgaacttgggccaatatatgttggctcaaatgttaatctctaagttatcttttttatatatcagcttgggcaaggctcgtaactttcatgggcctcatttcctaatttgtaaaataagctttagatgatctataaggttctttctgtttataaagtctgtgagtctactaattctacacagatattattacaagtgtacttatttataattacagtaggcagagtattaatttttgcttttattacatttttcaattcatgcttctaaagtttcacatttatattagctaaaaaccctgtcaccaaatgtttatttctatgtaagtaagtagcttcccactctttcttttctatagttaaatgaaaaaagttaataggctatgtattccactaggtagtctgacaaatttagttcatctttttgtccaggtgatttttaaagaat

SEQ ID NO: 1401 - DNA, 1060 bp, Homo sapiens
ataaaaaactgttgtttgttaatgtataatccactttctatggattcagaattgggaaactttctaatccctgcgtagaatctatttatctttaaatgtctaatacttatcacatgaattattaaataccagaggttttcctttcagtttccaacttccctgtgtagctttttttcagcaatgatttgttcatttgggcctcagctccgttcgtttaattttatcagttgccatagatgatgtcctaaaacaaccatttgtattaatgtaaaacctagattgcagtttggcctctcagatcaccaggtaaaatcatggacatctatctatctcattagcattcctcagttcttaatttttatttaagtagtttttatttgaagcctagtctatactgctactgttttgtgtgttatctgtgtttccaaactttttaagtgattgaactggatgttttacttacttttatcactagtaaactaatccaatgtagtagagtattataatgctggtgtggaattagggaagagaaagaggaaaaaggaaaacttctggactaaagattatcaggaaataggataaggagatggccaatttgatttttgctctaaccatatccaaatagaagttactcttgattagattctttcccacttaccctttccacatatatgctagtttttttgagatagcagaggtaggagtgtggtgaggcttgggacagggaaggagcgtaagatggattagtgttttttcaaaatgtacattgggacttctaagaagaattcctatctacagggaagtctagatcagttctggtgctaaagggatttatgtcatagtgtaattatttggcaagtaatattcaccactactaggtaattagagttgattctgtgattttagtattagtgtttccagctgcctacttaaaagtcattttttcagtatattacagttttaatttttttaacttctatcttgatttggataagaactatgtatgtatgtataaggatagtatagtactgtataaattgtatcattccatctttaggtg

SEQ ID NO: 1402 - DNA, 1131 bp, Homo sapiens
caccatttatttcatctgatactacaaagcacttatttcaagatttcatattttataacagtgcaatgtaatcctctgcttgatactcaaaatttaatacctcctcaattttttttttttttggtgggaaaggttaacctatggtttcagcccaacttcaatgagtcagaaatttcctttggaaaggaggggtttttattgctctttgaaattcatcaaattaaattaaaaggctttggattttatatgattttgctcataacaaatttttgatgcctccttttcccctttcctcaatatttgagattttttttttctattgtgcatgatagaggaatgctgctaagcttgcaagtaattaacttgaaattgttgtgactaattctgctcttttggctttttgtacctaatcagaattgatgtgactgaagtgcaaatcttcataataatcatgcatttgctggcagtgattggaggaccacctttttggcaatctatggtaactttgttcacattgtgtatcccatgtaatgcatgttgtcttttgcttgtgttttctaatatgggataatccagttaaagggtaatgtgtgaaattcttttatttttttccaaacagtagaacacaacttctctttagaggatggtgaattttactacttgaagttatgtagaacgttaggactattccagggctattatttttgaaggccattgagaatctgaattagtattgttatcccattttacagatgaggaaacagcagacagtataacaagttaaccagtgacaagattaaattagaccttttattctctttcttaactacatgagtctactagtttttctgtcatatacttaaagctgaataacaaatttgagattgtaagttaactctggttccaaaacaggataaatacctgttgaatgaaatcagtgccatgggattgtttgaacgagcttggaccttgatttccaggtctacctgaaatatagtcactcttacaaacacagattcttttccacaaacctctgaggtagggagtaaaatatggaggccaagaacacaagctctggaaccagactgtgtgcgtttgacccaggttccatggcctactgtgtgaacttaa

SEQ ID NO: 1403 - DNA, 3415 bp, Homo sapiens
ggtagtaaattccttcaggtatactttttacctttttccattatgatttatacatataatctacacatgtacatagtagatataattttttcttttataaagatcaaatgttttgtcctgtcttgtaattaatataaacatcctttttaaattatatgttttatctgaggaactctcagattcacatctgaaatggagttcccagacccagtaaactagcaatctaatttcaggattcatgaggtgaggttgcaacgggaaaacagattctccccctgccccttcatcctattgttagcactttggtcctactgttagcatcattaaaccaaaagggaacaacccgacttctctggtgatatatttggagacttagtgaaatattctgttttttcttttttaacaactcccaatacggattcccataattgaccccagatcactatattatttttttctttttacttagcattaagggttcattactgaatatgctgttttgaattgcattctgttaatacaggaacaaatactacatattgagctctcacatttttgtgtgccaaatggagaaaagatatttacttagggttcaggtatgaaatttacatctcttctgagattgaggccataaaatggaaattgccttccaaatcctcattaagttagaaggcttttactgacatttagaaagcaagtttatggtcagaacaaataaaaacagtgcagatgtcttcataaggctgattccagaagatcagctgttttgtaaaggtaagtgatttgcatctattacatatggattacccattctttcccaaattttttccccaaagagatgaatttttaccaaagattatagttattgttgttgttgtggttttccttttttttttttccaaaggaaagcagttgtcttcatgcataaaagtcagtgcttgttttatacattgcaagaaacaaaaagcatattttttgtttgttgcttccccaaaagacattccttttagaatgccttggaactatgttctatcatatcactctttaaaaaaaacaaagaagaatatattcttatttggaagagacttaatataatcaactcatggttacttttactgatgcttgagtcttttaaatgtagtaattgatcaaattgtattaagccataagggactttctggaattcagttaaggcaactaggtgagtgttactactgcaggtgaggtttcaggattcatttggtcagactgaagacgttctatgtagtataaattgattatatctcattcttgaactacaagactttaaaatgcctttacacttaaataattctgatagggtgattttcctttgtagacactgtaattatgttaacatttgctgtattttggtggaattcatttacattaaaatgatttacaaacaggcattcccacattctttggaggaaagtgtctaatctcaaaatggtactttttatttctgctctgatgtacaaagcctgtaaggacattttatcatgcttataagaaaactagtcaaaatttactaactgatattagtctgcattaatacaaactattgaaccaaaaaacatgacctttgtaatctggtaaagatactgataatttaagattttctttttctatgtctaacctttttaaaagtgaatttcattacattgttattatttggatgcataccttcatggtatgagtctggagagttttcacctggctgtaggacagacaccatggtccaaaggaattcttactcttcccaactcttaaagacttgaaacttcaagcagacctgacataaagatgtctttggtatagctctttggctatttctaaagagtggatgcactttggccacctttgataagttccaagatgatgacagaaagaaaaagattgggaaagacagaatgtgcctgttctttttgacttgagggagagagagaatgtgccaccctccttgatcttaagcgtggggtgagaatggcaacactttgtgttttttataagtagtgccaatttttaaaggatcacctggtgagacttgggattcctttgactcgagcttttccttcactttgcctcatattttcttggtagctcactttctttttcattgctaatgtgggggctagatgtttcttcatactctcccaaaacaggagttctacatagaaaggaagagaaagggagattttaatcttcatttaacaaatgtgtattgagccacctacaataaccagggctctagagagtgtacaaaatcaattcaaacaaaatccaacactcaggagcttatgttttggtgtatatagctaacatatatgacaaaagtgatgaaaaccttaagaatctatgatactttgcgcctaggtcaatagcttgcttccttactttgtggtccaagccatgtactaattttcctggcttttctaatgtttgtgtttattcttctttcaaagggcaacaatttttatgatcccaaagcaatttcaccaaattttaaatacagttatgactctcattcagttcatttatgacacagatgactattatacagagatggtactcatttagtaccctggccctaatacagggctgtccctgtaatagaataatgctttgcttcttttggaatctgagggaagtatagtattttcccttttgccagagagatcttttgtctctatggagtcaaaagtgggaggggtgggaagagaggttgggaaccaggaaactagccacagtattgagtttcagccaggtgcatcagattgagaatgtaatgtccctagtttattgaacaagagcagaaaaatctcttggagttcaaagcaaccatggtgttgattttctcctttcttgaaaacaagttttgaacttagactgtagaggttggagatttagggggagaagataaccatttaggataatccataaagtttaggacttgacttagttgacctagttaattttagaactaggttgacctagttaattttagaaaatttaacactgctacagtacaatttaaacttgaacatttgatttcaattttttttagagctgcatttttgcaagaggtaacagagttatctcaacaaagtgagttcttgagagttttgaagaaataaagtatccaaccattaagatttatgtcttccagtcttaactgaggttttctatatagtaggaagtgccacatttgctatttgattttaaaagtgtagatagatgttagccatacaaagtgtaaacagccctaattaaaatgctttcattgtgaccgggcatggtggctcacacctgtaatcccagcactttgggaggctgaggctggcagatcacttgacgtcaagagttcgagaccagcccggccaacatggtgaaaccc

SEQ ID NO: 1404 - DNA, 1050 bp, Homo sapiens
gttagccgggcatggtggcaggcgcctgtaatcccagctactcaggaggctgaggcaggagaattgcttgaacgcaggaggcaaaggttgcagtgagctgagatcacgccactgcactccagcctgggcaacagacctcgactccatctagaaaaaaaaaaaaaaaaatccagcagacacctatcaggaacatagaaaataacaagtgttggcaaggaagtggagaagttggaacacttgtgcactgttcgtagaaatatgaaatggtacagccattatggaaaagtgtggtgattcctcataaaattaaaatggaaataccatgatccagcaatcccagtcgacatatatactcaaaaaaattaaaagcagggtcttgaagagatacttgtgttccatggtgatagcagccattgttcacaatagctaaaacatagaagcagcccaatcggccatcagtagatgaatggataagcaaaatgtagtatatccatgcaatggaatattattccacttcaaggaagaaaattctgacactggctacagcatgaatgaaccttgaggacgttatgcagttttacaggatgagttatggagctggatagtggtgatggtggcacattaaggatgtatttaatactgttcttaaatggtacacttaaaaatggtaaattttatgtgtattttacaatctttttttaaattgaagaaaaatcctgtagataaattagaaaattcttcccttcataggtttatctgcatttgattctcccatacttgtacaaggatttatttgtattcaaatggacaaattacgcaataggaaatatttgaaaatatttatcatgggtaattgctattttcattgacttcctaagattttatgtaataatcatttgagtcaatattggtagctaatgtactaatctaatattgaaatcagattgatatctttgttacttaaagataatttgattggatcagcagttatttcaaattgattaaacaaaaaattataaaacacctagtttgtgctaagcaacgtaatgc

SEQ ID NO: 1405 - DNA, 1050 bp, Homo sapiens
agcacaagcccatttccctcgccgtctccccagacacggtgccctcgtacctcactgcctgagagaagtagaaggttggacatcgctgccttcctcctcttgcatgtcccctgtctagggtcagagcttccttcaaacccagctctcccttttgggcccgcgggggcgggggggagggacacacggggaacggggttggagggttgggtgaattctctgtcctctgctgtaggagtgcgggtagactggagcattgctgtctccgggctcacttctgtcagggttcagggtctccctttccttcctttattcccccagttaatagggctgacatctacatcccactccaccttccagcccctttcccgccttctttaccctcatgtcttccgtagcttaccatgtgttcgccttttcagtgttacttttcatgggtctctgcttcttccctgaattttgttagggaagaggtcacggtgtgattcttgttatccttcaaactagcggcttggtaagagtatctcttgcccccttaatcaggaagttaaggacggtgtcttcagccgagttgtgtaatttactgctacggggagaagatgagaggaagacatttgtgcctacaaaatgggatctcctcttagggctgagaaccagagtttagggaacctttgacctcttggaaaaagaactgccattgaggagtaatgcattctgttttgggagggaaaatcattttgttacttctttgaagggaggaggtataagaaatgaaatagaataatagagcagaaggtcaatgagccacagccctacaggtagccagccactcttcttaggtggcggatgatgtttttgttttgattacagtaagaataaagtatcagctcttagatttaacttggggctcctaccttcaaaagcatgaagggccgtctcagaagagatgctgctggaaacaggatttggaaactttctttgggtttcctgtcagaatgtgtgggggtggacatgcctatgtgtagtttttctttccttgtgatgtaatttatt

SEQ ID NO: 1406 - DNA, 1949 bp, Homo sapiens
cacctaggtgtatacgcctataacatgttactccttcacggttttttgcagtgcagtgctgtacccacttattctggaggtaaaagataattttgttcatgataggactgtggttagctgtctttcgttttttaactgttttcttttttttttgttttgtttttgtctttagaaaagacaaaactataaaaagaggcacaaagaactgaatacaactatttggacatatcccaaatgcagtttatatgactctaagttagtagtggaaatctcttattgctgactatacatttcagatatgtcagatgtgtaatccagagagtaaattcactcactgtattttcagtgatattttaaaattcatttatcagtaggatcattctgttctagacaagttggctatattataaaacattaagcaagcaggcactaagttaaatattgtagcagttgaaatttaatgctaatcttacagttttacacagttaacaatctaggccaaatctattgatacctttggaactaccctttaaattccatcctatgcttgtgaaaaggttgcatataatttcttttcctttttctctcttctcttcctcttcttttttctttttctttttctatttcccttttcttcctttttctttcacagagtcttgctatatcacccacgctgttctccacctcctgggctcaagctatcctcccacttcagcctcctgagtagctgggactacaggcgtgtgccaccacagttaattcataatttcattaatagatttcagattcagtcattgaacagatgtttaagtaaccccaaattaggctctttgatggatactgagatgtgaaggtgtagtttctgcttaaaggaatttatagtctagcagtttattttgtttgccacagcctgtcatgtgttttataaatcagtgttgtattttcatgatagagtgaaaatagaatgatactcattttttaagtaaaataaattgtgaacatttcacattctcttagttggtgaacagctattttggtggtcttgttttctaacagcttatgagtattagaccaaatcagtttcccagttgtttaaaatagagttaaataagaattgtttgctttactgcctgttttacttcagtccaagacttattttttgtaaatagcttttctgcatatgtatacatacacacacacacacacacacacacacacacatatgcatgtatatacacacgttgtagggaagttgtttcctggttcagctagcaatttcaattctctgtttaacgtcagaagttgttttgtagaatgggatgttaatatttttttctacactgattaaaatcatcctttgccactaaagtcaagtatctgctaggacagaaatgtgcaaatagcatgcgtaaatgtgcatttttagtgactgttgttagcttgacagttttattttcaagatcctcttctctcccgacctaattaattatgatgtgtttataaggcaacaataatatatttagttagtttgcaaaatgagaacaatttttctggtttttccatttttgcatgttttgagtttggattaattggacttgtattattctcagtagacatatataataaaatagtccatttaactgtgattctttctcttggaacattggctgacttttagatagtgagccttgtgcagtttcataaatacaggtactactgagttttggatgacattctttacacaacctaaaagtaaaggtgagcataatagaagctggaaacaagctgctgggcataatagaagctggtaacaagtctgacgttttctttgcactaggaaatgtatttcttattccaagtaatatgcccttgttaggttcaggatctttttcagtggttataactgcttaaacatttttttttctgtttaaagtaattcatgttatact

SEQ ID NO: 1407 - DNA, 1027 bp, Homo sapiens
ctaaagtgggaagcagatcatcatgtttgaggaagaacaaaaagacccttgtcatcacaaggctaggaaaagcctggtagatgaggttgatagggaacagctcactggatatcattatttctctttatgggtaaatatatgcaacttgtgaatttgaagatggtgttactaataatactcatttaaatctgtagggtaaccagtagtttttctagacatacagaatcactaattcctggtccataaattatgtttttcccagggatctgcagagataggaaggaattatgattagtattacaaaaagtcaaatgaaaattgtgcatttaccctaaatagacttatacagataaaatattatgtatcttttctttgaccagtgattatattgactcaaatcattatcatacattgtagcgatttgcagattgttaaggaaataaaatattgtacttatcccttcaagatcctagcactgggttttgttagtttttaagtctttggcaatttgagaattttgattagcttttacttatgtgattaataagatgtcattgcagttggtagacaaagatctttaaacacgtgaaatccatggaatagaataaagtttttttatagaaaggttgggagccattgattaatgtcctatctgtaatggacctacagggagaagggaactcatatgtttttgagtgtagaccccttacatcctatttaatttgcacagtaaatctacaaagtagatattgttattgtccagtttttttacaggtgatgaaactcaaagtaattatgtaatttgtgaaaatttacacagctctaattatagagaatcacgtgggtagtaaacttccagaagaagggacttttgcaatacaaagcagaaaataggtgatcaatacatatttgtatcttgcttaaatgtaaacatgaatgaatgagtaaatgacaggagactgcctctgtccctatactgttttcagtgagtcacaccatttttctcctaaatgagtctagaaaattt

SEQ ID NO: 1408 - DNA, 1048 bp, Homo sapiens
cccaaccaagaaatgtaaatctttgaattcattaaaggaaaggggtgagttgactgggaatttctagatttctaggctcttatattatttctattacttcagtacataattttttaaatctctcaggccaaattaaaatatatttcctgtctagatttcatatttccatggagtggtgtgatgatgtaagtgtgcttcatttaataaaagctactccggtatacctcataaccttgcagaaatactgattttatgggtctgtgatagggctagggtgctgtattttactcctgtgatcctcagatgattctgatgagatgctttttcaatttatttatctccatattttcattttagtgttatttttaaaaaatggtttgtattatatttttaaagccataggaataaagaagtacattttatagttaataatgaaaattaatgatatatcttagctttccatggttatgttttgttttactttttcaattagttaaatgtacatagattacttaagtcaaactcaagtaataccaagttcactgtagaaaaaaataaagtaccaattagacattatttctcagcctttttagatatttttctaattgtccccctcatgaaattttaatgccacagatataactgtatatttgtttatgtattgtatgtatatctgtgttttatgcactaaaagaataagaattatttttttgcccctcaagagccaattttcaccccattggtggtgatactgctcctgttgagaatgcatgcaataagccaaaagaaaaatcacctttaattttaccttacaacttgttaacattttggtgtacatctttctcagtgatgttcaatgcatatatgccttttctttgatgaaaatgaaatcagatacataatacttcatgctcctgtttttcttaatattttgtgaattttcatgataaatgagtatcttttaacagtaccccatctctaatggataaatactatagatgtatagtagtatgtgaatttgccatcatttgtttaaatgatttgtcta

SEQ ID NO: 1409 - DNA, 1136 bp, Homo sapiens
tttaaataagaaagaataatatgtgacataggccatatgtggctcacaaagcataaaacatttaccatctagctcttcatagataaagtttgctgactatggattagaagaatatatatcatataaaatataaacagagaccttagggaaacgcaaatcaaaaccataatgagatattatttcatacacactaggaaggctgtaatttaggggaaaaaaggacaataacaagtgttggccaggatgtagagagattggaactctcatacattgctgatgagaatgtaaaatggtacagccactgtggaaaacagtttggcagttcctgagaaagttaaacatatgctaaagagatgcaatgaaaaagaataaataaataaaaataaaagaaaaatatagagttatcttacgacccagcagttttgctgctaggtatatacccaagagaattggaaacgtatgtgtacactaaaacttgtgcaagactgttcattacaataaacaaaaagtggaaagaacccaaatgtccatcaactgataaataaacaaaatgtgatatagccatacaatggaatatgatttagccataaaaaggaatgaaatactgacacaacttcaacatcgatgaaccttggaagcatgctaagcacaaaagccagacacaaaaggccacaagttgtatgattccatctatgtgaaatgtatagaaaaagcaaatctttagagacagtaagtagattagtggttgccagagactgtagggagggcaaatggggagtaactgttcatggatatgtttttttttgggaggggtgatgaaaatattcagaaattagatagtgatggtggttataacagccttgtgaatataatttttaaatccactgaattgtgtacttgaaaatggtgggccaggcgcggtggctcacgcctgtaatcccagcactttgggaggctgaggcgggcggatcacctgaggttgggagtttgagaccagcctgatcaacatggagaaacccccgtctctactaaaaatacaaaagattagctgggcgtggtggcacatgcctgtaatcccagctacgtgggaggctgaggcaggagaatccttgaaccgggaaggcggaggttgcagt

SEQ ID NO: 1410 - DNA, 1046 bp, Homo sapiens
cggaatctcgctctgtcgcccaggctggagtgcagtggcgcaatctcactgcttgctcactgcaagctccgtctcctgggttcacagcattctcccgcctcagcctcccgagtagctgggaccacaggcgcccaccaccacgcctggctaatttttttgtttgtttttttgttttttgtatttttagtagagacggggtttcaccattcacaggatggtctcgatctcctgaccttgtgatccgcccacctcggcctcccaaagtgctgggattacaggctgagccaccgcgcccggcctcctaatctctgattaattaatgttccatgtgagaatataagacaaagaaaaaaatgacaactggataaaagtgtattatataaataaagattcattgcagcattatctgtaataatagaaaacactttgacatgcccagcaagaaggatagttaaattactgtacatttattgcaatatctgttaaaatagttatgaaaaacttcagtgaccttggagggagatgaagtaatatcggcgggggtgggggttggtagtaataaaaaacaagactcagaattgcaacaccttaacctctaatgtcaagcagtaaacctagtcttgagaacagttcattctggacaaatacttactgagttgctcttaaatgtttgattaataagtatctactataaaaataaataaggcaaaaccctttttgaaaccacattcccctttcccttgtagtagtgaccacctgatttttctattcctccttaaagcaaactcctcaaaaaaattgtccataatgccatctcccaatttcttgcctcccaatctttcctgaacccagttgtgcttttgtcctgggttattacactgaaattggtttatccagtctccagtgacctccagtggtcaagttctcagtcgcatcttaatttacatgtcagcatttgataattgatcaattcttcctctttgaaatattttcttctctttatcccaagaaactatatacatggttcccccccgccactgcctcac

SEQ ID NO: 1411 - DNA, 1348 bp, Homo sapiens
atcttggttagtgttctctgaacttcctgggtctgtggtttggtgtctatcctctctttattttttagcagtcttttttttctcccaacttgtctcttcgtttggccctgtcttcaaaatgtatgtggaagttaaccaattcttactacctgcactgctactcctttggtcaacattcctatctcttgcattatttcagttgccttccagttcttcctgattctgcccttgaccttctcttttacaaccagagagaccttttaaaaatttcagtggaaacttgacatcctctgctcaaaactgtccagtggcttcccacgcataccaagtaaaagctgaagtccttaccgtggcctaaaagcctgtatttagctctctatttaatatcttaccttctcttctcctaatgacttcctcattgtcctccaattatagtgccctacttgttccttatcgaagtcaccaggcatctcaaggcttttctgcttccctcagatgtctgcccaactctgtcctctaactgcccatcatctttagttgtttactcaaacatcactcttctagattataaacctacatgccatatggactacgatctccccattgctttttgttttctggaacactttaccagctgacttgtttctggcaggagagtgcatgatgcattggagaagatgtaagaaagccagttggctggagtgttgagaatgaagggagcactgttgtgaaataaagccagaatgggagttagggacccaactgtgcagacccttgtaagccatgttaacatctttggtctttatctttaagggaaatgggaaatcactgaagtatctgaactggagggattcggaggaggtcactaagtgattaaatttgtcattttacaaagttcattttagcttcattatgaatatattggagggggaaaagattggatgtagggagatcagatgagaggctattatagggatccaggtgtaagctgatggtagcttatttagtctgttatggttgatggccatacaaaaagaatgattctctgaagtaatgtatttatatacatctgtggtcagcaattcataactcctgattgccaggttaagatttccaatttaggggccgggcacagtggctcatgcctgtaatcccagcactttgggaggctgaggcggggggatcatgaggtcaggagttcgagaccagcctgaccaacatggtgaaaccctgtctcaactaaaaatacaaaaattagccgggcgtggtggcgcatgcctgtaatcccagctactcaggaggttgaggcaggagaatcacttgaaccctggaggcggagcttgcagtg

SEQ ID NO: 1412 - DNA, 1029 bp, Homo sapiens
atctctcatgaaggcagggctttaactaatttccttgtttttcccaaccttctctcatctgaaaaaattaacttgattggccgggtgtggtggctcacgcctgtaatcccagcactttgggaggccgaggcgggcagatcatgaggtcaggagattgagaccatcctggctaacatggtgaaaccccgtctctactaaaaatacaaaaaattagccgggcgtgatggcaggtgcctgtagtcccagctactcgggaggctgaggcaagagaatggcgtgaatccgggaggcggagcttgcagtgagcagaggtagcaccatcgtattcaggcttgggcgaaagagcgagactccatctcaaaaaaaaaaaaaaaaaaaaaaaattaacttgatcagggctaagattgttcctcaatcagatgttttcaaaacaaaggtgtctagggggtgttatttctcttcacaaaattaatagctctgggaacaaaaaatttgtgtagaactgtagcacttacgaggataggaaactcataacactctggccatactaagagagatttgatgctcttatatgagcaaacagatttaataaacagcgattctaatagttttctaatgtggcagtgtttttatcaactaaaacattgattctcttcactttagtttgggaaggaaaaaagcattaagcttctgtacctaaaatatgttattaaatatgttgtttacttaacagaaaccagtgaggtatcttagtccagctttgttgtgtaaataaagaagttgaatattaatgaggataaatgacttgtcttggctcacacaacttatagatcctgattttggacccagatattcctgcaaaagtctctttggttttgttgttgttgttgttgtgtttttgacacagtcttgctctgtcgccaggctggagcaagtggcatgatcttggctcactgtaacctccgactccctgattctagtgattctcctgcctcagcctcctgagtagctgggattacaggcacgagc

SEQ ID NO: 1413 - DNA, 1046 bp, Homo sapiens
tgagaatcctctctctttgtcccttctctggcccccactgctatactcacccactaggtaacaatgtttcaatgaatccagcctccttacagcttctcatacactttagacatgtttccctttggggcctttgcatttgctctttcctgtgcttggggtagtcttcctccacataaccatagagcttattccctcacctccctcacatggttgctcaaatgttacccgtgaggccttccctgagcatagtcttttaaaatataactttatattcctaccctcaaaataaactcccaacctttacttttctctataacatttattaccatcttgcatacttgatttttgtctgtctccatgtatactcctccagggcagaaatttttgcctctcatgatcactaacatatccatagggctacaactatgtcagtggatatttgttgtgaatggatgaaacttgtagaatgtccttaagaaggaggttggcattctcaataggagggaacaccaaccacagcagttctgtaaggacttttcttaaactggattttcagaactcaggttgcctgtatgtttattcttttgatttaataagaagcagagaccatgatctctagagaacatcatagaaatagtgttgctagtatttgtagcacttaacatttgtaagtaaactcatttattatataaacatttggacagtggcagaatttaattggttaccatagtggtgcaattctggaatatgcaaactttatcaatgaaaaatccaggaaacttccagtttttacatctttcccagaaaatacactggcagcagtataggaagctcagccatgttcctgtggcacaccttagacgaatttgaagctggggaaatggctgagtggtagcatagctaactccctggaatacaagaaagagtacatcagccagggtagaacaaccagaactattttagatgtagtagacaaaatagaggtagtggtcatggggaacaaggaagccaaggcacaacaagcttaagaaactttgtggatttat

SEQ ID NO: 1414 - DNA, 1006 bp, Homo sapiens
atgcatttcagttggtggcagataattgcttatttatttttttaaaaggctaagtaatgagtatgttattgttcattttacgtttttttcttcccacaggttccaatgattttggttggcaataaatgtgacctggaagatgagcgagtagttggcaaagagcagggccagaatttagcaagacagtggtgtaactgtgcctttttagaatcttctgcaaagtcaaagatcaatgttaatgaggtaacctacaactgctgggcagcacaaacaagtgcctttttagtttgctttaagttaacagccagacttttaagaaaaaatttttatcttttaagcaatcttgattccataattttataggaaacactaagtaattcctggaaactatattttttagcttgcataaggtcactttgatggctgtatgaggatacttaaatttaccttattgtaaaagaggaagctaaaattgaagaatgtgtgtaaaatcctgctaagcctctaagtgatatgcgataaagtggtgtgtaaaaattgttacatcaccttatattgtaataattatttacccaaatgtatataaataggttgtaaagtcaagttggaaaataatatgtttttatggatatcacagaattgtgttctgagtcttacctcacctttggtgcatgactcataagtgggtaatctgtgtgggtatggacatgtacctggaattcactcagtcctttaggcctgatacagctgatgcacaaggcttttgtgtggggcatgggggtggggtcactgggttaagcactccactatcttgaaaacagctgtggacaagaatacttagcaaataagctgcatgcctgggtgtaaagggccaacagtttactagtttactgggcccctaaaaatttagagcaatttccaactgtccccaccagtcaaccttaaatagttcccttgcttttgttaaccttaacataagccttttaaaaaaataaaaacaacagag

SEQ ID NO: 1415 - DNA, 1052 bp, Homo sapiens
tgattagaatcctaaaaattgatgacacagtctgtgtttggtatatattcagattttaccagttgtccctgtaatgctccttaaagccagtccattttttaatatactgcaaagaattatttattccagattagtatcaataagggacttctgtgatatttgtttttattccaaatcattagtaagtgttgtatttcatagcaaagcttatctgtttcatgttttaatactttggcatcagaattaaaatagtctgcttttatgagataagtagcattgtatttttgtctttgatactttgcacttttcatccaaaaatgaatccacaagatgtattaacaaacattatttgggctgggcacagtggctcacacctaaaatcttagcactttgggaggctgaggcagccagatcacttgacctcagatgtttgagaccagcctggacaacattgcaaaacccttgtctgtacgaaaaatacaaaaattagctgggtgtcgtggtgcacgctgtagctcccagccgttcgggaggctgagatggaaggatcacttgagcctgggaagtggaagttgcagtgagctgattgcaccactgcactccagcctgcgtgacagagcaagactctgtctcaaaacaaaacaaacaaactaaaaaccacaaatatttgttatttcaaatcaaggattagcagactttttctactttttacgtttaaccaaaattaacatcaaaaaaaggcaaacaaaaatcatgcgcctccgcatgtgataccttgaaagggagacagtatctcttttgtcctattttagacaaaaatgtatataacctgaatctaatcacgagaaaacctcagataaacccaaatcaagggaagttactagcctttatttttcagaaatgacaatgtcctgaaaggcaaaggccaaagaactgttccagatttttaaaaactaaagtgagaggaaataaactgcaatgtgtgatcctgaatggatcctgtccttggaggggaaagttactataaagtacattattggggcagttgacaa

SEQ ID NO: 1416 - DNA, 1045 bp, Homo sapiens
agtcatggggcaatatttgtaaatttgtaaccatttatgttatatttcatagagcacaacatttggctgatatcctttcttctaaaggctttcctgctgagtgcatttcaggtaagttcatctcttactttaatctttatttagtatactgacttgaagcctccaaagtcaggaggaaaaaataccactttatgagttgtcttgagagtgtgaaattatcttgtatcttttagagtaaaggaattttcaggcttatttttcattggaatttgatatgtcaatattctatttttaaggagtaacttggtatatagtaaaaagttagaaaacgagtgttcagaaagacaattttattagaatctctcttatagccacatataacttaattctataaaaccaagtttgtctgtattgtgttaagataaaaatattttttctttagaatttttttttttaataattgttaaaatgctggagattgctaactgaattgactgttttatggttttgtggaaggcaaaagtgattgagttcttgctgcaaagttaaatgattactgctggcataataagaatgaaagagtcgaaggattttttgatcagtgagatcctttttagagttttgtttggtgtcagcttaatttttaacctgttggcatgagcttgtttagttatggtatatcacgagatactggggagactattttctaatgaaccaatacttaaactatagatcacactttaacaccaaattataaacagctgattaaagcatttttattttcctaagaattgctagttatacttcatatgtaactttgcaaatagaatgttatatattcaggcatggcctgatcactatttaggattgatttttgaatttcaagttgattgcctaaaccatagtttaaaagattttaactttggatcttaacctagatttgcacagaaggacagaattaactgtggttggtgtattaaaagtgttaagactgggtgttatgctttttactttttgtggattggataaatatgtattagcttag

SEQ ID NO: 1417 - DNA, 1042 bp, Homo sapiens
acaaggggggatattttacctcttaaattgttgtgaaggtaattcttgccatattctcctttgtcaccatgtggaaagaacagcatctttaatttgaatactattttgaaaaattggagtgaaatgttttcttttgatttcagttcagtcatttgttctgcttctttttaagtgccctcttggaaacaacgcatgtttaaaactagtaatgatctcttaaaaacaaaaaattctaaaaaacccttgagtggaaatatggcatttttgacgtgcatgttatacagaaaatgtgcactataaatagtgtctattcatatatagatgtatgtctatatagaaaaatacacatataggtcacgcctgtaatgccagcactttgggaggctgaggcgggcggatgacgaggtcaggagatcaagaccatcctggctaacacagtgaaaccctgtctctactaaaaaaaaatacagaaaattagccgggcatggtggtgggtgtctgtagtcccagctacttggaaggctgaggccggagaatggcatgaacctgggaggtggagcttgcagtgagccaagatccgccattgcactccagcctgggcgaaagtgcgagactcagtctcaaaaaaaaaaaagaaaaatacacatatagtatatacatgactttgcagaatataggatatgtagttattgaataaatataattgagtattttaccgactttatatttaattattttacagagctagattaagcacagatctgggagttctatgtattctagtagatcgggttagtaataactcattttatgatcttttacaaatctctgtaattgctgtaagcttagagtcctgatttgcaaagtactttagagtaaatggtctttaggctctatgtcagttctaaaactgtcagttctttctgtgtataagtctattcgtagtctgatatgggaaaaaaattgaaaattggtagaagagggttaagacttcttgtaggattcaatatcatagcatctagtgataaaaattgcctttgga

SEQ ID NO: 1418 - DNA, 1030 bp, Homo sapiens
aggaagtgtttgaagaaaattcagggtcagtcatctaggtttatgattaatctagtcctatgtcctttggtaactctctaaccccttttttatagtgtcctccccgcccccaggaaacattcatgtatattttgattggttttacgatcatctatcaaaatttagaggatgaaaagtaagaacaatttttaaatctcagagataagagtaaataaaggcaaggtattctagctattcatgtttaccaaaaagtgcctcttctagtgtgctcctaaaggttttgtcaagtggtcttcatttcagcaggtgcaaagtgttgattttgacctcatgttaatgtcgttgaatccccagtaatcatctattgctagcgcttttatatattaaaatttaccatgtttttagcatagtttcttttgcttccaatctcaagtctacctcccctctgtcagctatagccaaagctgatggcaataaaatgcaaggagttggaatcacggagggtgattgtaatgactgttgtcttttaccttcttgattagactttctgaaggtagacttcctaaagataattacttttgaatagttaggtttgaagttttcagagccactcggtgctcacaggtcttctcagtgattgtttccaaatctccagtaagaaagtacaaagaagaaactggagggtgtctctagcaaacgcaatgtgtgctgcaatagaagggtaagacgtgagctcccagcaataacagcagaaaaaactaaaagcagaacagaaaatcccaaaaagataagttgtattatatcaacagagaacagaaaataaactaaggtaagagactaagcaaaccaaagttgtgattgccgaggtttaataggaaaaagcaaataatattcttttattatttagcacagtaagcaagatctgtttgttacacttttgggtcttgaaaatctttcctttaaccttttcaacacctgtttggtcatgctaggtgaagaaaagcatagtatgcagaggatagatgtctga

SEQ ID NO: 1419 - DNA, 1089 bp, Homo sapiens
caaaaaaaaaaaaaaaaaaaaaaaaggattacatgaatatacacacatacacgtgcacatatcacaaagcaaggtacccaggatataagaagcacttagtaattgacaggtattattattagcacttggcatgtgagttaaagaatttaatattcaacattattttaccccttcagcattttagcaaaggtgaagacttagtgttggattttagttattgattggttttgttttaaatttttcaacatatgactaagtcctgaatagagggaaacaaagcttgtttgcatatgtcatgatctcaagcatctgagccaaagatttttaggagagtgtgtatctgtcttggagtgtgtgtatttaataattttgtcatgcagattatctttcttgagttttttggtccaaggaaaaaagaaaggcaagggattcagctagccgatgtcttctttctgaattgtcagttgctccactctaagctctactatctttaagtagcatcatcctgaatgtcatataaatggttttgtagatactgtgattaccgtgcagagttataccttctgtgaaatttaagggacttttaatggtaattttgattaaaagtggtttttaccttacttttgaagacagcctcccccactgtcctcaaagtaaggagcgatgataggaacaaccaaaactggagtgagaagaaaacatggataggggagttgagtagaggtgggggaacatgaaaggcgggagtttgtgggttgaagaaaacaagactacaaagaggcattgaactagataatgcaatgcgctgtaatatggctcatctttgccagttatttccaaactctgcatttcaggtacagagccagaacttccaatctaaatgtgtcatttgctgtttaatgaatcctttctgacttctggagccacaaagaatatagttctcaattgttactgaatttaaagaatgcaacccttaattgttactgagtttaatagaaacaagaaaggaaaataggaaagcacaggatgatggggtgggtctacagacaaagactcctgaccgtgagcttcgggagcatctgcgtagat

SEQ ID NO: 1420 - DNA, 1042 bp, Homo sapiens
cattattactattattgtttaaattcttcttagaaaactgctatagaactctgaagtggtggtgattattgctgatagtatatcataattaatttctctattaagcatagatccagataatctggtaacctggaatctgctttaatgtaaatagagcactatgtatttgaatagagtactacagtgttataaatgttgaccctaaaaaatactagcttaattatagagctgatctcttgaggcctgcttcaaagtctatgttggcagtattgaataaacaagcatcttgatcccttggcaccattgtaatttctttgtaagtgcactattcatattatatttcaggataactcaaaacatctttcctcgtgggatcctgaaattgattttctctaaaaatgttcccaaaccattctgttttatataatgctgtctataatatggctgggaaaaaacagactgataaggcaaaataaggcattctgagaaatactgtgttgtagtgctgtcatggtaagaggaaggcttagatcccccttacctacaattcaattagatccagttgttctaatcatctgtcaaagtagtaagtggttaacatgttgtgtgagtttgctagggctgctataacaaagtaccacagatggggtggcttaaaaaatagaaatttattttttcacaattctggagcctagaagtctgagatcaatgtgtgggcaagattggtttcttctgaggcgtctctccttggcttataaagatggctgtcttcacattgtcttaactctgacccgtctatatctctatttcctcttcttataaaacaccagtcatattggattagagcccaccctaatgacctcattttaacttaattatctctttagagatcctgtttccaaaatcagtcacattttgaggtactggggcttaggacttcaacatatgaattttgggaggtacaagtcagcctgtgttatgtgtatttaacacatgtattatagtaatccaaatattccagtaatatctttcaccttcatct

SEQ ID NO: 1421 - DNA, 1112 bp, Homo sapiens
cacgctgccagcgcccattagatggatgggaaatgagtgtaactcattgggaaagatattagacttcaaatcacctaaggcaaaccctacttcctggggcgcgggcgcgggcgctggcgttaggagacgtcactcccgcgcataactgacatggggccctcttggtcggcgtttccgggcgggtccttccgacggccgccgcggtgattccatcactcggctttcttcccggcctgcctcgcgcccgtagccgggctgggccagaacagcccaagatggccgacttcgatgatcgtgtgtcggatgaggagaaggtaaggggtccgcctctctctcttacctcctcccccgacagggaactggggcccggcccggctgcgttgggagcctagcagtgtccccaggaaaaagaagcttcttggtccatgctgacatacgctctccgcagtcgggacgcttccctcttagggggctttcctctgcctcacggtggccccagttcctcgttcctcgactctccttttctctcaggcctgaggcacagcccaggggcctccctgcaagggaacagacgtttcctttattggatcgtgactgtggacttttttctgtaattttgcgagagggtggtggttatgttgcgacatatcaaaaagcagttattttaccgcctttagcagttggggctcaccccatccccccatttgtagatataattggggttagtttagggcgagtcacttcctggtcaggatggcctcttaacttcccttttgctcctccttcctcaggaagtgattttgctgtcacgactcttcgacaaggagaggtcccaaatgttgtccatctccctacacatgcactacttttctcctgtactgtcgcctgtctgattcgctataataaatctgtgagcctcagggcatttgcttcagaatttgaacaccagtctttccctatagacacatcccttttaacgataatttttgaaaattttgtttcttgttaacaaatctagaatagctgatggattttcttaacctccagaaaggttttctgtaacacataataaaccttatgttaacacgttcaagactgaacaaagcatcctg

SEQ ID NO: 1422 - DNA, 1043 bp, Homo sapiens
gtaggtcagtacatgtcacttttctgctcaaagccctccggtggcttcccatctttttctaagtccctatgttctgggatgttacctctttgccatttatctctgactttatctcctacatgttcttcttctggtctttgttccaatcacgtattctcgctgaataatctttgcatttgttcttttctctggagttcttttccttctgtatccctcatttcagatacttaaccagaagtcatctccttagtgaagctttctctggttattctgtccagttgcaaatcctaacatttcttgtcccttttctttgccttgttttttctccttagcatttatcacttgccaggtagtattttacttaatcttctctgttgtctttacccactagaatgtaaactccatgaggacagtatgctagtgagtcaccattgcctaaaacatagtgggtcttctgatatttgttgaatgcatgaatcttgcttggatagcatctgtcttgatttcattgttaactctcatagggcagtctgatttccaagttttgtgaggccatattgaggactccagtacttctgtattactgatagatttttattaatggagctttgtcctcagaaagctttagcaagtggccattgccaatgacatacggaatgaaaccagatttggtattaccatcattactgctatctgacttaccttagttcatccttctcttttattctctccaaatcctctgttctaccaaacaagagagtgttttcccactaccttttttgttcttattccctcactcatagtgccctccctttcctcccttccaccctatctaaagtactttgcagagcccagcttctccttttctctgtagttgtcctccaccaacccagctcaatatccaactccttactcttaagttctgtgccttatgttatctgtactactgctttggcagttttgctgcttagaattatagttgtttttaatttttttattttatttttgggacagggtctcactctgtcaccaagactggagtt

SEQ ID NO: 1423 - DNA, 1944 bp, Homo sapiens
caggcgtgagccaccacacctgcccgaaattttcaattttcagtagaaaattcttcttgaactttagctcagataaattcttaactaacaggccaggcgtggtggctcacacctggaatcccaacactttgggaggccaaagtgagcagatcgccttaggtcaggagttcgaaaccagcctgaccaacatggtgaaaccccgtctctactaaaaatacaaaaattagccaagcatggtggcaggtgcgtgtaatcccagctgctcgggaggctgaggccggagaatctcttgaactggggaagcggaggttggaatgacccaagattgcgccattgcactccagcctaggcgacaggagtgagacttcgtctcaaaaaaaaaaaaaggtgactagacttctgatacacagctttttaaaaaggttgtagaccccacattagattctccaaggttaagaatttcactcttactgactgaattgtgcccagctttcttgatatgatgttgtagaaacgcctgcaattcttaatctatgctcatattaaaggattcatttaaatacagaattaacactctttaactgtagctttctgtaaaccatgtttgtcatttgctataaagttccttgagactatatagcacacataattgtacacaaatctgtgaacattagcatctttttatttgcatgtttagaatttctactcatatagtacacctgaagactaattttacaaagcctgacatttaaaaattcaatctagaaatctgctaaaatttctcaaatttatcctccactgaacattgtaacatttttcctcctcagacgttcggctactacttaataatgacaatctcctcagggaaggggcagcacagtaagtatctttccaaatccacttagaatgttactctaacattggataaactatgttgacagtaaactagcaccctgaaaacaaagtttaaaatacttcaaagtaaagcagttggttttagcaattttcgttgttttttttaattggagaaaacatgttcccccaattgttgtttacttcctcaaagcttactataatatatgaactagtttttatttctgcccacatttgcccgattaaagcagagtttaatgttagctgttaggttttcctttatagttgttctagttcgtgttgaatttttttaaacagctagctatacataggaatgatctgccagtgaggaatgataatgtttaagaatagcaaatattaataaagtgccttaatagttaaaattaaccataagataaaagcatgattagcttacctagtcattgactccttaccactctgaagctaattaatctttctaaaatattttcattgtgtccttgccttcaaaaatattacggtggtgcctctttttttttttgatatcttctataataaaatctaaacttgctgtagctttcaaggctccctgttgtctggctttatcactactctacttttcaacacaaagttctgtttcagttgctgtctacccaactggctcagagttcctttgtaaagagttggataatggctagagtgggtagggatggggagacaggacaaggacatgttgatgcagagcaacaaataattatcataaagtcattgggtatgatatataattggtttagattttagccatagaaaacagttgtaagagctgctgcctgggaaacaataatctgccctgtccatgctgcttttttggaactcattttgggactagattctgcaaacgtagaatttgcacagctttactgtaattgtcatcgtgaatgataccctaattatacattgatttaaggaagctaggctcacatcggagatatactctaatgatggtttctcttagattcatagaatctgccatagaaaaggacattcatgatttgctagtttaactcctct

SEQ ID NO: 1424 - DNA, 1131 bp, Homo sapiens
atctcagctcactgcaacctccgcctctcaggttcaagcgattttcctgcctcagcctctctagtagttgggattacaggtgcccaccaccacacctggctaatttttgtatttttagtagagatggggtttcaccatgttggccgggctggtcttgaactcctgacctcaggtaatccccctgccacagcctctcaaagtgctggggttacaggcttgagccattgcacccagccccctaattattcttactctatactaagttctttttttcccctacctttgtaaatgtaggcattcccccaaagttcataattcatttaatgcaggtaaagtaacacagacttcggtgtcacaaaaacagtgggtttggattctacctttaccacttcctgagtgaccttaggcaagaagctttgtgaacttcaacttcttatctgtagataacactgtatttcatcagatttattagaggaaaaagaaaatacatgtaagaacatattttgtggactataaagcgctattttttttttcttactttcccttggtgattgcatttccattcacctctcccacactaaagaagagttagtgtttctaactactaactagacatctccatctgtaatttccagtttgttaatgacaccaccatctttttagtcactcttgagttccttctttcctttgcccatcatttgcaatatactgctagactttgattgtacttctacattctgtgtgcaactcttcctttccattcccattaatataactctgacttgttgcctagattaatcctgtggcctcctaaccaagcttcagcttttcttcgttttatcttgaataccagtattgattattctcccacaatattagttctagtcatgttttgctgtctctccattgcctatagaataaaatcttaaacttcttactttacatctactattacatgacctaaatctaccatcctgttttgtctttcattagtccacttcacacacaccctttaaacctgacagtcttgttcactgaacaagtccttagtttcctgtcttgcctttattttcagtctctgcttatcagaatctcatctgtcttgtatgacccagcctaaatggcacccgc

SEQ ID NO: 1425 - DNA, 1040 bp, Homo sapiens
tcattttagaaataatataggtgaacttcttgacctacttcagagattggagaggagctcattgaaaataatatatcctgtctatccttcacaggggactcaagcatatccattgactatagcattacttttctgttcacaaccagccccatttctgttcaagcaactcatcttcaattatctattgcagacagcaattagtgaaaactatcaaacaatgtcagataccacattcaaggccttgcgccggcagcttccagttacccgcaccaaaatcgactggaacaagatactcagctacaagattggcaaagaaatgcagaatgcttaaaggctgaatgtaggattcttcagtatgtggaaagacaaggattcaacgtgtggtcatatgataaataagtgatttataaacaagagtgatattttgctagggctttcaaagttaaccggttttctagcctcatggaatactgttgaacctatagcgttgtcttgattcttttgtgttctctgccttgtaattttctgttactgctatatctacgtgtaaatctttttttctttttttttttttttttttggttaattctgccacatttaatgttggtgagagagtgatctatcctaatgacattttactgtttaaaaaagtttcctagccatgaagccctgctactgatttagacaaggtattatggtcattactttgtacccctatccttccaagcacttctggtacttcagtcgtttttactgatccaccaacacctaaagaggctatgctacagtctctagctaaatggaagacacattcatccttctccctctgactgctttgatcatcatttattgcatctcataactaattttctaaagtttggattgggacttttcaggtcctttttggagggcaaaggaagtgccagcttctctggggaacttgtttttaaatccaaagacttgaaccacattccctgcacatgaacatgtttgcttttatcccttctctcattgtctccttcccatcttagtaccattgt

SEQ ID NO: 1426 - DNA, 1260 bp, Homo sapiens
cacccttactgaggtctcctatgtgccaagcactgtgctaagtggttctctgccgtgtcaaaatctcatgtaaacctcacagcaaccctacgaggtaagtctcgctttcctccaattttatagaggaggaaagcgaggctctgagaggtgaggtcaactgagctgacctggctagagttgtcaagtgggccgcccccctctgcccctccctgcacatgttcttgcgtacctctcacatctgcttacacttcgcgctccctcttgtgcccaggtaatgcccactcatcctcaggactcagttcttatgctgcctcctgggaaggccttcatggacacctcctctgcccccagactgggctcagtgtccctctgtggcactgagcccctctgtggccgatgagctgccctccaagcaccacgctggaatgtatatgttcagtctgtgtgctcctcgaggcaagcgctgagtttctagcatctttgaacccctagcatccagcatagtgtctggcacataacaggcctccgtaagtgtttgttgaattgactgaactgaactccaggcactgagccttgaggttattgtccttctgaccagttttccctgtcttcaccttctctaggcacaaagccaggctatttgatctctggagaaggatcctttcccttcctgcttgggttccacctgcaccctatgacttcgggtggaaactgctgtctgatcagccaccttgcccacacacttggacatctgtactgtctctgatcccttctctcctcaccaacaggctggaccccacatccacccctctgaatcaaatcattccgcttccccttagcctcagctctttcttctgggttgtttgtattttcttttctgtcccaaacagtttcccccacaaaaagaactttatgtctttctctgtcttccctcagtccttccagtcagcagcctgtgattgggcttttcccctcagaaacgaacaatccagaacccactgtttaaaacaactgtattttgccttgggaagtcccattgccttccctgaaaacattaaacattcctccgatccccagcctgagtctctctgtctctgggccccatcctgctccacagcagggctggtgtgtccagcacagagtgaccctccgatgccctttcccacccgccgccctgcctccctcgagccctgccttccctcacttcccagtctcctctgcttctggcagctttgggacccccgcccctggcttctcctc

SEQ ID NO: 1427 - DNA, 1077 bp, Homo sapiens
actgcactccagcatgggtgacagagcaagatcttgtctctaaaaaagatgaacagaactatactgaaactaaagcagggttagggaatgggttggtgctgctttgcagaaggccagttagtcctggcctgtttgaggtagtgatgtttgaacagagaaggacatttgaatgaggtgagggtgggagtcatgagaggattggaggagaatgttctggccataagagccaccatgcaaatgcaagtcgggtgaggtgggggcaggggcatccaaggaagcaggagccaaggcttccttcttcagggcctctgactctcatccacttctgtatccctctagtcttctctgctttttgacgctagttccagagcttcaggtgggagaaggtggatactcctgggcataggggttgtctggcccatcctgttcctgcccccactcacccctcccaaccatcatttccagggcccagctggagacagccctgaagtggaggaactatgaggtgaagctgcggctgctgctgcacctggaggaactgcagatggagcatgatatccggcactatgacctggagtcggtgcccatgacctgggaccctgtggaccagaaccccaggctgctcacgctggaggtcagggctcagattgagtgtgaggagggtgggctcaagccagccaagctagaggctgtgggcagaactattcctgacagcagggcagaacaagaggaaagttgaagtggttcccagggctccgcaagaagcagggtgggcatcctgtgcccaaagatgtgttggagcagggaaatggggaagatctgggttctagtccaggctttgctaccaccttgggtaagtccctggctttctctaagccttagttcccttatctgaaaagcacagagctggactggataattcttagagctctttctggctcttggattttcaatgtgtgcatataagcccaaaattacacacgagaatggatttctacacacaattgcaggtgggaattagagggtgagtttgttcaaggaaagattactgcaggaagtgagttttgaacaagtttt

SEQ ID NO: 1428 - DNA, 1028 bp, Homo sapiens
tacacgcaaggagcgagtttaggagaggagatttcataggcaaaaaagggagaaaaggtctctcatgagagagtggggcgctcgaatgggaattccagcctggggcagagtgcacccgattttataggcaggcttaagaaggcagtgtctgatttacatagggtccaaagattggttggaccaggtgtgacgtttacataacacgccaggtaagctggcttctccaccctaatcttattatgcaaatagaatctttgcctggctggcaccatgttgcctgctccttactacacacgcggctagcaaagagaagggaagatggagccgccattttgaacatgcgtagtcccaggtgtagccttttcctattgccacaactgctggcgttcacccctgcaagcttccagcttgcttgtctatgtttgcagcttgattttacaggatgttctttgttacaaaagaaaattatctgggggctgtttttcattaaaaggaaaaccttaccaaggactcctgtagcttacctgcctaaataatttattcttaatgcctatatcactactaggtatattaccaaaataaaaccggtattcaaacaaacacttgtacagcagcactattcacagtagccaaaagttgcaaacaattcacatgtccatcaatggatgcatagataaacaaatatattatgcagctataaaagggaatgaagtactaataaatcccacaatgtggataaaccttaaaaatatataagtgaaagaagccagaaactaaaggttcaaaattgtatgtgcgataatttcgaggcatttgaaccagagcaactccatcttgaatagggactgggtaaaataaggctgaaacctactaggctacattcctgagatggttaagcattctaagtcataggatgagataggaggtcagcataagatacaggtcataaagaccttcctgataaaatagcttggagtaaagaagccagccaaaacccactaaaaccaagatggcccagagagtgacct

SEQ ID NO: 1429 - DNA, 1099 bp, Homo sapiens
atatgttaatgagttgactgatggttggggactcctggatagcttcaggattgagggctggtcacaggaaagaccaaaccttgatgagagagttgggacttgcaggcacacccctcaacctccacgaaggggaggaaggctgaaagttatgctgattaccaatgaccaatgatttaatgactcatgactacataaggaagctttcataaaaacgcaaaaggactgggtccagagagcttcgagttagtggaacacgtggaggcacctggagggtgtcatgccctgccagggcatggaagcttcatgctctttcccacataagcatttctttcatctggtgttcaacagtctcatttgtaatatcctttataataaaccagtaaatgtaagtaaagtgttttcctgagttctgtgagccactttagcaaattagttgaacccaaagagagggtagtgggaatcttgatttacagccagtcagttagaagcacaagtaaaacaacctggggcttatgattggcattggaactaggggcaagcttgtgggactgagccctcacctgtgggatctgacactatcgccaggtggatagtgtgacagttgagttgaatcagaggacacccaactggtgtccactgaagaatggattggttactgttggggagaaattcccacacacattttggttaccaagagtcacagaatggtgaatatactaaaaaccattgaaatgtacactttaggccgggcgcggtggctcctgcctgtaatcccagcactttgggaggtcgaggtgggtggatcacaaggtcaggagttcaagaccagcctggccaatatggtgaaacctcgtctctactaaaaatacaaaaaaattagccgggcatggtggcacatgactgtaatcccagctgcttgggaggctgaggcaggagaattgcttgaatccaggaggcagaggttgcagtgagctgagatcgcgccactgcactccagcctgcataacagggcaatattccgtctcaaaaaaaaaaaaagaaatgtacactttagctgggcatagtggcttacgcctgtaatcccagcactttggaaggc

SEQ ID NO: 1430 - DNA, 1050 bp, Homo sapiens
gagatgcactctaagctcctccctgacctcccccgtttctcttcagctctctttgctctgttttgacctatcacttatcttaccagcttgcaccagtttagtatcctaatcagttacttctctggcactctactgacatggcatggcgcagtcaaaatagtttgctagaaaacaaaatgtttgcaataaaaatgtcttcaacatgacaaataagtcaaaaattattgtttccaactgctggttttttgtatgtttagttattctggtggccagggatttgctttattgcttctttgggcctttgagaatttttttgtgcacacacagacacacacacacacacacatatatatatgtttcttaaggaatcatattgtacatactgtttctttccactaacacggaatctcactctgtctgccaggctggagtgcagtggcgagatctcagctcactgcaacctcggcctcccgggttcaagcgattctcctgcctcagcctcccaagtagctaggcttacaggggcgtgccaccatgcccgactgatttttgtatttttagtagagacagggtttcaccatgttggccaggctagtcttgaacccctgacctcagatccacccgcctcggcctcccaaattgctgggattacaggcgtgagccaccacgcctggccgctgtttactactttttaaatatttgcaggctgggcgtggcagctcacgcctgtaatcccagcactttggaaggctgaggcaggtggatcacgaggtcgggagtttcagaccagcctggccaaagtggtgaaaccccgtctctactaaaaatacaaaaattggtggcgggtgcctgtaatcccagctactcgggaggctgaggcagagaattgcttgaacccgggaggcagaggttgtagtgagctgagatggcgccactgcattccagcctgggcgacagcgagcctttgtctcaaaaaatatatatatatatatatttgcaatggcttgataatatgaaacatttacgttgcttcttaataattatctaaga

SEQ ID NO: 1431 - DNA, 1060 bp, Homo sapiens
tccccaaggaagagttgaatatcagaatgagggtcattttggcagtcccatccctgtatggagacagtcctttcgttgttacttttggcagatgaggatttgagtttaagagacctggttgggggggaggggggagggatagctttgggagatatacctaatgctaaatgacgagttaatgggtgcagcacaccagcatggcacatgtatacatatgtaaccaacctgcacattgtgcacatgtaccctaaaacttaaagtataataataataaaataaaaaaaaaagagagacctggtggatttccgtacaacttcataatttccccctatccaagacccatggttccatttttgtcaccgtggccacagtggctgaaatggctcacttcatcttttgcactaaacagccttcagccccacactgcaccgctaaatggacaagttcttttttccctagtgtcttaaattcatggcctcagtctgaggcctttagttttatactgctttgggagagtcctctttacagtcttagagatatacatatacctcttactgtttaccaccactaatttaatagcaagaaagaaactggaaatcttgtaggaatactctgttcctttttttgttttttgagacgaagtctcactcttgtcaccaggctggagtgcaatggcgcaatcttgggatcttggttcactgcaacctctgcctcccaggttcaagtaattctcctgcctcagcctccccagtaactgggattataggtgcctgccaacacgcctggctaatttttatatttttagtagagacgaggtttcaccatgttggccaggctggtctcgaacacctgaactcaggttatctgcctgcctcggcctcccagtgtgctgggattacaagtgtgagccactgcgcctggccaaggaacactctttgttctatgctacctactaggacagctagtctactcagttaccccaaaaccaaaaggatagtaactcaacaagctcagaatacaccattctgcttgcagccattgttttcaccactaccccatt

SEQ ID NO: 1432 - DNA, 1156 bp, Homo sapiens
agagatcgcagtgagctgagatggtgccactgcactccagcctgggtgacagagcgagactgtctcttaggaaaaaaaaaaaaaaaatcattggcttgtaagttaaaatctttatcttgctctaccttctctggaatacctacatctctgatgtttttttaacattacatattcacaagctttaccaattcatggaaaggattcctctaggattttggtggatctcttgaagcactaagaacctcaagcaaaaatgtatgcaatctttgtactttaaaattaaagcatttcaaccaggagcagtggctcatgcctgtagtcccagcgctttgggaggccaaggcaggatgattgcttgagccttggagtttgagactagtctggccaacatagccagaccccgtttctttaaaagaaaaaaaaaaacaattagctgcatgtggtggcacacatgtagtatcagctttgggaggcccagatgggaagattgcttgatctcaggaggttgaggctgcaatgagctatgatcatgccactgcactccagcctgggtgatagagcaagaccctgtctcaaaaaaaaatttttttaatagataaacattcaggcattccaaactcctaatgtattgtctactattaagaatgcatgctggctgaggcaggagttcaagaccagcctggccaacgtgatgaaaccccatatctactaaaatacaaaaattagctgggccaggtggtgggtacctgtaatcccagctactcaggaggctgaggcaggagaatgtcttgaacccgggaggcagagattgcagtgagccgagatctcgccactgcattccagcctgggcaacagagtaagactccatctccaaaaaaaaaaaaaaaaaaaaaaaaaagaatctctggaatttaacattcctttaaacttaaaaaataagaaaaaataaattaaaaaaaattagaagaatgcatgctggggtctgctcagtgattcacaaggcaggaaatctcttgagccaaggagtttgagaccaacctgggcaaagtggcaagaccctgtctctacaaaaaaattaaaaattagcagggcatggtggcacacttctgttgtcctagctacttgggaggctgaggcaggagagtcatttgggctc

SEQ ID NO: 1433 - DNA, 1805 bp, Homo sapiens
ttgcctacttctttcaaagagattgcaaaacgattttaactcactaaagaacatttttcacctcttgattgtccagtacaagtgtagtacagttctttttttatgtatcctccctttgtttttatagactggaaggtatccagaaataaggcattcagaaatggaggcacacatagatgaaggcaaaggccattcctatgaaggcaggtctgtaggcagctggttatttgtttttctcagcctctcttggcattctaccttcatctggaaaaaaatttaaaaaggaggatactttataggtcctgtctcaagtatctgacttccctgggaagcttgattctcacattcaaaatacatggggagtttggttcagttaaattttatcacaccagaattgttgaaaagcaataaattattactgtataattggtgcctgtttgttatcttaggtattgttatttctgtttttaacttgtttggaaaaccatagaccataaacttttctgaacgttcgatgcagagctccaaccgaactagcaaagaacatttcctcaaagaaacggagtatttttttctgtaacaatgtaactttctgtctttcattcttcaaaatgtatcactataaatttcctacaaaaagagctatttcttctctcagtatcatacagattgatttgtatagatgtatatgtatggctgttaaattgtttgttggtataaaatggtgagtgtcagtataataatgatgataataaatagcggctaacatttaaagcgcatactctgttccaggcaccgttgtaagcattttacatcgagttgctcaatctaaaaccacttttatctggttgtctttatttatctagcaaaacttttaagaatctatgctgcaataaattccacaactcagccttcatcttcccaacaaaaataactagaattccagtgttttctctttatcagtttgtcttcaggaaaccgtcaacattttagaaccatgctagtccccaggacttgatctgaatatacaataggtagctgcattgcctatcttaggacatagaccagtaaacaaaatcaaaggtaactttgcacttagtataagcccttgatgttagcttcactgaagtaggagaggcaataaaaatgttgacttgaagtctgctctacctttcaccatctttcagaaaaatgttgatcaggactagcctcctcagcaaatgtaggcatatataaaaatatatttcttcatcctttatgatgtaataaagactaatggcttagacttagaaatctaacaaagtgacaatagtttttttctcccaattcagacctatttctgttcttaaaaagacatttaagccaggcacagtggctcacgcctgtaatcccagcactttaggaggccgaggtgggcgaatcacaaggtcaggagttcgagaccagcctgggcaacatggtgaaaccccatctacagtgagccgagattgcaccactgtactccaacctggatgacagagtgagactccagctcaaagaaaaaaaaagacattaagtctcatacagttatgaaatttcacaattccagaaagctttagtaatcaaaatatagatttaagacacttattcagtcatttcacttaattcatccatctattcatttattcattcattccatctttattgaatacctactatgtgcagtgcagttactccaatcttatccaacattggactactaattagtaagatttttgtaattctgtttttaaattattcctttacatgggacaaaattcaaaagg

SEQ ID NO: 1434 - DNA, 1030 bp, Homo sapiens
gcaccactgcactccagcataggcaacagagtaagaccctgtctcaaaacaaaaagaaaaacagatttcaaaacactaaatagaaagtgatcacaatttttttaaaagaaatatgcataaaatgaacacaaaggcaatattagattataacaaaatcctttggtgataggattatagggggttatttatttccttctttgtctcttcatttggatctttaaaatgtcaacatggtgccatgactatctggagaaaaaaaggcagacattctatacagagagagagctattttattttaagcatctgtgatgagtgatggagcatttcacacacaacaaggatgaaaagagggagggtttgtcagatgaaatcatagaatattcaactggagggtgggttagaaataatttaattcaacttcctttgttttatatatgaaaagattcaagtttatccaaggccacacaggtaatgtttagaatccagaataacaattggattttctactttccaggatctttagctcatctttcttcctttctatttatgtataatgcaggagctggcaagtagagctcttttaagtctgaaaaaagagatagaaaatgtttaggataaagagaaagagaaaagctatatcttaaatagcatggtgacatggcttttcttttcttttttttttttggagacagggtctcgctctgtcgctcacgctggagtgcagtggcatgatcataccccactgtaacctcaaactcctaggctcaagcagttctcccacttcaaccttctgcggggctaggactacaggaagacaccaccatgcccagctaatttttaaaattttttgtagataaggggactcactatgtttcccaggcttgtcttgaactcataacctcaatgaatcttcttgcctcggcctcctgaaacattggaattgcaggcgggagccactctgcccacagcctcttcctatttttgaattggcatttgccaaaaaaaataaaataaaataaaatgaaaaaac

SEQ ID NO: 1435 - DNA, 1053 bp, Homo sapiens
actctggttgccaaggctggagtgcaaaggtgcgatcttggctcactgcaacctctgcctcccaggttcaagagattctcctgcctcagcctcccgagtcctgggattacaggcacacaccaccacgcctggctaatttttggatttatttagtagaaacgcggtttcaccatgttggccaggctggttctccaactcctgaccttaagtgacgcacctgcctcggcctcccaaagtgctgggatcacaggtgtgaaccaccacgcttggcctgttcaaccagttatttattgagctcctaccatgaggctgattctgtgctatccctggatataaaatggaaattgaaacagacctaaaccctgaccttggagttcagtctagtatataatagtctctacgaaattatacatataagtcaggaatcgtatcttattcatcagtacaatgaatatagtaggttttctttgaatatttgtagactaaatgaatggattttaccagacgttaccttgccataaactaagaaatagttactattactccagacatatatgtacttatggaggtttgagaaataatgtggactaagaagcccttatatagcctcacccaactttagcatgctccttccagagccaacccatcattcaaataatccaaaattctgtctaatatctggttatgaacagattcctgagacaaaacaaaatgtggccacctattaataaagcaaacagtcttggtgttcagacactgctgccgtttagttcagaacagattattgtcattattataattttgtttattaaaaagaaaactcttggcagccgagcgcggtggctcacgcctgtaatcccagcactttgggaggccaaggctggtggctcacgaggtcaggagatcgagaccatcctggctaacacggtgaaaccccgtctgtactaaaaataaaaaaaattagccggccttggtggtgggtgcctgtagtcccagctacttgggaggctgaggcaggagaatggcatgaacccaggaggcagagcttgcagt

SEQ ID NO: 1436 - DNA, 1115 bp, Homo sapiens
ggaggctgaggcaggagaatcacttgaactcaggaggtagaggttgcagagatggtgccactgtactccagcctgggtgacagagtgagactctgtctcaaaaaaataaaggaaaatgaaaaataaagtggtgcttacctaggacctccaaaagttagcctctattttgtcttccaaaggtaagagagtagattgtcctctgggctgatataaatggggaagacagtactgtatgtgaccttgtgttctgacatgattctggcatctgtgcagaatctttttggtagcatgtgctttgtcactttctagcaagcagggagactaggcaggcacctagggcctgagagtcaaccagtccacacgtttccaaaccatgagggtaggagaaaggggtcccaatattctcagcatttgggtagttactactccgagatgggttttaaagccagttaataaaaaggcaccatgccaccggaagagatatgtgagcttggatctcaaagggtatgtactctgaagctgaaatcataaaccagagcatctgatgtgtgtctcatacacaatgagggaggaaggactgctgacggaaatgtcacacgcagctgcttttagcacttggctctcactgatgaagcttccctctctgccactacacaccaccctcttcctacatgagagacctttagggctctttagttctcatcctgaaagctgtgggacagattataaattgatatcttttatatcagtatagctcatgcttggttgatgtgcctgatgggctataggagtgattgactcagctactattttggtgaggaaagagagtcttccttagaaagagaattgtgtgccttgccctaaaaaggttaggaatgcggcctatggtcctaattaagtgccctgttaaacagtgtcccttgaacaagtcactttcttcttctgcaacttctccagctatataattaagcatgtaatcctgtgtgacttcatagtagggttgtgaggacaggctattcccaccgtctggagttgtcttcccctcacttttccattgccaaataaatcgtccttatcttttggagttaagttgaaacatcaatttcttgagattg

SEQ ID NO: 1437 - DNA, 1515 bp, Homo sapiens
cagttttaagacacatcttggccgggcgcggtggctcacgtctgtaatcccagcactttgggaggtcaaggcacgtggatcacgacgtcaggaattcaagacaagcctggccaacatggtgaaacctcatctctactaaaaatacaaaaattagccaggcgtcgtggtgggcacctgtaatcccagctactcgggaggctgaggcaggagaatcgcttgaacctgggaggcagaggttgcagtgaccctagatcgcgccactgcactccagcctaggcaacagagcaagactgtctcaaaaaaaaaaaaaaaagacacatcttgatttctgagatattacaatataactatatatttcttgggacagataaaatgcagtattgttattttattaatacaaataaaggtatataataataaggccctgataacctcagctacacaggaactcacagatcattctttcttttccatctcattcttagcacgctaatccaacctttgcaatcttaaatctaggacaaagcaatagaaggatttgggctatggagaaaagagaactcattttggtgtctaaagacctggatctgactttcagccttgcaatacttttaggaggtgaaatcactactctgggggaaatatctgattcagaaggttttgggcgggggggatttaatgtatgcagaagcagtttgtaaactgtaaaatctctatacaagaggaagagaactggctgcactccagcctgggtgacagagtgagagttctgcctcaaaaaaaaaaaacaaaaaaaaaaagaactaatatttgttgagtgccaggaactgagctgggtatttgggcattatcttatttgatctgatgtaaatgctaaggcatatcatgtctggatagtcaccttgctagctaatccattctgtggtgggtttttttttcttcttcttcctgaaataaccctttcattcccttaaaccttaaagcagaaatcttctttagttactgttcctatcacaaaccagttgatgactatgagctcatcacaaagctgcagcctctcactcattgttgccttgtagtaagacacatgatgaaataagagacccttaggctaccagtgtgctgtgtagaatcttccctgtgattcttttgccagaactagcccctgggaccttggcagaaaatttttacttatactatgataaaaattccaaaaataggctgggcgcggtggctcacgcctataatctcagcactttgggaggctgaggcaggcagatccactagaggttaggagttcaagaccagcctgggcaacatggcgaaaccctgtctctactaaaaatacaaaaattagctgggtgtggtggcaggcgcttgtaatcccagctactcgggaggctgaggcaggagaatcacttgaatctgggaggcagaggctgcagtgagccaagattgcgctattgcactccagcctgggtgacagagtgagactccgtctcaaaaaaaaaaaaa

SEQ ID NO: 1438 - DNA, 1070 bp, Homo sapiens
accccactccaagtcttcaatcaatgtgttctaaaaggagagaaagcctaagagtatgagtcaactttattcctggtactgaactttgtttgttctcatgttagttgcccgaaggaacagggaagagaagcaaaagggaagtgattaacaggtcaacctatttgactaatttaagagatcaatttaaaagaaaatgataacatagcaaactcctcttatatgcacataaggcattactaagtatctattttatggtgcttgacatgttacaattgcctttttttcttcttttttttttgagacagagtcttactgtgttgcccagactggagtacagtggcgcgatctcggctcactgcagctaccgcctcctgggttcaagcgattcttgtacctcagcctcgcgagtagttgggactacaggcgaccgccacaacacctggctaatttttgttgtatttttagtagagataggatttcgccatgttgcccaggctggtcttgaactcctgacctcaagtgatctgcccacctcggcctcccaaagcattgggattacaggtgtgagccaccgtgcctggccacagttgccttttttaaccttgatgttggcttttttttttttttgagatggagtcttactctgttgcctgggctggagtgcagtggcgctatctcggctcactgcaaccctgcctccctggtttaagtgattctcctacctcagccctccagagtagctgggattacaggggcccgtcatcaaacctggctaatttttttttgcatttttaatagagacggggtttcaccatgttgcccaggctggtcttgaactcctagcctcaagtgatctgcccacctcggccttccaaagtgctgggattacaggtacgagccaccgcgccgggtcagatgttggtttcttaagcaaaaacagaatcaggatatcccaggaagtcaacagacatctatctggtggcctcctaggtgaaaatgctctccttcaacttagcaggtgtgagcattataactgtaacctgtcctttttttttttttttttttttttt

SEQ ID NO: 1439 - DNA, 1015 bp, Homo sapiens
ctacatcatcaagtgtttcatgtacatgccaatgttcaaaaactttttttaatcaattagtcaaactttgctaaagtggtagcttgtcactactgccggggtttgttgaagtgtgccactctgcatgccagctaataataataacaacaatagcagttaacctgtgaaaaccgtgaacagcaactcccctgagagccaatgacaactagagatatggcaaggagtcatgttggaagaatactcatccagacccttgctgaaatagacccagaaaacggctctgtggagttacacccagaatggagcctatggagaacacccatattcaacaacagtggctgactttcagcacgcagcagacagcctctgagagactttgttctgtgtctcacccttctcttatgcagtgaggaaagggagactctctaggccaggcagtaaccctgagagcttccctgacagaggattgctgagagactgagcagatgcaagaggaatgcctctgttcttccctcactgcctattttggccatctccctgcttttagactttgcagtggaggggccagaggcttgagccaagccaaagatacaggagaaggatctggaatccacctcagtgggtagggccaattaagacaagaggggtgtacacagagggaaatgttcagaaaacaaacctcttgcaagaatctggaggtataacagggccaagtcttcatactgagttggtgggggcttcactttaatatgtgaatgttggaaagaggtgggatatgaaaagaaatcacaataccttgatcaccagcttctaccagagggatcttgtctcttattgctgctgtgagtactttggggcctcatgagtgagcttggctgtctagaaccctagttggccttgagtgaagaaaatcagtaactgtagttagactcccctgatctgccctacccgtctgtcctagcatcatctagagaacactctaggaagaggctgtgggtataattgagtgtaccca

SEQ ID NO: 1440 - DNA, 1091 bp, Homo sapiens
cccctcaccatcagtcatctcactagcatacaaaacccatcactttggaaactgtaaggcttttttagaagttgtaggtcaagaaatggggttgaaaaccaaatatatgtattacaatatcacactccttttttatagctctcactagatgttaggtattgtgctaagcactgataaacttgcccaaagtcaaacacttggcaagtggtagaaccaggagttgaaccaggccaaagcttatgtatttgactaatgggctaaactgtctctgatggtttaacaaatacagcaaaacttgcagttccaaagtgttttgtgccttttaaaggaatagatttggaagaatatatatttattcttaagtttacttgaagctcttcttttggaattacctgagaaatccttgatatattttttgaacatccttaacaagggcaaatttttgttctttaagatttgatcttcttaattaccaaaagttgcttagtgacaaacacagtaaataagttggaaaatcacaatagatattttagtccatttttttgttgctgtaactgaatatctgagacttgagaattcatgaaggacagaggtttattttttacagtctggaggctgagcaatccaagagcatggtgccaacattcagtgaggcatctcggcatcatagcatggcggagggcatcaatcacatggtgagagggcaagagcatgcatgtcagctcaggcctctcttcctcttttttttttttttttttttaatctttccgagacagtgtctcactctgtcgcccaggctggagtgcagtggcgcgatctcagctcattgcaacctccacctcctgggttcaagcaattctcctgcctcagcttcccgagtagctgggattacaggcatgcaccaccacgcccggcttctttttttttttttttttttttttgagacagagtctcgctctgtcgccagcctggagtgcagtggcgcgatctcagctcactgcaacctctgcctcctgggttcaagcgattctcctgcctcagcctcccgagtagctgggattacaggcatgcaccacagtgcctggctaatt

SEQ ID NO: 1441 - DNA, 1177 bp, Homo sapiens
attcaaatcatagcaataggaaataccatctttggtggaaaaacatgtggcttagaaagcaagtctatggttttgatggaagtagcaaaatactttatcatcacaaagcggtatctattgttgccaactttactttcccatcacattagccttgtattagatgaagtaaagaaatatgagtttttaagtaaattaggttaaccagaaatgcattaaattgttgtaagtaaaaattaattaatggattaatataaacataaagaaaagtttccaaagaaggctttgtccttttaataattctgcaattgacatgaatgaagtcctagaaagtgtgttcatcaaacctaggaatcaaagttgggaataagtgattttaaaaaaacagagagagtttgaaaactaagtttaacaaagttaaatgtaagatcctgcacttcaaactaagaaaaaataactgcactagtacaagataaggaatatagcctaacagaagtacatgagaaaaatgcttctaagttttagtagatgagaacttaatcgatgttaatgacttccaagaaaaatattaagatattaggctgaattaaaggaagcatagactctagaacaaaggaggggacgcatccactctactctgctggttatttctagaaactacaatttaagaggaatacggtcaaataaaaatgtattcagaagagagtaatcacaattataaaagaatatgagaaatgttaaatagggagaagacgtgttgtttgaagattaaaaagaaaaaaaatactgctggtagggatggcattggcagggcactgtggctttatactgttaatcctagtactttgggaggccaaggtaggaggatcccttgaaaccagcctgagcaacatagcaagaccttgtgtctacatttttttttaagtttctttaaattgggggacatgatagatttcttttttttttttgagatggagtctcgctctgtcgcccaggctggagtgcagtggcacgatctctgctcactgcaacctccgcctcctgggttcaagcaattctctgcctcagcctcctgagtagctgggagtacaggcacccgccaccacgcccagctaatttttgtgtttttagtagagacggggtttcaccatcttggccaggctggtcttgaactcctgac

SEQ ID NO: 1442 - DNA, 1058 bp, Homo sapiens
atctcaaaaaaaaataataataatgataaacaaagctgttgtaagctaagaaaaggctgttgaaaagcaaatagtcatcttccatcctcttataagattttgaaattatttattattattattattattattttttgagacggagtctcgctctgtcgcccaagctggagtgcattggcgatctcagctcactgcaagctccgcctcccgggttcaggccattctcctgcctcagcctcccgagtagctgggactacaggcgccagccaccatatccggctaatttttcgtatttttagtagagacagggttacactgtgttagccaggatggtcttgttctcctgacctcatgatccgcccgtctcggcctcccaaagtgctgggattacaggtgtgagccaccgcgcccggcccccttataatattttaccaacgtagtaacagtcatatcccctatgtggttttaatgcacactaaaagaatagggggctgggcatgcctgtaatctcaacactttggaaggccgaggcgggcggatcacgaggtcaggagttccagaccagcctgggcaacatggtgaaaccccatttctactaaaaatacaagaattagccaggcgttgtggcgcatgcctgtaatcgcagctactcgggaggctgaggcaggagaatcacttgaacctgggaggtggaggttgcagtgagctgagatcgtgccactgcactccagcctggtcgagagagtgagactttgtctcaaaaaaaaaaaaaagaataccacttagcatgactactgctagaattagcctctctccttactctagtgtaggtggagaggtggagggttattggtttatgtcccttcagagttatcaccctagtacttggaaactgcatgctgttcccaggagcatcatatgctctcccccaaccatctgctccatcatgggtccccactcacttaattgcagatcactgccccaaactcctggacacactttcttttgtaggatattattccctgtgatgggtgtagcaaaagagtaaatgtgaggca

SEQ ID NO: 1443 - DNA, 2840 bp, Homo sapiens
gattagtcatactaatggatcaagttatggattttttgtacatccaagttttagagtatcagtgatggtcttgctaaatgacctttctgattgtcccaggaaagctatcaagatattacttccttcccagggggttgccttgtagaaaacctaatttataatctttttaccctacccacaggtctgacagtcctgccatttcctaacttctcctgtgtggtcatccacctacctttgggaacctccagtcattactcacagagttggtctcatcctgggaactctctcttgcctctcccagtggttcattctccaagtctgagttatttggtcaaaaaaacctccaaatgcttcagacaactctcgcaaacttgtcatagcttttggtattccaggccacagaagagcccaggtgggtacatgggccctccaagtgtttgtttcctcaccactgtgagtgacaaatatgcttctttatccttaaaattgtccagccagtaactgttggaacacactgacctagatccacacatgcaaacacacctttcaagggcaaatgttaattcacaaagacaattgtaaaatctaagctaaagttcacaaatgggagctgcctttgaagtgaattcagcccacagacatctttgattagcaccgtgtgttgttgttgttgctgttttaaattttttttttttttttttttttttgagacagcgttttgctcttgttgccaagactggagtgcaatggcgcgatcttggctcacaacaacctctgcctcctgggttcaagcaattctcctgcctcagcctcccgagtagctgggattacaggcatgtggcaccatgcctggctaattttgtatttttagtgcagacggggtttctccatgttggtcaggctgttctcgaactcctgacctcaggtgatccacccacctcggcctcccaaaatgctgggattacaggcatgagccaccaagcccagcccttaaaattatttttaatgtctttagaagaggcatgcaatttcggatgggtgcagcactcacgactgtaatcccagcactttgggaggccgaggtgggtggatcacctgaggtcaggagttggagaccagcctggccaacatggtgaaaccccatctctactaaaaatacaaaaattagctggccatggtggcgggcacctgtaatcccagctacttgggaggctgaggcaggagaattgcttgaacccaggaggcggaggttgcagtgagcctagatcacgccattgcactgaagcctgggcgacaagagcaagactccatcttaaaaaaaaaaaaaaaaaaagaggcatgcaatttccattccccaccccccacagtctctactcctccctattatatctaattgcttcacccatgtatagtatagcctgtcctctgaaataattggagtttaagatccctgaatctaaacctgtaagcaggaaaatagatattttcctaatgccctataatacataaacatgtttccattttctccttctgcttttatttttatttttatttttttgaaatggagtctcactctgttgcccaggctggagtgcagtggtgcaatttcggctcactgcaaccccacctcccgacttcaagccattcttctgcctcagcttcccgagtagctgggactacaggcacctgccacctagtagaggtagggtttcaccatgtttgccaggctggtctcaaactcccaacctcaggtgatccacccatctcggcctctgaaagtgttgggattacaggtgtgagccactgtgcctggcaagaaggaacatttatgggtgcttgggtgtagtagttaagagtggttccacagaggccgggcgcagtggctcacacctgtaatcccagcactttgggaggccaaggtaggcggatcgcctgaggttgggagttcgagaccagcctggacaacatggtgaaacatggcgaaaccccctctccactacaaatacaaaaacttagctgggcgtggtggcaggcgcctgtaatcccaactactcgggaggctgaggcaggagaatcacttgaacccaggaggtggaggttgcagtgagccgagattgtgctatatagcacttcagccggggcgaaaagagtgaaactccgtctcaaaataaataaataaacaaatatggaaagggggatggctagaatgaactctgcagtgctggatcagaattggaaatatcaatgggagcacatagttttataaatttgtgtgtgtgtgtgtgtgtgtgtgcgcgcgcgcatatgtgtgcatttgtgtattagtgtgatagtctgtcctctgaaagggcctacaagccatgatactccagtacaaattagtacacctagaacccagattgttctaaatacaattctccctaaaggaaccagggctttttttttttttttttttttttttttgagacaagagttttgctcttgtaacccaggctggagtgcaatgccacaatcttggctccttgcaacctccgcttccagagttcaagcaattctcctgcctcagcctcccaagtagctgggattacaggcgcctgcaaccacgccaggctaatttttgtatttttagtagagactggtttcaccatgttggccaggctggtctcaaactcctgatctcaggtgatccacccgcctcagcctcccaaagtgctgggattacaggcatcagccaccgtgcctggccttttttttttttttaagacggagtctcgctctgttgccaagctggagtgcagcagcgcgatcttggccactgcaacctccgcctccctggttca

SEQ ID NO: 1444 - DNA, 1973 bp, Homo sapiens
ctattaagggaaaagtaaaggccaggtgcagtggctcatgcctgtaatcccagcactttgagaggctgaagtaggcagatcacgaggtcaggagttcaagaccagcctggccaacatggtgaaacccccatctctactaaaaatacaaaaaaaattagctggtgtgatggtgggcgcctgtaatcccagctacctgggaggctgaggtgggagaattgcttgaacccgggaggcagaggttgcagtgagctgagatcgtgccactgcactcctgcctgggtgacagagcaagactctgtctcagaaaaaaaaaaaaaaaaggaaaaatagtccttttaaagtgaagaaacctggtagacatccccttaaccaagtaatcaaagttaacttcaacagtaatggaacaagtcaactaatattatgtaggggtcacaacatcacttctgtgctattcctgctaagaatgcataacctgaatgtaatcgtgaagaaacatcagacaacccaagttaggggacactctataaaacaactggcctgtaactcctcaaatatgtcaaggttgtgaaagacgaagtgtggaaaattctattccagattgaaggagactaaagacacttgacaactgaacacaatgtatgatatagaatttattttaccataatggacattattggaacatttgagcaaattcaaatgaggtctgtaggttagaaaatattattgaatcaatattgatttcttaatttttataattgtggttatgaaagagaatatccttgtttttagaaaatatacactggcggggcgtggtggctcactcctgtaatcccagcactttgggaggccgaggcgggcagatcacgaggtcaggagtttgagaccagcctggccaacatggtgaaaccctgtctctactaaaaatacaaaattagctgggcatggtggcatatgcatgtagtcccagctacctggaggctgaggcaggagaatagctggaatccaggaggcagaggttgcagtgagttgagatcacgccactgcactccagcctgggtgacagagcaaaactctgtctcaaaaaaaaaaaaaaaaacaaagaaaagaaaatatccactgaagtgcttaatggaaaggggcatcatgtctgtaagttattatcaaacagaaacaagttcagaaaaaaattatgcacatacacatgcacagaaatacagtgagagagagagagcaagtgtgcagtaggtattagcctaggttgctaggagaattaaagttaacaagcaattaattcatgactaacaccagaaacttggagaatatgcccaatgaccttttatcaagtgcccagtgccaatttatcacttaagatagcactccacatggcagaaagacttaaacgccagtaagtcactctgtatgtttgggacatctatagaacactttttttttttttttttgaaaactcctctagcaaaaaaatgtttaaactttcatcttcacgttgggtgattgcagtcataaatttcacacaatgatcctgcttgtatcatagaataacccattttctgatgaacaggttgaatccaaataaattccaaacacgtgtataatgtagagttaaaacattttagactcaaagctcaaagctaattaagaaccggcatgggccacagtttgaaccagcaccaacttgtctttgctctgttattggtttgctgtctttgcctgttattccatatcacttgctggaaggaagcagccatactgaaatacaaattttgtttgtttcttttttaaaaaaggaaacaaatagatggtttattctaagaatgtacaggaacttatattctaaacgtccataaatgcatattctagggactcttatcatctcagaaccctactacagattctctttaatctttttaaacatcctgttacataaattgcagctgtatctatagcaggaagaa

SEQ ID NO: 1445 - DNA, 1030 bp, Homo sapiens
aaaaggctgggtgcggtggctcacgcctgtaatcccagcactttgggaggccgaggtgggcggatcatgaggtcaggagatcgagaccaccctggctaacacggtgaaaccctgtctctactaaaaatacaaaaaattagccgggcatggtggcgagcacctgtagtcctagctactcgggaggctgaggcaggagaatggcgtgaacccgggaggcggagcttgcagtgagccgagatcacaccactgcattccagcctgggcgacagagcgagactctgtctcaaaaaaaaaaaaaaaaaaaaaagcaaaagaaccataagtatttgtggaggtctactgagttctaggtactgagtggggttagagaagtggaaaaaacagaccacaccgagactctcacgaaatttacattctagttgatgagatagatgtaaataaaaattcaggtcattttatgaggaaagtgaaatggagcaacactaaacagaataatgaggagaaaggcacacaacttctgaaggcactagccatgtgaagactgggagtataccattccaggcaggggaacagcaagcacaaagtccttgaggaagggatgggcttaaaaaaacaaggagggcagtgtacctagagcaaaatgtgaacaaaggcaagtagaggaaaggtagacagaaactagattatgtaaggtcttgaaattcttttatttactcacttacttttttagagatggggtctccctgtgtcacctgggctagggtacagtggctattcacaggagcaatcatagcacactgcagcctggaactctgaagctcaaacaatcctcacccctcagcttcccaatagctgagactacagactcacacaatgtgcttggcaaggccttttattctaaatgcagtggtgagatggacaagagatgtaccatccatatcctcctttaaggaaggacttgatgcccagatgtaaagagtgtagtcaccaaacagccctttcagaatctgccccagacacagagagcccc

SEQ ID NO: 1446 - DNA, 1030 bp, Homo sapiens
tttttttttttttttttgagacagagtttcactcttgttgctcaggctggagtgcaatggcatgatctcaatcttggctcaccgcaacctccgcctcccaggttcaagtgattctcctgcctcagcctccctagtagcctgcctagtaataggcatgtgccaccatgcccggctaattttgtatttttagtagagacagggtttctccatgttgatcaggctggtcttgaactcctgacctcaggtgatccactcaccttggcctcccaaagtgctgggattacaggcgtgagccaccgcgcccggctgccattgaaggatttttaagcaaagaattcaaatggcctgatttacattttagatcactctagctgctgtatagaggatggactgtgggaaataaaagtgaaaacaagaccagtagcagtagcccaggggagatggtggtgatttgatctagggaggagaaagtgggaagtggatggatttgggatataatttggttgtagaagtgataactgcgcggtggctcacgcctgtaatcccagcactttaggaggccgaggcaggcggatcacctgaggtcaggagttcgagaccagcctggctaacatggtgaaaccccgtctctactaaaaatacaaaaaattagccaggcgtgatggcgggcgcctgtagtcccacctactcgggaggctgaggcaggagaatggtgtgaaccaggaggcagagcttgcagtgagcctagatagcgccactgcactccagcctgggtgacagagcgagactccatctcaaaaaaaaaaaaaaaaagtgataactggttcatcccaaccatttttatcagttaccttgcagaaaacaaatttagtgtgttgaaggaaaccaaaatatttctcgctaaaatactggggattttagtttaaaagcttaaaacacatgggcacactgcccttcctaactctgccttcatccgctcagaaacagctcagcggtgccagaggatccaggagcagactttactcttccc

SEQ ID NO: 1447 - DNA, 1022 bp, Homo sapiens
aaacactgtctctactaaaaatacaaaaattagctgggtgtggtggcatatgcctgtaatcccagctactcaggaggctgaggcaggagaactgcttgaaccgaggaggtggaggttgcggtgagccaagattatgccattgcactccagcctgggcaacaagagtgaaactctgtctcagaaaaaaaaaaaaaaaaaagaatttataatcaagcagcttcctcccctccccaatgccctgccactgatcccttatgaacattatttaggaagaccctttgcctctacttgttttttaaaaagtgaaataacagaaagtgaagaggttttctcaggatgttagcaattctccactgttaagcaggtcttctctaggtttacaacagaaatagctaaggaggcagagctcacacctactttgtctatctttctaatactgaacaaaacctttactcaattttgctgctttctaatgattctgtcctatttctactcttttttggcaaactcctctagcaaattatctgcgcagttatcgtcacctcttaatgtcaaataacaaataatttggttttagtctctattgaaatataattaagggccattatctactcctgaatagccacattaaaatgcctcttctcagtctttactgagttccctattgagtttgttattgcaaaccactctattaaggaatggtttttcttctctttataattaaagaaaattacatgaacagtatagcaacattaatacagctctagataaaagacagaaaaagtcacccacaatgtcactacccatccaaaagtaaacattttttaaaagttgttgttgttgtttgagacagagtttcgtcttgttgcccaggctggagtgcagtggcgcaatctctgcttaccacaacctccatctcctgggttaaagcgattctcctgcctcagcctcctgaatacctgggattacaggcatgtgccaccacacctggctaattttgtatttttagtagcgacagagct

SEQ ID NO: 1448 - DNA, 1098 bp, Homo sapiens
caatccccttaacagagaaccacaatgatgtatattccaagtcactttcaagttaaatttcattattggtatccttacattttcctttaagaaaaaagaaactctgggccaggtgcggtggctcacgcctgtaatcccaacactttgggaggccgaggaggctggatcacgaggtcaagagattgagaccatcctggccaacatagtgaaaccccatctctactaaaaatacaaaaattagctgggcgtggtggtgcacactgtagtcccagctactcgggaggctgacacaggagaattgctcgaacccaggaggcagaggttgcagtgagccgagatctcgacactgcactccatcctggcaacagagcgagactccgtctcaaaaaaaaaaaaaaaagaaaaactctgaaaagggtaaggaggaagtgggattcagtaacctacaaagcatttaggcaggacgcttttcaaaatgcagttggcagaaatggaagttgaactgagtgtggtttccagtacagggcatctggccaccttcacctcagtaaatactgctgatcgactctctctggctctggctgtcctgccagagacagccaaacacaggagacatgacaaattactatcatcttttgcttctttatttttattattattatttttctttttgtggagaacagcgtcttgctgtattgcccagcctgatctcaaactcctgggctgaagctgttctcctgcctctgcctacccaagtgctggggttacaggtgtgagccactgcactcgacctttatttttattctgtatactcatcagtccccttgtgccctgataatggctagaaataggagtttctcttatatacagtagcagggacacactttctctccttctctttcctttctaaaggacaatgtcaaggacatgtccaggacaggtcagagaatgttatatcagagatactgctgctatatttacccccacttgcctttcaagcaaagcaatttatatgattaaaaacaaaacaaaacaaaacaaaaaacagcagaggcaaactgtcctgggtatcttcagagaagaaaaacattgaatttt

SEQ ID NO: 1449 - DNA, 1073 bp, Homo sapiens
gtgacattcattgagaagttattgtatgtcaagcatcttgtagttcaaatgtattatctcattcatctagttggcaagcctatgagatagtttctattattttacaaatgagaaaactgatgcacagagaagttcaataatttgttaattattaatagcaagtggcagagtcaagatttgaactatgtctctttactattaaaagtccattattttggccaggtgcggtggctcatgcctataatctcagcactttgggaaggcagaggcgggcagattacctgaggtcaggagttccagatcaggctggccaacatggtgaaaccccaactctattaaaaatacaaaaagtagccgggcatggtggcatgcacctgtagtcccagctactcgggaggctgaagcaggagaatcacttgagctcgggaggcagaggttgcagtgagccaagatcacgccactgcactccaggctggttgacagagtgagactctgtctcaaaaaaagaaaaaagtccattattttaaccaccgtagactactgattctacattagagacctagatatcaaggccagtgtatcttcaattctttaatccatacccttctcctgaaacgcaacagcactgttgcctgagtgtttgttgaagaggtttatttctttggtttaagactttgttcccagagattaaattgcagatccctaaccttctcactactaagtagctcttaggagtggatctcaaagcttgaaaagattttagcctgccagacaaatatcattaattaatcccttttcccttaagacagccaggcctaccacactaccttgatgggtttctggacaaaaaaaaaaaaaaaaagcaaaggtagcataaatataattgatgatttctattagacttctttggaaaggagaaaacaactcttacaccttcattaacacctccatggagcctccaggttagtggtagtaggggttcaggacttacattagaaatccctgttttgaccttttctgttagaatgcttgactgcctggcattttcctattaatactaggatttttttttc

SEQ ID NO: 1450 - DNA, 1420 bp, Homo sapiens
taaaatatatgtagatactagtgtactttattatttactgccataaaagatatataaatccattataaaaagttaaaatttatcagaggccaggcatggtggctcacacctataatcccagcactttgggaggccaccaggcggatcacctgaggtcaggagttcgagaccagcctggacaacatagtgaaaccctgtctctactaaaaatacaaaaaattagtcgggcgtggtggcacatgcctgtaatcccagctacttgggaggctgaggcaggagaattgcttgaacccggaaggcggagattgcagtgagccgagatcatgccattgcactccagcctgggtaacagagcaagactctgtctcaaaaaaaaaaaaaaaaaaaaaaatcaaaacttacacataagtacacttacaaacacttgcaccattcacagtggaaataaatgcaaacaaatatagagatgcagtattaaatcataactgcatacaattaactgtagtaggctgggcacagtggctcacacctataatcccagcactttgggaggctgaggtgggtagatcaattgaggtcaggagttcaagaccagcctggccaacatggtgaaaccccatctctactaaagatacaaaaaacaatcagccgggaatggtggtgcacgcctgtaatcccagctacttgggaggctgaggcaggagaatcgcttgaacctggctactcgggaggctgaggcaggagaattgcttgaacgcaggaggcggaggttgcagtgagctgagattgtgaacattgccctccagcctgggcaacaagagtgaaacactgtctcaaaaaaaaaaaaaagtgatctctcagttctcacatagttttcatcatgtttagtgcaataccataaaccttgaataacaccttgggaccatatgaagtgccattagtgatgctggaagtgctcccaagaagcacagaatagttatatcattacaacaaaaagttgaattgcttgatatttccacagattgaggcctgcagcttgtacttgtctgccatttcgagataaatgaatccagcataagaaccattaaaaaaaaaaaaaaaggaaaggaaatttgtgaaactgtcactgcagctataccagcagtcatgaaaaccttgcactttttgcaaactacctttatatcttgtattgaaaatgcaacttttatattgcatttattttatatttattttggtgcaatatatttatattggtgcggtattgctataagaaattcatacgtatatagtctaatatgattccagaaaaagcaaagtcattatatgacaacttgaagcaaaaagaaggtgaaatctaaagcgagagaatttaatgctagcaaatgattgtttggtaattttagaaagaggtttgggttta

SEQ ID NO: 1451 - DNA, 1050 bp, Homo sapiens
caataaattcctgctggagaaaactgtgtccagatgttgtgcatgacttatcaggatatatgacagaagcaatcaaggaaatcatgaaagagattgtggatgtcccaaaaaaggtgggagataaagggtttcaagatacagatcttggataaattcaaaagctaatagacaccacacctgaggaattaacagaagatgacttgatggagataagtgcttccaaaccagagccagatgaagaggaagaacatgtagaagcagtagttctagaaaacaaattgacattagacaatctggcagaagggttctgattattcaaggctgcttttgacttcttttacaacatgagcccttctgtgatatggacactaaaactaaagaaggattggtaccatatatggaggctgggaagtcccaagatcaagctgccaaagagggctggttcctcataaatgatgctttctaaatgtgtctcacagtctccctccagctctgttttttgagacggagtcttgctctgacgcccaggctggagtgcagtgtcgcgatctcagctcactgcaacctccgcctcctgtattcaagcgattctcttgcctcagcctcctgaatacctgggactacaggcatgcgccaccacgcccagctaattttttaatatttttcgtagagatgtggtttcaccatgtttgccaggctggtctagaactcctgacccaaagtgatctgcctgcctcagtctcccaaagtgctgggattacaggcgtgagccaccacgccaggccccccagcctcttttataaggccactaatcccattcatgggggctgtagccttctgacctaatcaattcctaaagtccccatctcttgattggtatcacatcagggactaaattccaacagatgaatttgtggggacatcaacattcagaccatagcagcacttctgtctgtcttgttatcttctgctgcataaacagaagggagtagtgcctttaaatcagcccaagcgcctctgggtatcttgaagataaccagctctttccac

SEQ ID NO: 1452 - DNA, 1031 bp, Homo sapiens
tgatttttatgttatgctaaactatgaaaagtactgctatgtgggattctctctctctctcacacacacatacacatacacgcacaccacacagctacctaaaactcctgcagctgctaatgccacttggtcattttcctgtggttttcctcagcagggccctgggatttgtttttctccactgtggaccttgttcatttcctgctgcttccaagaggttgggagaggaaagagagcaggaatgaaggcgggagggggaaggggttagctaaggcagtgtagctttcaagaatgaaaaggaaaaagcttagtgacagtgttcctttgtgaagaattcagctttatgttgatggagctgcaagtcattagcaacccaggcatatggcccgagttgaccgggtcattctccggggccagatcgccctctgctgctgactgataaataacactctgggactcgaactgccaaggaaaagaggaagagtctctggggctagggtgggagggaaagaggacatgactaaggctaagagatcacaaagtcaccaggctgtagaagaatcttgttaaattcctgtgtgcaggaaaggaagaagtagccaaatgagcgggcgtttctaggactcattcaagaaacagtaggattcacccaagatctccactagctcctgtgatcctagctcccagcttaatgaggctctgcaaccattctcccttttattcctcacctttacctcacttggaacataaagggtgtttaaaatgggaagacaggctgggtgtggtagctcacgcttgtaatcccagcactttgggaggcccgggcgggtggatcacctgaggtcaggagttccagaccagcctgaccaacatggtgaaaccccgtcactcctaaaaatgcaaaaattagccaggcatggtggcgcacgcctgtaatcccagcttttcgggagactgaggcaggagaatcgtctgaacctgggaggcagaggttgcagtgagccaagatcgcaccattgtactccagcctg

SEQ ID NO: 1453 - DNA, 1034 bp, Homo sapiens
tacccagctaatttttgtatttttagtagagacggggtttcaccatattggccaggatagtctcgatctcttgacctcgtgattggctggaatgcagtggggtgatttcagctcagtgcagcctctgtctcctgggttcaagcaattctcctgcctcagcctcccgagtagctgggattacaggcacccgccacgaggcctgactgatttttgtatttttagtagagatggggttttaccatgttggccaggctggtctcaaactcctgacctcaggtgatccgcccacctcagcctccctaagtgctggattacaggcatgagccactgtgctcggcctccagccacccatttctaaagttgagatacttcaaaagtattatggatgtctctcacataatctcatgtaatagaaagattatcttttttagacagtagcagaaacagcagttttagtttgcaaaagaaacactttaactggatattagtggccaagtaaaaaaattaagtaaataaaagacgtagtaaatccctaaaccaaattgggcatgaggcgtgggaaaagctgctatgtttccagaatccaatatactttgcccctggcttgcatgatactgttacaatgaactgtttcacttgcaacagtcatttcaaagcatatacgatgctttcactgtattaaggattttaacatattttgtcttctttatcctggtatatctggggaagtggtaaacagcaaatgtgagcctttaaaatctagtgatatcttcaagacatttttgttagtttataagatatctgaacaagaaaatctgcaacaagagagcctaaagaaatctgatctaatacagatctgatacagatcacctgggcttggttgttacacaattataccctggtgtattagtctcttgcactgctatatacaattaaatcagactgggtaatttataaagaaaagaagtttaactggctcacagttctgtaggctgtacaggaagtatggcactggcatcagcttggcttctggt

SEQ ID NO: 1454 - DNA, 1156 bp, Homo sapiens
ttttttttgagatagtttcactcttgttgctcaggctggtgtgcagtggcaccatcttggctcatggcaacttccgcctcctgttcaagcgattctcctatctcagcctctgagtagctgggattacagccacacgccaccacacctggctaattttttatatttttagtagaaatggggtttcaccatgttggcaaggctggtcttgaactcctgacctcaggtgatccacacgcctcggtctcccaaagtgctgtgattacaggcatgagccactgtgcccggccgagtattatttttaaaactaaattatgctaggtacactcttaacaaggcaaggatttccattcacaaaaggaagcgtaaattatgcaggctaaatgaagcactgtcatacccaaaatattagatacaatattttcttatgatttaacttttacaaagggcctctttgtcagaagttgctgaagttcccggttcagcctattattgctgcatattcttgaaaacaaaattgttgatgattcagatgtatgtgtgactgtgcgaagaaaacccctccatttctgttgctgtaggactttgttgcaattagcttgctgaacttgattttctctttgaactgttgtgattgctttgtacatcctataaataatttacccctgatggtactaaacgactacattaatggcacctctggctccacatgatatcaaggacattaataattcatcatttattacagctacatccttgtagattagcatgagtgggaactgagtttacaacattgagatcaggccctctgagagacctttactcctctgtcatcatatctataaatattcagatattagtggtgttagaaaataaaggaaggactgttacagagctagactttaggtttaagtttattaagcattaggtttacagcctgggcaacatagggagaccccatttctacaaaacagaataaattagctgggcttggtggcatttgcctgtggtcccagctgtaaggagactgaggtaggagcattgcttgagcctgggaggtgaaggctgtagtgaggtgtgatgtcaccactgcatttcagcctaggcaacagagctttagattacttcaagttcttaagtacattttagggatatttga

SEQ ID NO: 1455 - DNA, 1116 bp, Homo sapiens
tgagagttgtcacaaagattctttgcttgaccaacccgtaggcaagcccttaaaccttctcctaggcctagctgtgtaaaatccaattttagcacaaaccctgtaaaaccagtttagcaagaactcttcctcattgtagaccattcccaggtgatgtctgatcaccctggcctgtcttcagcaagaatcctgttagggtttagccagagtcttccttactctggatgttattttttagtaatttcacatccactgagtgggatgaaagcaaacccaccttgctccttggctatacttgcccttgctgtttccctactgtctctccctcactgagtcgaacccagtctctctccccagctgcaacatcacattgccgtggtccctatatctattgagatgatcctgaataacgtctaccttaccatgctttaacaagtatcactgagtaattttttatttaacagttacggtgctgtgactccgataggatcagattcatcattggacccccagacctctcacccaggaccccaagtgtgcacctttgaagccattgtcttcactcctgactgatagatcggggatccaatggtgagtcagactaacgaaccattgctccggacaaacatctgttgaagctggtaaggaaagatttcgattctcaagattgtgaatatattctctggagttgggctagaggccagacttcttttgaaaggtacctcctgggcttgaaggtcttcttcctggctctctttcctgagtggggtttattccctgactccctggactaaaagtccttggaactctgtgaggctactctgttgtctctaatggatcctacttctcccatggcaatttctctggcatctgaatcccctctgtttgagcccctgctaactatattgctccaccactggttctgtccacctcctccttgttggacctttattggcctgtttggaatacttaagatctccccagactgcatcctgtaagctgtctttcttcccattgctactgctccttattcctcctcttaccacctttaatgttccttccagttcccttgagccctttgatatgactcccttcaaattcttacatcctccatcc

SEQ ID NO: 1456 - DNA, 1029 bp, Homo sapiens
aactgataatgcttgagaaatatattctgagcacacaggtgacagtaagggctagtagaaaagtgctggatcctgaagtcaggaaacctgagttccaatccaggctctgccactgactgacatgtctttgagcaagtcatttgaattttctgggcctcatttcccccatctttaaacaagggaattggactgtagctctgtagtctctttcaactttaatatgccactttgtaaacagaacacacaattttatagtattttttaaaattgaatctaaagcaaaaataaataactgacttggctacggatgcatttttttccccttagatgattttctcaagccacagataaggacacatcctgaaaccataattgctctaagaggcatgaatgtgactctgacgtgcactgcagtgagcagcagtgattcacccatgtccactgtgtggcgcaaagacagtgaaatcctgtatgacgtggatactgagaattttgttcgttattggcagcaagctggagaagctctggaatatactagtatcttacatcttttcaatgtgaatttcacagatgaaggaaaatatcagtgtattgttactaatcactttggttctaattattctcagaaagccaaactgactgtaaatggtaaggaattatgctccttgattttttttagtttagaaggatttttcatgttcagttttgaatcacttgagagaattagactaaatctgacatttaagtaggactcttactgttattgtcttttgagttgtgataacttatcaagtgggtgggatttttggattagtcagtctgcccacttatggtctctaattggtctttggttgaagggtaagtgctgtggccctaggagatgtgctactttcactgctgtttatgcttttgaagacattcttatgaaattctcagttttcattccagaaccataaatctctcttgataactatgaaatttattcctgatgggccttctaataactgggaatatttaggacatttttgg

SEQ ID NO: 1457 - DNA, 1050 bp, Homo sapiens
atttgccatctgtttaaaagtgctaggtgatactccctttctaacataaaaagcttgttctttcagagcctggcagtcctgtcacagctgtatgcacctagaggaaaacttgtttggaaattcctttcatttcctccccctctccctccttccctctttttttttactgaaacagaaattgattgaggaaggttcagtcattccttcaggaaccaatgagttagatcgggttgttactttatgtataatgaacgcttcaaaaactggaggctgatttaaagattgcagaacttgagtcagactcataagcagtactgtgacatgaattggagccagaacagttgctgatatcagaaccatctctttcattctgtgactttgctcttgccatgttctgactggggtgagccgctaggatacaaatcactatcactgtccatatttgagtctgcaaatcttgtcattgtctgctttaatgctctttgagttgcaacaggtgtattatttaaatgagtatttgaaattctgtgaacaggaattcttttggtagtgaaataggtgctcacacctgcttgctcagaatgtgaaaatattatttctgagttctctttgttcactttctaaagtgactgttgtttggtgttggagatgttaactgggttctattaggtgtgctatatcttggcaaatattccccatgatgaactcttcctactatcacaatcaggactatgactggatttctcagtctcagtgccccagattcaccatttctgattgtgtctggagaacgttttcctggaaaggcattccatgttccaaaagctacaaaaacatgccactttgcaactatgggtcagttatttgctctctcaatgtctcatgttgctgagttctagaaaatctctgtctcatttaccaggggtcattcaaaagtctgagatgtatattatcatgaaatatttgtgaaatttctcaccatgaatttggagggaacctacttttatttctcgctctggttctccattggtctgggctcctgcttctcag

SEQ ID NO: 1458 - DNA, 1081 bp, Homo sapiens
ccaccttggcctcccaaagtgctgggattacaggcatgagccactgtgcccagccctcttgataatttttattcttgtttcttcttatctgtgggactccaattagaatggggttgagattgtggcattcagttttataccaatattttacccaagtgtgtcatggccttttttaatcattttaatatccccagaaatgctagaagtgtaaaggaataacagaggtaaatttgctgtcattttatgccacatcctcttttcttactttgcttcttgatacagattatagaggtaattgtgaagacagttgaaccttagaagattgagctaagattctttttttggcaacctgcaagtaatgtttcatttttctattacgtgatctctttgcccatacagttggcagatgttttttccccctttttctaccttaaacttttttgtttggagtacagtctaaaccaacatcagttagccttgattttctttcttttttggacaattgtctggttcattgacaaaagtaacaagtttggaactaagagatatgttacaagctgcacttaacaccacctgaaaacccaagaatcatctgaaggttttgtcagtagtaaggtaggttttgtgtgtgtgtgtgtgtgtgtgtgtgtgtgtgtgtgtgtgtgaagatggaatagggtgaaggtgaagaaacagcttgacttgtgcctgttttcagataaaggagtaaagtgatctacaaactgtaactatcttgaaagagaaattgatcatcagatggtcgagtactcttggaatgtctctttgctgtttactgtggcctctttacaatggtgagacttatttctaccctctactttccactattatttttttcccctattggataatactagtctgagcagccctaatactagatgtacctaaacagagatacaagccaagtcattgttcagtgtagtcatttcttagtatctgtttatattttgtcacacatcagaatgtatattttatagagcatgtgtttgtctacttgtttgtctactataatatgtctttaataaagctaaaaacattctga

SEQ ID NO: 1459 - DNA, 1030 bp, Homo sapiens
cttttgttacagccacagccgactggcttccagtgagaagggtggcatcattatatctccattcttccctgaaccctagcaatttatcctgatgcagccactcagctgcattgcagtggtttccaggagcaacccacttacctgcagcccccacccatttcagtcatcccaacatggccaggggaacatagattacattttgaggaccataatttgacttatgacatatctaaatacctgagaaaggacacgctgtccttataggtgattaggtacttgttttattaacacatactgagagatattgttttagagactctgtatgggttatgaagggttaaacttttttgccataatttgtttggagtttagggtttggttttaaaaaatatcatgcagtggtaattggaaaaaattttgtttcaaatttattaataattaagatcttttctatttggaggcttccctttttattgtcttgggtatacaatgtgaacggtaaccgatctacttaattaaaactttctggcattttagcctctttgcttttgctggtttttttgcacataatttgaaacacgtaattattattttctggcttcaggggagtttgtgagaggcaagcctgtatctcgttgttctgattgggaattacacatgactatgaaaaatgggattttactatacataatggcatttaacagaagtagttttatgaaaggaaaatatcctacaaggtaggaaaaaaacaagtatttattaatgcttcattttctgaacttaaatagaattaagctaaattggctttgctttttcctccaataaaataacttttaaaaattcactttaatggagtagttccagagatatattactctttggatatggttatctagtttgcagcaagtatcttgtgatatatagcttagatctcagcaggaaagaaaaaaatcttaatttacatatcagtttctgtatttgtaagaattctgtagcaagtgacagaaacgctgttgagattaatgtaggc

SEQ ID NO: 1460 - DNA, 1053 bp, Homo sapiens
agaacagcatgaatgtggacatgaaaaaatctttctgcaatccatttaccacatactcctttgcaatatcagtcagggttcagtgcaggaaacagaaggggatataatgcagggaattaattgcttagggaatcttttgaaagggctggagggctgggctctagactgagcctctgagaatgatttccaggacaccttgaaacagtccacagtgggagctgccacctctgcttgagtcaggaaagtggcaatcaggaggttgctactgaaacagtggcaagaaaatgctactgtagctgtgatccaggtgatcagggcagccactgctgttaacattgtaactgctggaagtctggaatgtaggatctggccattgctgtgacagcttctccttgatgctcgtgaactggtgactagatgctgttatgatgaatctggtccctgctgcctttgccattgtctctaaaataattagaaaatgattaattatgtttttaatataatttaattgtaattttatgcaactaaattcttaatagtggctgtgtttgacaactgatttgtgaaattcataaaaatttaataattggccttgcaagagagtacagccaactccattgcatcactgtaaaacctcctagctgacggttctactccttaattgaaaattctctcttttttgttttagttcaaagctggagactggatactgacatgttcatgaccttgtgtacaagctgaaagctgctgaaagctacaggccaatggggctctgctttacttctgccttccatatcttgtgtcctgcatcttaatggtggaatcagatttgcatccagaatactagctataaaggagtctggaaaagacagtttttagttttccaacttctgcgtttcaggaaggcatactacaaggaggaagtcgctgagtgatagctgatcctttcccaggcactcatcttcttaaacatagtatattaattacaatttagcccattcttgatggctcattgtcatttctgtgagcttctcttttcataatggcctgtag

SEQ ID NO: 1461 - DNA, 1031 bp, Homo sapiens
aaaaaaaaaaatttcctctgattacaggagataggtagaaaaaatgtgttacagtgcagatgagaatttccttagcacttttaatgtgaagtttatttagattgggtggccagggaaagcatccctgaggaggggacatgtccattgtgagttgaatgactgggaggcaggcatctgccctctgaaaattttttactcagagagaattgtaaaacacaaatatgagaacctggttcgatataggaatagaaaggctgatatggctggcaccaactaaatgaggggtgaaagtgagagggatcagattgaagaagtagacggggaccagtgggggtctgttagccacagtaaggggtttggattttatttattcttaatgccactggaaagtataaagttggagaatgattggtatgtatgtcaaaaagtcattgtttgtgatgtggaaggagggcaagagtggaagaagggaaaccctttagtttggatgaaaataaatgatggcttggacttataagaatagtggcagtgaaatgaagtggatagatttgagatatgtttttaaagaggaactaaataagacttaactgattgattgcaggtaaggaagggagaggacttcaagagaacctctaggtttttgctttgagtaactggtggtggtactatttccaggaataggaaagacaggaggttgggtggagtgatcagattttttgtgtgaaggagatatatctaccaccaagattattttcttaactttttactgtacttgctttattatacattaacctattcctccatccatcaatctgtcttttttttttttatgcctttcaatgtaaattgcaatgcatttccacaagaaaggcttttaagtgcccagtttttctaattttacagatgagaaaactaaaccttggagaaaaatatgctcaaggtcgtatagctagttactggtgaatctaggatcagcatgcaggttaccattagttcaggactctaatttgattatattttagcttgtaaga

SEQ ID NO: 1462 - DNA, 1005 bp, Homo sapiens
tgtattcaaaagttccataaagaatcaggacaaaaaattgctactaaccatttaccacccagaagccataataataattaattttatttttcttttactattttaaattattttggctgtgaccgtcctagacgtgtgaatacatggtcaaaaaatgtgaactttttgggagatcttgataatgttacattgtatctttctggctctagagctcttacatttttcatactaaattgtctcagtctttggggctttattattattattattttattggcagtgttagatcttgtagccaaaaaaagatttttttttcctcttttggttccaaatagtcatctgttattttggattatttgctggattgttaactatacaggaaacttccaggcctcatctcacagcaatgactgtcatgttgataaacaattatgatatcccaggttatgttaaccctgcctaagtagttacatggcccagtgaggatgcctagtagctataggtgattggttctgttttgtctcctacacctaaaattttgccataggtaactgttttgataaacataggatagcgtccttttattctgtatgtaaaaaagtactatatgtaaaaaaggaacttaactcctcactaccctgtttctgtcctctagacagccagatggatcttgtgtaaaagtagaagtaatcttggctatagaacaagaactgttgatatttccattttaaaaagttgaatcagtcttaagtttgagttggtgagtaaaacaaaaccaaaaccaaacctgggataagctaccaataagttaccaaagtatttaaaaacttgacagatgtaaaacattaatatataatttattcttagcaacttaatctgtttattgagtggcagtgtttcagtaataaagctgagctatttggatacactgaccttaatctagtggaaaacaggaggcttttaaattggcacatacacaaatcatcttaggatccataaaatgcc

SEQ ID NO: 1463 - DNA, 1043 bp, Homo sapiens
gatagtttgctgagaatgatggtttccagcttcatccatgtccctgcaaagttcatgaactcatccttttttatgactgcatagtattccatggtgtatatgtgccacattttcttaatccagtctatcattgatggacatttgggttggttcccagtctttgctgttgtgaatagtgccgcaataaacatacgtgtgcatgtctctttatagtagcatgatttataatcctttgggtatataccaagtaatgggattgctgagtcaaatggtaattctagttctagatccttgaggaattgccacaatgtcttccacaatgattgaaccaatttacactcccaccaatagtgtaaaagtgttcctatttatccacatcctctccagcacctgttgtttcctgcctttttaatgattgccattctaactggcatgagatggtatctcattctggttttgatttgcatttctctgatgaccagtgatgatgagcattttttcatgtgtctcttggctgcatagatgtcttcttttgagatgtgtctgttcatatcctctgcccgctttttggtggggtttttgtttgttttttttcttgtaaatttgtgtaagttctttgtagattctggatattagccctttgtcagatgggtagattgcaaaaattttctcccattctgtaggttgcctgttcactctgatggtagtttcttttgccttgcagaagctctttaatttaattagatcccatttgtcaattttggcttttgttgccgttgcttttggtgttttagtcatgaagtccttgcccatgcctatgtcctgaatggtactgcctaggttttcttctagggtttttatggttttaggcctaacatttaagtctttaatccatcttgaattaatttttgtataaggtgtaaggaagggatccagtttcagctttctgtatatggctagccagttttcccagcaccatttattacatagggaatcctttccccattttttgtttttatcaggtttgtcaaaaatcagatggt

SEQ ID NO: 1464 - DNA, 1016 bp, Homo sapiens
tcccccataaaattccctggttcctccctgtaggttggtgatcttttgagaatgcaatttcaccttataatgtatttcaacgaaataaaagttttcagttttaaacaatcaaattattatagaagtggattttggagtatagccacgtcttaaattggggaccacatttattgatttctgatagattaatttttattttcagagacagggtcttgctttgtcacccaggctggagtgcagtggtgacatcacagctcactgcagtcttgaactcctgggctcatggtagcttaatttgaatttcttgtatttaactgagcaatttaagaacaggacttaatgtaaatctacacttttactttcctactccctcctcccctatcctttttcccatttaattttctgcctaaaatcagtttcttctcatgatctctgtgttgggctatgtattcctcctgtatatgtttcttccctcattcatagcatttatcacactattataactgatagttacttgtctgtcccgttagtctgtaagtctcactgaggtgcttcattgtcttgatcattatttgatccctatcatctaactcagtgattggcatagtaggtaatagatattttctgaatgtgtttttcttgtcacctagactcaaatactttagaataatattagactctttaaagcctcttcctaaaagaaagaaaacctaattaccaagttttatcagtttttctttctttataatattttttatatcctcatccattcatttttattttcatattcacttccttgtctgggctttttcgacctaagacctggggtccttggtttcagtcttttgtttttgttttttatcttgtatactactgctatttcagttttgtgtaaatttttctcttattcagaaagctcagtgggatctgtgttgtttaccacagaaaatgtaaacttatgtgtctagcattcaagacctttatcatttatttaaaaggttttagtgtctgataac

SEQ ID NO: 1465 - DNA, 1065 bp, Homo sapiens
acttcaagcctgtcccacatggtaaatatgcttaagggtcctcttagataaatccaatgtcaagttaaaaattttgtgctattcatttgacagtgaaaaagagatagtcccatttgaggatatgaccagagtataaatcattaagtaatagtattagaaagggctttgacaagttgtctcatctaactctctgctttaaagaggcaagtgacctaattcgttagtttcctcaaaatgcagactctaaaccgaggtttcataaaatccaggctttagagccttcaagaaccctctgaagctgcatgcaaaatttctgtgattgtgtctttttatgggatgagggtccatcaacttttatgtattcattcatgaattattccctacctttcttcagtattttaataaatgttatgtgaagcttgtaccaggtacttggaccatactcttaatatatgattcttcataaacttgatcttttgttttatctacagccagtaggaagtagccaatcttaaaacaaggaaccagatataagggactatggctctgtaattacttctgtatttgctttgaggtgtatttctggactgctcttggattcttgctatacgctaatgtctgaaaccaccttgatttttttttttttcaatctatatgtgtttggatttggctttgcttactgattgtctgatgtggaatttggtgacctggatgctggactgagtgctttcttagaattcatgttgtttttggaatttcacctcttatcattagtgtgaactgactttaaaactttatgtaaaacatgccctgcccatctctctctctttacccttttactgactgtaagggagtaagcttagatagcaattcttgttttttatttaattggaacttttattgagctaactaaattcacatgtagttataagaaataatagagatcttgtatacctttcccttagtttgcaccaatggtaacattcttacaaaactacagtataatatcacagtcaggatattgacattgataccaccaatcttaacagatttccctagttttac

SEQ ID NO: 1466 - DNA, 1034 bp, Homo sapiens
tgtcaggctgcgtttggctcatgatgcctgcccggatcccatacctgccaagggtgagccaggacagagcggtgaggggcatgtgagtgagcgagtgtggggtctggccactgcgcacagacaggcatgccagctgctgcggggcagggtggcggggcaggcagctcccggcgctggcacaggcgcctgctccgtgcaagggtgcatctataccagacataccgcaagcagcttctgctgcgggcactagtgtctggataagggaacgtggtggcgcctgaaagctgagagataccaggaacagcagaaccctattgccctcagtgtggcgagtgggggaggcatgtttcggggggcatgttttggcccaattgtgttatagctctttcagtctcactacccagctctggcttgcagctcctgggctgatccggccccaccgctacttcccattgcatgtgtggctgcctggtgcggtggagggcgggagggctatagtgttacagaaactctggcttggggaatcctgaggtctgggcccccagaagggttgccacccttcacttctgcagtctgagagtatgtcactgcccacagcttggtgagccgaccaagaatgtgttacatacccctttggctcctgccattcagtaggtcctgagttcttgtcccacatccaggaagaatgagattatgtggacaactagaggatgagcaaggcagagaagaactttattgagcaacagaacaactctcagtggagaagagacccaaagcgcgtagttcctatctgcaggcaggttgtcctggtaagtattcgtttttttttttttggggggggggttgtttttgtttttgtttttgagacgtagtctcgcacttttgcccaggctggagtgcagtggcctgatctcagctcactgcaagccccacctcctgggttcacgccattctcctgcctcagcctctcgagtagctgggactacaggcgcccgccactacgcccagctaattttttgtatttttagtagaga

SEQ ID NO: 1467 - DNA, 1054 bp, Homo sapiens
aggaaaaaaataaatttggctaacttaaagagttatttatcaggagacactattaaaaaaaggcaaatcagaaatttggagaagatatttttaatactgataataagacagaattgtaccctgtaaccataaatatgtagaatttctaccatatcaataaggtataagtttctgttgctccacatcctcttgcacggttggtattttagacttttaaaattcttctgccaagcacggtgcctcatgcctgtaatcctagcattttgggaggccaaggcagatcacttgaggccaggagttcaagaccagcctagggaatatagtgagactccatttctacaaataataataataaataaacattattattgttattattctgatcctggtggtcatagaatggtatatgtatggttttaatttgcatcccttgatttttaatgagggtaagcataatttcctctattaatggccatttgtgatattttcttcagtgaagaacctgtgggagatggaacatgaggctgacagttggcattatgttgagcttgtgagaggtgatgtgattctaccttcaggtactactgggtctgtgcattctataaaaccagagaggcaactatgatcagatctcctgctctggctgattttttatttctaggagatttttcatttgtttgttttcatttagagctgtactcctgagtcattaaatagaacactataaatttgctggtgcaggtcataacatttgaagggattaacatttggtttattctctctaaatccatagctattaggaaataacctaaaacttcaggatttactttgcagaaatgatttccttctaatgtatgctctctcaaaggaatttagaatcctgttacataagaggctatacagctttaatcccattcattgatatttagtgaccagttaaacttcaaaacaatttttaaaaatttccctaatttaaaaagtaataataattatgtgaaaaaattttggaaaatacaaactcatagataataataaaccatttagagaactgtga

SEQ ID NO: 1468 - DNA, 1055 bp, Homo sapiens
tcatgaaacttactgcaagtgcagtatttttaatcatactgctttttagcaagtttagtatcattctgctttttagcaaggccttgttttttcattttggccccaaaccattttttatccatgagccttttaatgttatattcttgcaaaatttttatctttagtcatcacttttgatttttatagttacatatttagttgttatgcaatatgtatgttttacataccaagtatgtttaagttaatatactattttccttagtagttaactcttttcttggttattcacttttgtcccccgttagcagtatgtcttacgtattttaagattcagagttgaaattctaaattccttttactcacgggaaattagattttagtgttttgcacaatgccaaatacatagtggacacttaataagcgttcgtttgtagtaatagcctctttggttttctatttcatagaatttcaccaaagatgattatttttgactgacttttaaatggctacatgaattcttgaccctcagcctaagtaaattttttcattgtggatcacaatacctactttctcttttccttcttcattttactcttaaaaatattaatgtgcaaatttggaagtgtcagtttcacaattgctaacctacttgaagtgttttgaaaaatgaaattaaggaaaatttagagaagtggtttattaccttaaaataattaatagcaagattcttcttaatatgttatgtcatagtcacatcatttatttatttactgattcattcttggttcagccagtcatccatttaataaatgtgtttcagtccttatcatatgtgcaaggtgctagtattatgaagaggaattcaacacagctgatatgtggagggatgtctttaatttatatttaaatctctgtgtgagatttgaaatattacaaaagactagagtataaatcaggtggaaaaagggacagcaaagaactgcaaggaacttaaccttttctagcatccagcttgaccattctataaaatatatttagcaaataatattctgata

SEQ ID NO: 1469 - DNA, 1035 bp, Homo sapiens
caactatcagaagaggattttggtaagacggagtgggaagcatcagaaggtcttacctcacctagacaacaactgcactggcagaatctgtctgatataactattttggatctctggagtctactgaaggctttcactttccagggagaagatttggatctaattgtggttatttttggtcagttacagctcttcgcatggtagcagctacccatccactaccccagccccatggcaggcagttgtgccaacaggtgttccagaaacagttttcacacagctcatgggagctagagtgggcaaaaagcaccttgtcctccaaatattggggatctgtgctctgattgctatttctgctcacagaggtgcagagagaggatggcagcctttgttgtatacctacccccattgttgcagtcccctcccccttcagctgaagtgattccaggggatttaaagggttagcacctttacctcctcatttttctctttttgggagcagacatgaaaggctagaatattcaaaaacaatggcatatgtgaggaaaaattagaaagtgactgtgcatgcccagggaaaggcacaggtttggaaaagacctgggaaaaccttaagtttacatttcaggctgatcattggcacaaagacaataccaatcaagacaaaaacaataaatagaaataacaacaaaacccagcaaaccctgaggaaagaggagaatctgatttccagagtaaccatattattagattctagttttcaacataaaaatgacaaggcatacaaagaaacagaaaagtatggctcattccaaggaaaaaactgaatcaacagaaactcttcctgaaaaagacctcatgtcaaatctacttgacaaagactttgaacaactgtcttaaagatgcttagggaactaaaggaagacgtggggaaagtcaagaacataatgtatgaacaaagtggaaatctcaataaacagaaaacctaaaaagaaaccaaaaagaaattctggagctagaaaatacaataattaa

SEQ ID NO: 1470 - DNA, 1050 bp, Homo sapiens
ggatggataataaacgtttcttcacaattacttccttagctctcaaaagggattctgaagcattccattataagtgctgcttacagacatgctgaaatgaccactttttgctctggagtgatattctttgcttaataaagaacaagagatcacaatatctttctttcctgagcagaagcagggcaaactgttgattcctttttgtttttttcctgcaaagaaaggaccttgcttatgtcacccaatttcccctttcaggaaggggaagtaatttttagtaagtcaaggtatgtagtagccataaggtcttctgtttaggattaaggttcagtgaagtcatttggcattcatttatttttggagttttgatccgaaagctgcttcattgcagaattttagtctgaattatgttctaaagattgatgatctctctatgggacttcactgtaactactccattaggacatcagatttagccaagtatttatgtgttaattttgttggattaacttatgtgcatagacatacacacacacacacacacacacacacacacacactgaagcctcattgttcccttaaattttaatttttatttgatatcttttcataatctattgagaaaagttatgatgggaatgcagtactgtgagtttgcactgacaataaaggttgatctatgacagcctcttagaagcaactactttaaaatattttatagtgggaaaaaaccccacaaatgcagttgttgttttgtatacttttttctctgttgacctgaataggattaaataacctctagggtgatttgcccattcagcaaagtggcacaggccaaaaaggagattaaagtaggatgagggggaaacaaggaaaacatgacaaaggaaaacccaagattagaaagactcagtgaagaaattttactcaaagaaataaagaggttttttcttccttcagtatccccaaagcaatatagcaggaaatcttactttgattatccatcaacaagcaagagtggaattaataagttgaccagcaaattgatac

SEQ ID NO: 1471 - DNA, 1027 bp, Homo sapiens
taatgaatgctgtttgctgaaatgggcaactcttgagattggaagtgaagctatgagttgagagcactttctctgttttggctgtgttaactctcagtatcccccggaagtcattattatcatttgccatctgaatccattataccctgtttactttcaatttttatgttttttacttttatatttttttggagacagtatctcactctgttgcccagactggaatgcagtggcatgatcatagctccctgcagccttgaactcttgggctcaagtaatccttccaccccaggctcccaggtagcagctaggactacaagagtgtgccactgcacccagctagttttaaatttttttattgttttgtggatacgaggtcttactatgttgcctaggctggaatgcagtggcacaattatagctcactgcagccttgaactcctgggctcaagtgaacttcctgccttggcctcccaaagtgcagatattacaggtgtgagccactgtgcctgttcattttctaagttattttataaataattaacacaagtaaacaatgaaaaacaaccttattagaaactttaataagaatttaaccatagcaaacccaattttttttatcctgtaagttcctggttttgaagacacatacatattcaaaatgagaaaaagtcctttgaatataatcatcaattgctatatacaaacctgtaacatatacattatataaatactgatttccagatttaaaatgaatctcttaatatgttctgggtttatcattacttctggtttttgcattttattgtcaaaaggcagtatttttgaaaactttgatggctaagattttgttgaagaaaggataaacactttcaattgaaaagtatttttgttttttagatttatcaactaatgagaatgatcgatttaatgaaatttgttatttctacatcagttattttttctccacactttttatatagatacttatcatcagcatttgtctacctatgaacttcatcaagta

SEQ ID NO: 1472 - DNA, 1027 bp, Homo sapiens
tgcacattgattttgtatcctgagactttgctgaagttgcttatcagcttaagaagattttgggttgagacagtggggttttctaaatatataatcatgtcatctgcaaagagggacaatttaacttcctcatttctgaaccgaataccctttatttctttctcttgcctgattgccccagccagaacttccaacactgtgtcgaataggagtggtgagagagggcatccctgtcttgtgccagttttcaaagggaacacttccagtttttccccattcagtatgatattggttgtgggtttgttataaatagatcttattattttgagatacgttccatgaatacctaatttattgagagtttttagcatgaagggctgttgaattttgtcgaaggccttcatctattgagataatcatgtggttttgtcgttggttctgtttatgtgatggattacatttattgatttgcttatgttgaaccagccttgaatcccagggatgaagcttacttgatcgttgtggataagctttttcatgtgctgctgggttcagtttgtcagtattttattgaggattttcgcatcaatacagggatattggtctaaaattctctttttttgttgtgtctctgccaggctttggtattaggatcatgctggcctcataaaatgagttagggaggatttgctctttttctattgattggaatagtttcagaaggaatggtagcagctcctctttgtacctctggtagaattcggctgtgaatccctctgattctggactttttttggttggtaggctattaatttttgcctcaatttcagagtctgttattggtctattcagagattcaccttcttcctggtttagtcttgggagggtgtatgtgtccaggaatttatccatttcttctagattttctagtttatttgcgtagaggtgtttgtagtattctctgatggtagtttgtatttctgtgggatcggtggtgatatcccctttatcactttttattgcatct

SEQ ID NO: 1473 - DNA, 1064 bp, Homo sapiens
aagatgttctttgaaaccaacgagaacaaagacaccacataccagaatctctgggacgcattcaaagcagtgtgtagagggaaatttatagcactaaatgcctacaagagaaagcaggaaagatccaaaattgacaccctaacatcacaattaaaagaactagaaaagcaagagcaaacacattcaaaagctagcagaaggcaagaaataactaaaatcagagcagaactgaaggaaatagagacacaaaaaacccttcaaaaaatcaatgaatccaggagctggttttttgaaaggatcaacaaaattgatagaccgctagcaagactaataaagaaaaaaagagagaagaatcaaatagacacaataaaaaatgataaaggggatatcaccaccgatcccacagaaatacaaactaccatcagagaatactacaaacacctctacgcaaataaactagaaaatctagaagaaatggatacattcctcgacacatacactctcccaagactaaaacaggaagaagttgaatctctgaatggaccaataacaggctctgaaattgtggcaataatcaatagtttaccaaccaaaaagagtccaggaccagatggattcacagccgaattctaccagaggtacaaggaggaactggtaccattccttctgaaactattccaatcaatagaaaaagagggaatcctccctaactcattttatgaggccagcatcattctgataccaaagccgggcagagacacaaccaaaaaagagaattttagaccaatatccttgatgaacattgatgcaaaaatcctcaataaaatactggcaaaccgaatccagcagcacatcaaaaagcttatccaccatgatcaagtgggcttcatccctgggatgcaaggctggttcaatatacgcaaatcaataaatgtaatccagcatataaacagagccaaagacaaaaaccacatgattatctcaatagatgcagaaaaagcctttgacaaaattcaacaacccttcatgctaaaaactctcaataaattaggtattgatgggac

SEQ ID NO: 1474 - DNA, 1137 bp, Homo sapiens
tggaaatgtaagagttattttatctcttttttggaaggcaatctggcaatatttattaaaatggaaaatacacatactctatgctccagtaattccacttcaggaaatatatccctaagaaataaaagtactggtatgtacaaggatgtttatttcagcactgtttataatatcaaaaattacaaacaaaataatgcttattaatgggatgggtaaataaattatagtatattgcggcacagatcattatattactatcacaaaaagcactatatgaattagagggactttctgtgaggtactgttgaatgaggaaagaaagatatacagaagtatgtattaatatatccaattcttttgtagaacagtgaccaaaatcctgtgtgtgagtttatgtatgagtgtgtgaacctacacatttatatgttcatatggcagggcagtatgtagcaaaagagaagaattcatactcagtggttagcatgtttttagagagttataataatacaacaggagtaggaaggaaaagggaggtaggcccataccaggtaattagatgtgagaatggaactcaaagagcaagtcaagactcaagatttaaatttgggagtgaactatagaggcaatattagatgctaacaaaaccgaatgtaatggctaaccctttaacatctatctgtattttttgtcctatattttaatcagtttctgcttcaccttggtcagcaaaagctcagcaataggttttgtaatattttctgttttaactagctcaaataaacacatattaattgaaaacttctaacagcttttatttattcaacaaatatttcttgatcacctgctttctggcaggcattgttatggcccctgcaatgacaaataagacatacagggtccctacataataaataaataaataaataaataaataaataaataaataaatatataatgtcagatcacataaaagctatgaagaaaaagcattttttcaacggataataagggacagagcagggaagggaaaaggagaggaggtttaactattttggataaggtagtgaggaaaagttttctttcagaaggtgaatttgacaaaagagctgaatgaaatgaagaaccagcccaactgta

SEQ ID NO: 1475 - DNA, 1099 bp, Homo sapiens
taggaagaatcaatatcgtgaaaatggccatactgcccaaggtaatttagagattcaatgccatccccatgaagctaccaatgactttcttcacagaattggaaaaaactactttaaagttcatatggaatcaaaaaaaagaccacgtcgccaagtcaatcctaagccaaaagaacaaagctggaggcatcacgttacctgacttcaaactatactacaaggctacagtgaccaaaacagcatggtactggtaccaaaacaaagatatagatcaatggaacagaacagagccctcagaaataatgccacctatctacaactatctgatctttgacaaacctgagaaaaacaagcaatggggaaaggattctctatttaataaatggtgttgggaaaactggctagccatatgtagaaagctgaaactggatcccttcctcacaccttatacaaaaattaattcaagatggattaaagacttaaacgttagacctaaaaccataaaaaccctagaagaaaacctaggcattaccattcaggacctaggcatgggcaaggacttcatgtctaaaacaccaaaagcaatgagcaacaaaagccaaaattgacaaatgggatctaattaaactaaagagcttctgcacagcaaaagaaactaccatcagagtgaacaggcagcctacaaaacaggagaaaatttttgcaacctactcatctgacaaagggctaatatccagaatctacaatgaactcaaacaaatttacaagaaaaaaacaaccccatcaaaaagtgggtgaaggacatgaacagacacttctcaaaagaagacatttatgcagccaaaaaacacatgaaaaaatgctcatcatcactggccatcagagaaatgcaaatcaaaaccacaatgagataccatctcacaccagttagaatggcgatcattaaaaagtcaggaaacaacaggtgctggagaggatgtggagaaataggaccacttttacaccattggtgggactgtaaactagttgaacccttgtggaagtcagtgtggcggttcctcagggatctagaactagaaataccatttgacccagccat

SEQ ID NO: 1476 - DNA, 1046 bp, Homo sapiens
aaaattttttttttgatctcacggcagcaaacttccaaaggcctttgatgtttgccattttgttgtgatagttaactaatctataatgtttgggactattgagttttgtgatttgacatttgttgtattggaatctgatctgtaaactagtagcatggcttgatgtagagctttgactaaagagactgagagaatgaagactaggaaatgaatttttactatctcttctcaaatgtttgtctaaaattagtcaagaacttcatttcattaaaaacgttaaagtttttttatttatatatgacctccaaaaatgattgaatattttttgaatacaaattctgtgccagtcagcacaccagctttttacatgattatctcatttaatccttaacacaacctcatggaatagatgttatcttcatttacagataaggaacattgggttcagagagagaagtattttgttcaagaccattttttcagctggtaaatacatgacagaggtaggactcaaaattcaggttttgtctgattccaaagcctgtgtgcttagtcactattataaaaacaaactcatagttcttgagtgagggaattatttaaggcttaagttacatttaccttttagtttaaaagacagtatatgtagtgactgtgtatcatgatgatccgtggtactgattattgaaatcattccacagaggtaggcatgtgcaggttgttgaattgtactattatagatcaattgtgcctggcactgttaacattttgaactgggtaattaatttgttctggaggactgtcctgtgtaccataggatgtttagcagcatctctggctacactcactagatgcgtataccactcccttgtgacaatgaaaaattgtcacgactttcagaaaaatcatcatccttctatctccaacagaagagtgaactcatgtttaacttcatgtaggtacagatgggatatttatcaatatgtatatagtacatagattaatagacacacatatttccttgttctgtcagctgacaaggtcta

SEQ ID NO: 1477 - DNA, 1104 bp, Homo sapiens
tacaggcgtgagccaccgtgcccagcctgtgtatcgctttggaatccctgccttgaaaaatcagaaaattgttcgggagtagaaatgaggagaggataggtagaggtttatttgtgcacaccagtatgtttattattttatatcttgctgaagaaataacccaaaagaaagttaaaatggtcatgtacaataacatatgttacgtaataattattttttttctaagaaatggttttatataaagaacatcttcccaagtcattggctattaagcaaactcctttattcaattgcttggaactatattaagaaaagtgttatagatcatatacttgcttttacttttctccaacatggttatttcccaagaatgtaactcctttccagattgatttttccattaggtaccttttaatttctatcattttttctgcatacaaaataaatcatgtgtttgattcatttatttattcaacaaatatgtagtgagcacttactagaatactaaatgccattgtgctaaatgctagcaataaagcagtgaacaaaacggacaaaaacctgtcatgaactataccttctggtgggagagacagaactggccaacttaaatgaataacatacatcgtgtgttagatggtgctacagagaaaaatgaagcagagcaggaggtggtaagatgtggtggtcaaggtttgcaattttagacagtgtggaagaaaagacttgaaagaatcaagtgagtaaactcaggatatctgggagaagagcattctagacagacagaactggaggtacaaatgcccagagatgggaacatacctagaatattcaggcaatagcaaggaaaccagagtggttggatacaatgtggacaatgcattctatgtggttggagcagagtgatggaaggcaatagaatagaatagtaaccaataagatcatttagataatgatgggcatgaggagggaagaatgtatataataaagcatcttgtaggtcattggaagaattttgatttttattctgaaatgagaaacgattatggggttttgattcaaagagtaacatggtacaacagtttttaacaggcttattgtgac

SEQ ID NO: 1478 - DNA, 1052 bp, Homo sapiens
catggaccacttagattcagttcatggctttgctgtttattggcagtgtaattttgactaagttaacttaacctctctgtgccttagttttctcagtctataaaacaaggagattaataatagatactcacagggttgctgtgatgattatgagttaacatacagaaagcacttaaaatagagcctgacacataaaaggactacattagtgctgctgtagctgctgtggcttattaggatttatactgaattaattctattgttgttttttgcttctttccaagactagcatcagaggtgctatacagagttaattgtcaattactaggggaaaagagttgaatatgttggttattttaaaatttatagcagaatgtggacataatagacaagaaatttgccatatttatgtatttggaatttttttagaaaggaaaggtgctgtttgaagaagaatataactttacccacttttcacacctttctgttttgaacaatggcagaaaacagagagaggcattctgagtcatctgactggatgaagactgttccaagttacaaccaaacaaatagctccatggactttagaaattatatgatgagagatgagactctggaaccactgcccaaaaactgggaaatggcctacactgacacagggatgatctacttcattgagtaagcaaatgtctctatctcttctaatgtgccctaacatgttgaggattgtctaagatttttttaaacctcattttagacacatacctttttcagaagactcattttttttctttctttaaaaatatttttcataaaactgacagttgatttttaatcagatttaatctgacacttcatttttatttgacttggataaaggaatagtgtatttgacttctggttttataagagcaggaggatcaaaaacagttcacgaatggtgaaaaatgtaaagaataaagggtattttgcttggctttttaaaaagcttttaggtagattgtccagcttaatgagatttcaagaattgtcatcatgagtaggagcatatt

SEQ ID NO: 1479 - DNA, 1051 bp, Homo sapiens
cacggtggctcacacctgtaatcccagcactttgggaggctgtggtgggcggataatgaggtcaggagttcaagaccagtctgaccaacatggtgaaaccccatctctactaaaaatacaaaaattagccagacatggtggtgggcacctgtaatcccagctactcaggaggctgaggcaggagaattgcttaaacccaggaggtggaggttgcagttagccaagattgcaccactgtactccagcctgggcaacagagcgagactctgcctgccatccccccaccccccctccaaaaaaaaactcacaggacctataaagcaatagcacagtaaagaaaacaaagtactaggtaacaatcaacatgatgactggaatagtaccttatatctcaatattaatgttgaatgtaaatggtctaagtgctcacttgaaagaagaagattggcagaatggataaaaattcacaaaccaaatatctgctgtcttcaagagattcatctaacacataaggattcctatagactcaacgtaaaagagtggaaaaagatatttcacacaaatggaaactcaaagtgagcaggagtagctattgttatgtcagagaaaacagattttaaagcaacaacagttaaaaaaaaagacaaagaaggtcattatacaatgataaaatgatcaacaagaagatattgcaatactaaatatatatacccctaactctagagcccccagattcatgaaacaattactattagacctaagaaaggagatatcaacacaataatagtaggggacttcaacactccactgacagcactagatagatcattggagcagaaaatcagcaaacactggacttaaactacactctagaacaaataaacctgacagatatttacagaacaattctaaccaagaactgcagaatatacattcttctcatcagcacatggaaccttctgcaaagtagaccatatgataggccacaaaacaagtctcaataaatttttaaaactcaaaatcttttgtgggcatttagtgctataaattt

SEQ ID NO: 1480 - DNA, 1013 bp, Homo sapiens
attatttgtaattatggaaaataccaagcattcttaatacctcaatgccctttaatctatctggaatcatctccctctccctaatcccaacttatttatttatttatttatttatttatttatttgactcggtctatcaccaggctggaatgcagtggcacgatcttggctcattgcaacctccacctcctgggttcaagtgattctcctgcctcagcctcctgagtagctgggactacaggcgtgcaccaccacacccagataatttttgtatttttagtagagacggggtttcacaatgttggccaggatggtctcgatctcttgacctcatgatccgcccgccttggcctcccaaagtgctggaattacaggcgtgagccaacttatctttaaagactgcttaaacatcagcttttagcaggctttcctgatagcaatcttaccaggcaattggtattcctctgcactccccaaaaaagattatgtttatctttatcttatcatttatctcttctgtcttcctgtctagactataaactccttgaagtcaagaactgggttatatttctaatttttatttctgcataaggatgatggggagaggaggatgagaagggaggaaggaaaaaagaataaaatgaataaatgaattgatccactaaatagtgtataaagttgctaggtattttagtcttgatttttattaccttcactttaaatgagcaaataataaccacttctttatctgtattaaattgccctgtgtgaaaacaaaacaaaaccaaacaaaaaaaacttgctaatggtatcagtggtaaaggtgtaaaattaataaagtaacccagaagataaatggctgcatttgtttgccctcctaaagaaaggactgttaatctcttagttgctaattaccttgagtgctaactaaaatgctaaatcaactttcaagttaagattaaaatatatttatgttgatcttttatccttactattagtacatcccttttagt

SEQ ID NO: 1481 - DNA, 1070 bp, Homo sapiens
ttcattgaccttgggcttcctggaagttggctttgaatttctaaatatagagaataagggggaagttgcctagacaattaatagctagagatggtattgttactactacagcctctaaagagaaagtcagttgatagaaaactgaaatgagggcaacagactagatgaattatcaaggtcatttccaacactaccactgtatccttctgaaagcagtggaagatctttagggcattataacataattatctgaagttttgaagcatacacctaaaggtgtgctctcttttaaggagttattcaaggaaaacttagtattctttttaggggtgaaagttgcttcttaggcagctgctatggttaaatttaaacataaatatatattggagaggagtgccagacacctgcctatgttagccagagaaattaagctaatatcaatgtctaattttgccttctcttttctttatctaattgctacaatgttatgaccattgggattgctttctttccagatgctaaacactgaatttgacctcaagcgtctagcagcaggcaaatacttctatcagaaacattactatttacctggagactaggagttaaacctgctgcctaggtagcaaagacaaaatgttattattacctgaaaaagtaacaaacacaatcatctttaattttataattgtttcttaatgtttcaacacttataggcataaaccaatgccatttcctggtagttatccctaaagtaagtatctctgactcctgttgcaactgtagtctttattctattgtgcaggttgttacttgagtcactgtggttagagggatttttggaatgacttcttaaaattaaatgtgtctcctaaggaaatgactcaattagattgacacttaagtatataactttagaatttcaatatcttggttcctttgaaagctatgctaattttgtttccattgtgttacttaatgtcttactgatactgtgatgtaaaaagtatacagcagctcttttattattattttttcctaagacttattttgttaaaggaagaaacaaccat

SEQ ID NO: 1482 - DNA, 1121 bp, Homo sapiens
attaacattctaaatttgatttctataaatttagaaaattccaaatctgattctagaatttgattcttgatttcaagatgtccagatcttagttagtagccatataaaactttcctgtgtaggatttttgtgagtaaacctgaacattgccacttcctgttgtttgttgtcatctgtcctctcatcaactctcacatggcagtactgggtacacgttaggtattttacaaacgaaagaatcacttagcaaggttgaatggctcaagagctgacaaaagcagaatttacaaaggatgcatagtttcatgttgttcctgtgaatgttctctgtctaggttggtgaccagattgttgaaatcaatggggaacctacacaaggaatcacacatactcgagcaattgagctcattcaggctggtggaaataaagttcttcttcttttgaggccaggaactggcttgatacctgaccatggtaagtaaagtagcccactagtagctgaaaagttgtatattagggaggggacagaagaaaaaggaatatatatttggagaggatagatattttactagttaattcagaggtgaatgctagaaccatgaaaagctagttacatagcagagttatcataaatagtattagaaaacaagtgacttaggcaggactttcgttggaatggaatgtattttaaatttaatcagaaaaaacatatagttgtttttgtagagaaatgtacctattaaaaaagtgtattagaggcaaacaatttaaataccataaaaaatgttttaaatctcttcaaaatatcccagctttttctcttacttagctaattacacattaccaaccaatatttttatttctgtaaagcaagataagtttatattataatgaatgcgcagcatgaaaacttaggcttttctggtgactcggcaaaaacaagttgctatcaccctacctggagacagggagttggacctgagaccatttctgtcctgtattaatgttaaacttcctgggtttccatggcatgttttgaaatatcatggtatttgaaagtcactgttttttgagtgcactattctagaaataaaggcagtaccacacccacgcagtacttg

SEQ ID NO: 1483 - DNA, 1028 bp, Homo sapiens
cagccccagcaaaggggaaaataaaagttgtcaggtcagcaccagggcaggctctggacaagatcagtgcagaaaaagcagaggtcggtcggccagcccaaaaaagcagcaaaaaattgaaggaagcaaagctccatcaaatgctgaggccaaattattagagggtaagagtcgaagaatagcaggctatacgggcagtaatgctgagcagatcccagatgggaaggaaaaatcagacgtcatcaggaaagatgcaaagcagaatcagttggaaaaaagcagaacaaggtctccagagaaaaaaatcaaaagaatggttgagaaatctcttccatccaaaatgactaataagactacaagtaaagaagtatctgaaaatgaaaaaggaaagaaagtaaccacaggagaaacaagttctagtaacgataaaataggagaaaatgtccagctatcagaaaagaggctgaagcaagaacctgaagagaaggtagtttcaaacaaaacagaagatcacaaagggaaagaactagaggcagctgacaaaaacaaagagactggaaggttcaaaccggaaagcagttctccagttaagaaaacactgataactccagggccctggaaggttccaagtggaaataaagtcacaggcactattggtatggctgagaaacggcagtaacctttagtataaaacaaagaaaaacaagttgtaatcttttcttacagcagcatttttccagaaaaagcctttttttttttttcagatattctgaaacagataagtacatgttaatgtgagcctcaagttacctaggctgcatgaagggcctttaggattgctaagaaccaactgtccccctggccggctgccctccctcgctctcaggaaggagctgcatccacatgctcatctgacccgccctgctcaggctgcccagctcgtcttcatgagtgtctgaacaaatgacatatgttgatattaacaatgtggtcacaactcactttgtatttgtgccaagttatctact

SEQ ID NO: 1484 - DNA, 1004 bp, Homo sapiens
aaagggagactaaacatctgcttaacttgtacacattttcagaattctttttaaaagtctagttaaagatgtttcttagaagttggagactgttaacaacttccataaaatagatccaggtttttcagttccctgaagcagcattcagtagcatctatataaataaaggcaccttctgagaataaaactattttatggagtgtgtgaacacacttgttctgtcacctgggttcatcttgttgtgaagcacattaggtccaggtccttccctctgggagtctgactgtgaaactctttaacccaacaactcaattagcccctgtagataagacatgcttcccagagtgagatttttgaaatccccttttcatccagaactatatttacccacctattgtaactattcaaatagagcaaaattaggaggcttgataaatactaagaatttagtaccacagaaattatttattattttccctgtagtccacaattagtgataacgaatcctatttttgttaactgtgacataactttgatgtcatatgttgtcctatgtggttcttcctaagtaaactctgtactgattatatactgacttagcaatgtggccttggaatgctgagcaaaatgtggatgtactggttgtaaatgtttatatattgtacagtacctttatatatacacttgaggttctgattagagaaagatctgtaaattgctcattattttttatatagatatttaaaaaaaacagtttatggcctgcatttcttttactgtcacattggtttaatgttgctttctaatggtggagctaggtcccatcatagtctgagtcctcaaatagattttgtccctccaagtaacaaactttcaaagtcctaaaatcaggaagagtcttataataatgattttacctctataggtatacttttatttatttataaatagagtttgaaattctttagagttgaatatcattataaccatttttcatctttcat

SEQ ID NO: 1485 - DNA, 2046 bp, Homo sapiens
gagcaaaggattactaaactagccagtacatgaatagattaggtttaatgaattaactcccaagtgacacactgtatttggaagagagactcatctagcctattatgagtgtgtagatctaaaagttttcacacataaatttcattaatttgaaagattatttttaaactgcataggtccacttgcctctaaataaaatgaacctaaaataaaaacaaactatactttgtgagacatcctggtatttagaatttttctacctgtctctgaaagtcagaaccatactccaatgaggcaagtatttggttattcaacttctcaaagtgtttatattatacatgggccatattgtacatatttagaaagtctgtagatcagcagtccccaacctttttggcaccagagactgatttcatggaaggcaatttttccacggacctgggggcagggagaagggatgcagggagggggtggtttcaggatgattcaagtgcattacatttactgtgcactttattatttcattgtaatatataatgaaataattatacaactcaccataatgtagaatcagtgggagccccaagcttgttttcttgcaactagacgtcccatctggaagtgacgggagacagtgacagatcatcaggcattagattctcataaggagcacacgacctagatcctcgcatgcacagtccacaacagggttcacgctcctctaagaatccaatgctgctgctgacctgacagaggtgacctgacagaggtggagctcaggcagtaatgcaagcagtgtgagcagctgtaaatacagatgaagcttcactctcacctgcagctcacctcctgctgttcagcgtgggtgtgggtggctggggacccctgtggtatattatacacccacagcaactttaggagagataatttttcccaatataactgcagattataaaattaagtcaacaggtatttttcttacccttctatggttattactattccaactaaatgtatgaatggcctaatctaattgtttttacatcttggtttaatttctcagtaacaagtaattatcaccaaaatctcattccttttttgaaatcaaaacaaaagcccaagttcctagaaattattatacagggataaatgaggcactgaaggtgggagaaccatgaaattacagttgatccttgaacaacatgggtttgaatggtgtgggtccacttatatacaggcctttttctgtaagtatattggaaaatttttttgagatttgtggcaatttgaaaaaacaaaccatgtagcctagaaatatagaaaaattaaaaagttatatagatactagcctattttatcatttactataaaatacacacaaatctattataaaaagttaaaatttataaaaacatacaaacaaactgtacatggcaccattcacggttgagagaaatgtaaacaaagatacagtattaaatcataactgcataaaattaactgtagtacatactgagctactataattattttgtagttacctcctgttgctattgtggtgaactcaagtgtcaaaagatctgtttaaaacaccatgtgatgctaatcatctctgtgtgagcagttcatctctccataaaccgtggatcacagtaaaaagtgatcccttgcggttcttgcatatttttcatggttagtgcaatactgtaaaccttgaggacataaaaactgcaggacccatatgaagcaccaccagtcatagaagtgctcccaagaagcacagaagagtcatgacattacaagaaaaagttgagttgcttgataccatagattggggtctgtggttgcccaccatttcaagataaatgagtccagcataaggaccattgtaaaagaaagaaggaaagagaagaaagaaggacggaaggaagggagggagggagggagggagggagggagggagggagggaggaaagaaaagaaaaactcatgaagcttttgctgcagttatgccaccaggcatgaaaaccttgcactttttgtgaa

SEQ ID NO: 1486 - DNA, 1066 bp, Homo sapiens
tcttttatcaagtaaaagtgtgtgtgtgtgtttgtgtgttttaaatctaagccttgtatcttttatccttgtggtctaattcttcctttctctcaatataggtatggcatcacagctgcaagtgttttcgcccccatcagtgtcgtcgagtgccttctgcagtgcgaagaaactgaaaatagagccctctggctgggatgtttcaggacagagtagcaacgacaaatattatacccacagcaaaaccctcccagccacacaagggcaagccaactcctctcaccaggtagcaaatttcaacatccctgcttacgaccagggcctcctcctcccagctcctgcagtggagcatattgttgtaacagccgctgatagctcgggcagtgctgctacatcaaccttccaaagcagccagaccctgactcacagaagcaacgtttctttgcttgagccatatcaaaaatgtggattgaaacgaaaaagtgaggaagttgacagcaacggtagtgtgcagatcatagaagaacatccccctctcatgctgcaaaacaggactgtggtgggtgctgctgccacaaccaccactgtgaccacaaagagtagcagttccagcggagaaggggattaccagctggtccagcatgagatcctttgctctatgaccaatagctatgaagtcttggagttcctaggccgggggacatttggacaggtggctaagtgctggaagaggagcaccaaggaaattgtggctattaaaatcttgaagaaccacccctcctatgccagacaaggacagattgaagtgagcatcctttcccgcctaagcagtgaaaatgctgatgagtataattttgtccgttcatacgagtgctttcagcataagaatcacacctgccttgtttttgaaatgttggagcagaacttatatgattttctaaagcaaaacaaatttagcccactgccactcaagtacatcagaccaatcttgcagcaggtggccacagccttgatgaagctcaagagtcttggtctgatccacgctgaccttaagcctgaaaacatc

SEQ ID NO: 1487 - DNA, 1048 bp, Homo sapiens
aacttgctgtgtccattggccctgggcatggctaaatgattcaggcagtggaaataatatactttactctctggctcactgtaaatgtgcacagactccaagcaaagctcctgtctttcgggcttgagttttagagacaaaggtttgccatgcttacaggctgaatgtttttccctactgaacaaactagccagcctttatttcaagctgaatcactttgttacttacggaaggaaaaggtctagagaaggaaaacgtatcttccatttatcctagacaaacaaataatctaatttcctctggcagtcaaaatatagtttcacctaagccactgatgcaggaagttaggttttatgtaacctctctaattggtaagtaagtaggtttgatgtctctgagataggaagaaagaaacgaaaatgttcatgaaaataatcagagtgatttgtgttaagtgatcctaaccttagcttgctctgggtgccagtgaaattaacctcaacaatgttggttggaagaatttttcaacttaaagaagtttgaagttggggaatcaaaaggcagggattgttgtttctatcacttagctgtaataaccagagcctgtttagtatttgttttttaaggatgggatgtgtcttcaaagaggagacttgccatgttcaaagcacaattaatgccattttcctactgaagtgaacactgccagtttttaacagtttctttcactttcctgtgcttctgtagataaccttttttactgcccagttgttggaatgttacagctggaaagggacctagaagagtaattatctaactctgtttccttattacacaaatgaggtagaaccagagttttacgtgtctgtagagtttatattgagggattaagaaataaggaggccaagaggaaagatgtaatgaaaataattctaataattataatctggattcacagtttaaagtattcagtccttagagataaacctgctctagtgatgccttactgttcagtaaagtagaaaataacttgtctttttgcttcgta

SEQ ID NO: 1488 - DNA, 1033 bp, Homo sapiens
cagttgtcccattgcagacaagagagagagcttcctgatgccaggctactgaatagaattattagtacctccgtgtgctcttgggtccagagaatataggctatcacatgagacactgaataaatgctctggttttcctaatgggaacacagaagcaagcaaaatttcacattcagctgtcctgtaatttctaagaatttgaagacagtaagtgtccaacaagatagaattttgccttcttttaaaccctcttgccactttaatatcctaagaattaccaatagctttctcagcttcacattatcatttctgtgcttgtttaatcccttcctacataaaactataaactcttggagagagggatggtgtcttagcatatttgtatttccagtcgttccttgtatataacaagagattatagttaaaatatttataatatttatttaagtgaacattttgaggatcctatgtggagatttgtgccaagacagaaaagaaatgggtgataacaggttattttcttctgatgtaaatagaattgagaccttaatgcttgcaaactacatacagatgtggactaattaatatgatgccatctgaggttagctcagtgatgtctactcataactattaagcctggtgcttttttaggtctcctgagcaataagactaagccagtcgcttcagtgagtgggcagtcatctggatgctgtatcacccccacagggtatcgagctcaacgcggggggaccagtgcagcacaaccactcaatcttagccaggtaagtgctatgggctactgccttctgtttgggccctgcactgttgttactttctggagaaccctgcttctggctggatgctgaataaagccaaatgaagccccttttgtgtcaaacaattttgtgttctatggcttacgtcgtaccgcatatgctgtgtctcttcattcactctgtaagtgtgttcaggatgtacattctaggttttccatcagacctccctaagtctaccctggaaggttagagaaacg

SEQ ID NO: 1489 - DNA, 1052 bp, Homo sapiens
cccactgaagcagaaggtttttctctgggggaacctgtctcagtgttgactgcattgttgtagtcttcccaaagtttgccctatttttaaattcattatttttgtgacagtaattttggtacttggaagagttcagatgcccatcttctgcagttaccaaggaagagagattgttctgaagttaccctctgaaaaatattttgtctctctgacttgatttctataaatgcttttaaaaacaagtgaagcccctctttatttcattttgtgttattgtgattgctggtcaggaaaaatgctgatagaaggagttgaaatctgatgacaaaaaaagaaaaattactttttgtttgtttataaactcagacttgcctattttattttaaaagcggcttacacaatctcccttttgtttattggacatttaaacttacagagtttcagttttgttttaatgtcatattatacttaatgggcaattgttatttttgcaaaactggttacgtattactctgtgttactattgagattctctcaattgctcctgtgtttgttataaagtagtgtttaaaaggcagctcaccatttgctggtaacttaatgtgagagaatccatatctgcgtgaaaacaccaagtattctttttaaatgaagcaccatgaattcttttttaaattattttttaaaagtctttctctctctgattcagcttaaatttttttatcgaaaaagccattaaggtggttattattacatggtggtggtggttttattatatgcaaaatctctgtctattatgagatactggcattgatgagctttgcctaaagattagtatgaattttcagtaatacacctctgttttgctcatctctcccttctgttttatgtgatttgtttggggagaaagctaaaaaaacctgaaaccagataagaacatttcttgtgtatagcttttatacttcaaagtagcttcctttgtatgccagcagcaaattgaatgctctcttattaagacttatataataagtgcatgtaggaattgcaaaaaa

SEQ ID NO: 1490 - DNA, 1050 bp, Homo sapiens
agcgagcttgtgctggagtccaggtaaggctttcaaataaggatgagaaacagaaggagctcggggcaggtgctgctggacggggcctgtggtgacatggcagagcccagctcctgagacagtcacaaaccctctggccataagaattgaatcacacatttcagctggtgggtaaacttaccagatttagttatgaaataccagaaacagctgttttaaaataccaattttgtttagcactaccaattcccttgtcaataccaggcttccctcatccacaccacaatgacagaagtaggaatttgggattccctgggtgcttggggatgaacaaagcaggttggctttgcagtatcctttgtgggaaccatctctgggctcttttgtctacactcgagttctgactttcacgcttcggggcccattgctacgctctgctatttccttaggcctcttggggcctccagaaattgatattccaatgcccttgtagtaactttaagagactgtaacttccaattaaaacaacacgcagaatttttaatgcattcttggacccatatagaaagtacttggcaaatgttaatacaagctgagtcttttaatcaattattcaaaaaatgttcctggatatctactctgagaaaagctctgagagaggagatgaaccttagagatttgtaggtgcactccatgggttctttaaaaaacaccactaccacctacgggtggtggattctccaactgactgcagcatagggcacagcaactgtggggtgagaggcaccatccctagagagcacgggctgtggtgtactttgctggggcctaaaggatgttaagcagtagggttgccccccacaggcatgagagcaggccccaggcccagctaagggtattttgtccaaggagtgttcctgtgaaggctgccctgctcagaggtttgttgggaacttgaatggaagggtaggaggcgggttggggttggagggggaccatgctctttggtaattttagtcagagtccaactcagggaggaataatgaaatg

SEQ ID NO: 1491 - DNA, 1037 bp, Homo sapiens
aaatctgtaatactttggctaaaattcataaagtaagccctagagaaaatacttgaccaccaaatttttgcccaactatcatcacctcccttcccccgcctctgttcttgccttttgacatctacatggaagacaagttctttacagcaaatggtaagaggcaggtgacctggtgtgtttgctgtgttgtagttcattgcctggggcttgggactccttttttaatggagagactagctgtgcaggtgtgtgttggatagggataaagtgctcacccctgccctctctacagtagttggtggtagatttctctctcattttgcctcataatcactttcgagtgcatgtatttacctaagggctgtagctctgtgggatgctaccagcatattggactgacagaaattgattaccttgccactccaacctacgtactgagtgagtgctccagccactcagtgaaaccaacaaaagtgagtccttggtttaccttccaatctgggtcctgctgtgtaagtatccctaagtggggatgcatatttgtttgtgcgtttttatttccatatatgtgagcatttctctgagtgtattaccagacggatagcacatttatatgtcagacatcttaacatctgtgttatctgtagcaggtgtgtagctcagcagatacgtgtcattgtgtatatagctgagtgtgtgagggtgtctgtgtttctgcagtcccctgtgtttgagagatgacttaataaccctgtgttttgagaggtcgctctaaaccagtgacttttccctcccctgctttattcctttccctcactgacactggcttctcccgctagagtaaatggctttagcacagcactgtcttctggggagcctgctgtcctgcaggcaagtccattaaactctttcttgctttaggactctgaaaacagcaagaaacaaacaaacaaaggtcaagctctaagaaaattactgctcaaacttcactaccctggaagccttactagatatttcttaaggtaacttaaaaattg

SEQ ID NO: 1492 - DNA, 1044 bp, Homo sapiens
gagggcctccggcgaagcaacccggcagccgcggcgcccgagggcctggcgctggtctggggctgcgccgggggcgcctggctctggggtgcggccggtcaggaatccccatcctggagcgcaggcggagagccagtggctgggggcgggaaggcttcttggacccctcgcgcttctccgaaatcgtaaagaaatgactaaacaaacgtgggggagcctttaaaaagaaaattgactccgatgccctcgcaggctcccggagcaccatctgtcacgcagacagccacacacataggggacctagggacacggcgacgtgggatcagacaatgcgcccggcagtctggcgaccaccttgcgggaaaatgccggcagccgggccgctgagggaggagaggatgcagagggaagggaagagaagggaagggcccggggcggggcaggcggggactagcgggtgcagcgcgtgttgtcccggcgggagctgcatctctgccggcaaagttcgggcgctcccggaaccggagctcggcaggctgcagctgtccccgggtggcctggccaagtccgggcatgtcggtgcttagccttcctctaacttaactgtgccctcttggaaacgccacctggccaggcttctctggggcgcctggagcactggcccggactgtgcgccttctgggagggggccgctcagaaccgctgggcttccgggtaattcgggcttcgagaaagggcccggcaggaggagaaaggcccctgcaggggctgcacgcaccgcccctgggcgtcgggagtgaggaccaggctgagaactcggggccccggcgtgggcagcctccacgacgctcggcacgggagaaatccgcgtcggcgacgtataggagcgtttgcttctagagaaacaaaagcaaggggatgggtgatcggttcccagcaccgcacttgcagaggagcgaattgggccaaaacagctttaatttccctgcgaggaaatcaggtcctctacggcaaaataaaaacaaatgctcccagagagctgca

SEQ ID NO: 1493 - DNA, 1033 bp, Homo sapiens
atatatataaacagtatagaaatataagaacatggagtagaaagatccacacccaattcatgagattggttgcctcttgggaaggaagggaaggggtgggcttaggggagggtacaaaggagattgcatctgttatcatttgttaattgtgatagtagtttcatgaatcttattttttgcttttccatattaaatatttttaagtgaaaagatggtaaagggaagaagatatgcatatctaagagagaatactatagtttgctgtatgagaataatggttcattcttttttaaaaatcaatattcctttgatcaattatggctgtgaattgtggtcctttaaacacaggagggtggggtagagtgagttttattcagcctgttttgttaaacttcatgtagaatgctatcacagcttaccttccctatctgcttatacgtggcaccatgtccctccacaggaaattcttaggtctgatgagatatggctgagatcatagctggttcttctaacctccctggcataagcaagtgatgaagttcacaccataagcattagtgaagctcttgttcagttataaaagactaactgtcatccccaggatgttctcaccatcactgaggcttcagccatgatgagaacctatggtcttactaagaccctttcatgagtccaaaacatgtggccatttaccagggctctctgtcagtttgagcaagttttatgcagctcctactgtcaaattttatttcaattagccctcacacagtggcctggaggttgggtctcctgagggtttatggtgatctgggaacttttgcctttcaccagtttaggtgggtggggcaaagagacaaacacagtggtttggtcaaagaaaccaaacccacactggcccccacaccctcaggaaaactgttgttgtccatagacagacactgccccctagtgtaaagcagataaagttgttgatctattagacagattttcctccagggaggctgtagagatacaggaggcctccagaagggtt

SEQ ID NO: 1494 - DNA, 1047 bp, Homo sapiens
cccgggttcacgccattctcctgcctcagcctccccagcagctgggactacaggcgcctgccaccacgcccagctaatttttgtatttttattagagatggggtttctctgtgttagccaggatggtctcgatctcctgaccttgtgatctgcctgcctcggcctcccaaagtgctgggattactggcatgagtccagccaatgtagatagattaaaatgaggaagaaacagtatttagaggcaccagttactccgggtgtgttagtgtgtctcaaattttacacaaaaaaaaatagctagtattagtaagtcaaccaacaaatatttattgaatacccactttgtgctggacactgggcatataatcctgtcttcatgattatggtcttgcttatgtaatgcttttgattgagtcaattaggtaactgagtactaaatgcataaaaaaactaaaggtaatggcaacaataaaataatctttgattcctcccctccctttattttctccgaaaaaagctctggccccaaagttaagtggttctcgttctcatcctggttttgcaattagtgttttatataacattgaacaatttacttaatcgttctgtatctcatttttcctacttaaaaaaataaacattgtactgaaccatgacttcacagcacaaggtattgtgatgagataatttataggagacttttttggtttcctgagaagtattataagagctcttaatggtgttaatatgaaattactttaaaaaccttcacttcttgaaactttaaaaatttcaatcccctagtgcattttagtcatttttctaattataattacattgaaagggggaaaaaaatccagccatctgtggcacttgttctccttccctagaggtagagctagagaagataatgatttatttgagatgttgttattcccactctggtagacaatggatagtggttgctgtttgtggctttaaggcccatctgctgatgggtgcaattttattaggcaaaaatatgtgggtgaatgtgtgcatggtagt

SEQ ID NO: 1495 - DNA, 1030 bp, Homo sapiens
aataataatgggggactttcagtactccactgacagcactagacaggtcatcaagacaaaatcaacaaagaaataatggatttaaactataccttggaacaaatggacttaacagatatatacagaacatttcatgcaacaaccacagaatacacattctattcaacagcacatggaactttctccaagatagactatatgataagccctaaaatgagcctcaataaatttaagaaatttgaaattatatcaagcactctctcagaccacagtggaataaaactggaaatcaactccaaaaggaaccttcaaacccacgcaaatacatggaaattaaataacctgctcctgaatgagcatcaggtcaaaaacaaaatcaagatggaaattaaaaaattcttcgaactgaatgacagtaatggcacaacctatcaaaacctctgtgatacagcaaaggcagtgctaagaggaaagttcatacccctaaacacctacatcaaaaagactgaaagagtacaaagtggcattctaaggtcacacctcaaggaactagagaaacaagaacaaaccaaacccaaacccagcagaagaaaggaaataaccaagatcagagcagaactaaatgaaacaaacaaacaaacaaatatgaaagataaatgaaacaaaaagccagttctttgaaaagataaatataattgatagatcattagcaagattaaccaagaaaagagagaaaatccaaataacctcattaagaaatgatacaggagacattacaactgacaccactgaaatacaaaagatcattcaaggctactatgaacaccttcacacacataaactagaaaacctaggaagagatggataagttcatggaaaaatacaaccctcctagtttaaataaggaataattagataccctgaacagaccaataacaagcaacgagattgaaatggtaatttaaaaattaccaacaaaaaaaagtccaggaccagacagatttacagcagaattctaccagacatttaa

SEQ ID NO: 1496 - DNA, 1061 bp, Homo sapiens
atgttctcactgatatgtgggagctaagctatgaggacgcaaaagcataagaatgatacagtggactttggggacttggagggaagcggggcaaggaataaaagactacaaatagggtgcactgtatactgctcgggtgatgggtgcaacaaaatctcataaatcaccactaaagaacttactcatgtaaccaaataccacctgtacctcaataaattatggaaactaaaataaaaataaaaatgaaaccacagtgggatgccacaggacactgattaaaatgacaaaaattacagagaccgcaagtgttggtgataaagaggaactgtaactcatatacattgctagtaaaaatacaaaatggtatagacacttcagaaaatgtttagcagcttattttaaagtgaaatatacacttactatatgacccagctttactcatgagaagtggaaacctagatccacacaaagactttgatgcaaatgttcatagtggatttattaataatagccccaaactggatggaactcaaatgcccttcagctgatgaatggataaacaaattgtggtatatcaatataatggaatattagtcaacaacaaaaaaggaaagaactatgtcctactgtgctgagtgaaagaaaccacacacaaaagtctacaaacagtattatattattgtgaaatccttgaaaaggtgaaactatggtgacagaagtttgtgtgtatatgctttttataaaaagccagagggaagcaaaatgcattgtgattcttaccccatttatgtatcatagcagaggacctgtacctgtcttaaagatttttaacatgtgaacaatcaaaatgaacaattttcttgtaatcacacagtgaatgagtggatgtgaaagttgaattttttgccattttgggtcagtgaaatgtgactatatcatactaagacattttttgctggtgatcccaaatggtatctggaaaaccttccagaaaaatagttctgaaaatgatgtctgtagtagtcgcatcattggaataaatgtataacctccttgagtta

SEQ ID NO: 1497 - DNA, 1071 bp, Homo sapiens
aatactgtcatgttttcttgcacactgacttctggtttccactgtatcagtatgtacctttgtaattgttatttttatgtcttttatgcccttgattattagttgggctcttcataaacagaggccatctctactactgtttatttttccctgctgtgcccagaacattggcgtagacacagtaagaacctagtaaatattactgtttctagccatcagggagattgtggaactcctcccagtataatttttacaaactccaagcaaatctgacccaaactcccaaattgtcaagtcctgcttaactttctctggaaaatagaccccttctcaacatcagaataggaagagaggaagaacttacaaagacacttaaaagttattcttaaatggtggttgggcatttaaaacagtgaactaacatatatataatttttgattagttggagctttctttgtattataagagtaatatatctcattacagaaaatttggaaactataaatttagaaacgtatcacccatacgtccaacatcgaaagaaaaccagtgttatgactttgttccatttgaagactaattgggagtccatctctctattggcactgggttcgattgcctctggctaatagagttcaattagttctatccctgggtttcctttcttagctatggggtggaagataggagggggagatctacaatttgaatatgtgttacttaataaggctaggctggccatcagttgcttatttcagatgtgtcactaaattttccttctagatggtccttgagcaaaacttaataattactgttttttatttccactgcctttataaaatcaaaattttctccttttgataaaaactgttgaatactattgatgtagagaatgtgtatatgtgtatatttgcattgattaaattattggaaaacttttcattgacaggtaatgtattttggttgtgcggatggtttgtaaaaagtatcctgtttttttaattctattcaaaattaaaaattttttttcctaaaataaagcaagaaaaataaatgtaagatatataaga

SEQ ID NO: 1498 - DNA, 1033 bp, Homo sapiens
cccaggattttaactcaaggctgtctgattgagaatgcggactcataagcacaatattgcactctaagttaataatgtaaagttagtttcattctttcagtagggaagatggaaggctgcagaatagggattttgatagcaaaaatctcctcattaaccccaaaaggaagtggcactggcagggccattctgaagcctaccggtagcttcagtattgttcttaatgctcttggatggagagaatgtatcttgagccaatgtattaatagtagattgctttgcttatgtagtaggcaatatatgggtatacattttcctgactattatcttaatgactattccaaattatgactaccttaaaaactaccaaaatcccctgctccagaattttcagtttcagatgaggttcataattcatggcctcacttttcccacattctcctacaggttggacgtgataagtatgagcctgcagctgtttcagaacaaggtgataaaaagggcaaaaagggcaaaaaagacagggacatggatgaactgaagaaagaagtttctatggtaagtactaggaggaatattgtattccatccttattaaaaatccatgatttttaatcccccaggcctcactgtattcttcaaagaactgctatatattaaaagagatcatagcagctgtacagatctcatctagtcgtagaggttaatgttgaacatatactttttaaaagctgttagagggtaggaaaagttattcagtcactctggcataaccagagataacagaaggaacttaggttgataccatgagtctttgcttttctctgtattatatcaaacattgggaaattcagcctctccaggcgatggaagcttccatagacttaacctgtctagaatcgacctggtcatcagagaaggcagataaggttttactagatccctgagagctgctgggtttctctgaagtgttatggcaaatagtaatgggccacggtcactcagctttagccattctccagtgaagagctgtc

SEQ ID NO: 1499 - DNA, 1012 bp, Homo sapiens
ctcttaatttgcaaaactgaatggatttgtgaaaatagatacctttttggcagaaatgcaatttggcattaatcccttgatctaaaacttagaagaaaccaggctgaattcaaatttattgatggatcaatttaaagagttttaatctgggtgttatgagttccttgggcctattgtttgcctgaaccctgtggggactggctcatcagcagaattattcatggaggaatttgctaggttttaccttggctctctagcttgggacattttgtttcttccttaaatccttattgcaaccgtccagctaccaggtaggtatattgccttgtaagtgctggtacagtttgccttatttatattccactgcttctcagggattaacatctgctcgtgcagctgagatcctggcgcgagatggtcccaacgccctcactccccctcccactactcctgaatggatcaagttttgtcggcagctctttggggggttctcaatgttactgtggattggagcgattctttgtttcttggcttatagcatccaagctgctacagaagaggaacctcaaaacgataatgtgagttctgtaattcagcatatggatttgtagtacacatcagatatcttctccgtctttgtctcccacttcttctcaattaccactcattacttaatggttatgaactcattacttaatggttatgaacagctgttgccttcaaggctcatccattcttccttcgtttccatttcctctctctaccacccacgttgtagatgctcttacaagtgggatgcccacctgcatgtgctgctgtgagcaggcagctctgctcaggccccggccgccacccactggatggcagagcacagcgattcatgttggcacatccacctgtccagaaatgcttggtggccattcttcaaaatccacaagttggttgaaaaacaatctttgttttataaagcaggagaaactgatgcatctagaacctttccaaacgtccagtt

SEQ ID NO: 1500 - DNA, 1049 bp, Homo sapiens
cttcaaaaacatggtccctcaggtaccagacgctttgtccttccccagtggatgacttgacagccccaagcatgtcagcctgtgaattagtgtgaagttaaggttttccaagtattacatgactcatcagagagatggatgtcttctaccccacccaaaaccaacctattttccttctatccaaaaagtggtagcctttcttttgaatgtaaactctgaatacaggcacaccatgtaacagcaatatctcttaaactggcgagcaagcttttgtaacttgtgtaaataaaaaagtgaataatatctttgttttgtattcaggtaattaggattatgactatttttattttcttgttttggacactaccttctctttgttggtatactaacggtgtaaattgtttcttttccaaagcaagcccttgtgattcgaaatggtgagaaaatgagcataaatgcggaggaagttgtggttggggatctggtggaagtaaaaggaggagaccgaattcctgctgacctcagaatcatatctgcaaatggctgcaaggtagctcttttattttaacaaacctcatagctagctctgctgttcgggcagcttgatttgaggggtacagtagcccatgataaggctggtgtattcacatgacatttttcttcttttcctcacatataggtggataactcctcgctcactggtgaatcagaaccccagactaggtctccagatttcacaaatgaaaaccccctggagacgaggaacattgccttcttttcaaccaattgtgttgaaggtaggccatttttgggcactttgagcatggcgtggtatttctcttgggcattaacaaaatcaaaaccataggcacaatctcttgttttattggctccatttctgagaacttgtgtcaagcacagagcagaggtgttttcctagctggcaggaaaccttgtggcagtttcccttccctccacctccaccctgcctcttctgtcaacaacaccagtctggcatgggtgttggagctgctgtcctgctactggag

SEQ ID NO: 1501 - DNA, 1767 bp, Homo sapiens
gttacactcttccgctatcctattctaaggtattgccaacttatgttttattctggatgtttgatatagttcttcttgagagccacatcacgtggtgaattttgacagtgagaaaacctcagcatttgtttatacgtaagataaccccaaagcatacattttgcttttaaattatcacgtggtcctgaacagtgcagtggagaaaggagaagaacttgggatcaagtagggggatagaatatggtagaatcctgttattatttttcttaatagattgcttttctggaaggaaggggaagcctcatgtatgggttccccttattatttcttcaaacttcagaagaaggttggagagatttaattttagacaaatttcttccacattaggatatagcaagaatctgtatagaattccagcctggttgagtgaagtaataatcttcctaatattttttaggtctgtctgacacttactgccaaacgcatggcaaggaaaaactgcttagtgaagaacttagaagctgtggagaccttggggtccacgtccaccatctgctctgataaaactggaactctgactcagaaccggatgacagtggcccacatgtggtttgacaatcaaatccatgaagctgatacgacagagaatcagagtggtaaggccagggttaccacacacctcagccacctgctgacttcgcttggttttttttcttttaagaaattgcatgaaatttcttttttttttttaagctcatggcagctttttctttcttttttgttttttttttttttatcatttagtgaagagtcaagggtatgggatattgattttttgcatgtcagtagaaactttaaattgccctacaaacgtgactgaagaatgcctaaaatgtgattggtttcattaattgggaaatgagatgtatcactgcagatttctatgggactttaataggagaactgagaacacagcctttgaagttaatgcattgttgttctgttgtgttttcttgcctccatcaggtgtctcttttgacaagacttcagctacctggcttgctctgtccagaattgcaggtctttgtaacagggcagtgtttcaggctaaccaggaaaacctacctattcttaaggtatgctcaagagttaactaatggagggatgtagacagcacatgagaactgccatttgagtgttaaaagtagcaaattacctttgtggtctgtgtgactgttcactgtagaacacctggagtggtctgtgcagtactttgctgtgtgtaacttacattgtgttgcctgtagatcctgatgtattataggaccccctgctccatataggttgattaaaaagggaagatgcagtaaaaatctgaccaaagtgggaggggaggagacggaagacagtctttattggtgaaaaacctaattcatctgcttttactactcttgagtttatatgttatcacctaacctagtggacagtgagagctgagggctgcagtgactccataatcgtatttgcatattaggatacagtagattccagtaactcctttaagccatttattttcctgaaatagctcagcttatcttatcttattggttcttagcttgtttactaatgatgtaaaaataagctccaggccaaaataagcccagccttagcctgtggaattctgatgcagtttgaaatgattgagattttactatgctgcccaagtgaagatgcagtctcagaaggatcatgaattgtacaaagtcc

SEQ ID NO: 1502 - DNA, 1046 bp, Homo sapiens
tgcccttgattaccatagaatgccataatttagttgaatatcagcaggataaatgaagcctcttgcaaaacactgttgagcccttttgaatacttgtggtttggggtgggtgtgggcatgtggggaggtggctggaggtatgtgtacacaagtgttccccaatccctgtgttctgaaatttcgtatgttcttttttaatgtgaacaaatgtcaggaatttatgaatatatcatagtgctcatttttttttttttctgtagcattcaaagtatgttacaggtgtaagatacttcagagttcagaaagaagggatcttgggtcttttatagcaaatactaaatagtaagtgaagctttgttttccaccatggactgccacacatccaaccatccaatgtttatgtctcaacaatccttcacagttgtctattcataagaaccccaacacatcggagccccaacacctgttggtgatgaagggcgccccagaaaggatcctagaccgttgcagctctatcctcctccacggcaaggagcagcccctggatgaggagctgaaagacgcctttcagaacgcctatttggagctggggggcctcggagaacgagtcctaggtatgcagataacctggtaacagagtgcctgggcacgtttttatccagtaacctagtctggtagacagttaacaagtgatcctatgaacctctatgtcttgttgaccttcctctacatcttttaggggcaatcctcctatttgtttatttgccccctattattttgaaaacaataagtgctgaagaaatgttcagcgtattgggctgtgagaaacaacgtcctgatggtttgcttctgacttgtacttagacctttggtctcatgctagtcagttctgtttgtttaaaaaaaaaaatggtggaagaatatctttcttatctaacctttgttgctgtggacatgacttataagcctaattaaagttaattaattcttagtgtgtctaagttagacatactatttcctgactgccttggaatgggtgtgaattt

SEQ ID NO: 1503 - DNA, 1048 bp, Homo sapiens
ccgcctcccaggttcaagcaattctcctgccccagcctcccaagtagctggaattacaggcacccgctaccacgcccagctaatttttgtatttttaagtaaagatagggtttcgccacgttggccaggctggtctcaaactcctgacctcaggtgatctgcccacctcagcctcccaaagtgctggggttacaagcgtgagccaccacacccggcctactctcaggattaatactgccctgaaaagctttgtagaagttatttcctcaccattccgactgcttctttttaaagtatattctaagtataatcactgcatcaaaaaataacaattttgaattcttgtcacatgttgcttttcctccaagttgtgccaatttgagaatgctagccagtagcatgtggtgtcttcacagtcccaccagcatcagatttttatcctttttttttttttttttttttgctggttttagtaattttcaagtatttttatgtaactctgtagaaggaaaaatagacattgtgtatgctagtgattgtataccaagataaaacctgagtattgcctttgtgtttcctttctgtggatatatatgtttatatttttggctaatcgatgtttattagttttatatttgcattcctttccttttgatagtctaagccgaatcatccttagtatttactcttgcctactggatataagactttaaggtcatttacttggcagttgcattcaacacattgtcttgtttattacaggtcatcatggtcacaggagaccatccaatcacagctaaagctattgccaaaggtgtgggcatcatctcagaaggcaatgagaccgtggaagacattgctgcccgcctcaacatcccagtcagccaggtgaaccccaggtaaggcaggaagctcaaatcacagtctgctgtgaacaagcaaatagtgatggtttaaaatcttcagcgtggttctataatggtttgcatctaggcttgctctgagtaggaaatgtacctgcactgccagaaagcaaccttgtcattcc

SEQ ID NO: 1504 - DNA, 1506 bp, Homo sapiens
gtgctcagtgggggcatgcatcgcactatttccatcgctaggaaaagtgattggtattaacccgttttcccttttctggggtagggtgctatcgtggctgtgactggtgacggtgtgaatgactctccagctttgaagaaagcagacattggggttgctatggggattgctggctcagatgtgtccaagcaagctgctgacatgattcttctggatgacaactttgcctcaattgtgactggagtagaggaaggtgagagctatttaaggtgtacaccaagatcttattcagatactgcccattagcatccatttctgtatacttcttggatatgttcagtttccagtgtgcttgtctcataagctaacagtaaaaaatcttggttttcataggtcgtctgatctttgataacttgaagaaatccattgcttataccttaaccagtaacattcccgagatcaccccgttcctgatatttattattgcaaacattccactaccactggggactgtcaccatcctctgcattgacttgggcactgacatggtgagtgtcacaacagtcacagatcgatagtagtgaggtgtgagctgtgtcttcattcactggcactatgctcccagcatccatgaggctggcgttgggaaaagaaattctcaggaccagtatccagtgtgtgtcccaatcccggcttcacagaatcagtattaccactcttcaaggcagcagttaacatttgtttatcagatgggaatctttatttttgtatacttcacctaaaagatttttaaatgggagggcaagaattttataacaaaaggttcacaatattagcttccttatttttagtaactaaattccttctccccaccccttcccaggttcctgccatctccctggcttatgagcaggctgagagtgacatcatgaagagacagcccagaaatcccaaaacagacaaacttgtgaatgagcggctgatcagcatggcctatgggcagattggtaagctgcagcctggagtgggaagctggcacatctaaggcatctgaggtgatggtgtccacctcaggttgaggttgatttcagagactgcaaatccaggcgactttcaggtctaggatgagccctaacggagtgagcctgtggagtttctctgaactctcttccatgtgagaatacatctgttgctgtttgcccagttaccttttgtggaaactggttttctatactgagcaccttggaactgggctcaactctgcctgagaaatgaggatgtccttcctcactgagccttgcggaacaggaggcatggttctaaggaattgtgtgtactgacgcacaggctgctttccctggagatacacacttatctgtcactcacttggatggagttaggcattggagaaagtatatgtgtttgagagtttggctggtaggtcaccaccaaagggtgatcctccatccacctcacactggacttctgcccccacagtgcagcatg

SEQ ID NO: 1505 - DNA, 1250 bp, Homo sapiens
agggtcctgaaggtggggaggagagtcagaaagtgccacagtggctagaaaaatggcagcatgtaggaattttgaaagatggaaaagaagttatcatttgtcagagattaaaaagtagggaagtggatttcccctaaaggtcatacccttagaagcagctggtcaagtaacaggtgggcattttgagagcaaggcacatgtgtctttgtgtaggctccaaaaagtgactcaaaaagcagagggccctgagattggagtgtatgcctggggtcctccatcccatccctcatagcctgtgagtgaccaggcaattctttcctgtgcttttatcaaccagggggaaacactcctccatatgtgctctcccaggcctgctgcagtaatcagctgaaggctatacaggtacccttgtgtgtgaggttctagtaattgggttgttttcccaacttaggaatgatccaggccctgggaggcttctttacttactttgtgattctggctgagaacggcttcctcccaattcacctgttgggcctccgagtggactgggatgaccgctggatcaacgatgtggaagacagctacgggcagcagtgggtgagtgggcacctctgacctgaccagtgtcagagctcctcaagccccagaagactgaggccacactgccaccagccatgcaggtgaagagccagagctcatcttctgtcttctgcatttcagacctatgagcagaggaaaatcgtggagttcacctgccacacagccttcttcgtcagtatcgtggtggtgcagtgggccgacttggtcatctgtaagaccaggaggaattcggtcttccagcaggggatgaagtaagtaatgaaggacatgtcaaggccttggctcaaagaaggggactggtgatttgtaaaccctttgccaaaaactaaacatatgacacatatagccaggtttctggaatctctagtttatagagcaaatttaggaagcaagaaatgtagctttctagttttttcatctgacctccaagttttcaagtacagctaatacataaagatgttgatctgccattttaatgcatagcattagaagataaacctttatttgcaccttttaagttttttctcccctactttgattttaggaacaagatcttgatatttggcctctttgaagagacagccctggctgctttcctttcctactgccctggaatgggtgttgctcttaggatgtatcccctcaagtaa

SEQ ID NO: 1506 - DNA, 1292 bp, Homo sapiens
ctggcggtaattatgggcattctgactttggttggaggaggagtgggaggggctatagttctattggttttttgtttccctcaaggtgtctaggctccctcagtggtcagtctgattagctaaggtgactggaccagcaaactgaccatagtcacatcttcagaatgtagatctcagttacagtttgaggactggtcatgttttagactttaaaatacaaaccaagtatgatttagtgaaaacttgtcagaatctaaaccatctttccaggtaacttggtattcctaaaaacatgtaaataagtacagttgaggtcccatgtttggattttaacacacccgacccccatcatcctccggttggttttcatccctgtttccctctgtaatgctggagcgaggaagactcactgtagtgtgtcttgtctgtctctttgccacccacaggctgggtggagaaggaaacctactattagccccccgtcctgcacgccgtggagcatcaggccacacactctgcatccgacacccaccccctctttgtgtacttcagtcttggagtttggaactctaccctggtaggaaagcaccgcagcatgtggggaagcaagacgtcctggaatgaagcatgtagctctatggggggaggggggagggctgcctgaaaaccatccatctgtggaaatgacagcggggaaggtttttatgtgcctttttgtttttgtaaaaaaggaacacccggaaagactgaaagaatacattttatatctggatttttacaaataaagatggctattataatggaatttgtctgtgccctcgtcgcttctttggtacagatgtctatgtgatctggagctgtggttttcaacatgagtccctgaccagcagtttatcagcatcacctggttgcttgctaggaaggcgggcccagacccactgagtcagaaatgcatcagcaatgtggcttaataagccctcaggtgattttgatttacattcaagtttggaaaccactggctaagaggaagcattctgcccgtgctcttttagttggagtaggtgagtttacctgacccattttttctggctgctgcctggggtgatagggctgtaactccacctgctgccttagcatctggctttttgatggaagagcacctcgcctaaaggatttccagaccctcagagtatactaaactgcagatgaggcccttctctttcagtctaaaagagacctgaagccttcctgctttccctccagagatcaccaccacatctcaagtgtctcta

SEQ ID NO: 1507 - DNA, 1155 bp, Homo sapiens
atctctgtctctgacccccctttcaaatgccttcctaacaaacacttctgaccacatacctttttcagtatatgggtcctcactgatatgttcaacttcttaaggtccttctcagcatttaaattgcggtcttatccctctcacatcctgacccctacccctttctctagctgtcaccctccctcatggacaaacttgtagaagagtcactgccactcctcctaattgttcacctcccagtcatccctctgcctcttccagctcccatgaacaccagtccaccaaaattgcctggttgaggccatactgacctcctgatgcatcttggtccttccttgacctctgctgcatctcttctgtccatcacacccttcctgaaaccagacctcccgtctttctgtcattgtctctgtgcactccttagctctcagccccctcttcacctgctcgacccctcgtttcctcagggaggcctccacaccttctctccctgcttcatactcttcctggcatgatttccagctctgatctggtcctctcctgagccccagatgtacaaatccagtgtgtcctagacatctgcatttgttcagaaagagcatggcacacttgagtcttagtaccaatggcgagcctaagtttgaggttccacaaataaatatgctttaggcagtgatgacatttggcaccctactgcccaagcgagaaaccggaaaggtgggtgagccctctcttttcctgctctgccccccacccaattactgtggattccaatgttgtggtagagaacatggactttgcgtcttttaacagacacagacagtgtcccatcactggctgatgaagggcacataatttagcctctttgtgcttcctttactctagaatatttcagagctgttaaaaggattaagtgaaattatgcataaaagggagtctcatagtggctgctgttcaatagttcattctctctactgccggtgtcctttacatctgggtgctggaagcggctttttggtggtatccctaatttttgcctttctctattccggtagttctcaaagtgtttctggaccagcagcatcagtatcacctgggagcttgttagaaatgcaaattctgatgcagacctattgaatcagaaactggaggtga

SEQ ID NO: 1508 - DNA, 1030 bp, Homo sapiens
ctcctttcctttatttacttgatgttttaaaaggtcctcatcttattggggactcatctccttccaacttttctataagtcaacatactgtttcatctttatcgactctgacgcttggccaggtgttagctcatcaactttccgtgatgatgtggttctgcacacagtaggcgtgcagcaaaaaaatactgaatgaaggaatgaagtatcagactgtagttaaagtgttccttaaagggcatgtgaacccagagtcttttttaatttaattccctgcaagccaaactgttaaacaacactgtactccttactgagcctcatcagggaagctcggcatagacccctcatcacccatggcttctagcactgtgtctacaaatgagaagggcaggcttaaagtgttgttggggaggaggggtggatgaggcaaaggaggagcagacagtggatctagggaacagtcaaataacgggagagaggacagagctgcccaaggaagggagtcgggttggtggggagtttccccaattatctcaggtgccttttatgctcatatgcaagtttaaacacaatatgaatctcccattctcttaaactagaggctaaaaagaggaccaggtgttcacacagaacttggcagatgatgttggccagtttgaacgtggagaggattgaaaatggctgagcagggagggatgctgagcggtgcttgggcctctagcagctgctaattttatagaatgcgctaaaataaaccttgtggatagatcttgcctcagccttttctatctctggtccttggacagagaattgtttaagtcatttcatgtttattgagttattttggttaatcatcagtacagattgcctctaagtggtttttgcatcttttttttattatcgcttggtcacataacttctcggaacctcagtttccttatttaatactctcaaggttgaatattaaatcatatgaacaggatttgcaaactataaagcaatgctatgcatgtaaggtgtcttttttttg

SEQ ID NO: 1509 - DNA, 1024 bp, Homo sapiens
tgaacaactactattttaccaggtcctgttctaggcactgtcattcagcaatggacaaaacaaaaatcactactcatatggaacttacattctactggggaaaaaagaaaaagaaaacaaataatagtgaaaacataaatgttcataaagtattttagtaataattgataaggagaaaatttggcaggagcaagaatggggatgtgccactttagggtgctcaggaaaggcctcattgagaaggtgacattagaatatggatctgaagctggtgaaggagctagtgggatgaatgtctgagagtgtcctgggttgaggaaatgtgcaagggccctgaggttgcagtaggtgaaaccttgggagcagagcatggctggagtatagtggaggaagaggaacagacaggaagtccaagaaacaaaaacggccaggtcctgtaaggattgcctctataaggatttcagctttcatctgaatgagatgggaagtgattggagacctttgaacagagtaagatataacccaacttaaatttttcaaagatcactttgctgtattgagactagagaacaagaatggaagccaggagaacagtaagggacactgcagtaatgcagatgagacgggtgctggccggggccagggtgacagcactgggggtggctgatgggttgattttgtcctataggtgataaggagccattaaagacttgatcagtgaagggacatcggatttgtatgtggaaaatatgattttggcagccctgtggaaggattggagagttcagacaaggagatgaatcagtttctaaagctctgatcactaaggataaagatagagaccttacaaggatgcagtctcatgcttgtgggtaggttgtccaccctggccagcttcttgacaagggataggaatggaaaagattaacacattaggaaattcctctgtaaacctagccaaggaagcaaggtgaatgactatgatcaggtttatcctagaggtggcctgctcagcacataaccg

SEQ ID NO: 1510 - DNA, 1039 bp, Homo sapiens
tgacctagctttctctctccgcagtgctggccgactccctgcacgtgggccccagcgcgcggcccccgccgagcctgagcctgcgggagggggagcccttcgagctgcgctgcaccgccgcctccgcctcgccgctgcacacgcacctggcgctgctgtgggaggtgcaccgcggcccggccaggcggagcgtcctcgccctgacccacgagggcaggttccacccgggcctggggtacgagcagcgctaccacagtggggacgtgcgcctcgacaccgtgggcagcgacgcctaccgcctctcagtgtcccgggctctgtctgccgaccagggctcctacaggtgtatcgtcagcgagtggatcgccgagcagggcaactggcaggaaatccaagaaaaggccgtggaagttgccaccgtggtgatccagccatcaggtgagctggaaacgatgcgttataggtgatgttattttgtgactaatgatagtgatacaaagaaccgggccagggagccccatggccttctgacaagaactgtttctgcttcccatgtgaggccttatttttaggggtgaagggagtagggtgttgagaggttggaggtgggcggggttacatttgttttgtgctgaggatgcctgtcgttttgcttcgcagctgcttttatctaaattcatgtccatggaaagccacagcctgcacataacacgaaggcagatctttcactcagagttgaggtgctgtggtccctcagccagattaggtaggacttggtgttcagtggagctttggggtgaaggtgccacaccctgcccctaaactttatcgggtttgatgtttcctgagtcctttgacgtgcctttctctgcagctgttggagtgtgtgcctggctcatcccaaaacctttcatctaacttgtatcctctaggcctgcctttcggtcccctcagatgtgcttttcctggaagggggaggagctctctagggcagggccgcttcttgctttcctgtatcatacagaccacaggagcatcc

SEQ ID NO: 1511 - DNA, 1017 bp, Homo sapiens
gttgtcagcaccaaaagaagatttttcatctctggagctgaatttgtctcacagctctgatccttagtgtattgtatggtgctgtcaaatcccagcactggctctccgtacccgctcccccttcagcttctgaatcccaactcgaggacttttttttttttaattgaaagtgctgcttgcactccaatttgaggcttctttgaagtacgtgtgcattgatcccggcatacccggggggagatgcagggactgtcagacaacaggagcggagctctaggaggaatgggctcctttaactggaagggatttgttggtagctgtgttctccagagagtgaaaagaaataaagagactaaattgtggaaaaggctcagttactatccaaaggatcccgtcatttgttttcctttggagtgctactaccattgtgaaagtcatcagtgtgcttttcctgactgatgctaacagatacagaacctgcaccttccctgctgctttgcatgtaataagcactcaataaatattagctgaacgggtaaataaaccagtacccacacatggattttgttaaaatatgtgcataggaaagctagaattgctaagaaagcagtaatgttcaactcctaggatattcagagatatttgcccctgagtaaacctaacgaaagagcgagtagtatgaaaaacaattgcattcttttttttttcttcctcttaagacttctcctccttccctgtgcctatgactcagaccattacagctgcttggacacttgtcaggagcgggtagggcatgagcatagcagcagacccttctcaaagacttccccgctggactctgtccagaagccagtgagcctggcctgacactccatggttgtctctagatatgtaatgtgcatgtatatgcgtacggataccataccacatacaacttgggaccaatataaggtaaccgagaagtgaccaaaaaagatagacagacaacctgacaagcactctgttgatataggtggt

SEQ ID NO: 1512 - DNA, 1044 bp, Homo sapiens
tcacaggggaagaggaatgagaagccactcctgtacctgagatggggaagactgaggacagaaagcagaattccgaagagaaagtgatggtaaaactagaagagactaccggggaaaagggaggaaaatccttttcaaaagttgggaaaatgcgataccatgtttgcccttaaagttcatttatgatacacacaaaaataaatcctttaaatgctctttctcagtaaattaataggtcaccagttgtgcctttaatataaaagccttttcctccagtgtaattaattgcaaaagctataggtagctgttatctttcagatcacaattttccagaattttgcactcttggactgtgtggatggaagatactgaattattaaacacaagttgtaatttagtttttcctcacacatgctgtgggctgtgagggaatgctcttttgtgaaggacatgttgcataagtgatttgtgggccaaggtcctctgtgctgagcaggggtggggacagcagactttggcccttctgaggcagtatcttaggtcaggttctccgcaagcaaagacagacaagcacgcgagtgatggattgagggagtgttctcaggagaacactgagggagggagggacttgagatagagctggagaagaaggcaagtcgaggtgtgaattcagagcaagtccacctccccacggggagttctggagcatgagtgtactgcagagtaggcccaccggagggaaggggactgggcttttctgtcccttcactagtcagtcattgtccacaggctgagtggcaaagaagcgagagcagttcataacctccaggtggcggcttccatcagcctaagcccggcctctggaggggggagggtacaggtgtgtgaattttaacagccagtacctgcagtggccagaggcccagcccaccagctggggtggactggccaccagctgcatttgctgcagctggtaatgcccttccccttagcaggtctgtgtgtaggagcatgtgtgttgagctgtggagataatgttgttca

SEQ ID NO: 1513 - DNA, 1033 bp, Homo sapiens
caatagatactgtgaactactggagaggggaggagggcatgggttaagaaactatctattgggcactatgctcactgcctgagtgcaatatactcatataacaaagctgcatatgtaccccctgtatataaaataaaagttgagatgaaaaggaaaggcattctagatacgaagtttgtattaatattttatatgaagattaattattttgtctttaggatcctgattccaaagaacattctgtatccaataagtctcagcatgcatctgagacatttcatcattcttccaactggctgagaaatccattcaaggtacttgacaagaatcaagaaccagctctctggaaacagctcatcaaaggtgaaggtgaggaaaagaaggctgataagaagcaaagagaaaagggagatcagcttttcgatcaaaagaaagaacagaagcctgaaatgatggagaaagacctctcatctggcctggtaccaaagaaaaaacaatctgtagttcaagagaagaagcaagaagagggagcagagattcagtgtgaggcagagactggaggcacacacaaaagagacttttctgaaattaaatctcaacagtgccaaggtaatgagcttacaagaccatctgcatcttctcaggagaaatcaagtggtaagagtcaagatgtccaaagagaatcagaacctctgagagaaaaggttacccagcttttgcctcaaaatgttcacagtcacaactcaataagcaagccccagaaagggggacccctcaacaaggagtacacgaactgggaggctaaagaaacaaaggcaaaggatggccctagcatacaggccacccagaaaagcctgcctcaggggcatttccaagagcggccggagacccacagtgtgcctgctcctggaggaccagcggctcaggctgcaccagcagcaccagggctttccctgggtgagggccgtgaagctgccacaagcagtgacgacgaggaggaagatgatgttgtttttgtttcctctaagcctgg

SEQ ID NO: 1514 - DNA, 1029 bp, Homo sapiens
ggttttataggtgcatgttcagtttctgccttttcccctatttatattttcaagattggtaagccagctgggttaaaatttaaaaaaggttctggtttttgcacacatatttaaaagaccataatttcagagtttgggtgtttcaggctattttaatctgaaactattcatctaacagtgtgagaggagagatccatttgatggaatctgtttttcagagcacactggcatcagtgaacatccaggctcttccagacaagggtcagaagttgatcaaacaaatccaggagctggaggaagtactcagtggtcttaccctttccccagagcaaggtaaagtggcttatgcctcagaactccgggtttgcatcgactttacaagagacattcgggaagcccttttaataaagaatgtgttgattcattcacttttccattttattatctgcttctgagacttctttcacattacacctatggttcataaaaaactttctcctgtttcctgtggactctactttcttccccattgtttaagcaactgttaaaatgctaccttctctaggaatccttcatcggaatggtgatgatccctctctcttgacctcacctccacacatatggtcccttcacttagtttgctgaactttaatctgctcttcccttgttttctgagcaggaactaatgagaagagtaacagtcaagtaccacagcagagtcacttcaccaaaactaccactggccctccccacctggtgcctccccaaccccttcctcgtcgtggtacccaacctgtgggttctctagaactaaagtctgcctgccaggtgactgctggaggatccagtcagtgctatcgaggtaagacccaagggcctgaccctgctgtgaatagccacccctgtgagttacgtgccacccggtacagtagtcacctcttatccacactttcagttaaccttagtcacctgtggttcaaaaaaaggtgagtacagtacagtaagatattttgagagagaaagagacag

SEQ ID NO: 1515 - DNA, 1031 bp, Homo sapiens
ggctgaggcaggagaatggcgtgaagcccggaggcggagcttgcagtgagccgagatctcgccactgcactccagcctgggcgacggagcgagactcccatctcaaaaaaaaaaaggaaacccaaatttgaaaacattttactcttagacatcttatgttcaaagactgagactctcaaataacttatttgaaccagttgagacgttttactcttgggtttcttaattcttatttcagtgtacctgagctaagcaaatttaaaggtaaatgtgggtcctccatgcttgcctgctatttccccttgtgtccttaaggacatgtacattttcccatattgtggctggatttcacttgtgattcttccagggcacctcaacacctttgcttcgaatagcctgggctcgaatcatattggatgaagctcacaatgttaagaatccccgagtgcagacttccatagctgtgtgtaagctacaagcctgtgcccgttgggctgtcactggaacccccattcaaaacaacttattggatatgtattcgctgctgaagtgagtaacttctcgtgattgtgtaaatatgaaccctgtctgtatcccttcatcattatttcatgtctcataataaagccttagtatgtgccagattatcttgtttaggagatggcaggcctgtcaacctttaaaggacaaaagaataaatatttatgagaaaatagctgttgattggttgatataggactttgattacattcagcccttatatatatatgcaaaaatataggactttatatatgcaaaatatatgcaaaatatatgcaaatatatgctatatatatatatatatgcaaaaattattcttaagtccagtgaatgttttcggctacttctgctttaaaacatatggtctagggctagcactacaatttatttgaagcaaacaaaaaagaatgttgattttaaaatatttccatttggctgagtgcagtgggtcatacctgtaatctccacactttggaaggctgatgtgggag

SEQ ID NO: 1516 - DNA, 1035 bp, Homo sapiens
ttttttattcttccaggtgatactgccccagcgtaaatttcagttgcaccatttaaagctttctgaagatgaagagactgtttacaatgtgttttttgcaagatcaaggtgtgtgtattaaagaagcaccttctcacacacattgttttattcctgtcttttcttgggagtgagttgaaggtcaaatttccacaaactttatggcattattgattagttggatgtctgtattccctttttttttttaccccatttttctccttctcccctccccagcttacctctgtctcatacacacatggaaggcaaaattttgaacctactcttcattggcttccttgcatagaagtcatagggtgtggtcaccatatactgaatctgtctggtcctcatggggctgtactgaataataatatctctttgacatttgacctgtcatccagcatctcaccggaactttaagaagatgactttgtaatcctttgtgtcatctgttctttgcactttctcttgaactcttatctttccctgaattccagatttactgtttcctatttggtacctctcatttacatttctaatgtaaatatattttttcttcttttacaccttatatttgttagcttattttaaaaaaagattggttttttaaaataactgtttcttttgcattacctttggccattgcttcttatgagcttggcatcatttaacaagtcttctataatttgtcaagatcccactgcaggcacagttaagcaggtcttagtgaccattatacatgcattttttttctttttaatctgaggcaggtcagctctgcaatcctatctaaaaagacatgaaagtagaggcaaccaatctggaagaagccctaataatccattcagtagaggtaagctgtaggactctcataaatacatatgactggtgaaaatggggatttggattcagtaaaacacagaaatgtgaggttatgaatccttggtatcagagatttggcgttaactaagaccctcaaaccagagtaaaatc

SEQ ID NO: 1517 - DNA, 1082 bp, Homo sapiens
aatttgataacctttgaggccttatggacttaccaaggtagaactttttgggtaaaagctggatctctatacttttttggattgggatatcttttgcttattttgagtttgtttcaattaccttagcttcagaaagtattaaaatgccaatgtgggtcacatccttttaaagggatatatatctagtcaaggttgtttggattcctcagacagggttcttaactggacctaagaagacttaaaggaagaaatctcattaaaaatgaaagcataataaaagtttgaatatattattagatgtgctgcttagggtttttgatagtttgcttattttttgtttttgttttttagatttgtttgtgagggaacagtagaagaaaagatcttacagctccaagaaaaaaagaaagatttggccaaacaagttctatcagggtctggagaatctgtcaccaagctcaccttggctgacctcagagtcctttttggcatctaacctcctgtggataagggctcagaatagcaccattgctggtttgtattaggatctgggaataacaacctaaccatgagccttgaactctgttctttgcatttcaatttcaccgtcaagcctttcaccttcctcaaaatgaggcataatcttatccccagaattgaggaggggttgtgttaaccaattagttaaccaattatgttaataatttatttaatgagtggtatggaaaccaattgatttttttagataaaagaatatgttttagagttggatgattttggaaaacaactctggcagaattgtatataagcttcagtaaagttcaaaaagcgggccaggtgtggtggctcatgcctgtaatcccgacactttgggaggccaaggcaggaggatggcttgaagccagtagttcaagaccagcctgggcaacatagtaagaccccatctctatgaagaataaaaaaatgagctaggcgtggtagtgcacacctgtagtcctagctacttgggaggctgaggcaggaggatcccttgagtccaggaggttgaggctgcagtgagctgtgattgtgccactgttttc

SEQ ID NO: 1518 - DNA, 1035 bp, Homo sapiens
ccctctaccactttccaaaagatcattcatgctgtttcttccctcctcagcctatgggatgcaaaggaactgatggaagattacaaggccctagggaaggtgaagccactagctcagcagttcttagcctagtttttggccatcagcccttctattagactagtgaagcctcagtcccaggatggctccccatgtacacttccctcctcgccccagctcacctacactggactatgacatgatcaaggaatctttttttttaagctactgagatttctgtgttgtttacatagcagtttgtaccctaaacaaacacttgagattttatacttcaggaaactattcagatttccttctcattagcaattgttccaaaaacacttactctgctaatttctgctagaaagaatcacagttcttctaacacagaaacatttctgtcccttgagttgggaaacaagaccctatgttaacccagtcagagtgtggactgaggcattcggagcctatttaagcagaagttttctataaggacaagatttaaaggcttacaaaggtaaagacaatggcctggtgggaagaattctagtctagaacgtttgagatttgactctagttctaggttcatcttagctgggtgtgtaacgttgaaaaaattggccgggtgcagtggctcaggcctgtcatcccagcactttgggaggccgaggcagacggatcacgaggtcaagagatcaagaccatcttggccaacatggtgaaaccccgtctctactaaaaatacaaaaattagctgagcgtggtggcgtgcgcctgtagtcccagctactggggaggataaggcaggagaatcgcttgaacctgggaggtggaggttgcagtgagctgagatcgcgccattgcactccagcctggtgacagagcgagactccgtctcaaaaaaaaaaaaaaaaaaaaagagagagaaaaaaatccttactttctctacactctgatttcctcatttgtaaggtgggcagttttcagaacttagca

SEQ ID NO: 1519 - DNA, 1051 bp, Homo sapiens
ggtactgttcacctgagaggcagcttggaaacatggggacattttttggttgttagaatgatggggatgagggcactattgcatttaattatatgtgggctgggtatgctaaacatcccatggtgccttggtggttgtgcacaataaataattgaattatcctcctcataatgccagtagtgcatttaagaaaaaccaggttatatggctatcttggtgaaggactaaaagttattactagcttcctttgcttcactgtctgcaccctctggctgaggattatttctcatttcgttgctttgctgttttctttccttagttcaagggacttgattcctttcaagctccaaaaatgttatttttaaactctggctttggctcggctcagtggctcatccctgtctctagagtccctgtttctagagaccctgtctctagaaaaaaataaaaaaattagccagatgtggtggcacacacctatatttccacgtaatcgggaggatcattgaagcaggaggctgtagggagctatgattgtgccactgtactcccacctgagtgatagagtgagaccctatctctaaaaagaaaacaaacaaacaaaaactgtgaaaaggtgcccggtagcatgggagaaaatatttgcaaatcatgtatctgataaggcattaatatccagaatatataaagaactcctacaactcaacaacaacaacaaaaaacctggtttaaaaatgggcaaaggacttgaaaagatatttttccaaagaagatgtataaatagccaataaacacatgaaaagatgctcaacaccactaatcattagggaaatataaagcaaaaccacaataagataacccttcacatctattaggatggctgttgtaaaaaaaaaaaaaaaaaaacaaagtaacaggtgttggagtggatatggaaaaattggaaaccttgtgcattgctgaggggaatgtaaaatggtgtagctgctgtagaaaacagtatggtgtgttcctttcagcagtctttgtgtagccagtagttgtgattcta

SEQ ID NO: 1520 - DNA, 1287 bp, Homo sapiens
gctggtttgatgttcaaaaatcaaccaatataattcactatgtcaacagactaaagaaaaacatcatataatcttattacataaccacagaaacatctgacaacatgtaacgtctattcatgataacaacttgcagcaaactagaagtagaagggacctttctcaaggtgataaagggcatctacaaaaaacctatagctaacaatattctttttatctttttgtgtatgttgttattattatagatttcagttttatgctgcaaatccatagtacattgctaccacttttaccttaggtgatcagttatcgtttagaactattaaaaataaaagaaatgcctttttgtcttcatttcagtcatttttgttggtcttttctttttgcaggttcaggtttctgatttttcaggtttttcaggtattttattccttctgtggaaacagcttcctttaacattttttatagtataggtctattggtagtgagttcttttagtttttgttagtctgaaaatctatttccactatatttttgaaaaattttctttgggtataaaatataggtttacagtttttcctgtcaacactttagaaatgtcactgcattatcttatagcttgcatagtttgtgatgagaaatctcctttaattctttattcctctgtatgtaataggtcttttttttttcatttggttgcctttaaaattttctgtttatattttgttttgtatgaagagtctgagtggtttttactttgtgtgtgtatgtgttgggctgcaggggtatgagtaggactgtttattttgcctgaggttctttaagctgctggggtctgtgggttgatatctttaattattttctaaaaaattctcagttattgttttttaaaatatagacatccatcgacttatgataggattatgtcctgataaacccattgcaaattgaaaacatcctaagttgaaaatgcatttagtacacctaacctaccaaatatcatagcttagcctaccttaaacatcctcagaacacttacattagcttacagttgggccaattgatataacaaagcccagtttatagtaaagtgttgaatagctcgtgtaatttattgaatactgaaaacgaataacagaatggccatacgagcacttgaagtatagttactactgaatacttattgctttcataccattgtaaagttgaaaaaatcatgagttgaaccatcctaagtcaaactgtcataagttagtgaccatctgtattttttcttatcaatacttt

SEQ ID NO: 1521 - DNA, 1071 bp, Homo sapiens
tatagcttgcatagtttgtgatgagaaatcttctttaattctttgttcctttatatgtaatgtctttttatatattgcaagagccccctgccccacttctgggattccaattatatacatatactaggctgtcatagctcttggactcattgttagattttgagtttagccaaatttaagtgctttttaaaacaaaaaatgtgcacttctcagaagatataacagaatcagcttcctgtaaagcctatcaatcacagtgatcaggatacagtttaaaattactcaatgtatgaaaaaaatagggaaaatgatccatttttttttttccaaaagtcaatcaatggtgacctgttctaaggtaacccagatactggcattagttgacaaggatgttaaagcagctgttataactatgcccagtgacataaaggaaaatatttctgaaatgaccaaatagatgaaaatctcatcagaaatgaaataacatggaaattctagaatgaaaacttcagtgtttaaaacaaagtcatcatgttgactgttgtcattggaagggtgagagtcagtgaacttgtagatagatcaatgtaaattatccagtgtgaagaaagagaattaaatatttattaaaaatgaatggagcttcagaaacttataggacagtattccaacatacatataattggaatcctgtatgaagagagcagatagctgtaaaaaatagttgaagaaataatgactatattttttctatatttggtgatggacctgaatttcaagaagctaagtagatcctaaacatgataaataccaaccaaatgtaggcatatcatggtcaaacagctgaaagccaaatacaaagagaaaagtttgaaagtattcatagagaaatgacacatgttatatgtggaggtactttaatttgactgatgactgaacactcatcagaaaccacagagattactttttcaaaatttctttaaaattatgtgaatgcttaggcaaaaaccatagcattttatattgggttataacatacatagatgtaatacatgcagctgtggaataaaa

SEQ ID NO: 1522 - DNA, 1073 bp, Homo sapiens
ttaatggcttgcttttctgcttcttatctttctcactcaataatactccatggaaatacgattccaggttactcaataaagatctaaataaatctttgtgatgaataccaagtgagaaatgggatagttatactataatttattcattaattttcatatcagtggtatttgtttccattattttcctaccacaaacattgctacaatagcatcctgttatacatgttcttgtgtagtaggaattttatttcttggaaaatggttctcaagaatacaattgctggattaaaaagcatctgctttttttttttttttaatctgtgggacagatttctagatgtagcgttcctggatcaaagggatatgtatttttaaatttaatagatattgccaaaatgtgttccagaaaggctgtagtacatttccaccaacaatatgtgagagtctctaaatgtctgcaggtataaattctttttaatttttgacacgatggttgctataaaatcttcattgtattttctgactagtgaattttgaacatccttttcataaatttattgggcatgtagatttgctttttggtgaattgtctattcctaagtcttgcttgagttctttgtctttttctaattaatttataaagtgttttgtagattatataattaattctcctctctctactcttctgttggtctgttgtctttataataatatatgactcataagttttaagcttatatatacaaatatatgttttataacttttagtttacagtcttggttaaaaaattgtctccatctatattttttacattcttcgagatttccataaaagctttgaaatactgcttttctaaaagaattgaagtatggcattagttgtggagttttcatcagttatatcaatttcctttatcacattgaggaaatttccttctattcctatttcactgagatgttcttgttgttgttttatcatgaatggatgttaaatgttgccagatactttttttccatctatggagataatcataaggtttttcacctttattcttttaatatggtaaattact

SEQ ID NO: 1523 - DNA, 1081 bp, Homo sapiens
tgttttgggcagtatggtcattttcgtgatattgattctttctatccatgagcatggaatgttctcccatctgcttgtatcctctctgagttcctggagcagtggtttgtagttctccttgaagaggcccttcacttcccttgttagctctattcctgaatattttattctccttgcggcaattctgaacgggagcttattaatgatttggctctctgcttgtctgaatatgtttaaaagaaaactgaacatgttttaaagaaagaaaataaaattcagatatccaacaatatacttttataatatccgtaatccaatccaaaattactttactttatggcatgcaaagaagcagcagaaaaatgtagctcattattctgtagcccagagaaaaatctgttcatagaaacagacatggaaataacagaggtgatggagatagcagtaaaggactttacatagctattgtaagtgtgcttgaggatttaaaggcaaatgtgaagaatgagaaaagagattttaaaaaggaccaaagtggaacttctaaaggtgagaaatatatgaaataaaaaatttacttgacaagcttgaaggcagatttgacactgcatcagaaaagatcagtgagcttgaagacaaaacaatagaaaccacctaaactgaagcacagaaagagaaataaaaaagctggagtatggagagaagcatatccagtgacctatggggcagtgtcagatggtttaacatacctgtaatggagtgatgggagtggcgaatttgggagtgggaggagtggcagaaaaactacaagcatgaattgttttattgtgcttcacttaattgttctttgcagatattctttttttcctttttcttttttttaaacaaattgatgatttgtgtcaactctgtgttgagcaagtctatcggggctatttttccaacagcatatatcacattttgataattgtcacaatattttaaaacttttcattattattacatctgttatagtaatatgtgatcggtgatctttcttattactctagggcaccatgagcaagcagtcatagatgatggc

SEQ ID NO: 1524 - DNA, 1040 bp, Homo sapiens
actttggaaaacagtttgactgtttttcaaatgtttatcacatcaataggatataggtaaatagttgtcatattcatccaatggaataccatttagccataaaaagaatctaactgctgagacacacagcaatatgggtgaatctcaaagacatgttgagtgaaagagccaaacacaggagcatatactgtatgatgtttgtatgaaattctagaacatgcaagactaatcagtagtgagaggaagcaaattgagaattgtttgagacttggtggaggaagtgtgtgtgttgattgcaaaagggataaggacatgttttggaaggattgacttggtttgtataccagtctttgttttcatttgtcataacccattgaatggtgtacctgaaaggatgcatttttgtatgtaaattatacgtcagtatatacttaaaaagaaaaataaaccagatcctacacttggctgaggggctgtgtaataacaaaaaataacattaccttataattgaaggacaatcttaactttgaaaacatatttagaaaaaagtttgtaaaaatacagaattaaaattagaagagaccagtgagtatttaaaatgtaatagacaactcaaattatgcttatgcagttttccagaaggatagatgagaatgtgttaacagattgctttggtactgagagtgattggaagaggtagagggcttagagagatacttttttttttttactttatgctttttcagtgccatttaaattttaaatcatgagtatattacatatcctctcaaattaaatgaaaatgtaacaaaaatcagacttcattttaaaataaaaattaaagctgttatattcatctgctgtcaaacaaggaagtttttacttaaaaaatttttaaagcatctgctataataaaaaggtgagaagaaagccattcttacatttcagctttacttgtagactagtgtattatctgtcaaaagcccttaaagcttgtttcttttgacccagcaattcaacctttgttaatgtgcccgaag

SEQ ID NO: 1525 - DNA, 1028 bp, Homo sapiens
atgtataccagtttatgtaaagcgaacgtttcacagtggcaaagtgggagagaagattggagccattatgtagacagccttacacaccaaatcaaaggttcttagttgttcaggaaataagacgtgtgcacaactccctccccgtaatacacactctcttagttacttctgtcagctactgcgttaagtgctgtcatatgggaaatggtaacagaaagttctttgcttatccaaaaagcccttcagatcttacttttcttttttccttagcatcttctacctgcaaaagctccttgacttttgagaattccttacagaactgctaaatgttttataagggggaaggaactcctgaaggcttttttcagtggggagtaacaaagcaaaaggatctgattgtaatccacaaattggtgggtttgggagaccacagccataacctaggaataatgtgagatcttgaactaaggggagtacacttatttttcacctgtcattcagacctagatagtcctgctggactttaacaataagagcatattaatggaaacaagtggttacacaggacaggaacagatgcagcatttattgatgctgcttttccttggccccttggctccagaattgggagcacagctactagtgaaattctctgtgtaggagggtgctgccacagttgagaagacagccaaactattgccacagtggtttgggaatagaatacacacacacttctattgttagcagtggcttactaatgcttccgtaaattaagcactctttcatgtaagggaaataggtaaaataatcatataatgaatctgtttcacttgaatgtcccctgatatttaatgctccttatttacaggaatgagggggatatgtctgaatcacgtgaggagtggaaagtggtggcagaagcactttttgtcattgaggaatactttaggataattcatccttttcctaatgtccttttttcctgtgtgctttcttcaagtatggccctacttttgtctgttaaggag

SEQ ID NO: 1526 - DNA, 1030 bp, Homo sapiens
acaaatgaagtaagccctgtaattgccccagctgtcttgatagagtttccaggacatgatacagggaggggacttgagacaaagcccagcgtgctccctgaggagatgaagctgtgagtgtggggaaactaaggtagctagaattcacaggacagtaccagagagaagagagctgcagagagaaataaccaagggaatgcactggagtgttcagcagagtgctgatcatcacatgcatgtgaagaacctacctgaggtgagggaaagaatcatcctagaggattaaaggcagcagtttctggcactcacacagggccacatagggttgcaggaacagtgcctgttaccagcaaccagactgtaaaaattcatattcaagtggcactgggtagagtgagtactcaggaaggtcctgcctcaatagtggggaataacctgctgctttggacctatgtagcaaataatgaaagcaagacctgaaaggatcagactgtttctaagtgatctaactacatccctgaacaaaactcaaggtttatataaaggaatataaaaataactaccacccaacaaagtaaaatctgtaatgtctagcatcttagtcaaagattaccatgcatgccaagaggcagtacaatgtgatcaataattatgaaaataaaaccaacttagaactgataaagatgttagaattagtagacaatgacagttaaaatatttatgataactatgttccctctattcaaaaagttgagacctagaagatataaaaacccaaatcaaatttctctaaacaaaaactgtaatgtttcagttgaaaaatataccagatgagattattagcatgttagacattgcagaagtaaaaattagtgaacttgaagacttagcaatgaaactatccaaaatgaaacaagagcaaaaaataagaatcttataaaaatagaaagttgtcagtgatgagctatgagacaacttacagtggcttaaaatacatgaacttagaatctccaaagaagagaacacaaga

SEQ ID NO: 1527 - DNA, 1494 bp, Homo sapiens
aattcagcaaagtttccagatacaaaattaatgtacacaaatcaatagctcttctatacaacaacagcaaccaagtggagaatcaaatcaagaactcagccgcttttacaataactgcaaaaaataaaaataaaacacttaggaatatacctaaccaaggaggcaaaagacctttacaaggaagactacaaaacatgctgagagaagtcatagatgacacaaacagatggaaacatcccatgctcatgaatgggtagaatgaatattgtgaaaatgaccatactgccaaaagcaatctacaaattcaatgcatttcctgtcaaaataccaccatcattcttcaccgaactagaaaaaacatcctaaaattcatatggaacaaaaaaagagcctacatagccaaggcaagactaagcaaaaagaacaaatctggaggcatcacacttcctgatttcagactatacctcaggccatagtcaccaaaacagcatgatacttgtataaaaataggcacacagaccaatggaacagaacagagaacccagaaataaagccaaatagttacagccaactgatcttcgacaaagcaaacaaacaaagtggggtaaagacacccttttcaacaaacggtgctgtgataattggctagccacatgtagaagaatgaaactggatcctcatctttcatcttacacgaaaatcaacataagatggattaaggactttcagacctgaaactataaaaattctagaagataacattggaaaaacccttctagacattggcttaggcaaggatttcatgaccaagaacccaaaagcaaatgcaacaaaaacaaagataaatagctgggacttaattaaaccaaagagcttttgcatggcaaaaggaagagtcagcagagtgaacagacaacccacagagtgggagaagaagatgtaaaagtggtccacaaacatgagaaaatgctcaacatcactaatgatcagggaaatgtaaatcaaaaccacattgcgacaccaccttacacctgcaagaatggccataatcaaaaaatcaaaaaacactatatgtgggcgtggatgcagtgatcagggaacacttctgcactgctagtgggaacgtaaacttacacaaccactatggaaaacagtgtggagattccttaaatcactaaaagtagaactaccatttgatccagcaatcccactagtgggtatctacccacaggaaaataagtcattatacaaaaacgattcgtgcacatgcatgtttatagcagcacagttcaccattgcaacccaaatgcgtggaaccaacccaaatgcccattaatcaatgagtggataaagaaactgtggtatatttatacgatggactactactcagctataaaaaggaaccaattaacagcatttgcagtgacctggatgagattggaaactattattctaggtgaagtaaatcaggaatggaaaaaccaagcatcgtat

SEQ ID NO: 1528 - DNA, 1065 bp, Homo sapiens
ttccagaaggaccattctcacctgtgttttgtttacatggaccactacagaaattagtttgaaggggcggcttttgaaaacctggacctctatgtcaacatgacagggtgaaactattccccctaagactgttcaacttgtagatacatcaactttgaaattattccattttatacctgaccaaaacatgttctgatatgtgtaggacagagacctggatgtgctttgatcgttaatgaggtggtcacatgagaaatgatacctgttactactgtattgtttttagagtcctgaagtctggaggctagacttcctgaaagcaagtcaagaatatagagcaccttgcaggagttcaagatggcctttggaaccaattatgtatttgtttcctcctacagtggagcagcattcaaatcaaatatttacatattgcttatcactttttctccattttaataatggaatgaactaaaataaacaagaacaaaagaatagtataattatatcagtaacaagaagactcaaaaaagaaacaggagtacctatccctatctgaattttcaagttccccattggatgaccagactggcaaccatttcaaatcccagtctatttcattgaaatttcttggttaagtttaattttctctgggggcatgatctcacaaagaatactcaagtctttttcttcttatggaatcatcgaaactgctatttatcataatcaccacttatgagcctgggtttgggattttgtgcatgtagttcagtctagtgttggtagcatgacagaaagtggggaaaatgccgcagtttgttgccttgaaacctaagagcaatccttggttttgttgctacattatttttccagaccaacacatctaccaagtaaattttattcactttaatttcataataaagttagtagagtcactcaacttacaactttatttatgtggcttggcaaaaatcactataaggcagctctaaatttgccttgataagctaaataaattacttttataacttactaaagcagaacaaacagtgaaactttctaaaatat

SEQ ID NO: 1529 - DNA, 1048 bp, Homo sapiens
tgttcttccttctacatttatttctcttcattttagaatcacactttttatgttaaaccagattattattattattattattcaaccagtattaagttgttaaaaccaagggaatggggccctaaccaaaaagaagtctcaactcagaaaaataagtccccagtcaggtggttcttactttcttgtgggttgcacattttgtatctctctaacatcagcgtattcctgactttaagcaggtgtttatatgtaaaataaaacctgggtatcgaagggaaatgcattctttttatggagtattgaccctgatcctctatgatgtcatatagagcaactcagggctatacttgctagattttaaccaagcagtttgaaatattaatcatcatcctctcatcttctccactctccattgccaaagtctttgtcaaaactccaaatttgttgataaaagattgtgtttgccattctcatttataatgcagtttctccttaagcctggagttttttgaatgagtgcatgagtaaatgagagaatgtgtgaacgaacatttatgaagtatctaacatgtgccaagcattgtgcctggcactttcaatcattagaatgttttatgtgattccacagcattttctgtatgagagtagctcacaacattttaaatgtttccaatatgaatcgtgttacaaaattcttaattttatatttcatataaattaaagaggaaaaagaaaaggtttataatatattttaaaacaatgtgttactgtataatacaactataattgtagttaataactaaaacctcttgaaaatgtcaaagaaatacttgatttctgatgcaactttgactaaaatatttactttagaaataaaaacgttcttattttgctatatcactttaattgcataattaaaaagcagtgttttatagaaatgctggttattttatattcaaaaagattttgtcacataattcatgggtaaaacttgcagttgtaaattgtgtctgctctggtatgggccctattaatagtcccatgctgt

SEQ ID NO: 1530 - DNA, 1069 bp, Homo sapiens
gtttgaggccagcctgggcaatatggcaagaacctgtctctacaaaaaatttaaaaattagtcaagcacagtggtgtgtgcctgtggtttcagctatttgggaggctgaggtgggaggatggcttgagcccaggagatcaaggctgcagtgagatgtgatcatgccattgcactccagcctgggcgacagagtaagactctgtctccgacaacaacaacaacaacaacaaaacaacaacaacaacaacaacatgcctcctggaacatactatttcagcttttattttctcatttttataaaacagattgaagacccggaagaaccagaccccaagaaaatcaaaggatcttctcctggaatacaagatactcttgaggcagaggatggtgcctttgagacggatgaagcccctgaggatgtaattcattttcatttcttaagtttaattgtgttgaataatgggaaagtaagaattgcagatttttagggaatcatcactttagggaatatttttgtcacttgcacttattagaattatgtttttttcagaagttcagcagaacttacatctaaccttcatctgctcttgcttcttctgtagcgaatcctttcatgcagaaaagctggttccataatgcgggaaggaagagacagagttgtaaaccttgcagtcgacaagacaggcaggattcttgcttgccatgtgagtaccatacttaggagaaaataacaaggactaggctgttccttccaaacactcattctttcatattcaatgtaaagatgactttttcttgactcatgttaataattcattatatggtactgtgtggacctataatctctagctttattagcataacaacaaaaatattaataattactattaggttggtggaaaagtaattgtggtttttgccatttaaaaagtaataattgcaattacttttgtaccagtattattattagcaaccatttattaaatgcttgctcttctaagcaatttaagagcatttaacttcttgttcagccttcagagcaatgctacaagtaggaaatggtatcctc

SEQ ID NO: 1531 - DNA, 1025 bp, Homo sapiens
ctagattacattctagcaaaggagaggaggaagatcctgaggttaatgttgaaatgagtctgcaagatgaaatccagcgggtgactaatataaaaacttctgccaaaatcaagtgagtaaaaataaattatctgaagttatagaaatagtaagctaccaagtattattggctttttcatgctatttgtaagctgtctgtatgaattatatatgtggagacggtggtcatgagacatctgtgtcacactctgctcctgttgtcctaatcatgggcccactttttgtcttgtatttggattattatagtaccctttttagctagtcatttactgtcttttcctgcagctaatttaagaaaaagaaaagtgtgtcccacgttcagaaaggatataaggtcacttataaagaatacatacacagaaccaaagtatgtatcagaaccaggatctgagcctagttttttttttttttttttttttttacttaaaagcctactcagctactactcaatactcggagcactcttttaattttttttgagatggagtcttgctctgttgcccaggctggagtgcagtggcatgatctcggctcagtgcaacctccatctctcaggttcaagcgattctcctgcctcaccctccgcagtaactgggattacagacttgtgccaccacactcagctaatttttgtatttttaatggagatggtgtttcgccatgttggccaggctggtctcaaactcctgacctcaagtgatccacccgcctcggcctcccaacatgctgggattacaggcgtgagccactgcacccagcctcagggcactcttacttgaaaaattgtttatagttattcaaactttatatagatagaggacattgtaaagccttttcctggaaaaagtaaaccttgtgagctaagatggtagctagaacatttatgattattttcttgtacaggtcctttgacttgattcattcacctcacggagagttaaaggctgtcttcctgctgcagaaca

SEQ ID NO: 1532 - DNA, 1150 bp, Homo sapiens
tacaaaggacatgaactcatcattttttatggctgcatggtattccatggtgtatatgtgccacgttttcttaatccagtctatcattgttgaatatttgggttgtttccaagtctttcctattgtgaataatgccacaataaacatacgtgtgcatgtgtctttatagcagcatgatttataatcctttgggtatatacccagtaatgggatggctgggtcaaatggtatttctagttctagatccctgaggaattgccacactgacttccacaatggttgaactagtttacagtcccaccaacagtgtaaaagtgttcctatttctccacatcctctccaggacctgttgtttcctgactttttaatgatcaccattctaactggtgtaagatggtatctcattgtggttttgatttgcatttctctgatggccagtgatgatgagcattttttcatgtgttttttggctgcataaatgtcttcttttgagaagtatctgttcatatcctttgcccgtattttgatggggttgtttgtgtttttcttgtaaatttgtttgagttcattgtagattctggatattagccctttgtcagatgagtagattgcaaaagttttctcccattctgtaggttgcctattgactctgatggtagtttcttttgctgtgcagaagctctttagtttaattagatcccatttgtcaattttggcttttgtcgccattgcttttggtgttttagacatgaagtccttgctcatgcctatgtcctgaatggtattgcctagattttcttctagggtttttatggttttaggtctaacatgtaagtctttaatccatcttgaattaatttttgtataaggtgtaagaaagggatccagtttcagctttctacatatggttagccagttttcccagcaccatttatttatttatttatttttatttatttattttttttttttttgagacggagtctcgctctgtcgcccaggccagactgcggactgcagtggcgcaatctcagctcactgcaagctccgcttcccgggttcacgccattctcctgcctcagcctcccgagtagctgggactacaggcgcccgccaccgcgcccggctaattttttgtatttttagtaga

SEQ ID NO: 1533 - DNA, 1033 bp, Homo sapiens
ggtagtcagatgttctacacgtctccagcctaagctgtccacttcggatttcttgctcttttcctttttgcttaagcatatcttggtatgttgcctggaagtttatgtgtgttactacagcagaacaaagaattatgtaatataaagcccaacttgtttttcttttccctaccagctgtactataacttagacaaaactcaaccattttctttcattatgtacagtggctattaaaaagaaaggatgtagaaaaatttttttcaggaaacagtggaaaactaatgcgtcatgatctgcttaacaggggactgtaaatagaagcaagtccagatcatggaaattgcttctttaaaatattttttttcaattttaaaaggaatacattcacatggtttaaaaaaacccctcaaactaaagaagaatacagaataagaagtaaaagttctaccctccaacctactaccccaactcctgaatcccactgccaagagaaacagtcatttgttgtgcatctttctagaagaattctatgcatattacagaggtgtcacaaatacccacatgctttcttcccttacaagctctgtgacttgatttttctctttactgtgctttaagcatctttgcatattagtaaacatatacacctcagttaaaaaaaatcaacagctgggtgtagtggtgcatacctgtagtcccagcaatttgggaggcagagaggcaggaagatcccctgagcccaggaattctaatctaccctgggcatcttggcaagaccctgtctcttaagaaaaaaactatcgcaagaacaaaaaaccaaacaccgcatattctcactcataggtgggaattgaacagtgagatcacatggacacaggaaggggaatatcacactctggcgactgttgtggggtggggggaggggggagggatagcatcgggggatatacctaatgctagatgacgagttagtgggtgcagcgcaccagcatggcacgtgtatacatatgtaactaacctgcacaatgtgca

SEQ ID NO: 1534 - DNA, 1062 bp, Homo sapiens
tgtaaacttgatatagtgaggatgttttcttttgtaattaaaagattaaagagattcagaatacttgtttgtaattggttttggaatgaaatttcacttggaaaataaaggcctagaatatgagactattcatcaatagaaaaccattgtagggagcagttaacaggtaaagctctatttaataagggcaagctgatggcagggaaaggaacagaccttaaaaaggactcacctgtgagaattggagacggtaaccctgtggtatcaaaatgcaggagaccagagatagctataaatctcttgcagtgttactgcctccgcatgaagtcataatccctagaatgagaatttatttttcatgatacaccgataatgcaagggacaatgatcaggaagtactgcacttagtctttctttctcatacctaaaatgtttttcattttatgcttttttagaatagagtgtacttacttcctctcttcctcacatagacttgaaaactcggcgactttaggatgcaactccaggttgacacattttcattagtttagaaaacccacgtgtcccactctcagaatcattattatagtagaggagatattcagggcaaggattccttgggaaacaacatccagattcaagggaagacatctgagtcacgacaacttaaaatccatcctggcctgccacaaagtgtttctgtaacattaagtacctcatatgcaattcttgaaaaggaaaattatgtcaatataacgtgaaatttgtgaaactcaaacatgatcatctaggcaaggagagctgaaatagaagaaataaaattatagcctctaatatgaaaggaaatacttttagtgtggttgctgctaagcagtagtttttttcaactgtatttaaaaaaaataaaaagaagcacttgattgctggtgatagtgcaagcttgtataaacccaatgaagtgaatttaacaataccagcatttactctttgttaagaactgaattgtgttcctgtcacatttatatgttgacatctttacccccagtacctcagaatgtgact

SEQ ID NO: 1535 - DNA, 1059 bp, Homo sapiens
cccttgacataaggggcacggatgaggaggcggcttacttctattctgacaatctttttaaaagtgtccttgtagaccacactggaagcaagtcctattaggcattcaatttgcccagactttccgtgttccaaagcctccaatgtctgcttgcctaagggccatgactaaagcggtggcctttttcttatctcatttgtccccttcctcctgctcctcctgatctctattataaaaaaccgaggttgtgaaatcaatagggttcctaagttttgctccgggcctaaggtggacttttgatgttttttctaatgtctgcagctaactgagtgataaacttatcctttaagattagttggccttcaatagagtccggtgacagagtggtatgcttcctcaatgcctcccttagtctctccagaaaggcagtaggattttcttcctttccctgtgtgatagtggacaccattgaataatgtataggcttcttcctacttttccttagtccttctagcatgcaagttagtaaatgtctgtggcaccaatctccatgtattctgcgtcccagtgagggtctacactgggctttttgattctgtaagtactttaagggttggccgagtgcaaacagctcccatgtttgagcagaccaattattaggcaattttcctaactctgcttccgcaagagtctccctatcaattactgcatacccattgtgttttttttttttccctcagtcacccgggaggaaccatctatcatcctgccttgaaggtagtttctgctggatctggtcagacctttgtatggtaatgaggatttaaatcccctgttaggaaatctgctaggttaatgtaatttgctgtggttaatgttaaatcacctttttctagcagaatagccccatactttaagatttttgagttagtaagctccctttttgctttttgacttaggatagttctgaactggtgaggtgtgctcacaatgaggtttcctctaaaggttatttttctgctttcttctgttagcaaagcagttgctgctacagattga

SEQ ID NO: 1536 - DNA, 1342 bp, Homo sapiens
aatttgcattttcctaatgattagtgatgttgagcatttttcaatatacctgtttgccttcttttaagaaatatctatttcttttaagatatgtcttctttggagaaatatccattcaggtcccttgcccatttttttttctttttatttactttcattgttttcttcaaaggcatgatcattaacttttgccatttttcaacccaattatttgttttctttttagagttatttgagttccttatatattttagatattaaccattttttctaatgtatgaaggtctaatgtaattattctgtcagtagatagccggttgtcccagcagcatttattgaagagactgtgccttccccattgtttgttcttagcacctttgtcgaaaattaagtgaccgtaaatgtatggatttatttctgagctctctattctattccattggtgtgtctgttattatgtcagtaccatgctgttttgattactagagatttgtagtagattttgaaatcaggtaatgtgatacctgaagctttgttcttttttatcaggactgctttggctatcagggtcttttgtggttccaagcaaattttaggattgtttttatatttctgtgaaaaatgtcattgtaatttggcaaggattgcattcaatctgtagatcaccttgggtagtatggacattttaacaatattttcctaaaccatgaacacaaaatgtttttgccttcttcaatctttgtcatcaatgttattcctacacatttttttttttttttttttttggtgactattgtagttgggattgttttcttgatttctttttcagatagttcattgttagaacatggaaatgctacatttttttattgttattgattttgtatcctgcaactttgctgaaattttttattagtgccaacatttttggtagagtctttagagttttcatgtcatctgcaaacagagacagtttaacttcttcctttccaatttgagggcctttttttttttaaggaaaatatttgtgtctttttattttcctttccttttgtttttggttgacgtgtaataattgtagatatttatgggatacagagtgatattttgatacatctgtgtaatgatcaaattagagtaattagcatatccatcacctcaaacacttattatttctttgttagaaaccttcaaaatcctttcttctagctttttgaaaatatacaataaattgttaactctaatcaccctacagtactatataaaactagaatttatctagtgttaccctatctagctgtaatttagtattcattaacctacctctctatcctcccctccc

SEQ ID NO: 1537 - DNA, 1084 bp, Homo sapiens
ctttatgtgaagtgtcatttttctcaggtttcttctaagattttccttttatcactagttttaagcagtttgattatggtgtatccccacgttctcatgttttctttcttgtgcttggagtctattgaattttttggatttatgagtttatagttttttttcagattcggaaatatttcagctatgatttcttcaaatattttgtaactccctgcttgccttctttcctttagcaactcccattacacattacacacatatttggctgcttgaagttgttccatggttcaatgatgctttgtttattttttcttggtcttttttttttttaatcttctgtgcttcgttttggatagtttctattgctatgtctccaagttcatttatctttccttctgtgatgtctaatcagatgtttatcccatccagtgtgtttttcatttcatacattttagttttcatctgttgaagttcatttttaaaaacatcttatgtatcttaatttgttaaatttttctctaaacttttgaacatatgggatgtgttcaaatatcataactgtgttatcataactgtgttactcttatttattaatgctataatctatgtcattttaaaagtatttttgataaattattttcttctcctcaatgtcagtttgatttttctgactctttgtatgcctggtcatttttttttttagatgcacaacattgtgatttttatcttgagagatgctgtatatttttgttttattaaaaatattcttgcactttttctggagcgtggtcaggttattgagagataattggatactttcgggtcatgcttttacgctttgtttggcaggaccagagcaacatttaccctagggttaattttttctcactactgagtcaaaatccttcatattattaacctcagccccatgaattatgaggttttactctctggatgatgaaaatagctactattcctggccctgtatgagacgtggggtagtttgctattatcatttgccatggtttattccctggtctcaggtagtttcctctcacatgcttcatcagttctcaacggaaac

SEQ ID NO: 1538 - DNA, 1028 bp, Homo sapiens
tataaaaatacaattatattatatatgataatatataattagatataattaaatatgtaatatattacatgtaatacataataaatatataaaatataaaatttaatataaaataaataataaatatataatatattacatataatatataagaatataattctattatatttagtaatatataattagataatatatgaatatgtaatatattctattatgtggaatatatataattctaatatatataatgtagttgtacagattctgattgcttctttatatgacaattttgtaataccatattgtatagagataatagaaacatggttcaactttcctttagtatgattattaaaatttgtgttttattgttgatagtttagggaaatttttttcaataccacattttgttgcttgcaacgtcatgtaaaattttacaattgtcaaatttgggaaaacttttatcaagattttacttgtaagagttgtaagatttagataacacttctatgactagtttctggctctgtacatttcaaatcttatttctcctccactattctcctaatttcagggctgggcattgtgggatgtattcacataacatcagaattcaacataggctcagcatcataggatgcctgtcatcccaacatgatgtcccttggtcacccagctcactggtgagcagttgatgatagaagtgtttatggaatccattaatacaaccaggtggttagcagtcagctctacacaaaagtgatgccaaccatgtaatacatttcattccactcaagctaagtatatcttcaacccaactctgatgccaccctacacaaagggaaatgtgacagaggggaaatcaggacagtattaactaattggtgttatatactttaatttcgtaaactttatgaaaacatacagccatgcctacatattgataaaggccctacaaggaacttgggagaggctcatggcattagcttcagggtcaactgcctctacatgtcatatcagtgtgc

SEQ ID NO: 1539 - DNA, 1028 bp, Homo sapiens
gcctcccaaagtgctaggattacaggtgtaagccactgtacctggccggtaccctgttttgatgagccagtggcagctcccggaactcaagttaaaagactctaaacttggtgttgtatgaaagttggtatgttctcccatccttaaatttatttttgagccctgctttcgatgaggaaagctctagaaagtcgagtctcagaggaaatggtaccaagctaagcagagattctgttgtaggagctggaggtatatagtagggggtggaattatttctggctcagttcatcttctggaaagttaccgtattgcccaatgtccggggcccaaagatgccggtgaattcagacttgattgaagccactgctatccaagaagctctgacataatgaatcaacatggcagcaatcagtataggatagtaacacatttttagtcctggcacaagtttattgttctgagttactatgccattgtaagcatttccctgcagtgagttaaccttggtcttgacctgaatcttcagcaaacttaagcttgtcccataaaagcactgaaagctgaagcctttttactgacagtgccctcgttccttgccatgagagggggactgacaggagcagccaggctggctaagtcagctggggctcagagcagagtgccagctcaaaagagaaatatttaataaaaaatggaggcagaagcccagttatacaaattaggctgtctgatggagacagggatagctctggctttttatttaaaaaaaaaattatttcctaagtactcattttaaaccctcctctgttttaatggaaggtgctgcccctttaacatatgtcctttaaagtaagagtacctccttcccagatacgtgcagagcccagccctacccagttctgaagccactctgacacagaccaatgttttttcaggggctcaggcctttatctcacaggtctgcaacctgttctgttgctacaggcaccatatctagtgctgtagtagacactaggagacaaaggcga

SEQ ID NO: 1540 - DNA, 1080 bp, Homo sapiens
caaggtcatgccactgcactccagcctgggcaacagagcaagattctgtctcaaaaacaaaacaaaacaaaatcaaaaagaaaaacgttaaactagtattttaaccaggaacaagaaaaataaagagctaaagctgacagtagtagtaaggccaaggaatacaagcatggacacagagcctggagattcccatgactggagtttccttactagttcttcccacaggcctgaccactggcatttcagaaccaacctgtttcccggacttgtgatgctctggcagcagagccaatcaatgtttgcatcattgttgctcctgctgcagtacaggcagctgttgttctattcctgaaattcagggttgcaacccttggtctcaaagtgaagagtcatgtccacaggtcaaggagctagggcttctaaaagaggacgtccctgctgttttttagaatttaactggactattgtgactactatctctgtaccttgacttctgtgctttgcttccttattaactccttatgacttagaccttagatttgcccatagattctgtttctgcctctgttccacttgagtgtcttctcttgagtttacctactgtcagattctggccaattctatgactcagatttttttctgggactctatttggacattttccttacactttctttcattgcccaatcctcttccaaagctgctattatcctgtcttaacattgacatggccagtcaagaggccaggatgggctggggagaagggataccaaaaaacagaagttccccacgtacggggcacttgccgttggggaagaagttgttctcaatttcacgtgagaatcctggtgagatgactgagaaatcagtgagaatgtcatgccggagtcacagtgctgtggtttctaacagcctctatactttggaagcaacctgtctaaagtggtatgtatttcttaagttataactatatgcaggaaaatggagggccaccagcttgagccaatctgtctctcttagtttgcttggacactgacctctccaaatgaggatttttatttattttgtaattcatgatat

SEQ ID NO: 1541 - DNA, 1039 bp, Homo sapiens
ggtttttagaatcaatctctctctttgtgcttaaccattattcctctttcttcttcctcttttcccactgaagtgtgctctgtagctctacagattatagcacaagactccatctcaaaaaataaaataaaaaagacttctcaagtgaagaggtagagcccatgcccagcccaagccaccagcactcagctatctcaggaagacagttgagtcctcactctggttaaagccactcaagctgacagtccatatccaataaagatctgtgtctctggaatctttgatcagaagaattctgatacaatgcaaataattggtccaatttgtcttctggttcccaaagaagatcaggtagaatgaccacttgaaattagccaaaaaacctcatctctaattacaggagcaatttggcatttagtgatctatcccagcattagttcacaaaagacccttctatgtgtgctgcacaataagatatgatgtaacaagcttggattccatagtacatagtattcaagaaggactacataaagcaagttgctgagaaggggttaacagcggtgcaggtattactttgaagcatatcattccaataattgatatgagcattagaggattctctctctttctctccctctagcctaactaattttcaaaaggcatcaacccttaagataccatcaattttcttgccctggtatttgaaatggggtacctccacagcttatcagtacaggttttctaaagtttccatggtattcaaccaccaagtaaaaatttaggagaatacagttgtcaaaaccattgtcaccctaataaaaatatatgctaaaaatacatgtgcttttgattcagatcttaaattgtgaagtacactggatctacataggtcaagctgagccacagcccagtgatttttgacctgtatataatctatatgattcaagttttcacagtcttttgtagataacttaagggctgcactttagcaatggtgaaaattggacttgagaatctacgtgtctgaaattcttcaaaa

SEQ ID NO: 1542 - DNA, 1058 bp, Homo sapiens
tatgaactggtgaatttcggctcagccttccaggctggcattctttgcccagtaccacttaactttattcatgatccattttaggtaaacagtccctgtgccatgccggtatgcttagctattccaaagacagatactctccaggatgggcagctcctatctcagtgtgttacctggaatgcttactgcccagagcagtgattctcaaactcaagagcctcgggttctggcaaggtgccttagggacacaggtgggagcaaggaggggcccagggagacagcaggtggtggcacattgagcctttacctctgcagctttgaattgacctatttttatatttgggtctctgtttaagatttcattgccgtggtagggagagttccaatgctaaactaaaaattcagctgtggggcagagagagcacgtgacggtgagggttcttcttcagagcctctttaactgggaggcctccttgctctcctctttgctctgctgagccagcaaggccctgcagccagcataccagcctctcagggctgtcttctgtgacctcaggcaggtaggagccaccagctgccctggagtcctgcttagaaagtgaggcttcctctgttgcctcaacatcaggagtctgccctggggctgggattgaggtgagggaaccccttcatgtttctccccaaggcttctctccgggagtagtctttgaatggtgggtacccagaggtgctccaatgtctgtatattaggacatctgaccctttccaggacacaccaggaccctgacaggcacgtgtgtcctgggcctgttgtcaccctttccatcccctcagtgttgtctcctagtgtcggaaccccaacccccagctgagttcagctcttctctgccctggttatctcaaatggaaaatgagaacagaggtttgctcagccagattccttccctgcagtcatctgcagataaatgagatactctctgtgaaagaaggaagctgagtcagtgcttcgctcacccctgaggaagatgctcacctgctcctctccccaaccccctccc

SEQ ID NO: 1543 - DNA, 1061 bp, Homo sapiens
agacttgtgacaacgatggcagggatcccatctcctcgcctggacactttctcctccccaccagaaatgagtaggttacagccgaggggagcagcagtgtctgaaaaagaccaccagcgttctgagctggaggttcttatagggcgtgggagaggcagcatctttccccaaaacctgcctgatggttggtgtggggccacttggctttccttattccacaaggctaatgatgaaaaaagggatccagaggcttcaccttaatcataaccattttagcttctgccctagaattactgaatttgaagtcctctttcctattacgttcttttttattttgttttatttttttttttttttctgagacatcttgttctgtcacccaggctggagtgcagtggcacaatcttggctcactgcagcctcaacctcctaggcccaagtgatcctcctgcctcagccttctgggtggcacaggtgcatgccaccaaacttggctagttttttaaattttttgtaggggggggggtctgactatgtttctccagctagtctctgactcctggggtcaaatgatcctcctgcctcagcctcccaaagtgctgggattataggtgtgagcaatggcacccatctttcccattatattctaaagtatctatactgtatccctaatttcaaaagtaatttatgaataatgtagtagaaaacttgaaagcacaggaaagcaaaaaggagaaaaataattccactacccagagacaaccgctgttaaagtactatgctgtgtattctttgtttttgtctaatcctgggctcactctttacattctgtctcggggttaagggggatttctcttcaaataattcccagtgattgaatgtgagagtgagagatggctgcaatcatctgcccagctcctttatttagggttgaggacccaggtccaggggaactgacctgtacctttccacacagtgggcagtgactgggggaggacacaggtcaggcttcctgatttagagggcatgcagtcttgctcccactctgggtcctgccttgt

SEQ ID NO: 1544 - DNA, 1032 bp, Homo sapiens
ggaaggaaggcatcttgtaggggctggtggcagcgtgggtgaatagattcagccctgggagctgaagataagggaaatctgcttgagtcagcactctccggagcaggtgggcgggagcctcccgtctccagccttgatagcagaggccttggcagcagagagcccggctcaggcctgttatatcgtagtcttgctgcagagattgtggcccttcccaggcccagcctctagagaaaggctcctttgttctccacatgccgtgggagtgaaggagtgctgcttgggtgccagctggacgcagccgcagcaggtggggatgtggttggggacggccatgtagaaatttgcaccctgtaagctccccagaccctgccttgacagcctgccctacctactcccaaatgagccctctgtgctggctgacccccttgctttccccaaatcaaggcataagacccccacttcttgtctttgcttccatcaagcccttcctggcatgtgcgtctcctacgagcttaacctgacttacacttcaagtcctgtctcattcattcagtctgtggatattccttaagtttcactgggtaccagacattgtcatagctcttgggagacacgggtgcatgagggaggcatagctctccttccaggggcttgctgcctccttctgaagtcttgcttggcctttccagccccttctcaattctgagaaccatgttctttcttgttattaaggttcagttccatggggtgtttttttttttccctaatctttctacttaacctaagttctaagttccctgaggacaaaaaaacatgacttaagcctctctgcagcttgtgtgggtgggcccaggccatggagtcaaagggtcaggaaaatgggctgggtgttcttggttgtcctggctgaccctcagctgggtgattttcgctggtgaggacagcactgtggcaggagagacggggattttggttctgccctcccacctctggattgagagcccagccctccaggcctctctgccccct

SEQ ID NO: 1545 - DNA, 1049 bp, Homo sapiens
ggcagccagatcttgattcaggatctgccatgcctcttcctgaccacagccccgctcctccatcctctgcaggtgaatgcccaggcccttaccagtgccttctctccacacaccaagccttggattggtctggcagaagctctggggacactgatgcgagcctgggctgggtcccccaaagggaccatccaggtgataacacagggtgagctggggaccttgcagagggagggggaggaggggatgagggagtgtgggatctgccctgctgggtgtatttgctgcaggacacagggttagtgagaggcagtgagggtgccttggaccctgccctgagtatagctcccttactactggtgggagggtggtaaagggaggggttaaaaaaagtcgttggaaagatgtactgaatattcataaatcatgtttatgtagcatttttaagacctagatattttgggtgcaagagaaacctctacgagagagagagtttcatgcgagaggtcgtaggatggctggagggaggccctaattaagcaacaggatgctggattctggtttttggccctgtctcttccctgctgtgtgactctcccttctgaggcttggattcttcacttgtaaagtgagagttaggggcagatgagccaggagcggtgaggacactttgtgctctgtaacttactaaggtggtaccttgggccgtctgacagccctcgagagagagtttgctcagccgtggagtgggaatgagaacagtgccctctgaccacccctcgggctgctgagtgggctgtggccacctttgcagtggatccagtactgtgcggatgtggttgagtgaccaaggagggctccagtttccttaaccctgtagacgtgtatctttccccatggactcttgggtgtctcacagttgggcagagattgcagggagagggcagctaaaccctaggcattgacaataccagggaagggcagagccagggggtcccactggcctgggtgtccaagcgccgaaggaaacaaggcagggagctgggcagcag

SEQ ID NO: 1546 - DNA, 1055 bp, Homo sapiens
aggctttagtggggaagcgagggctaggtagggaatgctgtgatcttttggcgtttggcagagttctgaataatcttattctcctgaagttagaagactgtgatgaagtgtatagttttgtttgggtattgaataaaaaagaatgggtacctgcaggaaggaaaggagctaagatgctatcccaaaggcctgatgctggttgcccagacaggggagcatgaacatgggggccttgttttggactcttagcctccagtgactagaataaaaagggcctaaaaaagctaaagtgagaggcaggagaagctcctgggttttcatagttctgaatcttttggttccacttgtgtggttgtgtgtacaagtcagagtgaacctcattcctgtggataagagccaccatttctcctactggtgaaattagaaggaggttgtatagggcttatgcgatagaaaagatcaagatggacctttgggtatagttggctttaggaggaggaattttaccaagacactgttttgctgtctctgtactacttcctgtgtgttaactccattctcagacaggccattctcccatggaggcaaggtgactgcatttccagccttccctggtaggttgaaatctagtggaaagagtctctgcctccctcctcaaagcccccataaagtttgtgtgtctcattggttttgattgggtaaagtgcttatgcctgggtccatgcaaagcacgtggcctgagttgtggagtgggaggttcccctcgccgagggcagttagaccaaagctaccaaaaaaaggaggagtggacgccggggaccaaaaaacagcaacatgtgtgctcctcaggaatgatgcttcccttaagattagcatccagactctagaaatccccactccagaatgacagctgtggcagtggaaccagaggatttgctgtcatcagttggcctctatggagagtgagacgctgtcctggagatagaaatgtggagttggtttccttcctttccttcttggggaaaatcaaaccatttacagttcatttccattgc

SEQ ID NO: 1547 - DNA, 1056 bp, Homo sapiens
aaattaagtttgcagatgtgagatgaaatatagccagtgaatatgcatactgattctgaatgaaaggaattaacttttcagtcaagaaacagtctgcatgcagtaaattgaatttttcctgcaactggaatgatttgtttaattcttctttgaacactgccctttctccagtaagaacactaatgatttgctaatattttttaaagaaatctgtttttttaattagttaagctcagacttcctcttattttttatcctagagaaaactgctaaaagggaatgatatatcagtactattcttctaaaacaactttttaaaaatgattatacaaagccaaatatgctcattatataaaatttagaagcaaaaagaaggaaataaaaattttccataattctaccagctagagataatggtgttagaatatattcctttctaatctgttttctatgcatgcacaaacacatatgtgagcacatatttataattttattctaaaaaataggacactgctgtacatattgttttacaatctaagtcatataattataatattctttaagcatatttatgagtaaaatattaaaacctatacaaaaaaataacagaatggcattttagctcattcattgatttttataaaatatttaacacactccctggtttgtagttagcgttcaataaatgctaaaaatttatcttcaccatcatcattaatttatttattaatcattattaaattattcattgatcattttttgaggatttactattgccagacactgtgctacaagctgggaatgctgacagtataagataaagagggaaatgatgggggatgggtcatgtaaagggagaactttcatttttacttcatatatatctaagcagttataataggttgatttttgtaatttaaaaaatgtaaaaatgcatacatgcactagtgcatgaatggcagccaggatgagtggaattggagaagcatcacacacacagtgacttttgtgtttgatcttgaagaatgagcgaaccaggcagggagtcggggagga

SEQ ID NO: 1548 - DNA, 1065 bp, Homo sapiens
ctgtcacggctttttgcccccctgccgcagcgactttttcgccgccgcggcgttttgcccccgccgccacggctttttgccgctgtcgccgccgctttttgcccccgccgccgcggctttttgctgccgcgactttttgccccggtcgccgccgctttttgtcaccgcgactttttgcccccgccaccgaggatttttgtccccgccgccacggctctgagggcaggagcggcagactcggctgccagctctactggcgtcctggcaagggcagcgccgaggggtgctcctggtccagctctcctggctcagggattctttgcctaggcgccggcgccccgggctccttgcctaggcccctgtggcctgcatagagtggcgctgcctgtggaggcggtgggagagaagaaggagggcggtggtgggggtgatgcggcggccacggagggtggcacaggggctgcggccagccgggcgctgcagcagtgcgggcagctccagaagctcatcgtcatcttcattggcagcctgtgcgggctgtgcaccaagtgcgctgtgtctaacgacctcacccagcaggagatacagaccctggaggtaaggggttcggggacccgggctgggctccaggagcggcccggacacctccttcgggggccccagttcactcctggccgagttgcatctttgagcccacgtcacccccttggaggcttcccctccctcctgcactcgctgatgcggcagccagaggacccaggaccagccctcaccttgggcaggatttgtggagcgggtgcgtggtgggaactgggatggaggctccagggtcccgtgggggtgggggtgggctgcgtgaggacatccccttaccccctgaatttccatctggtccagccctctcatcttgtaggtgaggaaaccgaaggcccgagggagaaatgacttgccaggaacccctgttaaggaaaattaacaaagtgtggttattaaagaagaactgagttgggagtcagacctggaggcccgcacccgcagttaagacattataccaccttgagtctg

SEQ ID NO: 1549 - DNA, 1072 bp, Homo sapiens
catagccaaattatgataccttagtgttcaataacattattcagggaagttgaattattgattattaacaccatgtagtaatatggcaaatgtttaggatatccacataagcatttaactagactaaaaactagaattttattgatttctgacattgagattaatgggactcataaatttaaactctacaaccatgggaaaaaatcagtcattagttttagttgattctctacttactgataatgtataaacaaaataacaataataactagaaattataatgtcagcaaaactaagataggagaatagatcaagcacgtttggcttaagtgattacatttgtaaaagttaattgtcattctttttcagtaagagtaataaaagccttgtggaaatttggcctgttaaaaattctcatttctagccttactgtaaatattaatatttgttaaatatttttctagtttgtttatttatttatttatttatttttgagatggagtcttgctctgtcacccaggctggagtgcagtagcgtgatctcggctcactgcaagctccgcctcccggtttcactccattctcctgcctcagtctcccaagtagctgggactacaggtgcctgccaccacgcccggctaattttttaccttgtgatccacccgcctcggcctcccaaagtgctgggattacaggtgtgagccaccacacccggcctagtttattgtattactaagtaaatcaaatagcataatgtttatatatttgtgttttttgtataaatgatagtattaaaatttaacaagctcttcagactgtatattttattaatatattagtttgtgtttatttccaagtttagcaatagccaatacttgtgaagaaatatcttaatatactaccatttctgatgaagttctaatattaaaattaaacattagtgagaacaaaacagaatcctgtaacttggaacaaattcatttctcacttatagactatttctaggtagaaaattccaaaacccccaaaacatttaagagaaaaatacagaaaatacatgtcaggttgctag

SEQ ID NO: 1550 - DNA, 1033 bp, Homo sapiens
accttagacgcagtgaacttgctttttatttcagagacttgtaggcaaaagagaatgtagccttgacccagatgagactttgcactttgtaactttgagttaatgctgaaatgagttaagactttaggagactgctggcaaggcatgactgtatcttgcaatgtgagaaggacatgagatttgtggggtcagggacagaataatacggtttttctctatgccccttccaaagctcatgtgaaagtacactccctaatgttagagtcggggcctaggtggaaaaagctttaatcataaaggagtgggagtggatccttcacaaatggcaaagcgccaagcccttaatgccatcctcctgatagtgagtgagttctcatgagatctagtagtttaaaaggctgtggaacctctttcctctctctgtcttgttccaacttctgccatatgaaacatgtcattgccgcttggatttccagtgtggttaggaggggcctgatcagtgtgggcctggtcagtggacctaggtcagtgaggactatttagtgggatagtggtcagcaggggtctgcttagagagggtctcattagtggggtctagtagtgggggttttggtgagtggggacctattggctgccagttgtttggtgtctggtcagtgcaaacctgggctgtggggcttgatcagtggagacctggtcagctggggcttagtgctggcctggtcagcatgggctggggcactggtgaccaggtcaaggggtgctattcagtggaggactgggcacatgagacttagtcagcagaccctggtgggcgtgtcctcatcagtgaggcccttgtcagtggggccctggtcagggcagccttgtcggtgggacctaatctgtattgtcctggtcagagaggacttggtcagtggtgacttttgtagcaccggtctacagggtgacctggtcagcggggatctcagcatttggtgccggttcagtggggtctactcactagggtcccagtcaggggcatctggtgaca

SEQ ID NO: 1551 - DNA, 1039 bp, Homo sapiens
agtagagagatatcgaaggctctgtggataaggaatagtctaacagtgagtaatgctgatgagactggttgatagaggaagatgatgatgttacctagtatttacagggcacaaggcagtcaaagtgccttgccatactttatctcatttaacctcagaattgtacaacacagggcaggatgatatccggcctttttttttttcttttttttaatattttattttgagataattatgcattcacatgcagttgtaagaaataatgcagagagattgcacatacctgttacttagattcctctgatggttaacatcttgcaaaactataacacagtatcataatcaggaccttgacattgatacagtcaaaattctaaacagttccatcactgcaaggatcactcatgttgtccttttctagtcctgcccctcccagttcactctttcatctcaccccactttagtccttagtccttaactgctggcaaccactaatctcttgtccatgtttataatattgtcatttcaagaatattataaaaacggaaccattagcatgtagctttttaggattggcctttttttttcactcagcacaagtgtctgaagactcattcaggttgttgtgcatatcaatagtgtatccctttttattgctgagcagtattctatggtatgaatgtatgatggttcggacatatgggttgtttcctattttaggctgttatgaatgaagctgctctgaacattcattatagatttttgtgtatacaggtattttttagaaaatagagataagccaggcatggtgatgtgtacctatagtcccagctactctggaggctgaggcaggagaatctcttgagcccaggggttcaagatgagcctgggcaacattttggagatcctgtctacaaaaaaaaaaagatggaggtagttttttgtaatggcaagattgtacattagaagatagaaaagtaggttttgcatcttactagggaagatacatgtatatttctctccctttggactgatcatt

SEQ ID NO: 1552 - DNA, 1059 bp, Homo sapiens
atgtgatcaattactggagtcacctgtgagggaattgcgagtccccatttactgaacaagaaatttgagtcaggcagatgatccgaggtgatggtgacccatgatggaatggggactgcagctcaggtctgtccaactctaaagcctgctggttcttttatcttggatcttatgtttgaccacactgtaatcaggagataccactaagatgggaagatgagctgccgagatgggtgtggggcctaggggtgaagtaagagtcaggaatgcctgaggtttttagtttgggagacagggagaacgatggtggcaatggcagaaatagacatatggaagccaggaagaggtgcagcagttggtgagagaatgagcattattttagataccctgagtttgagatgacagttccattcaagcaggaatttcattaggcaagtgacaatgccacccccatccgcctttcattaaatctgtcattttcttttcttctaaattgggaatgttgcagagaaactgtgaaatagatgacacccctcttacgtgccaaatacctgacctccttttgcagcttcttacctttcactttcagaaatattctcccttgaaggggcttcgtgtttgtgtgcaggaattaatagcattttctatccctgtgccctgtagggaaagagcacagctaaacaaggagagagaaaactggagttctgagctgccttgctccgagtttggttggaggccccttatgagggtcagctgggaatgaaagaaaagtcaagtcaagccctgccagcaccctccaccacctgacctcccatgggtgactgaagagccagctaatgaacaagttcttttaaaggcagcctggggagtgtgggagaggctgagttcagcaaaacatgactaggtggtgctggtgctgtttcggggtgtggaggcagaagtggttgatctccttaatttgaataactttggaatggggagatggtgctttgatagaggatttgattggagattttgattgtaggatatgttgaaagaggggatcaggctaaagccatt

SEQ ID NO: 1553 - DNA, 1040 bp, Homo sapiens
cttgcttcaactccatttattacattcatcatgacacaaacttttaccagctccatttctggctgcttgagatccaaactactctattggcctttggagctattcctcctcttgcacctttatctttgaccaagcctcagtgccaccttttgttccagtaaggacatcttcctccctaccccacagagaggccacgctcaaacattcctatctcttggtgtacgttttctcttactctgggatatcctctcctcacccttcatttactgaaatcctactcttcctcagaatactacttcagatttctgtttccttccctttctctctctctttctcctctcctgccttccctccacaaacttggaggcctactataatgctaggtgttgttctgggtcccacaagtacattagtcaactgaacagacaaatttattctttttttttatttttattttttgagatggagtctctccctgtcacccaggctggagtgcaatggtgtgatctcagctcactgtaacctctgcctcctgggttcaagcgattctcctgcctcaccctcccaagtagctagaattacaggtgtgtgccaccatgcctggctaattttttgtatctttagtagtgatggggttttaccatgttggccaggctagtctcaaactcctgacctcgtgatctgcctgcctcggcctcacaaagtgctgggattacaggtgtgagccactgtgctcgaccaaatttcttcttttcaagaagtttagactacctccagaagcctgactatagtaatgggattccccactgatcttcctgagctttcaacactttcattgtagtatttattcttaatttcatgtccttatagtatacaataacataatttctgtactatataattatatatcttgtgcaattatgtaatatgaattgttatgtgaaattttgaaatgtatatttggatcatgtcttcacaattagattgtaatttcttgagaacagggaacttcatacttcagaaatcctcagtttatccat

SEQ ID NO: 1554 - DNA, 1536 bp, Homo sapiens
taagtgatcctcccacctcatccttccaaagtgctggaattacaggtgtgagccaccacacccagcccatctatgtttttgatatcaaattgtagtttctcagtgtcagcttcatctgtactgttagaaatgcagtatctcaggtcctactccagtcctactataacaagatcccacaacatagcatgtgatttgtgtgcacattgacatttgggaaatgctgttccattcacaaaggtgcacactttttggcttggtctttaagcccctctacatctggaaagcctcaaacaggtttccaaccttatttcttgtttctgttccactatacccgagccaaacagaacattcactccagtgagtcactggcatcctgttacttgaggttatgtggtcagtctttccatctttgcatgtctaagtcatgcccatgtcttaagacccatctcaggtgctccctgttccaggaaactttcctgattctcccagaaggaagaaagttctccatcttctgaattcttacagcattttatttgttcttctcttagggcattcagcactatctaccttctgttatcttctctgagtggactgtataagtttgtttgatcttctggtgtcccacagtgcctagtataatatgtggtgtatagtagatgctcactaaatattgtggaataaataaatgaatgaatgaatttgaaattagtgccaagtgtatcttattttccccattttctatttttgtttattgccttaataatacaggacacaaattatcctttaaaagccagctctgtgcaatgaagatggggttaaggttgaggagaacatgacatctcaaaataagccagaatgaaaatttcctccagatgtttttttcctcagagtttcttatctttcccaagtcttattctctttatgataagagaatcatctgataaaaaaatgttattttagtatgtgataaatgaagacttaggggaggaatcatttgctttagaaaatgattcaaagttggatttattctgttggtaatctcatcctaaatttaaaatagcatttgatttttagtactgtatcatattctcagcttatggacgtatttgttacaaattaaggttcagatgtgttaatctccaagtcatcttgtgtccggaattggtgggttcttggtctcactgacttcaagaatgaggccgcggaccctcgcggtgagtgttacagctcttaaggtggtgtgtctggagtctgtcccttctgatgttcagatgtgttcggagtttcttccttctggtgggttcgtggtctcactggctcaggagtgaagctgcagaccttcacggtgagtgttacagctcttaaggcagcgcgtctggagttgttcgttcctcccggtgggcttgtggtctcgctgggctcaggagtgaagctgcagatctttgcagtgagtgttacagctcataaaagcagcatggacccaaaaagtgagcactagcaagatttattgcaaaaagcaaaagaacaaaccttcca

SEQ ID NO: 1555 - DNA, 1022 bp, Homo sapiens
acagttttatgtcccttaagtgtactttaatctagtattattttctttccatgaaactgatttgttgaagagaccaagccagatgtcctgcaaaatctcccatcttctagatttgtctggttgtttacttgtgttgttaagcttctgcccgtatcccatatttcctgtaaattggaagttggttctaaaggtccaagtggattcaagtgacttagaatgcataataagtgatgttagtacttcatgtagcatcagagcaggaaatacataacatctagttagtctaccgatagtgatgctaatattggcaccctctagaatagggctgtgatagtctgacccttccattttctagttacattttttaaatcacatgatagaaacctgattgtaaggtgttattcatggtgccagcctacaaatattgggtgccagttcagtcattcatctgataattttagtatcagttgataattttagacaagttactttttgtcatctctgtacctctcttacttgactataagatgcctctctgaggctgggcacagtggcttatgtctgtaatcccagcactttgggaggtggaggcaggtggatcacctgaggtcaggagtttgagaccagcctgaccaacatgctgaaaccctgtctctactaaaaatacagaaattagccaggcgtcgtggtgtattcctgtaatctcagctactcaggaggcttagggaggagaatcacttgaacctgggaggcagaggttgcagtgagccaagattgtgccattgcactccagcatgggtgacagagcaaaactccgactcaaaaaataaataaataaataaataaaataaaaatgcctctctgagaaaaggagaggattgttaatacagctcatcaggcaccatgcaaatagtagtttgtaaaaacgtattagtcttgggagaaaccacacacacgaatagtgtgcaagctgacaaggtgtcaatttgttattattaagaatcacagcaataattttttta

SEQ ID NO: 1556 - DNA, 1533 bp, Homo sapiens
gctgaggtgggaggatcaccagagcccaggaggttgagattgcagtgagccgtgatcatggcagtgcactcccgcctgggtggcagagtgagaccctgtctccaaaaaaaaaaaaaaaaaaaaaaaagtacagataatgaatttttaccaagtgaaccaccacagatcaagaaatagaacattactagactggggtatatttgtaggagtgacattgttggttttagaggtatatgaatgataaaacttagtattacatattgttgaacgttttcccaaagtggttgtaccatttagcagggatattctggttaccccacaaccttgctgatgcctgtcagttaaaaattattttgccattctagtaggggtgcagtaatgtatcagtgtgatttcattttgcattttcctggtattgagattgagtatcttttattgtcatttgtgtgtcctcttttgtgaagtgcctgttaaatctttttatccagttttcattgatatgcttgtttttctgttgatttgtaatacttttttccggatatgtgtcctttctacgatatatatgtattgcatttcccttttttcaatctgtagcttgccttttcgctcttttaatggtgcttattcatgaatggagattctctaacttttttttttctttttgagacaagatctcactctgttgcccaggctggagtgcagtggcacaatcacagctgaccgcaaccttgacctcccaaggctcaggtgatcctcctgcctcagcccccaggtagctgagacctacaggtgagcaccaccacactcagctcttttctatatttttagtagagatggggttttgccacattgcataggctggtctggaattcctaggctcaggtgagacatctgcctcggcctcccaaagtgttgggattacaggcatgagccactgcacccagcctgagattcttaattttaatgaaattatactttatcaatcttttcctttatggttactgctttttgtgtcctgtttaagaaatcaatgcctaacctaggagtatgaacacatttttctgtgttaaccttataacaattttattttagtttttgcatttctttttttttttttcagacagggcctcactctattgcccaggctagagtgccgtggcaggatctcagctcactgcaacctccacctcctggctcaagcgatcctcccacctcagcctcctgagtagctgcgactataggagtgtgccaccatgcctggcttaattttcatattttttgtagagatggggattcaacatgtttcccaggttggtctcaaactcttgggctcaagtaatcttcccacttaagcctcccagagtgtggggattacaggcatgagccaccccacccggctgtgattcactttttactacatggatgtgtctgcttgatccagcaccatttattgaaaagactatccttttccttctgcactgtttggcactttttttcttaaatcggatgactgcatggtcatccaatttatga

SEQ ID NO: 1557 - DNA, 1096 bp, Homo sapiens
cacactgcaacctccgcctcccaggttcaagcaattctcctgtgtcagcttcccaagtagctggaactacaggtgtgcaccaccatgcccagctaatttttgtatttttagtacagataggtttagtacaggcaggggtgatccgcctgccttggcctcccaaagtgctaggattacaggcataagccaccgtgcctggcccagcagtagttattcttatatcagacaaaacaaactttaaagaaattgcagttaaaaaagacaaagagcggcattatataatgataaaaggccttgtccaacaggaaaatatcacaatcctaaacatatatgcacctaacactggagctcccaaatttataaaaccatcactaatagacctaagaaatgagatagacagtaacacaataatagtgggggacttcaatatgtcactgacagcactagacaggccaatgagacagaaagtcaacaaagaaacaatggatttaaactataccctggaacacatggacttaacacatatatacagaacattccatccaacaactgcagaatatacattctattcaacagtgcatggaactttctccaagatagaccacatggtaggccacaaaacaagccgcaataaatttaagaaaattgaaattttatcaagcactctctcagaccacagtggaataaaactggaaatcaactccaaaaggagctttcaaaaccatgcaaatacatggaaattaacctgctcctgaatgatcatgaaatcgagatggaaattaaaaaaatcttcaaattgaacaaaaatagtgatacaacctatcaaaacttctggaatacagcaaagtcagtgctaaaagggaagttcatattcctaaacacctacatcaaaaagtctaaaagagcacaaacagacaatcaaaggtcacacttcaaggaactagagaaacaagaacaaaccaaacccaaaccagcagaagaaaggaaataaccaagatcagagcagaactaaatgaaactgaaacaaacaaacaaaaaatacaaaagataaatgaaatgaaaacctggttctttgaaaagataaataaagctgccg

SEQ ID NO: 1558 - DNA, 1022 bp, Homo sapiens
aagatacaaccctcctagcttaaatcaggaagaattagatactctgaacagaccaataacaagcaacaagattgaaatgctaatttaaacattaccaacaaaaaaagtccaggaccggatggattcacagcagaatgtaaccaggcattcaaagaattggtaccaatcctattgacactatttcataggattgagaaagagggaaccctccctaaatcattctacgaagccagcatcaccctaataccaaaaccagaaaaggacataaccaaaaaagaaaactgcagaccaatatccttgatgaacatcgatactaaaatccttaacaaaatactagctaaccgaatccaacaacatatcaaaaatataatccaccatgatcaagtgggtttcataccagggatgcagggaggtttaacatacgcaagtcaataaatgtggtacaccacataaacaaaattaaaaacaaaaatcaccatgatcatctcaatagatgcagaaaaagcatttgacaaaatccagcatccccttatgattaaaactctcagcaaaatcagcatacaagggacatatctcaatgtaataaaagccatctatgacaaacccacagccaacgtaataatgactgggggaaaagttaaaagcatttcctctgagaactgaaacaagacaaggatgcccactcacaccactcctcttcaacatagttctggaagtcctagccagagcaagacaagagaaagaaataaaggggatccaaattgttatagaggaagtcaaactgtcactatttgctgatgatattattgtttacttagaaaatcctagagtcctccagaaagctcctagaactgataaaacaattcagcaaaatttctggatacaaaattaatgcatgcgaatcagtagctcttctatacaccaacagcgaccaagctgagaatcaaatcaagaactcaaccccttttacaacagctgcaaaaaataaaataaaataaaatacttaggaatatacctaacca

SEQ ID NO: 1559 - DNA, 1083 bp, Homo sapiens
ttgtcttcttcaggataaagtctacactctttaaaatggcacaaaagactgtgtccgtcatatcagtctcattcttcgcctagtacttaaatccaccaacaccaaaccacttctaattctgtgcaagcaccctatggtttcttgcctcaaggcttttgcttgtgacaaaaactctgtccttccacttcatcatccattgactgattagtgcttattcccctttgaagacgaagttcaggggtcatcacgaataatcctttgcagattttctttccatccactctattcatttgggatagaagtgccccctttgagttgccttacactttgtacacagctctgttactgccttttactatactctagcacctgtggtttactcatctttgaagtcccaacttctagtacttggaacatagcaggtacctaattaatgtttattaatgaatgaatggataagtccaaagctttccatgatttctcccctgcagcctcatcttaccaccaccacaagccctccaaaccacatgatctagccatactgaatgattccagtgtgccaagtgcacattgcttttgtacacctctgcttttgtatattgtttcttctgtttgaaatgccttttcccaccaggcgcggtggctcacacgtataatcccagcactttgggaggccgaggtgggtggattacctgaggtaaggagtttgagaccaccctggccagcatggcgaaaccccatctctactaaaaatacaaaaattagccgggcatggtgacacacgcctgtaatcccagctacttgggaggctaaggcaggagaatcgcttgagcccaggagacggaggttgcagtgagccgagatcatgccactgcactccagcctggctgacagagcaagactctgtctcaaagaaaaaaaaaaagaatttctggattttccaggcatggtggctcatgcctgtaatctcagcactttgggaggccgaagtgggtggatcacgaggtcaggagattgagaccagcctggctaacgtggtgaaaacccgtctctactaaaaatatgaaaaattagcgtatgttt

SEQ ID NO: 1560 - DNA, 1026 bp, Homo sapiens
atgtgaaagaagccagacacaaaaggtcacatactgtataattccatttacatgaaatgtccagaataggcaaatccaggcagaaagtagattagtggtttccaggaaccagggagagggaaactgggaagtgagtgttaatgagtatgaggtttcctattggagtgagaaacacgtactggaattagacagtggtgatggttgcacaactctgaatatactaaaatcatagaattgtaagatttcagaagatgagctgtatagcgtgttaatcgtttgaataaagctttgtttttaaaagaagacaaagaaataaaccaaagctgagagaagtaactaacccaatcctttatcttttataagagtttttttaatgataaagactcagttaaagtccaatttgattcagttcagttaaagctaaatggcttagaatgaatcatgtctaaatattctgtataccaatcctacctatattatagggccctaaaagaagggtcagacgaagtatgctctaagtggctctcagtactgaatattcacagattaagttttacaaaaaggtaaagttttgtgataaccctcagataaaacagaaacatatgacctatgttttgacataaaacatacgtatttggcctgttctgaaagatatgtataattttcacacaccacattctaccaaggaaaatgtcaaccggagccaaccaacttggtgttccactcatcaactcttttatgccaacatggtgtttctgcccttgtctcagaagccaactactgatacctgcttcagaaaactgactatgaattccacaaagtcctgcttttttcttttggattgtacaatcaacaaacaagtcacccttctaaaactctgtttctgaaattttaacataattcctgaagttccagagtctcttaaatgctaaaatattaacaataccattccattttttcccctaacactcagaagcatactgatacccatcctgtacacagccttttcttgcctgataacaagag

SEQ ID NO: 1561 - DNA, 1033 bp, Homo sapiens
caggctggtctcaaactcctgacctcaggtgatccgcctgcctcagcctcctaaagtgctggaattacaggcgtgagccgccacgcccggccgaaaatacatattttcatacattcattcttgatcattgtgcaactaacagctagaacatggcctggcacacacgatgcactcataaatggatgagtggattaacaaacaaatgaataagggggtcagctatcaataagcataataaaattgtggctaagagtttaggcactagaaccagtacacttatgtccaaatcccagctccagcacttgccatcaattactagtgttttcctagcttcagtgtctctctacaaacaaagacaatggttgtaccaacctcaaaagactattaggagaactgaataagataataaggtcaagtgcattctcagaacttggcacactgtaagcacttacaaatattaattggtatcatgatctttgttgctattttttaaatttagtattggaatggaaattatcattagaatggaaactttgcaaagtccacagaaagaaagatagggcttctcttcgaacaacgggagaagagaagaaaacaagttttaatgaggagacagaaaggagataatttaaaattatgaaaagaattattctaattcaagtgctacattctctgtgaaagtggttgctctcttttctgtgttggtaatcatacctttcagaatgttcagggttgtccaacttttgtaatttcattctttttgataaagtttctttattaattgcatgaccaaatgtaagctaatatttacaactttgaaaagtttacacacgcacacgcgcgtgcacaaattagaaaaaatgttctatcccagtatttaagatttatttatttatttgagacagagtctcgctttgtcgcccaggctggagtgcagtggctcgatctcggcttactgcaacctctgccctctgggttcaagcgcttctcctccctcagcctcctgagtaactgggattacaggcgtgtgcca

SEQ ID NO: 1562 - DNA, 1050 bp, Homo sapiens
tctcaagatctcagagtgtactgtccttatctctatgaaagcacttgccatgctatattgtatttaatgcaatgtctgtacttccaaatagactataactatctaagggcaggaactaaagtatctcatttaatgtgatcatgtgtttgttgcatggataaatgaaataagaagggattcctggctgcttcttccaggcctgtctccctttgtctttaagccctggaggagtcgaccctactttggcaaaaaacatttagcatgtcccctcctctctctgagtactgctacctatcctatatcccaaggctaccaaatgcatattttaaactttacagaaaataccatgttatttagtattttaccatttttagggtagggcataggaatgtgttcctatctctcctgtattttttctaaccaatgttttctctaatttttaaaccctttcatggaggcgttttgtattttaggtgctgtcattcagagtccacaggatggatgaatggatatgaaaatgaacaaacgtgtgacacaacactgcatgatttacctgcaatgactttctgatcaagcctgaagtgggttgtagcctctttatttactttttatttgacacatagcagagagagatttaaactatctcttattggccttttccctgcgtcttagcttggtttctgtcagtgtttcccagcatcgagaaataaggactaatctgtcatattagatctaaactctaaaagaaaaggactttgggccttatatctgccacccattctttcaatggaggtgacacccctcatttctatatttccagtcatctctcaatgaaaaggaacatgcaggctggctggcctttggagagcaccccacacagttttgaggagctctgcagctctgcttgccctttctgcatcacagcagatccaaaaggtgaaaaaaaaaaaacaaaaaaaggagggggttggggtgttagcatccttgcttcccccaccagcaccacacagctgttcggaggtttagtcttcaaaagcctcttgattacca

SEQ ID NO: 1563 - DNA, 1028 bp, Homo sapiens
tagtagaggcggggtttctccgtgttggtcaggctggtctcgaactcctgacctcaggtgatccgcccgcctcggcctcccaaagtgcagaggttacaggcatgagccactgcgcccagcctacaggacttctctttttaaaagccagaagatattcacagggaggcagaggaggacctggcatttgcttggaaattggtggttttttcttccctgcctcagggctggatcttggcagaaatcttcactttgttaagtcccagatggacatgaaaataccagacagggcacatcgggctacacatgccacctgacaattatttcgtatccaaaagtagatcaccagcttgtgattcttccaggccccctgcctctttcccttctcctccttaaaagctttccctgagagtaaacaatgccaaagaggaatgtactacgtatgcactcccctctgtggaggtaaaataggagaaggatgtcaaaaccatcaaccagaacaatgtcttaaaaaaatctgtggggaaaaaatttatacttagctgctgctattcactgagcatttctgcctagtccacagacaaaggtggctgcatctgctgtcaggagcaaggtcaaccctcaggccaaattcagcccatccgacatgttttatttagcccacacaagtttgacccacttctaactgctcttgggaaatgagtgggtctgccaacactgggcctgccttcccacacagcgggagaacttgccccctttacacaggacagggatgtgttttccagtttgccacagtccctgccactccctgtccttgtcgtccctcattcacttaattatgatacttgcctggcatcttgcaggtttctgatgctgttaccccagtatagaccaagtgcagacagaatttcatttctgctttattaaggcacagtcttgagaaacccattggcttcacacacaattaattaatttgtggcaacaagctactatattggcttgcatgtcactttcacctctctgggcattag

SEQ ID NO: 1564 - DNA, 1051 bp, Homo sapiens
tttgcttattgactgaagttccttataaattctaggtattagatctttgttggatgcattgttagtgaatattttctcccatccggtaggttatctatttaccctgttgattgtttattttgctatgcagaaggtctttagtttaattaggtcccatttgtcaatttttggttttgttgcaattgcttttgggcacttatccaaaaactttttgccaaggctgatgttggtaaaagtatcttctaggttttcttctaagatttttatattttgaggtcttacatttaaatttttaattatcttgagttaatttttgtatacagtgaaaggtaagggtctagtttcattcttctgtatatggctagccagttatcccagcacaatttattgaatagggagtcctttccccattgcttgtttttgtcagctttgttgaagatcagatggtgtagatgtgcagctttattttgatgccttgtaaatggaattgtgctctcagtttcatttttggattgttcatttctggtgcatagaactgcaaatttttttgtatattgatcttgtaccctacaatttggtgaattcatttattaattcttaaatttttgtgtggattccttagaattttctatatacaagataaagtcatctacaaatagaaatagtgttacttattcctttccagctggggtgcttttatttctttttcttgcctaattgccctcattagaacatcaggtactatgttgactagaagtggtgagagcggacatacttgttttattcctcatcttacaggaaatgttttcaagtctttcccctttaagtatggggttagctgtgggtttttcatagataccctttatcaggttgaagaagttctcttctttcctagtttgttcattgttttttaacaagataagatgctagattttctcaaatgctttttctgcatttattgagatgatcatatggagtttgtcctttgtcctttgtaatatggtgcattacatttattgtttcatatgttgaatcaaccttgcattcctag

SEQ ID NO: 1565 - DNA, 1032 bp, Homo sapiens
gcagtggtgtgatctcagcttactgcaacctccggtccccaggttcaaacgattctcctgcttcagcctcccgagtagctgggattacaggcacctgcaaccctacccggctaatttttgtatttttagttgagatggggtttcagcatcttggccagtctgatcttgaactcctgacctcatgatccacctgccttggcctcgcaaagtactgggattacaggcgtgaacccccatacccagcctcatcttgcctttcttaaaggttcacagatcagaactgcacataatcgatacactggatgcaaatatgtaatgaatgaatgatttttcacattacaaaattaatttgtgcgtattatagaaagttcagtaaatacataaaagcaaaatgaccaaaatgttaacagtgtttattaactataatctgtactcaaattatatccattttggtggatgaccttaaacatatgtatgtgtgtataacattaaataataggtaataccgtaagactgtttcacctaattttttccacttaacagtgtttaatgaatattttctcatatcattaaactctatacagcattgttttaatggctgcatagtattccattgtatgaatatgccagaaagattattatttaaccatgaagattgtgctagcattgtgttctcaaggatggtaatgctaactgaaccagcatggtaaggtgttggttggcataccataatccctataaatacatccccagtgttgtatattggcagtctttacattgctgtttgcaaattcctgaaattgcagaatgcttttggccagtttcttatagttgatacagttgttagtctttttctcaggttacagtaatgtttacagtgcctcttgtaaagtcaaaggatttgtaccaatctgagtggcaattttttccatgtttcttcaactagtccttttaagattctcacctgcctttagcaaagaacatatatttaacacctgtggttgcagttatgtaaaaaataccgatgtcaca

SEQ ID NO: 1566 - DNA, 1052 bp, Homo sapiens
ggactcatccatattagaagcaatgattatttctaacatattcacaaaattaattaaattatataacttgtataaattaagggaaatgaatgagagaaaactcaacaatgtattgcagtggttttttgagtagcctctttgggagactttactgctgccagatcaatctttataaaatgccattttcatcaaagcattcctctctgaaaaacttttaaatctgggactacaagataagatccagtctgacttatttttccgtcagtcagccattgttattgagagcttgttatttgtaaggcgttgtgctctacatatggaaaataaggaagatgcaaatgtctgtcattctctagttcacaaacattcttctgtagccacaccagcttctttactatccttagtggtccttagaacagaatactgccttatgctggacctgttctgtatgtaagacctccataagaactgtctctttaaagaacctttctctgatccttatagcctgtatcacattaatctcttctgtcctttaaactcctaaagcacttagtaacataatggttttagcacatattacatgtatgtgtgtttacctaatttaccttaaatatatttattaaatacctcttaccatattaaatatatatttaatatatattaaatatatttccatataacataagtatatgtttcatatatttatattaaagtaggcaaacatatttggataattaaatatttttatataatttcatatatttttttgagacagagtcttgttctgttgcccaggctggagtgcaatggcacgatcttggctcactgcaacctccatctcctgggttcaagcgatcttcccaccttatcctcctgagtagctggggctacaggcatgtgccaccacgcctggctaatttttgtattttcttagtagagatggggttttgccatgttgttccggctggtcacaaactccagggctcaagcaatccactcacttcagcttcccaaagtgctgggattacaggcatgagccacaacacccagcc

SEQ ID NO: 1567 - DNA, 1077 bp, Homo sapiens
actaggttttaaataggttacatgacttgaccaatgtcacataacttgtacaggtgatatctgaaccaaagagtctgaggccagaacctgcacttctaaccaccttactatatagcctcaaaaattcagacataatctgatcagcatcatcagttaattagtatatgcaatgttagcctcaaaataaaaatgatgatttaagattcatggttgttgcagtgctgctcattttggttatttttaatgccttaatactttcggtaaaatacttccagggactaattaatgttttccttttttcctctttgacagcattggattcaaaggctaacaatttgtccagtctgtccaagaaataccgccaggatgcgaagtacttgaacatgcattccacttatgccaaacttgcagcagtagctgtatttttcatcatgttaatagtgtatgtccgattctggtggctgtgaaataatgaatacagtcactggtaagggagaacctagaacccagtaggtgtatattttcaggaaactgagctcacagagatgtgtattagaatccaagtggaacttctgcctctaaagaccttgcaagaaaagagatgtcctgaaaatgaaaggttgcacctcatttaatgaagcttaaccctatgtagaaagtctctttcgggggcagaggctttctctgggtgccaagccatatatattagggaatagtagattgttatttcgttttttccctcccagtgcattttaaaaacagcactggctggggcattctcattctctgatggagccatcaatgagatttaacttagtcaacctgtgctagcaacattctgaaattccttcaaagaaggcagtcctttgggaaggtgtttttttttttgtttttttgtttttttgttttttttgactctaatcaacattccttttgttggtgacatttgtgattttcagtaatctgagtttttgatggccttttaaacaagactccagtatgtgaaagttaattgctgtgctccacagatcttgtctattggcccctgtagaaagttaacctttgttgttttccttt

SEQ ID NO: 1568 - DNA, 1035 bp, Homo sapiens
tgctacacacatttcttctctgtactacagaacttgtctggcatgtgccccaaattcagagtcaactgagcggcaggtcttagtcacagcatctgtgactcctgctttcccacctttagaacattctataggagaggctgatggtgagttggagtgtgtttctatgttcttttttcctttgaagagataggatcagttgaaagctgaccccacccacagactttttttgctatctcttttaattaattaaggagtggctgaaattttcctctttgttgacttatgcattggtgggaactttaaaattcatctagtctttctgtccatcccatgctggatctgatgtttacaacattctagtcaagaggtaccatattttctctcttcttgaacatctcttgtggtagacagctctccacagcagtttattccatctttggccagctctaattcttagaaagatcttcttatattcagctgtaatccatctcctcatgacttgtcctcattgacatctactcagaaatttgtctcagagtcctgagacctgtgcaggtgatagggacccaaagagatgcttgtctgtagactttactgagctgacacccagctctccataaaaggagtcaaacccagtgaggagcatgtctggggtgattgctcaggtaaagcatcttagccctacttgtttcatacctccctgcacaggtgggcactggtgggagaataacatttatcaagcagtgtttccctaacctctcttatgataagaatagctcaggtgttctcatggagattctgattcagtgcatctggaatgtcatctgggaatttgtgtgttcaagaaatagccaggtgattcttacattaggaaagttttagaatcactgcagagtgaatctgggaaatcaaagtgtttgtttttgtttgtttgttttttgagagtattagagacaggttgctttggctagatcctgtggtcatttttcccccttggaaatgcctcctacttgctggcctcacttagtacagaga

SEQ ID NO: 1569 - DNA, 1020 bp, Homo sapiens
cctggggaatgaggacatttctgatcaaccaaggaaggaaacctatttgaaggattacaatattttctttttttttttttaatggtgtagttcagaaaacgccagttagactgagactcagatttatgtccactggtctttgtttctgtgccccatcccaaaattaatttatgaataggaaaagagatttgatagtgaagttctttctcactctgaagtctaatactgtttctgggaggaagtaagagaattattatgcccacactgtgcactgagaggcttaaccagcaggtgaagctgttgattaaaaacataggttgatgagtattctcatttttctcctttgaagctttcagaaattttctgctttgtcctggtctaaatttattttggcccagcccttgtctccaccctacatttcaaaccagtagccttccctctatggctcaacatttctctgcctcagttttttccattttaaagatgaagatattgtttggaaggaccagtaaatacaattaatataaaaattgcttctgtagaatcaaacaacctccaacatttctgttggaaatttatagtttatagagtattcttacacaatgatctcctttaatcctcacaaacttggtggaaatggagcctcacaggggctaggtgacttgtatacattgtttacccctacataataagtgacagagctggtacttaaacttgtggcttgatttttctttttttttttgagttggagttttgctcttgttgcccaggctggagtgcaatggcgcaatctcggctcaccgcaacctccacctcccgggttcaagtgattctcctgcctcagcctcccgagtagctggaattacaggcatgcaccacaacgcctggctaattttttgtagttttagtagagacggggtttctctatgttgggcaggctggtctcgtactcctgacctcaggtgatccgcccgcctcagcctcccaaagtgctgggattacaggtgagccaccgtgcct

SEQ ID NO: 1570 - DNA, 1021 bp, Homo sapiens
cttttcacattcttgatgatatacttttcagcccaaatgtttttaacttgatggaatacaatttattttttcttttgttgcttgtgctttcagtcatatttgtgaaaactttgcttatcccacattacaaagatttactatttctaagtgatttataattttaccacctacctttaggtctctgatccattttgagttaatttttatgtgcgaggagggagtctaacttgattcttttacatgtggatatttagttgtcccaggaccatttgttgaattaagtgcccagaacaagtacatctatatatagagaaagtagattagtggttgtcagagactgtaagaagtggggaattggagagtgactgcccataggtacaggcatgctttttggcattatgaaaatattctggaattaggtagtggtgatggttgcagaacttttggaatatggtaaaagacactgaaatatatgcttaaaaatggtgatttttgtgatatatgaattatactatagaactaataataacagtaataaagcaaggtgtctttccacatctccatgccttgtattttcattaaaaaaaaaaaaaaaaaagcatttcagggccaggctcagtggtttactcttgtaatcccagcacttttggaggcctaggtgggaggatcacttgaggccagaagttcaaaaccagcctgagcaacatagcaagaccttgtctccatgaaaaataaaaaattagccagaaatggtgatgtgtgcctagagttccaactacttggaaagctgaggcaagaggatcgcttgagcctaggagttcaaggttgcagtgatctataatcaccactgcactccagcctgggtgacagaacaagaccctgtctcaaaaaaaaaaaaaaaaaaaaaaaaaaggcatctcactttaatagtaagaggccagaatatgatgctggcagcatgttgtgaggaaatgtattagatgaaagaagttaaattccagttctccttttttcagaaatg

SEQ ID NO: 1571 - DNA, 1048 bp, Homo sapiens
aggagatctggcttgctgggctccatttgaactttgagtacaacagagacatgagcccttcgggacacatgcctgaggtagtgacaatccaactttggaagagtggaagccctagtttcaaattcaagcatgctttgagtataaattaagtttacctctttttgcacagcaacatggccaatctttcctaagctgctcagcttacaagaaaaggaatcatactgctaagaattcaaacttcagcagtcataggtaagtaaggaagtcttataaacctattctagccacctaaccagaaactcgaaatttagcaggttctttcagtttcaggacagttgtgttcactagatcagaggcattgagacatgaagaacagacccttaaaaagggaaagtgttcccttcagtttgaggacatcactggaacattagggaagtgggaacacagctgctcactctacagtgtgggttgcctttgtgtctggaatgtgtctgacgtcctgatccctgtgcacatttcagggagccttgggaggaccccgaatcactgatggaattgcgcagtgcatggagatggctcagcaggatgagggtaaatgcaggggcaagtccaggccatactgagagacaatgagtggcgctgatgaggacaaagataaaatcaaaagtttgtgcttcatcttcaaaaactcaagctgataacaaacttggcctgatgagaaataataagtatttttctatttacatgagaatttaatctcaaaacagaaatcagaaaaatatgaagtccagggcataaaacctaaaactattgctcatatttattctttctaaatagagcaaagtgtaaaatcttctccataagacatacattgtggttataaaaaggcaaaagtcttagtgagaatcattggtattccatagaagagtgaattaaacacagccaagggaagacccacgtctcatacttctcttgtatattccaaagttccagggaaattccaggtgatagaggttatttcccatactgttaaagcaaggtttcagac

SEQ ID NO: 1572 - DNA, 1630 bp, Homo sapiens
cgtgacccattctggtcattcttccagcatcacaaaaaccaaaaaatggaaatatggccaaatacgtgattagctgtccctcatcttcaggtttcttatctgttacttatagataatagcattaccttaaggattatgatgaagatacaatgtccaaatataaacacagttttgagcaaaatgccttgtacgaattggtcaatgaataattactaaatatgtgaatatttctggattgtatggatcctatgaataattactgaataattattgtgattgcttttattggcagtgctgaaaactcatccctttgtgacctcaagtaacccatgacactttgtgaacctgcagttttttcatttagaaacttgacagattttcattctgacacagaatgtcaggtctcccagaccctagaaaatacattgacttaaagcctttgatacatctcaaagcagtatccttacagtgtcactggaagatggtgcgggctgcagagagggatgctttcaaatgggattaaccagtcctccttccttcacttccacatgaatgctgggcagcccagggtcaacccactgcaccctcaactcaggcaagtccagcagccaatcttaggagacctgggctacagaacagtctctcaagttccaggctcacaaaacctaggtggggatgaaagctgagaaagcgaagaggtggttcaggggatcactctttcctacttgttcctctcacctcaaactcaccttctactgcacagcaacactgaggatcgccaaccaaccctgaccataaccttgatcttgccatgttctgttagtggaatgcaacccaaaatcaatggtgttaggtcatctcaacaaaatatatatcaaaccatattccataagaactgctcgtggccctgttcttttcagtatatgggaaaacaaaatggaaacaacaaaatagcatcaggtttacaaaacttcccaagatagatggtcacacatgttttcaggagacctctatataaatgactttgatcacttgataccttgaaaagaggtcttggggcactagaatgacatctataagtgacaagtataaaatgtagtgctcagtgacattaaaaaacaaatcaacccacatagaggaagagctttggacgtagggatgtcaaactggtctagaatgtaatgaaaacccaagaaggtgccccagtaagaaagaagaaatcaatctaacaatgggatgcagcagcaagaatactgagacaggaaagaaaatattttaaaaaaatgaattattcattcactttctagtggatacagaaaaaactgcagaagacccggaggatatcagggcaggctaaaagtttgatatcttacacctgtggaaaagccttaagctctgttttaactgagagcaggtggggtgacttcatgactaccattaagaaaatataacctgttgggaaactgtttctgccttgatgatgttgtacagacaagagataaacagtgaggaatatgcttagatgtattgggaaagacacgggtctgtggcattgtcacaagggtacacgaatactgagagtgaatgctgaaggaatgatccccattggtggtgaccctcaggtgagagt

SEQ ID NO: 1573 - DNA, 1032 bp, Homo sapiens
gtaaaaagataatgtagctgcatttctttagttattttgaaccccaaatatttcctcatctttttgttgttgtcatggatggtggtgacatggacttgtttatagaagacaggtcagctgtctggctcaatgatctacattctgaagttgtctgaaaatgtcttcatgattaaattcagcctaaacgttttgccaggaacactgcagagacaatgctgtgagtttccaacctcagcccatctgcgggcagagaaggtctagtttgtccatcaccattatgatatcaggactggttacttggttaaggaggggtctaggagatctgtcccttttagagacaccttacttacaatgaagtacttgggaaagtggttttcaagagtataaatatcctgtattctaatgatcatcctctaaacattttatcatttattaatcctccctgcctgtgtctattattatattcatatctctacactgcaaatttggggtctcaatttttactgtgcctttgtttttactagtgtctgctgttgcaaaaagaagacattctctgcctgagttttaatttttgtccaaagttaattttaatctatacaattaaaaccttttgcctatcactctggacttttggattgttttttacattcagtgttataatatttgattatggtgattggttttggtgggtactgatgcgaattaataaaaacatttcatttccatgtttattttctaatctcttccacattgtaggctatgtttaccatatgtagcagaatgtatttacatttcttggttctagtcatttgtattcttcgtgagtgtgagtgtgtgtgtgtgtgtgtctgtgtgtgtgtctgtgtgtgcctttggcatttaggaagggttgtatagctcatgttaaatattgcactaaaaatgtttttgatggttttcctccctttggactagacacacttctaatatttggtttatagttttaaattataactttcagcatcaaatatttccatacaacagtcaattaca

SEQ ID NO: 1574 - DNA, 1047 bp, Homo sapiens
cgtcccccaacagctgttgaaggctggattctctttgtaactggagtccatgaggaagccaccgaagaagacatacacgacaaattcgcagaatatggggaaattaaaaacattcatctcaacctcgacaggcgaacaggatatctgaaggtatcctaagtgacactttattgcctcctttctttcataagccttaggtagcattcgtagttctgtgtttgctgtggttggccaagagcaaagttgaaataaaatgacattggaaatctatgttttgtcagacacgccaaagagacagaaacggagatgatgtatatatacagtagagatatatgatgtacattcattgtttaaagtgtgtagatttttctgagtttagatttgaggaaaaagatactcagtgatacttggggaaataggagggttttcatatctgtcttttcactttccccaggggtatactctagttgaatatgaaacatacaaggaagcccaggctgctatggagggactcaatggccaggatttgatgggacagcccatcagcgttgactggtgttttgttcggggtccaccaaaaggcaagaggaggtaaaatgaagagggcaaatactgtctgggtgaagggaatacgaacgaaacagaatgaggacttagtattatgtccctctaatggactcctctccctgcttctttttccctagaggtggccgaagacgcagcagaagtccagaccggagacgtcgctgacaggtcctctgttgtccaggtgttctcttcaagattccatttgaccatgcagccttggacaaataggactggggtggaacttgctgtgtttatatttaatctcttaccgtatatgcgtagtatttgagttgcgaataaatgttccatttttgttttctacatttaatgttactttcctgtcctaaaattgaaagttctaaagcatagcaaggctgtatggatcattgtgaagatacttctagggactgaactctatgtatttcttttttttcttttttttgagatagagtcttgctg

SEQ ID NO: 1575 - DNA, 1031 bp, Homo sapiens
aatgcaaaccacagaaagatcaggggttgcttggggatgggaaggggcaggagggaaggattacaaaggcacacgaggaaacatttcggggtgatgagtatcttccttactttgctttaatgttttcacaaaatcgcctgtgaactttttcaagattacatttctaaggttaataattataaaattatttacccttaattgactcatctttatacactctaatgttattttttgagatataattcatatactacgtaattcaccctgttaaagtgtacagctaagtggttttagtatattcacagagttatacaactattaccactgatttagaactttttcatcatccccaaaagaatccccatacacattagtagtcactacatatttctccacagttctctcagccctaggcaaccaccaatctattttctgtctctatggatttgcctatataggatatttgttataaatgaaatcatgcaatatgtgaacctttgtgactgactcttttctaattagaatactgttttcaaggttcatccatgctgtagcatgtatcagtacttcatttttatggctggataatactacatggtatggatattccacattttatttattcatcagttgatggacatttaggttgtttacactttttgcctgttatggataataatgctgctgtaaatatttttgtacaagtttttgtgtgatcatatgtttttaattttcttggttatataactaggagtgaaattgctgcgtcatatggtaactgttcaactcattgaggaacagaccataatattttaagaagtgctgatgtgatcatggttagtgtagagcaagttctgccaaatggaagatattgtccatcctgttttttattttgaatgtgtaaatagttcaccccaaatattttcagaaatactgtcattatacttacattcagagtaatgttttcagtttttcaaggcaaaacttgtcaaactgtctctgtgattctttagactgttttagcaaaactc

SEQ ID NO: 1576 - DNA, 1081 bp, Homo sapiens
tcacttgaggtcaggagtttgagaccagcctggccaacatggtgaaaccccatctctactgcaaatataaaaaattagcggggcgtggtgtcacatgcctgtaatcccagcttctcgggaggctgaggcaggagaatggcttgaacccaggaggtggaggttgcagtgagccgagatcgtgccactgcaccccagcctgggcaacagagcaagactccatctcaaaaaggaaaaaaagaaaaaaaaagaaagaaatgtctggatttctaaaacaccaaaaaaaaaaaaaaaatgttgggggaaagagaagacatatgaatggctggtaaatattacatgacaagatgtttagccttattggtatattcgtatcagggaaagcaaactaaaaccacaatgacagggtgatgtcagcgaaaatggtagagtaggacttctgtgggtcatccctctgcagaaacaccaaacaccttgacagaaaagtcagaatttagcttatcaaaactctggaaaggtaatcaaaggtttacagcagccaagcaaatacttcgccagaagaaagggcactgaaacaaggtaagagatctttgtggcattttagcttaccctagcctcacctcccttcctggtatggctgcagtcttgaagatgacagcctgtgttccccatgctggtgcctgattccagagagtggacactcttcctcctgagggattctgtgttctgttttgtcctttctccaaaggactgccaccaggggcaaaaaacaaacaaaaaaaccaaaaaaagaaaaaaaaaaaaacagggcaaacaataagatattgaaagcctgagaggaaaagctgtagagtgagtttttgtagaggaataggagctttgaaaagctattgtggatgagaaactagaaagccaagtgcacagctcagggcagtatgtgtgctcagaaaagacctgagaaagccattagctttcacctctggcttgtctttaggttcaacacaaacaggaagtgaatattaaggtagatttataaaggccctgggtaagttttgaaggagtgccccaacagctaatcagtaga

SEQ ID NO: 1577 - DNA, 1051 bp, Homo sapiens
ttttctttttggtttatttgttttgaaatgtggtcttgccttgctcaggctaatcttgaactcgttggttcaagcgatccttccacttcagcttcctgagtagctggaattacaggcacacaccactgtacccatctatttttgtttttattttttacacattataaatgttcagtttttttaaaaaaaattacgaagcatgtgaagaatctagaaaatatgcttcattcacaagaaaaaagaaatgaacagaaactaccccgaggaagcactaatactagaattactagacaaaaactttaaatcagctgtcttaagtatactcaaagagctaaaggacaccatggacaaagaagtaaaggaattcaagataataatgtctcaacaaatagagaatatcaataaagagaaatttttaaaagtaggcaaagagaaattttggagctgaaggttacaataattgaaatgaaaattcactaggggagctcaacaaaagatatgagcagacagaagaatcagcaaacttggagataggtccactgaaattatatagtttgaagagcacacatttaaaagactgaagaaaaatgaacagagtccaggagatgtgtgggataccaacatatatatcatggtaaggagagggagaaaggtgcagaaaacatgtttaagaagtaattgccaaaaccatttcaaatttgacaagacatgaatatacacatcaagaagctcagctaacacccaagaaggataaactcaaagacatccatacaagacacattataattaaaatttccgaagccagagataaagagagaatcttggaagcagcaagagagaagcaacttgtaaaatataagggatcttaaataagatgaatttctgttgatttcttagcggaaaccatggaggctagaaggcagtgggataacatatttaaagtgatgaaagacagacctgccaaccaagaattctaaatctggcaaaactatccttcaggaattaagaagaaatcatgacatacccagataaacaatagctgagggggctt

SEQ ID NO: 1578 - DNA, 1026 bp, Homo sapiens
taaacagttaatgcattttattaacaagtaggttttctaatgttttctagtgtttttattcaagctgctttgtcaaggagcactaaaacctcttttttaggggtcggggttggggaaacagggtctcactttgtttcccaggctagaatgcagtagcaagatcatgtttcactacaacctcaaactcggtgggctcaagcaatcctcccacttcagcctatgaactaggtaggactacaagcatgtgccaccacgcctggctaatttttcaatttttggtagagactaggttgcccaagctggagtctcttaacacattattggagttgatttgttccttatctttttttttttttttttttaaggatttttacatttattcaaaagaggatgagtctctttatcaagttttggtgtcaggattatattagtttcataaaaggaactgggaaaacttgctgtattcttatgcttggaaatagtttacataacacaggaattacctattatttaaaggtttaatgcaagttacctgtaattccatctggacctggtatctttttgggaactagatctattacagtcttttcagttacttctgtggttgatagtatagggtagtgttttatttatctctgtattctcagcttctagtgcagtatcggttttatagtggctactaaacatgtttgttttgaataagtggataattgtaattatgtctctaaaaagtataaaaaacatatgaattaatagtaataatagctaagagtatgtgccagaaactagtctaaatgctttacaggtattcatttgtttaatcctcactataaccatgtgaagaaggtattgtgaatatctccattttactggagaaactgaggcacagagagtttaggtaaattgtctaagagtataaaggcagttaaatattggagccaggatagtgcaaaaatcaaagtatttgtatttggtgagatttttaactgttcacttatactaaaaaattttagtataactatttag

SEQ ID NO: 1579 - DNA, 1086 bp, Homo sapiens
ccaggtgctattccctcaagaaatgcaaattaaatatgtcggtcttaataaatcaggagggaagcatagtctgtgtctgttttaaatgacaacaacaacaaaacagctttggggtttaagaagtggaagacacatttttatttttttgagacacaatctcactctttcgcccaggctggagtgcagtggcgtgatctcaggtcactgcaacctcccgctcctgggttcaagcgattctcttgcctcagcctcccaagtagctgggattacaggcacgtgccaccatgcccagctaatttttgtatttttagtagagatggggttttgccatgttgcccaggctggtctcgaactcctgatgtcaagtgatcaccgacctcagcatcccaaagtgctgggattacaggcattagccaccacgcccaggtgagaagacagattttaagagaaggagcagggctggtatctgaataggtatttggatgttaggggaaaaccctttttggcctctgtggtagagcgatcggaaggtaaaagtgctgtttacaagaataatccattggagatctggggattggggacgacttataggatagagtcctcttgttgagaatttcccgaatgaatctcatgtaggttctgtcacagtaagatggaggaaaactttgatggggtaagtatcacaagtggctgtcctatagggggaaatcctagcctgcagtaatgtcagtgtctcagtattcagccagcgagccactgagctgctccaggggtttaaaatagaatgcatagaatacaatgtatacagctggtgatgctttccaggatcaaaatagagcccttgtctgatcccattgacattgtaaggtttcgatctctcatacctgccacagacaagtacattgtaggcattcaacttttaaggttttatacatgcaaactttatgttttcctgccacactacacttggtgtccacagaagtgtagtttgtatgttgcctcttcttcctctttcaaccagaacacttagatctgtgatcataggatgtaagcctgtgattctttactttttctaataagaaatac

SEQ ID NO: 1580 - DNA, 1120 bp, Homo sapiens
tttgtaggcttatttgaaggcaattgtatcaacacattttgaaagccaagacacaagtattttaagtttctgtttaaccaagtctcgagataagcagagtaaataaactctttagaagcaagactcagttggtatgtacaaagtgggattgctttgtatatattccgcttagtttgagtcagagctagtaatctgatgctcttaaatgtcttcataaacttgggcagtgatgtttcctttctgtgattatgtgtcacagatttttatatgtggactataattagtatagtacaatggctgaaacttttcctatagttggatatatcttctgagacttccagtgattgtataatgttgagtagctccagaagattatttgaatagtaaaaacaaaagacatctctacctatgtgagtttattatttagttagaaacacagaactaactatttaaaacaggtagagaaagattaagatgaatgtgatgtagtggagaaagctttggagactttggagtcagaactcaaatggctctaggtcccaaatccagactctcattttgattctcagaacaattctgtggaaagagaagatacaataggcaatatccctttttacagataggtaaacagaaatagcatctcaaaacctcatttgcactgggtgaggtggctcacgcctgtaatcccagcactttgggaggctgaggcgggtggatcacttgaggtcaggagtttgagaccagcctggccaacatggtgaaaccccgtctctaccaaaaacacaaaaattagccaggcatggtggtgcatgcctgtaatcccagctacttgggagactgaggcaggagaattgcttgaacccgggaggtggaggttgcagtgagctgagatcatgccactgcactccagcctgggcaacagagtgagactccgtctcaaaaaaaaaaaaaaaaattcatttgcccaatgacaaatagctggtatgttgcagagccagaatttgaatccaggtctttttgcctccatggctagtccttttatctccatgggatacagtctaaaatccttagtttgaggttcaagactatcactaataagagtcttactcatctacttcag

SEQ ID NO: 1581 - DNA, 1064 bp, Homo sapiens
ttgcaaataagggactggaatagggaatgtttaggtggtcctgtttctggaaaggggaggagtcaatctcagaatgaatggggtggtgaaggatgtaagaggtgctttgcatatagtagatcattactgagtgtaaggttttagagtgagaaggatctgtattaattgctgtgacaggcaacaattaactctttttttttttttttttcctttgagaaagtgtctcaccctgtcacccaggctggagtacagtggcatgatcatggctcactgcaacctcaaccagcctgggctcaggtgatcctcatgccttagcttgggactacagttgtgtgccaccatgcctaatttttgtatttttttgtatagttggggttttgccatgttgcccagactggcctcaaactcctaggctcaaaggatctgcctgccttggcctcccaaagtgctgggattacaggcgtgagccaccgcaccaggccctatttaacttccttgtgtctgtttcctgatgagtaaccaggggatgtttgcttgcaagggttgtataaggttagaatcatcatgtgtaaagcatctgattcatcatacaggttttttaacaaatttattaagagcctgccatatgtgtgggacttttcgttggggtaaagaagacaaagtccttacatatatatagagcttacattctgatgccattcaaaacagtggtagttattgatttgaggaatgcctaaataaaatggagttaagaatgccaaggccaggcaaaaacctgaatcagttgcttgttatgcaaaaacgttatgacaaattattggaagtttcactttttgttatctaatagggaaaacgctaatctatattggtaaatggttttcagaggactcagctacatgtgtttaatatactcaatctggccatcagcctttgctgaggagccgcattgttcaaaacccatctccaaaccaagtctgtctcttgccttttcttcctctaatagctgaaaatctgttgcttcaacttgtagccctctgttcatgcagtgagtagaggtagttgta

SEQ ID NO: 1582 - DNA, 1937 bp, Homo sapiens
ttggagtcaccatagtggaaatttatgacctggtatccagttcagatacctggagcttcttgactggggggagattggatcccttggggaagagtgaagccttcaatgctgccacaagtgtgatccgcccgcctcagcctcccaaagtgctgggattacaggcgtgagccaccatgcccggcctcttttttatatttaaaaaatatcattttatatattatcagggcaaaagagaaaaaccgtatgattaccttgtcatacacagtaaaagcatttggcaaaattgaaaacttttttcatgatttataaaaacaaaccccagaaaatgctcagcatgatgagaacagaaggcaacacttccaaccccattaagggcagatttgaagaacccacaggtaacattatattaaatggcataagattgaatgcttttctattaaatcagagaaaaaagtagaatacctgttgttactcttttaattcagcattatactagagctctaagtcaatgcaataaagtaagaaaaattaataaagtattgaaagaattgaagctgtctttattcacagataatgactgtgtttgttaacaatgctagaaatctacaaaaatctaccagaactaatcagtgagtttggtagtgttgcagaatgtaagctctcaatgtaagtggtcttttgtatttctgtatattagcaatgagcatttggaaaatgaaataagaatacaatttcatttaaagtaacatctaaatacatgttgtgcttataaataaattcaacagactgggcaccatggctcacacttgtaatctcagcactttgggaagccgaggtgggcagatcatgaggtcaggagatggagaccatcacgcctaacacagtgaaaccccatctctactaaaaatacaaaaaattagctaggcgtggtggcatgtgcctgtagtccagctacttgggaggctgaggcaggaggatcacttgaacctgggaggcagaggttacagtgagccgagatcgcatcactgcactccagcctgggtaacagagcaagactctgtctcaaaaaaaaaaaaaaaaaaaaaaaaaggaaagtcaacaaaatttatgtaaggccagtacaccaaaaactacaaaaaattgctttgagaaattatgaaagaactaaattagtggggagataaaccttgtcatggatcagaagagttgttatgtttaaagagtcagttcttcgtaaattgatctccagatccaatgcaattctaataaaaattccaagcggcattttggtagaaattttcaagctgattctaccatttatatggtaatgtcaatgatcaagaataataaaatagcaatattataaaagaataatggtgaatgaattcactacctatttccagaattactctacatacagctatgaaaatcaagattatgtgttttgttgaaaaaaaaatagaatatatatcagtggaagagaagagagaatccagaaatagatactcacatgtatgtctaattgattcttaggacatatatatatgtatacacacccacacacacacacacaaacgtgtgtgtgtgtgtgtgtgtgtatatatatatattcaccgttttgaagattatcatctccaaatagggaatatatatatatatatatatatatatatatatatatatatatatacacacacacacacacatatatatattgcagtctgataagataaacagcacaatgaaacaatttctcaaaagacttgaatagatacttcagaaaagaagatacatgaatggtcaattagcataggaaaagatgctccactgtttagtcatcagggagatcaatcagtgcaacaatgagataccagtacatatccataagaatggctaaaattaaaaaggctgaaaatagcacatgttggtgaggatat

SEQ ID NO: 1583 - DNA, 1042 bp, Homo sapiens
gagggggcgccaggcagggcctgtcccgcctggggagactgcgcccgggataataggagcgcttggcctctgagactacccggcagaagggacgtccccaaatgacactcggaggccgcctccctgggctccggtgctcggtgccgggaggagcggcacggctttctaccccgcctcaggtgcgccagcacgttttctgggcagcatctgtgtgttaggcgaccggagaggtgggttccttatagggaataagaaaactgaaactgacttccaactgcaggcagaaggaagcagtggtcattgctggaggttaaaactgttctgaccgggcgcagtggctcacgcctgtattcccagcactttgggaggctgaggcgagcagatcacgaagtcaggagatcaagaccatcctggccaacaaggtgaaaccccggctctactaaaaatacaaaaattagctgggcgtggtggcgcgcgccggaagtcccagctacttgggaggatgaggcagaagaatcgcttgaacccgggaggcggaggttgcggtgagccgagatcgcgccattgcactccagcctggcgactcagcgatactccgtccccctctccccgccccaagaaaaatctgttcagtggggagcgacaaggaaggagctttcagcccgactggggtcgcagggaagaattcaagatggcgtgtttaggagctctagctccttgacaaattagtaaaatgttagtcttaggagaagaacgaaaaggctctcctaggctaagaaacagcatacacagtgagaaacctcagaagaaataaaattcaaggaagatagcaacaacgaaaacatcagaaggaacactaaaggtataaaaagggcaaagacagccctagggttgggagggatccaggttttttatgaaaattagtggaatccctaagatacttacctttgtattataagtatttgcatgtctccttctagaaacgtttatcactctgtgttacacagaccagcagtgttggcgtcaactgggagcctgttag

SEQ ID NO: 1584 - DNA, 1423 bp, Homo sapiens
agcagccagcaacttgagggataactaccgatttgcacatacgaatgttgagtctctggtgaacgagtatgatgataacggagatggtatcatcttatttcgtccttcacatctcactaacaagttggaggacaagactgtggcatatacagtgcaaaaaatgaccagtggcaaaattaaaaagtttatccaggaaaacatttttggtatctgccctcacatgacagaagacaataaagatttgatacagggcaaggacttacttattgcttactatgatgtggactatgaaaagaatgctaaaggttccaactactggagaaacagggtaatgatggtggcaaagaaattcctggatgctgggcacaaactcaactttgctgtagctagccgcaaaacctttagccatgaactttctgattttggcttggagagcactgctggagagattcctgttgttgctatcagaactgctaaaggagagaagtttgtcatgcaggaggatttctcgcgtgatgggaatgctctggagaggttcctgcaggattactttgatggcaatctgaagagatacctgaagtctgaacctatcccagagagcaatgatgggcctgtgaaggtagtggtagcagagaattttgatgaaatagtgaataatgaaaataaagatgtgctgattgaattttatgccccttggtgtggtcactgtaagaacctggagcccaagtataaagaacttggcgagaagctcagcaaagacctgaatatcgtcatagccaagatggatgccacagccaatgatgtgccttctccatatgaagtcagagttttcctaccatatacttctctccagccaacaagaagctaaatccaaagaaatatgaaggtggccatgaattaagtgattttattagctatctacaacgagaagctacaaacccccctgtaattcaagaagaaaaacccaagaagaagaaggcacaggaggatctctaaagcagtaggcaaacaccactttgtaaaaggactcttccaccagagatgggaaaaccactggggaggactaggacccatatgggaattattacgtctcagggccgagaggacagaatggatataatctgaatcctgttaaattttctctaagccatttcttagctgcactgttatggaaataccaggaccagtttatgtttgtggttttgggaaaaattatttgtgttgggggaaatgttgtgggagtcgggttgagttgggggtattttctaatttttttgtgcatttggaacagtgacaataaataagacccctttaaactgtaaaaaaaaaaaaaataggaatgcggtccatggtttacttaatcgtataatatcagtgttcattttcttattttgataattgtcataatgttgtgtgaaatatt

SEQ ID NO: 1585 - DNA, 1031 bp, Homo sapiens
tcttattttttttttttctttgagacggagtttcgctcttgttgcccaggctggagtgcaatggcacgatctcagctcaccgcaacctcctgcctcccaggttcaagtgattctcccacctcagcttcctgagtagctgggattacaggcatgagccaccatacccggctaattttgtatttttaatagagacggggtttctccatgttggtcaggctggtcttgaactccctacctcaggagatcctcccgcctcagcctcccaaagtgctgggattacaggtgtgagccactgtgcccagccaagtctttgtcttttaattggtatacttacaccatttatatttcaagtaattattactatgtttgagcttaactctgccatcttatttttattgtttttagtttatctctgtttctttttcttgccttcctgtgaattatttgaacattttttagaattttatttttgtttatttacagtgttttttagtttatctctttgtgtagctttttagtggtcgttacgggtattgtatgtaaatgtacgtatgtgtgtataaaatcacagactactgatattgtcattttacttatttgagtaaagtatggaaacattacttccctttatataaacattacttccctgtatatctatcttccctttgtatttatagctttactttttgtttataattgtcttaaatatttcctttagaaccacatcagacactgttataatctttgcttcagcggtcaaacataattttaaaaactcaagaaaaggaaaacctattgtatttacacgtttttgaatgctgcattctcaccttgatgttccaaggttccatcttttatcatttcctttttttccaagggcttcctttagccattctttgagggtaggtttgttgatgataaattctctttgttttccttcatctgagaatttcctcttcattcctgaataccatttttcttgattacaggagtctggattgacagttcttttctttcgatatttgaaacat

SEQ ID NO: 1586 - DNA, 1026 bp, Homo sapiens
ctctcttttgattatcttcaaagggacaatttctcttaaaaaatcttattataattcttctttgtgcaatagtagatatatcagacatgttgtacccttccccccaatttacctgttgaaaaaatttgatagttcacctgggttcatgaagagaccaattacatgctattgaatattacctccagtttgtcttgtctttgtcctacttttgagcataatacacttgctttcattcctttctctggatctcttgcatcattctggcaaagtagatgagaaataccattgtaccctagatgggcccttttttccgaggagtcagtgcgatgtgaaataccctttttattgacctggtaaagatttgttcattgatgagaccacatatgttaatttctgtgatgataattgaagtttggtccttgtcctataataaaccaattaataaatttagaggtcacttggaggaaagtcttagatatgaattctatttttactggtctgaaagttgtagtttttagagtcttaatgtagatacgatcactgtgtattattagcccagtctcaaaggtcgctgtcccctggtggggccccctctatccctggtgtcctttgctttctttgtagggacttttaacagtatctccttctgagagcttgtcttggtctgtttttcacagactgggtaattcatatgagcagaaatttatttatcaccgttctagaggctgggaagtccaagatcaaggtgccagcatttggcaagagccttcttaactgcatcctcacatgacagaaggtggacgggcaagagggagcagaagagcaagctatccaaatgctgcatgacacttttttttttttttaatatataaaggccttaatcttattcacgagggaaaagttcttatgaactaaccacctgttaaaggcgctacctcttaataatattacattgacaacacctgaattttgaaggaaacacattcaatccatagcagttgtcatatcctggcatctaaccttatg

SEQ ID NO: 1587 - DNA, 1032 bp, Homo sapiens
gagtttgtatgtgttgggtaagtatgagtttgagggggcttctcatagcaaaaatctccagaccatagactgaagatcacctggcgaacctgctctgattactcccatgttttgggttacctgacaaaatataagacttctagtcaaatgcatgacatacttgtattacatgggacacacttgtgttaaaaagttattcattatttatttgaaattcaagtttaactgggcatctgtatttccatttgcatatctggcaatcctacaggtagtataattctaatttagaataatttttgaaattcaagacatctggggaaagaagggattttaagtcaaagagccaaatttgaatgctggccacattcacatccagctgtgtgactttggataagttgcctaatttctgagcctcacttaacttagctataaaaatggggacagtattcctcacttgaaatttctaagctgttatgctgatcaatgagattaaacgcaaaaatattctggaaacaaaacagctttgtgcaaatgagataagaagttatttgagtgttcctcgttcttgggctaagaacaagtcatgattccagaaaaaagatgatcccaatgaaggaagaaatactataaaaaaatgatcatactggcctagaatgcaaaataagcgtgaaataagaaacaaaaataaatttctttaagttctctagggttcattgccttggttctacttttgtcccacacttcttgtatttttttttcttatgtagcaagtgaactgcacaaactcttgcagccatttctgctgaggcgagtgaaagctgaggtagctacagagcttcccaagaagacagaagtagtgatataccatggcatgtcagcattgcagaagaaatactacaaggccattttgatgaaagacctaggtaatcagagggcacttgtccatttagaaactaaatgaggatgtgatttcaggtagtaaaatattttataatcacactcatttgtatgatcccaagaatatgggatgga

SEQ ID NO: 1588 - DNA, 1971 bp, Homo sapiens
cctagtcaccagagttctctctttctagaggagtctaggaaaagcccagattcccatgggtttcaaaattatccctttggaatgactgtcttaggtatggcctgaactaatctaaaacttcagatttggcaaaattgctcaactttaggaatgtgcaagttaaataatttcatgtcttactgtatttcattggttctcgtatatctgccataagtatgttagagttggagaaggacctataaatgccttctggccagttttttatttcacagacccagaaaggttatatgacttgcccaaggtcacacagccaacaaatggcagaaatgagattagaattgaggttttcaggttcattgctttctctacccatttggggcttgaatcttgaaagagttccccataatttttcctcttacacttgttgcaagctcagattaaataagtttttataatgagaatattgttttgacagtgctgtgcttctttgtttatgcaaatttaaaataacagccagtaacaagggactctaggcttgactttgttcttgacttactccatcattttgccgcctttcttccctcctctcgctatacaaaaattttctcgtgttatggaaaatgagacatcacttaccccttgcttctctaaagtaatgcttctcagacttttcaacccatatagctgtagatgagaggatagtgactttacacccccaaacagggcatagttgtagatgactgaccacaggctttcttcagagtctccagtttttcttttcttttttttttgtgtgtgtatttgaattttgcattttactcttcacatatctgtatttattttgctactaaaatgaaagcttatatttctttccattgagcaaattgacattccagaaagaggcaccttgtttattctagggcttatatcccctgttgcattgacacgtcccctgggaataatctccactctagtttgaggatgactgctctgagggatacagctacctgtggaggtgtattctcatagaaagcatttggaggttctgaggcagtctataaatcatacgacacttatatttctactttggtatttatttataaacttttattgtttggtaaattttgcctgagggaaattgaccttaaataccactagacttggcagtgtttccttttctttttcttgccaggggccatcgggttttacttttctcccaaatgacccagatgttggatattctccaagactatatggattacagaggtgacaccttttggccactacattacctaaggctctgttagacttaacagtccagataggtccatgaagaataatatgggatatgagaatattacaaaggaaagcagggtgagaacattattcagaaccaaaaaatcaaaaggcgagaggagagtgatgtgtgaaggcaaggatggacagcagagaacaggcacgtgggcagaaataaacacccacgttcccatcagttacatgatttaaaattatgggccgtggagcaaatgttgtggaaatgtttttgaaaatgtgtgataaagtttcagtgactagagcttttagcgtcttgtaacattcacctcaacagttgagcacttactcatgatcagtgaaaaggtgaacattgaaattatagagataacaaataagccaggggaaaagtaagagcaactttttctgcatagacaataaagaatgtaggttattacctgggaagtctgtttaatatgtaataagatttgtgtgagatgatgagaaaaggctctaacatgagttgatcttgagcccaatgttgaacagctccagaccttacaatttaaaaaagtagttcagaccgggtgtctgagttccgcagtatacctggtccagtggacacttgcagaatgccgttggcacatgccactggccattgaggggtccccagatgcataaacagcctgatcctgtagc

SEQ ID NO: 1589 - DNA, 1050 bp, Homo sapiens
gcctcagtccttatggtgccaagaactggggaggatggggcactgggactggggtggtggtcccagtgtagtattgtacagtcaaaaaagtgtgaattttagagtcaggagatattccagaatcatttcactcttggctttctcatttacctggtttagttacccaacctttcaacttcaacttccttatccatatgatgggacaatatctgtcttatcctctgcacaaggtttttaagagggtgaaatgaagcaacattgataagacaaacaaatcctttgagaaaaagcaaaacttcaagcttgttcccttgcttgacctttgtactttttacttcatctgcctaaaaccctttcttcccaaataaccacatcaagtgttgttcaaatgtctgtttctcagagaggtcttctgtgattacctcatataaaacaggccccatcccccctctgttattctctgtcccttctcccatattttcctttatcacacctgtcccacctgacacattacctatgtatttgtttatttgactgttgctttgcattaaaaaatacacttatggcagcaggggttttttcttgttcgctgctgtgactgtggtgcctagaacgatgccttacgtgtaatacatgctaccaaacgtttgtagtgtgaatgaatgactataaatgctaagatactaagcagctttgttagtaccagcttgaataagtcacttaacctttcctgtgtactgtttcataaccttgcctatgtgctgttgcataacctattgcttctactcactctgtaatgttccatctactctccgtccttccgcagtcatttgccaggaatcacagatgcaccacagagattttgctcattgagaaccctaatttttgagatgctttcctgttatcatggccccagctatatcttccagaaaacataaacatatttgggaagtccaacctgtgatattcctaggagataagatattttgtttcttccctttgaaaaatcattcttccacaagtcccttttgtgtgcctttgtttttctaa

SEQ ID NO: 1590 - DNA, 1052 bp, Homo sapiens
acaaaaggaggaagatcttcagcaatgtaatattgtattatacctcaaggaactagaaaaaagaacaaactaaacacaaaattagtagaaggaaggaaataataaagatcagagcagaaataaatggaatagagacttaaaaaattacaaaagattggccaagtgcggtggctcatgcctgcaatcccagcactttgggaggccgaggcgggcggatcaccaggtcaggagattgagaccatcctgactaacatggtgaaaccccgtctctactaaaaatacaaaaaattagccgggcgtggtggcaggcgcctgtagtcccagctactcaggaggctgaggcaggagaatggcgtgaacccaggaggcggagcttgcagtgggccgagattgcaccactgcactccagcctgggtgacagagcgagactccatctcgaaaaataaaataaaataaaattatggaagatcaacaagataaagagttggtttttgaaaagataaatctttagctggactaagaaaaaagtagactccaaatcagagacgaaggagacattgcaactgattctacagaaatataagggatcaggctgggtgtggtggctcatgcctatagtcccagcactttgggaggctgaatcagggagatcgcttgaggtcaggagttcaagagcagcttggccaacatgctgaaaccccatctctacgaaaaatagaggtgggcacctgtaatcccagctacttgggaggctgagacagaagaatcacttgaacctgggaggcagaggttgcagtgagccaagattgcaccactgtactccagcctgggcaacagagcgaaactccatctcaaaaaaaaaaaaaaaaaaaaaaggatcataagaaactgttatgccaacaaatcagatcacctagaagaaatacgtaaaggtaaactcttggacacatccaatctaccaatattgaattataaagaaacaaaaaatctgaacagaggccagttgtagtggttcacacctgtaatctgagcattttgggaggctgaggtgg

SEQ ID NO: 1591 - DNA, 1049 bp, Homo sapiens
aagaagtttatctcagaagtagagactagaatggtggttaccagagggttgggtggttagtgggcttggggagttggggagatgttggcaatgagtacatatttacaattaggagaaataagttcaagacatctaatgtaccgcattatcttgctaatgtacagtaagatgacattaacgatgtattgaaaaatatttagaatggatgttgtgttctcacaaatatatcagataatgcatatgttaattagctagatttaaccattctgcaatgtatatataaagaacatcatgttgtacatgataaatatgattttatatgtcaaattaaacaaatttgaaaaggaaaatggaaaaaatgcatatataggaggatagcagacatgacaacatctggataatagcattatacaggacagaaagattaaaatggagatgaaaaattattagaataaatattggagacaaatttctcattaaagaacgataaactacttcaaattcagtgttcagagagtactaagtagaagaggtgagaacccatacctagacatataatgacatctccaaacatctcagcggttttgccacaaaggattcattttaaaaacatttttggaggaactgtttaaataagagaaatagaaccagcagatgttggcctggaccactttactaccttgctaacatgtctcactccttcaccccactttaggaacttagtgtagctcagaatctttttactattcacacacatttgaataaattctcggctaaatataaaatttgtttcaaagtaattttccagcaatcctgagcaaaaagaacaaaactggagacatcacataacctgacttcaaaatatgttacaaagctatagtaaccaaaacatcatggtattagtataaaaataaacacatagaccaatggaacagaatagaggatccagaaataaagccatgtatttgcagccagctgatcttcaacaaagccaacaagatcttacactggggaaaaaagactatcttcaacaaatagtgctgggaaaa

SEQ ID NO: 1592 - DNA, 1109 bp, Homo sapiens
gacagagatattaactagcagactgtcatagtgaaacaggtgaaaggtgatcagggccgatggcagtgagaaagaggaggaagggatgtatttaaaacattttggagatagaatctgcaggataatgtaggagtgagggagtagaaagagtctaagatgaatcaggtttctggcttaggcatctgaatattaaagaggccattttctgaagggaaaaaaaaggagttaaaaaagaagaatcagtcacaggagaagattagttctatttatgttgaatataaagactctgtgggacatcttgatggtgatgtctaacggagcttgtggttggaaaaatctagctagaactctagttagtttcgtcaggcatttactgcttattttctgtgtgttaaatattgtgtttaacaggatgtctgagctggagctattggtttgagagccatctgtttgtaagcagcaattgaaactatggaaaatcacctagaaggagcatgatgaatgaaaagagaaagtcttgggatgggactctggagatccccgatatttaatgaaaaggtggaagaaatagctaaggaaaaggagaaagatggtgtcacagaagccatgtcaggaagagaacttcaggaagcattgaggagtcaatagtccaaatccacaaagaggttgggcaagatgtaggcaggaaggtgccttctagatttgacaatttgaagccatttgtgaccttggcgaaagcagtttctatgaagcagggcaggtggaagctttgcagtatcatctttggggcaaaaattttattttcaaattcttgtctatttacactctctgccttttgcttctgttcctcatcctatccctttgccccccattcccactcttcctaacacaaaattgttgactgattttcttttctttttttttttttttttttgagatggagttttgctcttgttgcataggctggtgtgcaatggcaagatctcagctcactgcaaactctgcctcccgggttcaagcgattctcctgcctcaacctcccgagtagctgggattacaggcatgcgccaccacgcctggctaattttgtattttcagtagagatgggg

SEQ ID NO: 1593 - DNA, 1023 bp, Homo sapiens
ctactgtaatagccgtttaactgggtccccacactttccatcctaagttcttctgtctggtaaaccttcctgaagtaaggctctgataaataccactctcccactgggtccgttctcaggagccttcccatttaagtgcagattcttatcctgcactcagaggtcaccttcctttttggccttctcgcctactaagccactgaacaactttactgcgcatcaagagcttggctagcaggcgcctgccgtgagcaattctgatttggcgggtctgctccggggccaggggacccgcccttaataggcctccatgtgatcccagtgctcgggaccctatggaccacacactgctctcgcaggcttttcccaagcccgtagtcttcagcccctgtgcccggctatgctgttcttttaccctgaaacgctctcagccccctctccacctgttgaaatttttctcatgctttaaggcccagctcaaatatctccttcgtgaagcattttctgattgttccaaatggataagatgcaaactccttagccttaaatttaagatgctctgttttacaattccaggcccatctcctgccttcctgcctggttcctccgctatccctaagcccaccacaccgaaatggttctcagcataggccctttacacatacctccgccaggaatgtggttcgttttctctctctttctctctctctctctctctatatgtatatacatatctcctctctccccacccaaccccgtctctcctaaacttaccctgctagacccggctcatatgtcacttactccgtgccacattcatcacaacgacagtctttctagactcttccccgcccccatagccgctaagtcactccctcccctgtgcttctccagactttatacgcccgagagaacccaacgacagtagcttacttgtggtttatctgttaatttgaacactaggcagtgaacttggctcaggctgtgttctgaggacctagccgggagtccacaggcagtcag

SEQ ID NO: 1594 - DNA, 1046 bp, Homo sapiens
gagcttatggtctagtgggagagatgaatgttacacagatgatcacataaattgcatatgtaattacaaagcatgaaaaatgttgaaaaaccctagatgctttaaaaagaatgtaatagaaaattttatgtagattgatggcattaagggattcttctcctctgaaaaagaaacacttaagccaagacttcattcattcaacagaactattcaaacttgatatgggaaagttgaagtttagggagagaggtatcaagaattacttccaaatttctggcatgagcaactgggtggataaaggagccatttattaagatatggaaaactgaaggaaaaaggtttcaggaggaaggctatacacagaattgaagaattcatgtttgatcctgttaagtttgagacatccagggagatgtcaagcaggtagatgtgtatacagatctgctggaatggacctgcaaatttgggagttgttggcatggagagaacttgcagcatgagaagagaagatgactcagagtagagtccagaggaactctaaagttgagagatcaggtaaaaaagggacctgcaaaggaagcagataaagaaggcctggagaggtgggaggaaagctaggaaaatgaggtgttatggaaaccaggagaagagttaacaagaatgaagtgagcaactggcagaatctaagagatggagtaagatgagattagcaaagtggccagtggtgaccttaacaaaaatagtggtcactatgatctgggggtggaagttggtttaaaatgattaaaggtcgaatggcaagtgaggaagtgaaccctgtgtctcgtcaactctgtggagaaatttggctctaaggggtaatagaatgctagacctgggttttgttttgcttttttttttttttttttttttttagcacggaaagattctacagcctgtctgaatgctgattggaaagatccaacagacagaggggatggccagaggggaaaatgagagctctcagaaggctggaagggataggcttagtccacctgtggctggat

SEQ ID NO: 1595 - DNA, 1027 bp, Homo sapiens
gagcaatccagctgctgccgtgggcatgattcctggcaaggatcgggggcctgccgggctctacacccaccctgggcctgtgggctctccaggcatgatgatgtccatgcagggcatgatgggaccccaacagaacatcatgatccccccacagatgaggccccggggcatggctgctgacgtgggcatgggtggatttagccaaggacctggcaacccaggaaacatgatgttttaagctgctaagatgggatgtgccgatccttgtcaaaatgagattccaggtcctgagagctgctttgaggcagttccaggagtacttactattggtcatgcaataggagaacagagacccgagggctgctttgggggaggggggaactcgagaatgtatggatttacctgaaaacaaattattcatttaatcaacaggtgtgttttttttaagatttattttttaaaaattatttttgtggacttgggtatcaatgatggcacctacttttgggaatctgtagctgtgctttgagaattgccatcggtcatgtgttgcaccgttctctgtatgtttacgtcctttggactggcttctcccaggattcttttctgtttttgtttttttgatttgggctttatttttttctgtgtactgtactatattgtaaaagggattttagcagagactttagtctttggggcaagaggagaacaggaatgctgggctgtttactttaggtggagaatccatcttcagacctttggactattttctttcaactgcagtgtatagaaaaaccaaactacgacctcagagcagagtattaatgaaaagcacaaaaaaaggaactaagttcagcgaggggtggggggaggggggagatttttcttttgaaaaataatgactcttaggacatttgtttttcagttcaagtgctcttcagcactgtcttgtctcccaatataccaacccactggcacatttttctcttgttttctctctccgattttgctctgtctcctcagttaa

SEQ ID NO: 1596 - DNA, 1027 bp, Homo sapiens
cacgagccaccctcaccacgatccctgccctggtggagcccccgtgcggaacacaggatccgaagatggcagcggaagctccgcagcggccccaaaagcgactgggcagggagggcacaggctccctcactgggtgaaggcggcgcaaagaatgggaagagccatcccgggagccaccgggcgttcagcctccctagggcccccaggcggctcgggccggggtctcaaccggggcgtttccgggggtttctgaagcaggcgaggggcagggcgggcgaaggccattcggctatccttctggctccagaatctcccaacgcgcaggtgtccaacgtgaccagcgcgacttaccgctccaatctctccagttttccaaggccttgctcagtcctcctgccgggcgggccctgaggatgcaagggacggaggaagtttcgtgcgtgcgcccttcctatagcgcccagtagaactaacagtacctgtctctgtggcgcaatcggttagcgcgttcggctgttaaccgaaaggttggtggttcgagcccacccagggacgcctctttgagcttttaaagtattcatgcattgtcaatcactagataaatggggaagattttatcttcctggagtcctaagccactaatttgtgacttatccatgtcaagggccagcccacctccccaaccggattcttaaccgggtatctcctgaaatcctgggtttatacgtgtgtaactcaggaatcctgaaacagagacctaggaacccacttctggtgtgataaaattctaattcagtccgttatacgcttaaatgagtaatttacatgcctccattttttcatatgttaataataggaggtcagtaatatcccgaggatgtgcctggatttactgattgctctatcaataatgtgaccagtggaatcattcatcatcatagtgatcctctccatcatttttgaagagtatttttcctcagtttgtgcatgatttatttaacccttttcaaaatgtttttgttagcca

SEQ ID NO: 1597 - DNA, 1076 bp, Homo sapiens
ccaaaacagaatccaatccaaaagcttaggtttttgttgctactacagtaattacatcttcatatacgaaggacagcacattattactgtccaagaatggtgcctcggacaactggttgcttacactgttttcagagatgaaataggaacataagcaggaagatttttgtctaaatatgaagcaagaaaggcttaaatgtctttattcaggggattaggcatcataagtttttttttttttagagaaattgttttcatgatatttcctatctccttttgtcactttgcttttgtcggtaaattttacaactaaataaggattaccaggcataaaaagcagcagacaatcatgatgcaaactgaaaataatcaatcaaaactgacccagaacttaaatagatgttaaaattagcagaggaggacattaaaactgtttttatacatgtatctcatataatcaaaacattaaatagagacatgggagataaacaagaaaagccaaaatcaaactttcaaagacaaaaacatttgagatgaaaattacattggatgaactaaggcagattagaaactgcagaagaaaagattagcaaacttgaagatacaagaacagacactagctaaagtacaaaaagaaaaaaaaatgttaaaaagtgatttttaaaaagcatcagtgagcagtcaggcaacttcaaatggcctaataatatgcaggtaactggagtccccaaaggagaaaaaaaagaaagagaaaaaaaatacttgaagaaacaactgctgaaaatgttctagccataacaagacctattaactcacggatccaagaaactcagcaaaccccaagcacaagaaacatgaagaaaattacactaagggataacataatcaaattgttcaaaatcaaggaaacattattaatagcaggtgtataaaaagacatgttacctatagaagaacaaagataagaacaacatcagatttcttttgagaaacaatgcaagtgagaagacagcggtacatctctaaagttctagaagaaaaaaggccaactagaattctatgcctagcaaaaatat

SEQ ID NO: 1598 - DNA, 1105 bp, Homo sapiens
aggatattaacatttattcaataacattatctaatatatagtccagatagaaattttctgtttagaaaatgtcacatctatacacatatatgtgcatgtatatagatatttatgcatacatagtgtgtgcatgtgtgtatgtatgtgtatatataacacacatgcacattacatatgcataaatgttttaatttaataatatttatatgcatcaatatcttaaagatatatacgtatcattagctggaagctgcctctatccatatattaaaggtttctccatatgtagtgaactgtaacctaactggatgtgtaaacaacctgtaacctactcttgagccaatgactgagttttagccaatcaaaggtggccaactgttcaaactgggttcaaataagacaaactcagagctgtagccaatccgattatttttgtacctcacttctgttttctgtaagtcactttcccttttccatccataaatcttcttctaccacatggtagcactggaacctctctgaacctattctggttctggaaatttctgattcaggaattcttctttgcttaattaaactctgtgtgtgtgtgtgtgtgtgtgtgtgtgtgtgtgtattatatattatatacacatgtaatatatatatgtatgtgtatatataatatttatttaagagagagagagaagtgacttgtggtactgatgttgcttccctaggttccaagtaaagttcctcaattgcactttacttacctagagctgtccctccatttctttgtccttgttgctaagtttttgaagtggataggctagttatcttgttcaacatcctgcattctgatcaaactaaacatttttggaaagaacagaatataggaatttgtgcttcttaccactcaacctgtcagaaagcaagtgatgcaagaacaaaatattgtgaatatgtttacatcgaaagtgttaaagaaaactcagcatctgccagcaagtttatggcgtgccacggtggtatagtgattggcactttgtgttgtgaatgcagaaccttgattccaatccaaaatggcagtgtgtggcatctttttggggagaaactgagctgt

SEQ ID NO: 1599 - DNA, 1058 bp, Homo sapiens
cccggataatttttgtatttttagtagagacagggtttcgccatgttggccaggctggtctcgaactcccaacatcagatgatccacccacctcggcctgccaaagtgctgggattacagtcgtgagccatccaacccaggcttaagtcttttcacagttggaaggtcctgattagagcagctaattctgctttttgagcagaattctgagaaggtaaacccttggcctcaatgacttcttgttagctaaccttcctttcttactccctcatgaataaagctatttccatctctaaaccactcaacactggggttagacaagggcttgtcttcaaggttggaccttctagagtagatctcttccatggtttccacccaggagtcaatgagttggggatctgtttcttgggatgtgaggtccagcaacagagtagcagggtttaaaaatcagcatactttaagggtaacatctggggtgtcaagcagaagagcctgatatttaagtaactggccccctattagccattggtatacttttgcctctaggaccctctgtactgtacttcatggggtggtggggggcgggggtggtatggcatctacttgttgtcccaaggtaaacttactggcttcttctaccaatagagtgatggtagccacagatctcaagcttcctggtcactcagctgccacctggtctagctgtttagagaaataagccactggtctgaggcaattcctgacccttcgagttagaacatccaaagctgtcccttgttattcatccacatagaggatgaaaggtttttctaagtttgagagtcttgaagcaggggctgtccctgggttttcttttaaggctaagaatgccttttgacaggctccattgcaattcaaaggcttatgaccactcacttttggaggttcgtagagtggttttgctatgagcccaaacctgggaatccaaacccagcagaatccagctattctcaaaaaggaatttgagggacctggagtgccaggatggtctcttttcatccctgggtcaagatcctggt

SEQ ID NO: 1600 - DNA, 1026 bp, Homo sapiens
gaatccttcatatggaagatctatgtgggtgcaaagaactattgttaaatgtagtgtttattaatttcctatttatatcatttctatatgtaactagatggttgcacaaaccatctttctctctcacccacagcaagtgataactaaagaatatgaactgtttgaattccgtcggacagaggttcctccattgctccttattttagatcgctgtgatgatgccatcaccccattgctaaaccaggtacaaaaccctttcttggcataatagaaggataattttaagtgatattcatcaaaatacagatagggaagtaaaaacatggtccatttatttgcctccttatttttagctattcttggttttgctttgtatttcctggtgttttggtatcatgattcttccatccactgtcatcataactcttctgcttcatctctcctgtacctttctgccagtacctccacccctaatcaagacagcttcttaattctgtagattctatttccctgtgtttccttctgtctcctcatttccatgcttacagccattgccttggtctagatcctaatctcttgcaagaatattgaaatagtcatctacttcgttccctactttttatttcttctcactccaaatgttccacaagtacaatttcctaaagcacagctctatcttattactcttggcttaaaaaacttcattggttcccatttgcctactaggttaaaaagaaactcctgaacttggcatccaagagccttcacaatgtgggctaaacctcttataaaacctagagttcaccacttacatagataatgccacatggtttcctgccagcatgcttttactgtgactgctttctaaactctagaatgtttggaataccttctcttcccatcttcacctatcaaaatactgctgttaaaaccactcaatctggccgggcacggtcgctcacgcctgtaatcccagcactttgggaggccaaggtggctggatcacctgaggtcaagagttcaaga

SEQ ID NO: 1601 - DNA, 1025 bp, Homo sapiens
aatcattaatactaagagaaagcagtaggttttgcaaatcaactagtcagttttgttgtgccgtattgattcaagtcgtggaaatagtaagtgttctttcagcaaggaaattacaacttcagctattggaaaagaaaagtggaactatccattattaaattcatttttgtcctaaagcaattacaatggaaatatatttccttatttaattcttaccttggacaaaaggcatttaattttctatagttgagacagttgctaaatgtatgacttataattgtcatagtagtgatgtatcactaccattcaataattattagatctaaggcattgtacaacagatgactcaagtgaaagggggataaatataagttctatctttcttcagaatataaaaaggcttctgcagaaccccaaagtgacagagtttgatgctgcccgcctggtgatgctttatgctttacattatgagcgacacagcagcaatagcctgccaggactaatgatggacctcaggaataaaggtgtttctgagaagtatcgaaaggtaaccagtttccatattagcccaccaaacaggaaccaactctgttattatattcttagctctaacgaatgataaatcatactatttttatttacagaaatgtataattctgtcttttcatttttgtttccttaataaaattattttcttatgaaatgggcttcctgatgcctaagcaatcaaaatttgcttctctttcttaatagctcgtgtctgcagttgttgaatatggtggtaaacgagtcagaggaagtgacctcttcagccccaaagatgctgtggctatcaccaaacaattcctcaaaggactgaaggtatagacatctcctctatgctctcctgagtgagaacagttgaagtccttgaggctgagagtgaatgaatatgatcttcaaagtatcttgaagattgctgctaatttagtactgtgtcagttaaatgaaattaaaactggcatcctcttgaaagctttttcttt

SEQ ID NO: 1602 - DNA, 1783 bp, Homo sapiens
agccactgctctccagcctgggggacagagcgagactccgtctcaaaaaaaaaaaaaaaaaaaagagccatctatgacaaacccacagccaacatcatactgaatgggcaaaagctggaagcattccccttgaaaaccagcacaagacaaggatgccctctctcaccacttctattcaacagagtattggaagtcttagccagagcaatcaggcaagagatagaaataaagtgcatccaaacaggaaaacaggaagttaaactgtttttagacgacatgattctatatctagaaaaccccatagtctcagctcaaaagctccttcagctgataaacaacttcagcaaagttgcaggatacaagtcaatgtacaaaaatcactagcattcctatacagcaacaacaaccaagctgaaagccaaatcagaaagcaatcccattcacaactgccaccaaaaaaataaaatacctaggaatacagctaaccaggaaggtgaaagagctctacagtgagaattacaaaacactgttcaaagaaattagagaagccacaaacaaatggaaaacatcccatgctcatggataggaagaatcaatatcattaaaatggctatactgcccaaagcagtttacagattcagtgctattcctatctaactaccaatgacattcttcacagaactagaaaaaattattttaaaattcatatggaaccaaaaaaacgccaaaatagccaaggcaatcctaagcaaaaagaacaaagctggaagaatcacgttacccaacttcaaactatactacaaggctacagtgaccaaaacagcatggtatgggtacaaaaacaagcacatagaccaatggaacagaatagagagcccagaaataaggcctcacatctatgaccatctgatctttgacaaagctgataaaaacaagcaatggggaaaagactcattcaataaatggtgctgaaataactgactagccatatgcagaagattgaagctggaccccttccttacacggtatacaaaaatttcaactcaagattgattaaagacaaatgtaaaacccaaaattataaaaaccctggaggacaacctaggtaataccattctggacctaggaacaggctaagatttcatgacaaaaaaactatgcatctgagaaaggtctaatatccagcatctataaagaacttaaacaaatttacaagagaaaaacaacctcattaaaatgtggaaggccgaggcaggtggatcacctaaggtcaggaattcgagaccacctagtcaacatggtgaaaccctgtctctactaaaaatacaaaaaattagccacgagtggtggctggcacctgtaattgtgccacgggaggctgaggcaggagaatcacttgaacctggggagatggaggttgctgtgagccgagattgtgccattgcacaccagcctgggcaacaagagcaaaaccctgtcgcaaaaaaaaaaaaaaaagtgggcaaaggacatgaacagctacttctcaaaagaagacatacgtgcagccaacaagcatatgaaaaaaaactcagtatcactgatcattagagaaatgcaaatcaaaactatggtgagataccatctcaacaccagtcagaatggctattactaaaaagtcaaaaaataggctgggcatggtggttcacgcctgtaatcccagcactttgggaggccgaggtgggcggatcacaagatcaggagttcgagaccagcctggccaacatggtgaaaccccttctct

SEQ ID NO: 1603 - DNA, 1034 bp, Homo sapiens
acctgccttggcctcccaaagtgctggaattacaggcataagccaccaggcccagccttttttcgttgttgtttttaaggaggaagaggggacatgagcaaggatgtaccctgtgcattcgctcccctccctgtggcttaattgctagttctatttttagttctttgagctagttccataatgttttccacagaggttgaactaatttacattccaaccaacagtatatgagcattcccttttctccgcatccatgccaacatctgttgttttttgactttttaataaaccaaaatagtaagagccatatatgacaaacccacagctaacatcatactgaatggggaaaagttggaagcatttcccctaagaactggaataagacaaagatgtccactctcactggtcctattcaacatactgaaagccctacccagagcaatcaggcaatagaaagaaatataagacatccaaattggaaaagaagtcaaattatctctgttcgcattcaataggattatatacttagaaaaccctaaagatccctctagaagattcctagacttgataagtgatttcattaaagtctcaggatacaaaatcaacatacaaaaatgagtaacatttttaggcaccaataacattcaagctgagaatcaaagtaagagctcagtcccatttacaagagacacacaaaatacttaggaatatatttaaccaaggaggtgaaagatctctacaaggagaactacttaacattgatgaaagaaatcatagatgacacaaacaaatggaaaaacatcccatgcttatggattggaagaatcaatattaaaatgatcatattacccaatgcaatctacagattcaacacaattcctatcaatttaccaacatcattcttcacagaattaggaaaaagaatcctaaagttgatatggaaccagaagaaagcctgaatagccaaggtgctcctaagcaaaaaacaaatccagagtcacattgcctgacttcaaattatattataaggctac

SEQ ID NO: 1604 - DNA, 1036 bp, Homo sapiens
tcctgacctcaagtgatccgccttcctcggcctcccaaaatgcatataggcatgagccatcatccccacccttgtataaattttactgggaaatctctgcaatttagagactatctgaacattttaaaatagccacaatagctgattctgtttcagtgaagtcccacaagaacaaatactctctcagttaattctttcaaggtattttagaaagagagagagagagacaagcaggaaggaaatgtagggttggggtttttttcatgatttatacataagcatgtatattccttgattaaagatgtttctggttagttttgtgcaataacattcaaaacggatgcttctgattgatgtagttttagtgtccaatgagtgatttaacaaaattatttgcctagtaatggttttgaaaataatttgatctccttcttggtgatatttaaggaaggagctaataggaacattcacttttgttatgaagccattttgatacggattgaaacaggaaacagagtaaaacaacacagtgctacccaagtgaagctagtgactgagctgtgttcgcatgtccagtatcagctacactcatggtttttttggtttccatggtttctttttcttggtttatcaaaggattcagaaaaaagatttcaagaaaagatagagttcctagaagcaccattaatttttgtgtcccattcttttttttatactcaaaatactaaatgtttctagtttccatgttttggggacatctaaatatgctagttctttcaaaaatgctttgaggtccttgtacagaggccattgtaatagcactgtattaagtatttgacaaaggcttatacatgaaaggagatgtgtagtattaatacaaacataaaattctgccgtattgatatcatgtcatggtaaggcactctgcaccctcttgaatataaaagaatatttctacatttggttccagcaaacactattgtgctattctgaaatccacagcacagaaattataagacatccgctcataaacaga

SEQ ID NO: 1605 - DNA, 1676 bp, Homo sapiens
agataggtcaaaattgatctcctgcatcccagaaaataacaagtacccttacccgtcaggtagcaattttagcaaccttaatcatggtttctctatttttatttctgacatatatcaagatcacttttactgtaaattgaaacaaaatcttagttgtaaacaaaacttaaaaataaagaagagaaagcaattattcctttcctccctagtatatttccaaaaatgaacataatttttagtgtaagaacagagcctttgtataagtaagctcgtcatcttaagcaaggagtcacctgaagatataggtcccttagatcctaataggaaatatacattagtttaatctgaaattgaagttgccattcaaagttatcttaaagtggctctttcttgcatactttatttctttaaaacagttcttttgcgataatattttttagtgattcaggcgctggttgtaatgaagcagagttctatatatgcaggccttccgtagttgtatgatttgtttctatagggcctgctctgattagctgtaattgtgattatctttgtttagatttaaacaccatttaaaatagaaggcatgtatttgctgctaagacaccaaggaactttgcagaagcaacttatctccttagcaacattctttttttttttttttttttgagtcagagtcttgctctgtggcccaggctggagtgcagtggcgcgatctcggctcactgcaagcttcgcctcctgggttcacgccattctcctgcctcagcctcctgagtagctgggactacaggtgcccgccaccgcgcccggctaattttttgtatttttagtagagatggggtttcactgtggtctcgatctcctgaccttgtgatccacccttctcagcctcccaaagtgctgggattacaggcatgagccaccatgccctgccctccttagcaacattcttaataaaattgccttctaaataaagagaggcagtcaatatttcttctctttccatagccatatgaagtttaacatgaattttgtattacttccctttttcatttcatatataatgaaatacacagaaataaaatgtagtaaccaattacagagacttctttaaagatataactgttgtgcttttttgaaggcaaagaacctgccctgaaaaagaatctgacctgaacacatgctgtcctaagcagttagtctagtgtgtctctggggtctatgcaggtttgcagtgtacagactgttatctcctgtctcagtatttgcccttcttatggaattactttccttcctcttactaccttatttcctcctcttcatttgtctcattagttgtattagccagatatatatttacttgtaggggagggggaatgtcaaatttcagtttctaggaattatatatggcatgagtcattgctatagcatcacagaaattttcatcaacgtctatctagaacagtcaggagttctagttatgagttctgtaatagatatttattgaacatgtgagaacaatgtaaagccaatagttggttcactcaaatatttactgagcactgggatacctccatgaataaaacaaagatcctaacccttgtgaagcttcattttaatgcagggggagacagaaataaaccataaacttaacaaataggtatattttatag

SEQ ID NO: 1606 - DNA, 1012 bp, Homo sapiens
cttccattctatacccaaatatcagaccagtacctcctgcctactattcatgatatattttcatctggttagatgtccagagcaagacattctatttttggagatgcttttgttttttccttcaagtaacctcaaactacttatcagtttcctagaggaagttctggcttctggactgcacagccgaagcaaggagagctctcaagtcacatcaaggtcagcgagcagaagatgaaacggtggttgggggaagggcacagcttcctctcttgtccccactacaggttttccctactaaacaaaggtgttggagagcagctttgggttctgtgctggttgttagaactcatctccaggtagcccacggatacgtggttggcacagacacaagactcccagagttgtcctaacaataagtctgagcccatctcaacccacttttctccggtagtctttatgtatctgttagcacaatcacttcagttactgatgaattttgttgggatctgacttggggaaagggttatcagagcctagaggggcttaaaaagtaatcatttgatgtacataccacactccttggcttcctttctcttcccttaaccctttctgcttttcattaaccacattcctgcacaactcatttctgaaaacctaccatgtttctttacagagccatccaaaaattttttgtccctacatagcaattttctgtggcactgagaaaccatgtatgaccacaataaaaatccattttgtgaaaggatatgagtgatttagttttatttctttggggctaatttatgggaatttatgaggtgggacatgagctggtttcacaccaaacataatgaaggcattacttctacctgaaggatatttaaagtatgtcaaggcaaataataaattctagtgtcaatttcacctctcttgaaaacaggagaaagtgacagtatcattattgccaggaaattaaggcatcctcaaatcatcatagcaaaaataccaaagc

SEQ ID NO: 1607 - DNA, 1030 bp, Homo sapiens
cctctctcaaagagggctggagcaccttatgatcacaggctgatgtgtaagaacagaagctagaccttaggaagacctcatggtggaggaaattggattcagggcaactctttggacaggcgtgggaaaaatccctttctatagtcaaggacgaagaatcaggggaaaggaagggttaatttggaagatgggtagttataaatgagactctgggaattagatatgtggggaaaaaaaaaaacaatatggtggagaacaaggctgcttggctttgtccatcttcccaggcactggaatatacttgtcctactgcttgcctcaccccatctcccaccctctccaccaagggctaacctctatcagtgtctcctgctccccagagctcctaatcagtctgtatgcaaggtagaataactccctttccttcccttcccctaaggaaaacatagtaagttaactctcttcccctggctacattcacacacccaacactttcctctccacggtttctgggctctgctgatagtctcagctctggagaaggagggggagaggagggatgatgcatcatcttgtatccctgtcccgtgtttctgggaattgctcttggacaccccttgccagcaccttgtcctacttccacccgtaatcattcaaggcctctggccactttccagcccaaagccagggaaccctggaaagtgggaggccctggaggagccaagccttgctgaaacaaatggaggtagatgtatgaggcgtcactcacctgaatggggccatgttgacatctgtcctcatctgtcatcagcctccaggtccagcagcagttcagaaggatgggcagatacaagactgtagatggtctgggtaatggaagggagaaccacttccccacttccaggtttccaggaaccaggaggatagatgagttcacctccatgcacacgagtcctatttcagaacttgggaagttggggactgttttggaaaataatttcagtcagggtgggtagatgtcatccaagga

SEQ ID NO: 1608 - DNA, 1030 bp, Homo sapiens
tctcaaaataaaaatgagggtattcttttctgagctgaaggatcatcaagtcagctgatggagaccctgtagattgaacatgataattacctgtatgcagaattcccactgggatgaatatgaccacagagaaatgtgacagaacattctttttttttttttttttgagacggagtcttactctgttgcccaggctggagtgcagtggcgcgatctcggctcactgcaacctctgctgcctgggttcaagtgattctcttgtctcagcctcccgagtagctgggattacaggcgcctgccaccatgcccagctaaatttttttgtagtttttagtagagatggggtttcaccatcttggccaggctggtcttgaactcctgacctcgtgatccacctgcctcagcctcccaaagtgctgggattacaggcgtgagccaccgcgcccggccagaacattcttaaagatcatgagatttaatttaatatctaagatgactgacctggataaaccctcttttacttgcataccttaaaagaagggaatcctacataagtcagggttgggttagggaatgcctgcctggaagtaggaagaatggaaaagctggcctctggatgggcttttttagttctgttttagtgttactaggtttgcaagtccttgttgatatgacaggatcaagaaagaagctagaactaatttctcagacttagcttattcacagagtttgtttattccgcagatttcattgatcaacttaagagttagaattaaaaatcaaatgggatctctttctgctttgagatatggttcttggggaaaatatttgccttcaaatgagttggaaaaacttgtctagggattgagaatagggctggggaatgcattcctgatgtactaaccatttccctggatcactttagtcttttttttttttttgagagagagtcttgctttgtcgcccaggctggagtgcagtggtgcgattttgacttgttgcaagctctacctccctggttattcccctg

SEQ ID NO: 1609 - DNA, 1069 bp, Homo sapiens
tttttttttttttaggtgtagtattgagtcctgtttgagctattgttctctttttcctgaaaaatggcactgtcaaagagggagctggatgagctgaaaccatggatagagaagacagtgaagagggtcctgggtttctcagagcctacggtggtcacagcagcattgaactgtgtggggaagggcatggacaagaagaaggcagccggtatgtacctttctgcatcttttatcttaacatatagggtgaccccaaacactgctttgaacttcctcaaaattctctctgttgggaacatctaaaaaaatggcaggccatattttattttcacctgtattatagtgaaaataggctaaataataatttgctttttctcttaattgcttattttttatgttatttatgatagattttaaatcttcgtttggctaccatactgagtcacctaagttagatttacttaggaagtatgcttaagtcagataggcatattcagattcagactgaacatctcaacatacaaaaatctttatgaaatacatgaaaaagcttgaaggaggtagattttgttaatggtaggcttctacaacttgctatttgggaaaggtgagggtggttattcatctcaaacttgatgttcaaggtaaacaggttgctctaactgcaccacttcccacgccaaaaaattataactattttcacctcacagggcaaggtcatttagtgtaagagagatgggaatcctacaaaaaacttaaaatttgtttcactcctgggaataaaattccagtgttggtacctgttataggcctagtattagactgtgtactcttacctttccaaccctaccaccgcctttcttcctgtcagatcatctgaaaccttttcttgatgattctactctccgatttgtggacaaactgtttgaggctgtggaggaaggccgaagctctaggcattccaagtctagcagtgacaggagcagaaaacgagagctaaaggtaggttacaatttactgtctaatgagctcaggactgttttgaatggtaacagagttgctgagctta

SEQ ID NO: 1610 - DNA, 1030 bp, Homo sapiens
acctctaagttcatgggttgaaatatccaaagaaataattggcagctttgtctttttttagataacaggagttttgattctcatgtttctccatatttcctttttttccttcttactgttacttataaactgattgctctaagattttatctttgatttatttgaggcctaataagttgttttagaatgtgactccactggtacctgagctgtacacctcattgttgcctctttgtagaagtttctctgcaatgcacttgtagatagaataccaaaaaataactattatttattatattcttgagagcttaccatttgctctatggcatattgctggtcctctgctgccatgagtgaaacacttggaggagttgtcagtacccccttaactactacactttttattctgtagttgccgactgatcctggcctctttcagtattagcagtatcaagtagcctatttttctactcatttcccagtatctctctttaggagaaaaaaaaaagttctgtgactcctatcaaaccttccaaagttcttctgataccttggctatcccattacttttcctgagggaaaagagtgaataagtaatgtctgcttggtcccctggccaggctatggaactaaagaaaaaaagcagagagatttgtgccctttgtgtttggagcattgtagggtggtcagagaaggagagatagtccttgccttaaaacaatttgtaatttgtcaggcagtgtggcatgtgcctgtaatcctagctacttgggaagctgaggcaagaggatctcttgagcccaggagttacaatttagaagaggcaggggtatcacaaaatatatattcacgtattataaaatctaagtagcagtttcatgtaaattttagggttggttatagaatttcagacctatgttgaattttgttatatttaaggtggaatgattgatccacagtatacacagatctgtacagtgaagattatgtcacgatagggcatacttctttttttttttccttttttttt

SEQ ID NO: 1611 - DNA, 1024 bp, Homo sapiens
ccacccgcctcagcctcccaaagtgctgggattacagtgtgagccaccacacccgtccatccaaataactcttatagagaaggcactgcagcctcaacttcctgggctcaagtgatcctcctcaacctcctgagtaggtgggaccacaggtatatgccaccgcacccagctaattttaaattttttgttgagatgcagtctccttgtgttggccagactggtctttaactcctggtctcaagtgatccctctgccttggcctcccaaaatgctgtggttccaggcttgagccaccacgcctggctttattttgttttttgcttgccttaatgttccatacaggatttatttctttgcgggctatttttcaggaaggtggagttaaaagaccaaacgaaacctacaccactgatcctggatgagcaagggcgcactgtagatgcaacaggcaaggagattgagctgacacaccgcatgcctactctgaaagccaatattcgtgctgtgaagagggaacaattcaagcaacaactaaaggaaaagccatcagaagacatggaatccaataccttttttgacccccgagtctccattgccccttcccagcgccagagacgcacttttaaattccatgacaagggcaaatttgagaagattgctcagcgattacggacaaaggtatctggcttagagtataacacagaatttggaaaaagttaagaagctgacaagaaaacattgttaaatctctgtgttctaggaaattagataaataggtcatttaaagcagcagtcctcaacctttttggcaccagggacttgtttcatggaagataatttttcccctggagtaaggatggtttcgtgatggttcaagcacatagcatttattgtgtactttattattattatttttttcgagatggagtgtcgctcttgttgcccaggctggagtgcaatggggcgatctcggcttgctgcaacctttgcctcccaggttcaagtgattctcctgcctcagcct

SEQ ID NO: 1612 - DNA, 1050 bp, Homo sapiens
acagtgacagatcatcaggcattagattctcataaggaatgtgcaacatagccccctcacatgtacagttcacaatagggttcgcgctcctatgagaatctcatgccaccgatgatctgacaggaggtggagctcaggccataatgcaggtaatagggagcaatcgtaagtacagatgagactgttggcttgcctgctgctcacctcctgttgtgcagcccagttcctaaaagactgttgggttggggacccctgatttaaagcaatgaatactttgaaaaatgtgctggacaagatggctcaagcctgtaatcccagcgctttgggaggccgaggtgggtggatcacgaggtcaggagttcaagaccagcctgcccaacatggtgaaaccccgtctctactaaaagtacaaaaattaaccgagcgtggtggtgggtgcctgtaatcctagctacttgggaggctgagtcaggagaatcacttgaaactggaaggcagaggttgcagtgagctgagatcgcaccactgcactccagcatgggcaaaagagcgaaactccgtctcaaaaaatatatatatatatttattaatataatacataatttttttagcagattttacttcctaattcgtttctacataagtggaaatattatgaaattgagtttgaaaattctccacatacaactaagtggagggaaacaatttgaaacattctgagtgactaaggaaggcttgcctgtagttaaaatttaatgagacagtacacctggagagttgaattgattgtatattgaatgacctttgccgcctttttatcctctcaaagtgaggttttcataaaattcctttttttttttttttttttgagacggagtctcgctctgtcacccaggctgcagtgcagtggcacgatctcagctcactgaaagctccgccttccaggttcatgccattctcctgcctcagcctgccgagtagctgggactataggcgcccgccaccacgcccggctaatttttttgtatttttagtagagacggggtttca

SEQ ID NO: 1613 - DNA, 1050 bp, Homo sapiens
ctcgggaggctgagtcaggagaatggcgtgaacccgggaggtggagcttacactgcactgcactgcagcctgggtgacagagtgagactccgtctcaaaaaaaaaaaaaaaaaatttgggattctggccgggcacagtggctcatgcctgtaatcccatcactttgggaggccgaggcgggcagatcacctgaggtcgggagtttgagaccaggctgagcaacgtggagaaaccccatctctactaaaaatacaaaattagctgagggtggtggcacatgcctgtaatcccagctactgaggaggcttaggcaggagaatcgcttaaacctggaaggtagaggttgctgttagccaagaccatgccattgcactccagcctgggcaagaagaacgaaactccgtctcaaaaaaaaaaaaaaaattgagattctacacattctgttttctatgactccaatttatctttctgtcttggattatcttgtttttaggctcaactggagaagctacaggcagagatttcacaagcagctcgaaaaacaggcatccatacttcgactaggcttgccctcattgctcctaagaaggagctaaaggaaggagatattcctgaaattgagtggtgggactcttacataatccccaatggctttgatctgtgagtttgttttagtacctttttaaaaaaacagtttttaatcagctgagtttaagactcaagttaataccttttagtaaagctatggttttagtgggaaggatggtactcattcattaattaaaatttttaaatccaagagagataagtaactgtacacaaggtcctgtatttttttttttttttttttttgagagggagtctcgctctgtcacccaggctggagtgcagtggcacgagctcagctcactgcaacctccacctcccgggttcaagagattctccttgaattctccttgaatctcagcccctcaagtagctgggactacaggtgtgtgccaccatgcccatctgctttttgtatttttgatagagacagggttttgccat

SEQ ID NO: 1614 - DNA, 1069 bp, Homo sapiens
tgtttataatagagttgggtctcacttggttgtccaggctggtctcgaactcttgggctcacgccatcctcccaccttggcctatcaaagtgctagaattacaggcataagccactgtgtccagcctaaagtttcttttaatgatattgatatttacctaggtttctttaatatttttattgctgtccgggcctggtggctcatgcctggccaacatggtgaaaccccatctctactaaaaatacaaacattagccaggcatggtggcgtgtgcctgtaatcctagctactcgggaggctgaggcaggagaattacttgaacccaggaggcagaggctacagtgagctgagatcgtgccattgcactccaacctgggtgacagagtgagagagagaaaaaaaaaaaatatatatatatatatatgtattcttactgctttggtatactaatatctctgcctgacagttgacaatgacacaccagttactctgggagtatatcttaccaagaaggaacagaaaaaacttcggagacaaacaaggagggaagcacagaaggaactacaagaaaaagtcaggctgggcctgatgcctcctccagaacccaaaggtgcatttctcagtggcctcttctgttaaaaagagtggcaagtttatgtctttaatcctggaggaactttaacatctctgtgtttgagtgatttctgtttctaagaattattcttggggtcctttttctccaagttttctaccatcttttcatattaagataggtcaacacattcattatagaggccatttatggcttatttttaagcatactgatcatacaacactctggttttcctggaagaatacaggtcttgaaattcatggagatagtagttgcagtatttgcgtagactttttatgtacataattcttaatgttttaatttttacaatgaaagtacaggataaaaaacttgaccctgtagttacattctcgttcagcagtattttgactgagcactattatttataagctctttcactagatgctgtgatcagtgtgaaaaatatgaaaggaa

SEQ ID NO: 1615 - DNA, 1525 bp, Homo sapiens
gtttatggttacccagttcttccctctcaagtcttctttttttttttaccagaatattagttctgaacaagtcaatatacttgttcaggccaagatgtgaactaaagattgtatgtcctttgagaactataaaatatcatcctatttcttttttttttcatctttttttttttaaatggtctgagtttgcttccaacatccatggaagcattacaaattttctttcctccgtagtcatatccttaccctgatgtattgctgtgtttcatcctcactccaaaatgcattttatatgttgtaaatatttttctacctttgtgttgatttaatgtttttattcttttatgttgagtacatgtgtatcttctatttttaaaatgtgcttatttctattaactagttctttattataaaagtggtacattatcacaaaaatagtgaatgcttattaagatttaaaaaattgtctgacaacacagaagaatacttactcaaaatgtctcctttctattctctgatcccttagaaccactctctttaggtaattgctattaacagtttttcacatatcctcctagaaaattttcatgcctatatagtgatcctatatatatattttatttatttatttatttattttgagacggagtttcagtcttgttgcccaggcaggagtgcaatggcgcgatctcagcgcactgcaacctctgcctcccaagttcaagcaattctcctgcctcagcctcctgagtagctaggattacaggcacgcacccccacgcccggctaatttttgtatttttagtagagatggggtttcaccatgttggccaggctggtcttaaactcctgacctcgtgatctgcccactttggcctcccaaagtgctgggattacaggcatgagccaccgcacccagccaagtaatcctatattataagagtctaagggtctagaggacaaaaagtctgtaggtctttacattgtcaagaacaatgagattgtaagtatttttggatgatagtaaatacctctccctgactcttagagtaaactttggttagtaatgtaatggttaatgtaaagtgctagactttgaagaaatgtaagagtgtggaaatatttctagactcatcaactctaccttttaagcattcatctatttgtttactccagaggcctttgtttatagagaggaaaccattttggattcatctttttacttgccactccattcaggcagctgctgatgctaaaatggaagacataactaaactttcccttctccagagttcgaaatttgagcaacccagccaagaagttcaagattgaagccaatgctgggcaactgtacctgacaggggtggtggtactgcacaaggatgtcaacgtggtagtagtggaagggggtgagtctgaaaaacttgagggagactgtccccagacaaccctaggcttagagtgattagcattgtggggagaaaggagaaaaagatcgtattttagtgccatacctgatataata

SEQ ID NO: 1616 - DNA, 1107 bp, Homo sapiens
cttaaggcctggtaggagataagtttatctcattccaccttccatagttcttcctgacttgctgttccacccaggcaccagagcaaataattcctcacttcatttcaaaaaactaaaagccttatgcatatgaattcgtaaaatctcatacaaatatccaaggaggccgggcgcggtggctcacgcctataatcccagcactttgggaggctgaggcgggaggatcacgaggtcaggagatcgagaccatcctggctaacacggtgaaaccccgtctctactagaaatacaaaaaatcagctgggcgtggtagcgggcgcctgtagtcccagctactccagaggctgaggcaggagaatggtgtgaacccgggaggcggagcttgcagtgagccgagatcgtgccactgcactccagcctgggcgacagagcgagactctgtctcagaaaaacacaaatatccaaggaaatggaggtcacaatttttttttaaccataaaatcacgttcagctgggcacatgtctcacaaatgttactaggtcttcttataaaagaatattatctgatttaaataagaaattgaagtgtttttattatatatctcttttctagggtacagccaaagaccggagctttggagagatgaagtttaaacagtgtcctacagagaacatggctcgtgagcatttcaaaaagcatggggctgaacactactgggaccttgcgctgagtgaatctgtgttagagtccactgattgagactactgcaagcccttgcctctcctcccttgcctttgtctcttcagtcctctcacttattctatttcccaaccccctcccacttgtttgtgtgatctcagaactgtgccaagcagacactgggacaaagggagaatatcttgctcccctcctgagtcagcctggtgttgccctttattccccttatgtgcatatgattaaagagttatttttaaacttggtgtgatatttttcacacattcgtaagtattagagtttgggtctacaggtgatcttttttccggacttttagcaattgctgtggaaaaaaacattttttgtcattgacatttatttatatatataaa

SEQ ID NO: 1617 - DNA, 1044 bp, Homo sapiens
ctttttacacaattgagttgatctcatgggtaatgtgcacaggaaatgtgctttttgaatatgtagtacctttttctccagttatgttttttttgtctttatcctggagatttttccattttgctgctttactgcagaaacgagctctgttaaagcatggattgtttgcagaacgtttcaaatcttataggaggaagtgtggagaagttactgtttcctgctgagaagagagggttaactcatactccatatacatctattagaatttttctttgcttcctgcctgcggcatttcaccagtgagacccatcatccagttattctgccttattccacttctgccattgctcctgtagtgttttgatttgtttaccttttagagaacagatagataaaacttgcaaaattataggccccatgcttcgaactatttgtgtttaaagttttgggagggatgttttgtggttctttgaataataatgcagagaaattagtagataccggacagaattacctgtgtttaccaataaccgatcaaagagttattttcttgcccagaggtaaaattataacgtgcaaaaacatcaaatatgataacagtcatcattgaagactcacatgttaagtatctgctatgtgcccagtcatctcattgtaccttaaaatcgtctgagaagtagattttttaatcactgatttacaaacgaggaaactaagactcggaaattaagttgcttaaggttactcagtaaaatggtggggttagggtttgacttcatcattaactttgtaaaataatgtttaacgttcttggtataccagtgatatattgcaaacagttctaatgtgagtgagagaacctcttctccaccctattttaaaacatttttactgacctatgcaagcattttacatttcctcaccttgggctctggggctttaactgtatggttacatcatttgcaagaataagttggtccctgtcccgtctctgctgtgtgggatcacaagcgacaattacagttttttttctagtcagcaata

SEQ ID NO: 1618 - DNA, 1032 bp, Homo sapiens
ttttttgcatttttggtagagatggggtttcactgtgttagccaggatggtctcgatatcctgaccttgtgatccgcccgtcttggcctcccaaagtgctgggattacaggcatgagccaccgtgcccggctgtgccaagaggttaagtaacttgcccgtggttacacagctaataggtggtggagatggagacagaattcaaacccaggcattcttgatctacagtatacactcttacccaccatcctacacagcctttcttattcataaaatattttctacagtgcaagaaaattttgatagcttgcttatttattcaagatttagactatatagattaactagactatcaagattttaaattcttgtgttttttgtttttttccccctctgtggcataactatctcttagtgatttgaagttctgataggcatttatttatgtttttgattaattaaaaaaagggaaaaaaatggaacataattattgaagctatcgtctaggtaaaaacctttctaaatgtaaggttcatttagattgatgacctgtagagtgtaacagtattgccataggcatacagctttttaatcacatatcatacataaacaaattagtaatacaggtgggtagatacagaccctaactttgagctctaagatgaaatttgtttataaatccctagtttccattcagttttttcaatatttatcaaacacctactgtgccaggcattgtttaggcacaggggatacagcaggagaacaaaatgaacaaaattttttgccttcacagagcttaaaatttagccgggcttggtggtgcacacctgtggtcccagctacttgggaggctgaggcaggagaattgcttgaacccgggaggcagaggttgcagtgagccatgatcatgccagcctgggcaacagagtgagactccgtctgaaaaaagaaacacacacacacacacagacacacacacacacaaagacagcatatactctagtaaggggagacagacagcaaacagataa

SEQ ID NO: 1619 - DNA, 1051 bp, Homo sapiens
ctcaagcaaattaatggaacccaagaagggggttgtgtgagccccgatttatggtggttgggtcagagcaaatgttaacctgagatttgtgattggcatgggaagtggggggcagtcttgtgagactgagcactcagtctgtgggatctgatgctctcttccagtgtcagaattgaattggagggcacctagctggtgttcattgcagaattgcttgcttggtgtgtgtggggagaactctcatacatttggtcaaagaagtctttgttgattgttgaatgagaatgtaggaaaagcacttttaagtttgtttattctctattctcagaaggctgttggggcattctagtattttagatgactctttctacttagtctagtgtgttattggcttaggttctttttgaggttcaaggtaaactttgtctcagccccccaaagaagtaataaatctattttggtctcttgcgtatttttactcttggtttacgcttaatggcatttctgtattcattgagcaggagctctgttataattggttattatccaccctctccctcccctttagatgcctaagtcaccttttttttttttcattccattgctctaggttcatagagttataggtggtatttttccaggtttctggcaatgtttcgaaacatggaactgtcttaattataaactataattattgtaatggtatatattaagcctttttgtctgtattgtgagactttccaagcagttgttatcttcttccttttagctgcttagtctcttacagcagaagggtgatttcatccatggccttaggtgggtttgaagcaatatgtaaaacataattttactataccaaattccatagtaagctaaagagtaaattttgtagcaaataaacattcccataactaaaagtgtgaaacactactgacaaacttcacatggttctgtgacatggaggtatcttgaaaggaaaattacaatagcagtggaaaaacactaatattaaaatttgctcacagaggccacccagaattactttaatgtt

SEQ ID NO: 1620 - DNA, 1034 bp, Homo sapiens
gccaggcgtggtggcacatgcctgtagtctccctgctgctcgggaggcagaggcaggagaatcgcttgaatctgggaggcagaagttgcagtgagccgagatcacgccgttacactccagcctgggcgacaagtgagactccgtctcaaaaaataaataaataaataaataaaaagaaccatgtataaaatatttaaattaataaaggaatctaaaatatatcaaggaacaactcttagacagttatgcaaatttgaaaaagaaccaaagagaaatgttagaaataaaagtataactgttgaaattgaaaacttagtggatgatttgaacaacagataagaccattggcaaagggagaattcatgaactgaaagatctgaagtaatttcccagaatgtaatgttaagaaataagttaaaaggaagagcataatgagtctaacatgtgtgattgaagtcttataaggagagaattaagaacaggcaatattttaaaggaataatggagaaaatggaataattgatgaaatatgtgaatatatatagggaccatatgcatatgaaggaagggggttaaataaaaagaaatctacttgtacatactttatagataactgaagaatatcaaagtcaaagagaagctcttaaaaacagtaggagaggatgggtattctatcctcagtatacagtattcttacagtatgaaactatcactgcacagatcatgaaatgcaaattgataattatagattattaattacttacaaaggaatgacagattgataactatggaagcaagaggacattggaataaaatattcaaagtgcagagagaaaacagccatcaaattagaattgtctacctagcaaaactaagttttaagaacaagggcaaaataaagacatttccataaagacaaaagctagaaaccaacagatcttcacctaatgacctttattttatttaattcatttatttatttttgtagagataagggtctcatgtgttgcccaggcttatctcaaactcctggg

SEQ ID NO: 1621 - DNA, 1955 bp, Homo sapiens
gatgaagaaggaaaaagaaattcgtgctagttttgctgttgcacctcatactgcaaaagttatggccacggtgcttgattaactgcttggttaagatgaaaagggcattaaatttttggtggaatatatgaacagatatgtgtttccgttgacagcagtcaggttctgtactgtctggtttcaggaatccactaggggtcttagaacatatacccccatgttaaggagggactactgtaattgcctttacccctgaatatttgtttagggttcttgttaattgttttctctctcacactctggcttagtacttacaggtaaaaaaatttttttgagacaagagtctctctctgttgcccaggctagagtgcagtggcacaatctcagctcactggagcctctgtctcccaggttcaggtgattctcctgcctcagcctcttgagtagctgagattacaggcatttgccaccatgcctggctaatttttactatagatggggtttcaccatgttagtgaagctagtcttgaactcctgacctcaaatgatcctcctgcctaggcctccaaaagtgctggtattacaggaatgcgccaccacgccctgccaagtacttacaagtaaattctttttttctttttgagatggagttttgcttttgttgcccagactggagtgcaatggcgtgatctcggctcattgcaacctccgtctgctgggttcaagtgattctcctggctcaacttcccgagtagctgggattacaagcatgtgctaccacgcccggctaattttgtatttttagtaagagacagggtttctccatgttgatcaggctggtctcgaactcctgacctcaggtgatccgcccgcctcggcctctcaaagtgttgggattacaggcgtgagccaccatgcctagccagtaaattcttgtaagttcgaatatggtatgacctctagtaatgtacatctcttgatgtctctaatttctgtattagtatattctttgtacttcattctgtagagcatatggtattcacataatacttttggttattgggtatggcacatacagtgctagggttctcattgtttctcagtcccaacaagaacatctcatcagaggagtttaaggtacattttaagttcattcattagtatctccccagataaacttaattgtaagtctgaatccctaagcaagaaattaaggtactcctttaaaaaatacattatttagtaaacaaagcatctctgacttctatacatacagcaccatttgttcagtgttttcagttcttaaaaaagaaataaaattataacatttagatccaaaaggggccttagaaacttttttgagtacattcattttacatagacttaggctagttgcgtcttagctcagcctaacgtatgtgaccacctgacctgatgtgatgccctttcactctcaaaatgtaacagtttgaatgataatgtactcatcctcacatagtggtggaggagtatggcactcagattttctacgtagttcagtgttctttctgctaccttgatactttttcagataattttttcttgttaaccctcaacaaagcaactaagtgattttaaggaagttgggagatttatctttttaaagagaagatgtagattctttgaaaaaagatgttgttttcttctatttaaatattcaagtgacactgccattatttgtactgagtgtccttacagttaaatatttatttaatcataggatattgaagccagagggtatgttatggacgatctaatctaaactagttattttatatgggtttttttgtgtgtgtggagacaggaccttgccctgtcattcaccctggagtatagtagcacaactatggctcactgcagccttgaccccccgggctcaaccgatccttacatcttgacctcccaaaatgttggga

SEQ ID NO: 1622 - DNA, 1049 bp, Homo sapiens
atttttagtagagacgggtttctccatgttggtcaggctggtctcgaactcctgacctcaggtgatccgcctgcctccgcctcccaaagtgctgggattacaggagtgagccaacgcacctggccttgttaccctaattttaaggaagaagaaactgtggcttggagagattaggtaaattgcctaaactctcagagctgcctggaggcagagagccagattcccacttcaggctatctaaatccaaagcccatgttgtttgccacttaaccactaatccatgctgcctctttatgtataaaacccagtataattgtgaataagaacaacaatacaccagagtttctgctataaatatcactgtagtatctataacttagcctagtgtttccttgacttgaatttcatgacctatttcatggattaatatacagttgccaaccttttttttttaaaccatgtaaagatatgtttaaaaacaactactttgtgtgttactaccattgtttcatggaaaaaagtgagaaggacataatctcggaataaagtacagttcttaagttaaaaccttaagcccccaagaatgttttaactcagtgaaacatgtcttcagaaacctgtagtaaacatgatacgtaatgatgaaacaaagcattccaagacagaagtccttcattatcattactattgatcattatgctggaggttccatttatttagaaatgaatgaatgaatagataggtcaggtgcagtggctcatgcctataatcccagcactttgggaggccgaggcaggcagatcacttgaggtgagcagttcaagaccagcctggccaacatggtgaaaccccatctgtagtaaaagtacaaaaagtagctggatgtggtggtgcacacctgtaatcccagctactcgggaggctgaggcacaagaatcgcttgaacctgggaggtggaggttgcagtgagttgagatcatgcctctgccctctagcctgggcaacacagcaagaccccgtctcaagaaaaagaaaaaaggaatgaatta

SEQ ID NO: 1623 - DNA, 1032 bp, Homo sapiens
acaaaatgagaaaaactgaagtccagagcagttaagataccacccaaaggaaaatgacaatttagtaaaagtcctgggactagaacccagatttttctgactctcagtcctctattatttctgttctgccaaatagccctcctaatctaacttacaattttttattttataacagcaccttagtaatctttaatttttctttcttatttcttagtcatttaccagggactgattcttctgttaaagtttcttcctccttttctctctgcctttcaattttctgttattgttgctctgtttgatatatttatattaatattatagcctgctaactagtttcccggtttgtgttacctttttcattcacttcagactacatacacacagatgtctagagatacaatggtttaagaccatagtctctggaaccagtgtgcatagatttgaattctggctctgtcacctcataactctataactttagataaataaaattagtttctcgtctgtataatgaatccagtaatagtacatacttcataaagtgtggaaactaaagagttaataatatatataaagggcttagaacagtaactgacatttaataaacaataaatattagctgctgctatgatgaggaagatgactgtgcctactactgccattattattattaacaaattaatattagcaaggcatactctgaaaacctttaaaatatatttttatattgctttatgatttaagaaatttctggccgggtgaggtggctcacgcctgtaatcccaggactttgggaggccgaggcaggtggatcacctgaggtcaggagtttgagaccagcctgaccaacatggagaaaccctgtctctactaaaaatacaaaattagccaggcgtggtggcgcatacctataatcccagctactcgggaggctgaggcaggagaattgcttgaacctgggaagcagaggttgcaatgtgccgagattgcatcattgcactccagcctgggcaacaagaacaaaactcc

SEQ ID NO: 1624 - DNA, 1027 bp, Homo sapiens
agttccagcttcttgggaggctgaggcaggagaatcacttgaacccgggaagtggaggttacagtgacctgagatcacgccactgcactccagcttgggtgatacagtgagactgagtctcaataaataaataaataaaaagttttaaaaaagaaaaacaaagaaaaggccgggtgctgtggctcacgcctgtaatcccagcaccttgggagaccgaggcgggtggatcacttgaggtccggagatcgagaccatcctggccaacatggtcaaaccccatctctactaaaaatacaaaaagtagctgagcgtggtagcgcgtgcctgtagtcctagctacttgggaagctaaggcaggagaattgcttgaacccaggaggcagagattgcagtgagccgagattgccccactgcactccagcctgggcaacagagcgagactctatctcaaaaaaaaaaaaaaagaaaagaaaagaaaatgttaaggtaactgggtgtggcgtggtggctcacacttgtaatcccaatacattgggaggccaaggtgggtggattgcttgaacccaggagtttgagaccaacctaagcaacatggcaagaccccatccctacaataaatacaaaaattagctggatatggtggcgcgtgcctgtgtttccagctactcaggaggctgaggcgggaggatctcttgagcccaggaggtcaaggctgcagtgagccataatcatgctattgcactctagcctgggtgacatagcgagtctctgtcccaaatatgaactctttagtaaaggattctggggtataacactttctgtatagaaaaaataaagttaaatgatttcctacactgtacacagaaatatattccaagtgaattactttggtgtgtaaaacaaaactttaaaatatttgaagaaaatataaatatttttatgattatagggaataaaggctcttaagacacaaaaaactaataaaaatttttgagtttgattacataaaaattaaacttctgcatta

SEQ ID NO: 1625 - DNA, 1663 bp, Homo sapiens
cttgcaggctacacacggtgcgtgaggcacccccaaagctccgatccgcatcagacttagcccagccgaagcccccaaatttttatgttaacccagcctcacgccactcctcctctccctggtcctccgagtccccagaaaaggactcgtatctaaactcgttatctaattctcgagttagcggtctgggggactctgagctcgaaggacccccagcctagggtcttgtatcacccaatccccttaaaaagtaggaattcggacgaagtccacttaaccatcccaaagtgccatcatctgcaattctaagaaagaatgatgggacgtgtgttacctgctaatatatctttccctccaggcagttgtgtcgacccctccacgctggttggcagagcggcttggcctttttgaggagctgtgggctgctcaggtaaagagattagcaagcatggcacagaaggaaccccggactattaagatatcacttcctggaggccagaaaattgatgctgtggcatggaacacaaccccctaccaactagcccggcagatcaggtaacaggcccatcctgtaactaccaggattatccttctgcccctttactttctcttcacttgagcaggggaagaaaacttggtctgcttgtttctgttccgtccccattaagatagcctttcctgaagattttgtttttgttttttgttgttgttcttttatacagacggggtctctccatgttgcccaggctagtcttgaactcctgggctcaagcgatccttccatctcagcctcccgaagtgctgggattacaggcatgagccaccaaacccggcctgagatttgttttatctgtattagtttctgcatcagagtctctgtcctttcattggggaaagaaatgaaagcttctgttgctctggtaactcatttcacctttgcaagtttacagttgctgagagatgagcaactttctccccactgtggattgtaaccctgtctgttttaaatcattaatttactttttaataattgatacataataattgaacatatgaatgggtatatgtgatattttgatatatgcatacaatatgtaatgatcaaatcagggtgttcaggatatctgttaccccaaacatttatcatttctttgtgttgggactatttcaaatcttctagctattttgaaatatacaataaattattattaactgtattcacccaactctgctatggaacattagagcatattccttctgtctaactctatttttgtacccattagccaacctcttcatctcccctcccccatcctttccagcctctggtaactatcactctattctctaccactgtgagatcaactttttaaactctcatataggaatcagaacatgtgatattttcctttttgtgccttgtaaccctgtctttttcttcatccccaccttccactgctgaagttcaacactggcagatactgcagtggctgctcaagtgaatggagaaccttatgatctggagcggcccttggagacagattctgacctcagatttctgacattcgattccccagaggggaaagcagtaagtttctttcttatcaggaatacagtgactactaaaccaagagatattgaagcaggaaattctaacatttta

SEQ ID NO: 1626 - DNA, 1031 bp, Homo sapiens
tgaagtcttgttctgtcacccaggctggaatgcagtggcgcgatctcggctcactgcatctctgcctcccgggttcaaacaattcttctgcctcagcctcccgagtagctggaactacaggcatgcaccaccatgcctagctaatttttatatttttagtagagacggggtttcaccatattgtccaggctggtctcgaactcctgaccacgtgatccacccaccttggcctcccaaagttctgggattatagacatgagccaccgcgccctgccagggaattgatttttatctgccattgccctctctcagtaggacagttcctttctcttcacctcttctgtcagctaaagaccatgagagggagaaagctagaagctgaagattctgaaaatcactaactggcctcttctttctcctaggtgtggcacattggttgacctttgccagggcccccaccttcggcatactggacagattggaggactgaagctgctatcggtcagttgtgggacagagttaggttaagattcctattttgagccgggcatggtggctcacgcttgtaatcccagcactttgggaggctgaggcagatggatcataaagtcaggagtttgagaccagcctggccaatatggtgaaaccccgtctctactaaaaatacaaaaattagctgggtgtggtggcacacacctgtagtcctagctgctcgggaggctgagacaggagagttgcctgaacctgggaggcggaggttgtagtgagccgagactgcactactgcactccagcctgggcaacagagcgagagtccatctcaaaaaaaaaaaaaaaaaaattcctggtttcactgggatgagcaggagaatcggaaggtgatactttctgtcggcaccccccttttttttttttgagaccaagtctctcggtcgcccaggctggagtgcagtggcgcgatcttggctcactgcaagcttcgcctcctggattcaagcaattctcctgcttcagcctcccgagtagctggga

SEQ ID NO: 1627 - DNA, 1046 bp, Homo sapiens
caagggagcaaggggaaatgcagatgtgtagagcaaaaagctctgaacttagactgggcatggtggctcatgcctataatcccagcactttgggaggccaaggtgggtggatcacttgagatcagcctggccaacatggcaaaaccccatggcgcggtggccttgggtaaatcttacttattttccccatctataaaatgaggctattaattcctttttgtcctaccagtaaattcacctcataaagataatgaaaaccaggccaggcatggtggctcacacctgtaatcccagcactttggggagggtgaggcaggcggatcacttgaggtcaggagttcgagaccagcctggccaacatggtgaaaccctgtctctactaaaaatacacaaattagctgggtgtgctggcctacgcctgtaatcccagctacaaaaaaggctgaggcaggagagtcacttgaactctgccaggaggcagaggttgcagtgagctgagattgtgccactgcattccagcctgggccacggagcgagacaacatctcaaaaaaaaaaaaaaaaaaaaagataatgaaaaccaactaattcaggaaaaaggaaaagttaaaaagtgctgtaaaatacagactgtcggccaggtgcggtggttcacacgtgtaatcccaacactttgggaggccaagttgggcggatcacttgagctcaggagttcaagaccagcctggccaacatggtgaaacctcgtcactactaaaaataaaaaattagctgggcgtggtggcatgcacctgtagtcccagctactcgggaggctgaggcaggagaattgcttgaactgggaggcagaggttgcagtgagccaagattgcaccactgcactccagcctgggcaacagagtgagactctgtttcaaaaaatatacatataggggctgggcgtggtggctcacgcctgtaatcctaacactttgggaggctgaggcgagtgaatcacgaggtccagagatcgagaccatcctggctaacaccgtgaaaccccgtctc

SEQ ID NO: 1628 - DNA, 1120 bp, Homo sapiens
tcaggtggcctttccctggctccaccaaagcttttctaaaccacctttctttctccctatgaacctgcaaacccctgatctttatttgccccctgtatgtactataattcagctacattctacccccagcttgcttccgcttcctctctgtttttgccctttgttttcctcaaactgccagcatccctgatctctagcgggctcacagctcactgacccttatttcctgcccctagctggaagcagagatccaaagctgtcttgatttcctccgttccgtctatgccgttcttggcttctccttccgcctggcactgtccacccggccatctggcttcctgggggacccttgcctttgggaccaggccgaacaggtgagtaggaggtagagaaatagaggcagataaaccactctctggtgggaaggagtggagaatacagtaatcaaggttctcagaggcatctggtgagtgggtcatttgttggggactgaccggatgtgttgcttttgaagtctaagatgatgtattccactcttgtctcattccttcaaaggtccttaaacaggccctgaaggaatttggagaaccctgggacctcaactctggagatggtgccttctatggacctaaggtaagcttgggaccctggttagtgttgtatttatttattttttgctttgttttagtaaatatttaatagatacaaagaatttttttttttgagacagtctcactctgtcacccaggctaaaatgcagtggtgtgatctcagctcactgcaacctccagctccctggttcaagcaattcccctgcctcagcctcccgagtagctgggattacaggtgtacgccaccacacccggctaatttttttgtatttttaatagagatggggtttcgccatgttggccagactggtctcgaactcctgacctcaggcaatccaccccacttggcctcccaaagtgctgggattacaggcgtgagccaccgcacccggccacaaagaaatatttttaaacttacgtaggatataaagaaaaacaatatactttctgccctcttggcatctgcaatctagtgagggctgctgaaggtaaataggccatatcagtgc

SEQ ID NO: 1629 - DNA, 1112 bp, Homo sapiens
aagggtgtagccatagatgggtggtggtgaagatctctgagatgaggagctcaaggaattgagaggccagggtgtggacatcaggtaatattataacaccattattagatggagagagctgctgagaactactgccagagtgagttgagtagagtgaactggaggggtagcgtatgatagagctaggtgacatgatgaaggtagtagcccgggatgagggtaggttaaagggtgggatggcacaggtaatggaggatagtggttctggatagtgcttctggcttatctcgtgccttcccatctgtttcctgtagattgacgtgcacctccacgatgccctgggccggccacatcagtgtgggacaattcagcttgacttccaactgcccctgagatttgacctccagtataaggggtataaaaccttgccctatcctcttttcccttgacagtgcatggaataagtccttctgcctttggccctaaaaactaaaccctccacaccctctcctgccagagctgaatatttcttaaaaactggaaggtgatcttgggtacacaattcgtgatacttccaccattccatccacccccccctttttcctttcaaggcaggcgggtgccctggagcgtccagtcctcattcaccgagcagtgctcggttctgtggaaagactgttgggagtgctggcagaaagctgcggggggaaatggtgagacctctgacctggatttctgttctggccccaaaccggatagttatgctccagatcctgtcccccttcatatgccagcctctttccttctcaagtctgctccatacaagcacacttctggccagagccagagtgactaatttgccatcacctgttctttccctaccaggccactgtggctgtccccgttccaggtggtggtcatccctgtggggagtgagcaagaggaatacgccaaagaggtaaggagttgaggtaagggagggggcagaagcaggtccagtagagagtctggtgccctgcagtgggcaggaagaggctgcaggggtggtagaggaaggagcacagccctcacagccacaagactgggctcgagtggctgctgtcctagatgct

SEQ ID NO: 1630 - DNA, 1105 bp, Homo sapiens
cggtctcctccgcagggttctcttcttcttgtttctgggacatggcgggaccgggactgtggagtgtaaggggcccgggaaggcaaccggagaagggaagggggaggggaaacggggacaacctgcgctgctgcttcggctcctgtcactagggttgctcagtcaaaatggcggcccttgcccgtgacgttgcgaccgccccttcctatgagagccagtgggagtgaggtagatagggcaatgacgtaacgatctaccaatagtcgccgtctaaaggtgggctctatagaggcgaccggcaagctggaacaccaacctggaaagagagtgagccacaaggaccaattggaagcctgtgggggatatcgggggcggggctgctggctgtggtacttttgcagctttggtgggctccggcttccttcactccagcccaccgcgtccgagagacttagcagggcgtcaaactggagagcggaaggatggaaccttttattctcaggtggagaggattaagctttgcggtgttagcagaaaatgatcgagctccagaaaatgatttggaggtcagattcgattttaaagtagtactaacaggccgggcgcggtgcctcacgcctgtaatcctagcactttgggaggccgaggtgggcggatcacctgaggttaggagttcgagaccagcctgaccaacatggtgaaaccccgtctctactaaaaatacaaatattagccgggcgtggtggcgggcgtttgtaatcccaattacttgggaggctgaggcaggagaatcgcttgaaccctgcaggcggaggttgcagtgagccgaaatcgcgccactgcactccagcctgggtgacaggacgagactttgtcgcgaaaaataaaataaaacggtaccaatggtattacgatgtgtcacttggcctgtggaagagagagactgagtctcaacccgagctgtcttgcaaaacactaatggcttacgttccgtagtttcactcttatgtgtagtttttatattccatcagggtgatcccttggggactacgctccttgaaacaaggaggacagtgtaagtatgtggtaaacatttggtaaatac

SEQ ID NO: 1631 - DNA, 1049 bp, Homo sapiens
tgccactgcactccagcctgggcaacagaacgagactccatctcaaaaaaaaaaaaaaaaattggccgggcacagtggctcatgcctataatcccagcactttgggagaccgaggcaggcggatcatgaggtcaaaagatagagaccatcctggctaacatggtgaaaccccgtctctactaaaaatataaaaattagctgggtgtagtggtgccaccttgcgtgcctgtagtcccagctactcgggaggctgaggcaggagaatcgctggaacccagggaggcggaggttccagtgagccaagatcgcaccactgcactccagcctggtgacagagtgagactccatctcaaaaaaaaaaaaaaaattaccccactttccctaattaccatactaccctctttaccttcccgttctctaccgaatctatgtcataactcttgagaataactttgcttcttctataggaaccttgagtcagatgtctggagaactaagcaaagatggtgacctgatagtcagcatgcgaattctgggcaagaagagaactaagacttggcacaaaggcacccttattgccatccagacagttggtatgtgcaaacttggaggaaccactcctgaaaggcaacctgcaccctccactgctgattgtttcttttccccataaccttcccatttgtctctcacatagcagcctggatttatacagaaactggcagtgtttaaaaagatttatctttcccttttactcagggccagggaagaaatacaaggtgaaatttgacaacaaaggaaagagtctactgtcggggaaccatattgcctatgattaccaccctcctgctgacaagctgtatgtgggcagtcgggtggtcgccaaatacaaagatgggaatcaggtctggctctatgctggcattgtagctgagacaccaaacgtcaaaaacaagctcaggtacctggacagaggactgtaaaggggtagaggctgggagcacagcacctgccctgttcgtgccatagaccagataccacaattagctttt

SEQ ID NO: 1632 - DNA, 1196 bp, Homo sapiens
ttaggtggtcttggctttgcttcccttgaggttctgattttactttttctctccttttcaacttaaaaagtatcaaatgtctcctggccaagtcttttccctatcaagacatgccctacctgccctctcagttctacttcttccttgaaacagtgaaaaagacttgggaggacatagaagacatctcctgccgtgacttcatagaggagtatgtcactgcctaccccaaccgccccatggtactgctcaagagtggccagcttatcaagactgagtgggaaggcacgtggtggaagtcccgagttgaggaggtggatggcagcctagtcaggatcctcttcctggtactgttcttctctacaattttggaggcagaggttggtggggggggaacttaagaagcagtaatgaggatggttttatagctattccatagccttcctctttcttatcctcgtatgtgttctcactgtttttggtcaaattttactttgccctttttgttgttcctctgcaggtcattgttgaaaataaattatctgaattataatacgaatctgcatggttttgatttatttattttttttctttaggagtattcacattgtgtgtaggtacagaaagggcagccaattccatttttccagggttaaggttttagtaggatagtgggacgaagaagagggatcaaggagtcctgattatctttcaaggctcagtttaactcttaggtattttgtactcatccttttctcccttctctctcccttcttagaatcatatttcttatttttaaaagttttaaaaacattttttaatactgctgcttgcagaacaaggctacctgataggcagtgtgcccagagtagccagaagaaattagaagttatatttcttcttggtgttacctcagcccgttacttctaaggccttatgatccttatcatgctttttgtttggtgttttgttttgttttcagacggagtttcactcttgttgcccaggctagagtgcaatggcacgatctcggctcactgcatcttccgcctcctgggttcaagtgattctcctgcctcagcctctcgggtagctgggactggctaattttttgtatttttagtagagacggggtttcaccatgttggcaggctggtcccgaactcctgacctcaagtgatccacctgccttgtcctcc

SEQ ID NO: 1633 - DNA, 1050 bp, Homo sapiens
ggaccttccttgaaatgaagacatagaatgattgaatagtatctagcaattttctgttgcaaaaaaagattatcttaatttcatagctaaatgaatgtcttaacagattgtgatttacacttgtaagtgaaatgtgttcagagaggagaagtaggcagggacctgattacatagggctttgtaaatcagaatgaaaaaagttagaatcaggctggcacagtggctcacacctgtaatcccagcactttcggaggccaaggtgggtggatcacctgaggtcaggagtttgagaccagcctggccaacctggtgaaaccctgtctctactaaaaatacaaaaattagccgggggtggtggcgggtgcctgcagtcccaactacttgggaggctgaggcaggagaatcgcttgaatccaggaggcagaggttgcagtgagccaagatcatgccactgcacttcagcctgggtgacaagagcgagactctgccttaaaaaaaaaaaaagaaaagttagaatcaaattcatggtgctcttacaggattttaagctgccaagtgatgtgacctgcctttttcagattactctggcttctttgtagatcataggtcttaggatggcaaaagtagattttggaagaccaattaggagatcgttataggagtacagcagagagagacattgttgcagctatgacttgcaatagaatggaggtgatagtagaggtaagaaggatagatttgggctgtattaataggtagagctacagaattggatagattatggagtggggggaaagagtagaatcaaggacaattcctaaatttttggcttgagcatcttagtggttgttggtgctttttactgagatggaagaccgaaggagtagtaggtttgagtgaaattcagtttttgttttggccatgttaagtttgaaatgccgccgggcgcagtggctcacgcctgtaatcccagcactttgggaggctgaggcgggcggatcacctgaggtcgggagttcaagaccagccttgaccaacatggagaaatcc

SEQ ID NO: 1634 - DNA, 1045 bp, Homo sapiens
ttacctaatttttaatctttatccacaacacattataaatgatgatagcttaagaattataatagttttatggatttttttgtgctctagtgatcataccgtgattgattttattctaacctcctcccagggtatatgagtgtaacaaacgctgcaaatgtgacccaaacatgtgcacaaaccggttggtgcaacatggactacaagttcggctacagctattcaagacacagaacaagggctggggtatccgctgcttggatgacattgccaaaggctcttttgtttgtatttatgcaggttggtgataaaatataagggttgtttcctgagactgggacatggtagggaattgaaccagagacaaattgaacataagaagaaagtgcttgacatgtgaactggagtaagaggaggccagggacttctacaaagaacgtgatgagtgatgtacctgtctagctagaccagagagggacacaagtgtttcacaaataagagaatgaaaagggatgaaattttggacatggtgatatttcagagaacagacatgattatagagtccagtgtatcattttctcccatgtcactccactcagagatcttttagcatagcccagtactctgtttcaataaagtagaagaaatggaaagacagaaagggcaagatttaaaatgacagtaagttctccatactttcatagttaagatacaaagggaggtattatcaaagagaaacactgggccggcgtggtggctcatgcctgtaatcccaaaactttgggaggccgaagtgggtggatcacctgaggtcaggagttggagaccagcctggccaacatagttgaaaccccatctctactaaaaatacaaaaattagccaggtgtggtggtggatgcctgtaatcccagctacttgggaggctgaggcaggagaatcacttgaacccttgaggcagagattgcagtgagccgagatcatgccactgcactccagcctgggtgacaaaagcgaaactctgtctcaaaaacaaaacaaaaaaaa

SEQ ID NO: 1635 - DNA, 1287 bp, Homo sapiens
caagcgatgctcccaaaggggatcctcagcctcccaaagtgctgggattacagccatgagctaccgtgtccagcccagtgcctgtctttttgacctgtctccaaatctgccttctctcaaacctaggctagaagcctaagaaacagccagtaacctgttggcttcattccttcccctcccattagagttactgaaagctctcgaaattacggttacaatccttctcctgtgaagcctgaaggacttcgccgcccacctagtaagactagtatgcatcaaagccgaagactcatggcttctgctcagtccaaccctgatgtaagtcacctcaagcttattcagagtctaataaaggaaaatgggccattgtcacctcatcaagtccttcactataattactgttaggtcttctcctacttctttagccttgacttcctgccttattttctttcatccagcatctaatcttcctcttgccaccgccctttcctgccaaaccgtgggtaacagcaaggacttaaaggagcccttcccatttacttctcttacttcttaccctcctgcttccccaggatgtcctgacactgtccagcagcacagaaagtgagggggaaagtgggaccagccgaaagcccactgctggtcagacttcggctacagcggttgacagtgatgatatccagaccatatcctctggctctgaaggggatgactttgaggacaagaagaacatgactggtagcctggaaaaattttgggaatggtgggaagaaatagtaagaaacttgggatagagcattttttaaggaagctaaagaagtagtgggtaaaaattcagatcctaagaattggagcatctctgggagggctttctgactccaagctaaactattgtttgacacatcctctctcatttccatttttttactctttcccctcagctcctttgtctagcagatctaattatgcttgaaaaaaaaacctgctacttaggatctttgagttccagcttattggtgtttctcagctgcaatgttgggagagaaataggggtagaatgtccattcatgatagaatgtctgttcatgagttgggatgggtcctgaccccattctccctcctgtccaggtccaatgaagcgtcaagtggcagtaaaatcaacccgaggctttgctcttaaatcaacccatgggattgcaattaaatcaaccaacatggcctctgtggacaagggggagagcgcacctgttcgtaagaacacacgccaattctatgatggcgaggagt

SEQ ID NO: 1636 - DNA, 1086 bp, Homo sapiens
taggaggttgaggctgcagggagttgtgatcacgctactgcattccagcctgggcgacagagtgagacctgtctcaaaaatatatatattatttaaaaaaaaaagataagtggaaatgaatagagatacttttgttagtttcccattttcctttctctccaggagtcccgacctctacatgttgtgctgggaaatgaagcctgtgatttggactccacagtgtctgctcttgccctggctttttacctagcaaaggtgggtaaaaaaacgtagtacctaggatctgagtccctcagaacgaaaagatctggattcaagacccagctctaccacttaccagcatttagcattgggtaaattaaatcccttaactttgctgagtctcatgccaccatccataaaaactaaaatgatattttgcagtgttgctgtgaggaaaaaagtgagcaaatatatttcgagggatatgtaaaccataaagcaatattcaaacagtttattactgagttccgtataggtatcagtgatctagtgtgtattcctctgcccaggttagttcttgaggactaaaaattccttctctgcagcattgcatctagaaataggtatttaccatgagttaccttgttgactttcatgttattactaagaaggagggagggcaaaagtcatcctttcatttttatagactgggtacttatggctttgagaaaggtggtaacttacctaagtatgtctcctttggtcccagtagtcttgttactttttcctgtcattataaaaccttgtgataccttcttttcactttcctatctagacaactgaggctgaggaagtctttgtgccagttttaaatataaaacgttctgaactacctctgcgaggtgacattgtcttctttcttcagaaggttcatattccagagagtatcttgatttttcgggatgagattgacctccatgcattataccaggctggccaactcaccctcatccttgtcgaccatcatatcttatccaagtaagcacaaggaaattaaattgctacctatcatgtaccatgctgggctctgatgagtgagatata

SEQ ID NO: 1637 - DNA, 1046 bp, Homo sapiens
gagccaaactccatctcaaaaaaaaaaaaaaaaaaaaaaaaaaaaacaataattagctgggtatggtggtgggcaggccaagctgggcaaatcacctgaggtcaggagttcaagaccagcctgacaaacatggagaaaccctgtctctactaaaaatacaatattagctgggcatggtggcacatgcctgtaatcccaggtactcgggaggctgaggcaggagaatcgcttcaacccaggaggcagaggttgcagtgaactgagatcattccactgcactccagcctgggcaacaagagcaaaactccatctctaaataaataaataaataaataaataaataaataaataaaataaaaagggtttaggccaggtacagtggctcacgcctgtaatcccatcactttgggaggccaagacaagcagatcacttgaggtcaggagttcaagaccagcctggccaagatggtgaaaccccatctctactaaaaatacaagtattagctgggcatggtggcgtggcacctctaatcccagctactcgggagactgaaacacaagaatcacttgaacccaggaggtggaggttggaggttgcagtgagccgagattgcgccactgcactccagcctgggtaatagaggaagactatgtctcacaaaaaaaaaataaaaaagaaaggttttttttttgagacggagtctcgctctgtcccccaggctggagtgcagtggctcaatctcggctcactgcaacctctgcctcccgggttcacgccattctcttgcctcagcctcccgagtagctgggactacacgggcccaccaccacgcccagctaatttttttgtatttttagtagtgacggggtttcaccatgttagccaggatggtctcggtctcctgacttcgtcatccgcccgtctcggcctcccaaagtgctgggattacaggcatgagccaccacacccggccaacataaaacatttttataaaaaatatatcttcaggcctggtgtggtggctcatgcctataatcccagcact

SEQ ID NO: 1638 - DNA, 1050 bp, Homo sapiens
cagagctggaaaatttgatgcatttactgaactcttcctgaaagtttaatatggagtgggaatcagtttttgtcctaatttattagagaaggcttcctcttctctactccttgtgcaaacccatctctggatagctagaaaaggaacttcagaatggactatatgtgatgaccacctgtatgcactctaggctcttatctgtctctattttatgtggtgactatatctcagaagtactaccccttctgagtagtactattatttcctatgccaattttttttaagtctctgatgctgccctttttaaatttttgtcttattttttagcctctttagtattagggggtgaggtgacattcctagactctacagtagcagtttggcatgttagtgacaggaaattgtgattccctatctccccctcctcctaccttttctgcttttgtgattccattgttcctatctcattgaggctttcccaggcattcgaatttagttagtaggtcatttctaatctctgggccttgtcttttctctctccgttcccctccttccctaccacatattttttgtttattctgaggtggtttgtttctgaaagttaatctaggtcaccttctatatcctgtgctttctagttggctttagacatcttgttctagcaacaatgatggtagcagctctctccctgaccttgccccatgtgctgtccttctgtcaaggccatttgtgtgtgtactgcggcaggtgtgtgtgtggggggatgcgcccagactgttctcacaatgtcctcagtttttcaggttgtctgacagctttatgtacagcgtatttttagaaaaacttaaatatacttctttatttagggttttattctgatgagcaagtttgtgtgtatatgtgtgtatgagcatttgtatgtatatatacttatacagatctatattatatatacagtttttgtactatcatttaaaataaaaatgtttctcaataaaatgtcaaagccgaccatttcagggtgtcattgaatttgttttcatctcctgg

SEQ ID NO: 1639 - DNA, 1046 bp, Homo sapiens
actttgccagcttctcagctattcttggttaatagggtgcttgctgctatcttagtccaaaatcagcacacatttatatttaaaaataggaggatcagtctgatagtagcacaatccccattgatagccggggtgaacagaccaatttgactagcaagatgggtatcctatctagtgtatagagttctgaaaagctgttttgttggcaagaaggatacctttctttacaaaattagctttgagcctgtccaaagctaaggacatataagcatctgtgttcagcgactggaatctcaagtaagttctcaaagtcaatatttaggaaattggacacctaccatgtactagggtacatgtagataatttctttttggtaaatacatatagtcagcaaatgctgtgcacatattcaagtaatagaaagtaattctggcaggtactttattaatatatatagtcttggctgtgctgacagaaaaaaaagcaggaacttgtggagccttaagaaccaaagaactaaaaatcttgttgaattaaatcctggtgagagaaatcatcaagatgggaaagttggagggaactagagagataggaacctagagttctctgatgggtgatactcttttttttttttttttttttttgagacagagtctcacactgttgcccaggctggagtgcggtggcatgatcttggctcactgcagcctctgcctcccaggttcaagtgattctcctgcctcagcttccctattagctgggattacaggcatgcaccactacactcagctaatttttgtatttttagtagagacggggtttcaccatgttggccaggctggtcttgaactcctgacctcaggtgatccacccgcactggcctcccaaagtgctgggcttacaggtgtgagccaccgtgcccggctgggtgatagtcttaagtaatgggaaaaattatgaactagggcaactttcctaagacttccttcctctgtaaaaaagaaccctctactccaaggagatcaataggtaaaaaatacaggtga

SEQ ID NO: 1640 - DNA, 1050 bp, Homo sapiens
aattgttctctcctagaatgttatttattatttttttgagacagagtcttgctctgtcgcccaggctacagaccagtgtagtgcagtggtgcgatcttggctcactgcagcccttgcctcccaggttcaagcgattctcctgcctcagcctcctaggtcactaggatcacaggcgtgcgccaccacgcccagataatttttgtatttttagtagaggcggggtttccccatgttggccaggctggccttgaactcctggcctcaagcgatcctcctgccttggcttcccaaagttctgagattacaggcgtgagctactgcccggcctctctcctagaattttggagcattcttacttgacgtaaagaagggaacaagagccgggcatggtgactcacgcctgtaatgccagcactttgggaggccaaggcaggtggatcacctgaggtcaggagttccagaccagcctggcgaaaccctgtctctacaaaaaatacaaaaattagtcagacgtggtggcgtgctcgtgtaatcccagctgctagggaggctgagtcaagagaatcacttgaacccaggaggcggaggttgcagtgagcttagagtgcactactgcactccagccagggcaacagagcaagactccgtctcaaaaaaaagaaaagggaacaagaaaacttatcagtttatttttctttcttctttttactgggtttccttgatcaaggacaaaagtgtacttcaagaatatactctttcctgatggccaggtagagagggaatctttgtttttctgtgctccatacccagcccagagagactgaatgaaacaccgatggtgtttcctagaggaaaccctaagaagcccgtttcccctattgcacctcacttctctgccctttcccatctaaacagagaatttaatttcgacatatgtttatcctgttttgttcatatctcctacaagcttttattcttttactgttttctatttgaagtgaacttttttccctcaacccctccatctttttaaactgtctccatttttct

SEQ ID NO: 1641 - DNA, 1048 bp, Homo sapiens
ctcctgtcttagcctccctagtagctgggattacaggtacacaccaacatgcctagctaatttttgtatttttagtagagatgaggtttcaccatgttggccaggctgatcttgaactcctgacctcaagtgatctgcccgccttggcctcccaaagtgctgggattacaggcgtgagccaccgcgcctggtctgaaatatgttcattttaatccagcagaattcattgctgtttcaagatagaaccagatttggaaataaaattggaaggtggctatctgccaaaaatttcaagtgcctcttggccatgggtagcttattcaggaaacccaagtcttttaaggaaggacttggatttttttcttaatttcaaagaacgtttttgtgccaagggatacatatttgaggtctgagaaccatgaaacttgtttgtaggattagaagcaaaagttgactagagggaaatgtagagttattttaatttaactccctcattttccaaattaggaaactgaggtaaagatgttgcataaaggctgtatgttaccaagattaatctttttttttttttttgagatggagtctcgctctgtccctcaggctggagtgcagtggcgtgatctcggctcactgtgacctctgtcttccaggttcaagtgattctgcttcctcagcctcccaagtagctgggattacaggcgcacgccaccacgcctggctaatttttgtatttttagcagagtcagggtttcaccatgctggccaggctggtcttgaactcctgacctcgtgatctgcctgcatcggcctcccaaagtgctgggatgattacgggcatgaggcaccacacctggccatcaagattaatcttaataaatatgttgctccttcttttttttttttttgagacagagtttcgctcttgctgcccagtctggagtgcagtggtgcgatcttggctcactgcatcctcctcctcctgagttcaagtgattcccctgcttccctagtagctgggattacaggcacatgccaccacgcctggcta

SEQ ID NO: 1642 - DNA, 1048 bp, Homo sapiens
gctgttctcgaactcctaacttcagctgatccacctgccttggcctcccaaagtgctgggattacaggtgtgagccaccgggcccagctggctcattctttgatatactgcttttaattggctattagctgaggtgaccccaggactggtagatcaaattgctttcaagcttttgtttctagggacatccttgcacttctgactgtttcctagaagagcgttaggaaaaatttacaccagctaagaaacaaaatttagcttttctctgaaatgtggcttggttttcttttcttttttttttttttttggagatggagtctcactctgtcgcctaggctggagtgcagtggtgcaatcttgggtcactgcaagctccacttcccgctttcaagcgattcccctgcctcagcctcctgagtatctgggattacaggcgcacaccaccacgcccagctaatttttgtatttttagtagagacggggtttcaccatgttggtcaggctggtctcgaactcctgactttggcatccacctgcctcagcctcccaaagtgctgggattacaagtgtgagccactgcgtccggccgtggcttggttttcttaatttgcttgatccagtcattattaaggatgttgtaatggtacgcttttttttttttttttttttttttttttttggagacggagtcttgctctgttgcccaggctggggtgcactggtgcaatctcggctgactgcaagctccgcctcctgggttcacgccattctcttgcctcagcctcccgagtagctgggactacaggcgcctgctaccacgcccggctaactttttgtattttttttggtgggggtgtttcaccgtgttagccaggatggtctcgatcttctgacctggtgatctgcctgcctcggcctcccaaggtgctgggattacaggcgtgagccactgcgcctggccgctttttttttttttgaacacacttccttagagctatgtgttcagcagtacttctcaggaggcaggttgacatttcaagagtatttt

SEQ ID NO: 1643 - DNA, 2035 bp, Homo sapiens
atccttgtaatgtataaccttgtatatacatctttgtttgcttcactaagataacttagtacttcttggtcagattgtacataatgatttttaaggctttttgctttgtttttttctgtttttttgtttttgtttttgtttttgtttttgttttgagatagagtttcgctctgttgcccaggctggatttcagtgaccccatctcggctcactgctgcctctgccacccattatcaagcgattctcgtgcctcagcatccctagtagctgggattacaggtgatcgccaccatgtccagctaatttttgtgtttttagtagagatggggttttgccatgttggtcaggctggtctcgaactcctgacctcaagtgatccgcttgcctcagcctcccaaagggctgggattacaggcgtgagccacagcacctggccggctttttgcaagttagtaccaaattgccctcaaggagcggaagagcctcaaacaaaatctaccttgtgactgtcgcccaggttggagcgcaatggtgtgatcttggctcactgcaacctctgcctcttgggctcaggtcatcctcccacctcagccttctgagtagctgggactacaggcttgcgccaccacacctggctaaatttttgtatttttagtggagaccagttttcaccatgttgcccaggctggtctcgaactcctggcctcaagtgatccacctgatttagcctcccaaagtgctgggattacaggcatgagccaccatgcccagcctgtgcattctttttttttttttttttttttgagatggagttttgctctcgttgcccaggctggagtgcaatggcgcgatctcagctcactgtatcctccgcctcccgggttcaagcgattctcctgcctcagcctcccgagtagctgggattacaggcaggtgccaccatgccatgctaattggttttttttgtatttttagtaaagacggggtttctccatgttggtcatgttggtctcgagctctcgacctcaggtgatcctcccgccttggcctcccaaagtgttgggattacaggcgtgagccaccgcacccggcctttttttttttttgaaaaggagtctcattgtgtcatccagcctggagtgcaaaggcaatcttggctcacttccagctctgcctcctgggttcaagcgattctcctgcctcagcctcctgagaagctgggattacaggtgcctgccactgcgccggctaatttttgtatttttagtagagacgggttttcaccatgttggccaggaggctggtcttgtgaactcttgacctcaggtgatcacgcctcccaaagtgctgggattacaagtttgagcctctgcgcccggcattcttttttaaaagataaaaaagtctggctgcagaggaaccttatacctgaaatgttttgctgtctgaattcactccagagtgaaatgacttgaagtacaagttttgtgactgctccgagaatttttgtgtcagaggcttctccttctgccattttttgaacatttacctagaattacaaaaaaatcattccacatttcacagtatggtgctaggaatctgaccaggtccagttcataattttaaactttagagttttaaaaacatgtatgcttatcatgctgtaagcaaatgggaccccaggagtaaggggtaactttctgtttttcctcattaggtttcaactttctgtgctgtggggtcagtggtaagagaggtagatctgatgtgtatctgtgctaaagaagcatgagctccttacagtaactagcagccaattcctcttccccataacagttgcagacttctaatcccagcaccttgggaggccgaggcgggcggatcacgaggtcaggagatcgagaccatcctggctaacacagtgaaaccccgtctctactaaaaatacaaaaaaattagctgggcatggtggcgggtgcctgtagtcccagctactcgggaggctgagacaggagaatggcgtgaacccgggagg

SEQ ID NO: 1644 - DNA, 1030 bp, Homo sapiens
acaaaaatcagccaggcatggtggcgggcacctgtaatcccagctactcgggaggttgaggcaggagaatctcttgaactgggagaaggacgttgcagggagccaagatggcgctgttgcactccagcctcggtgaccagcaaaactccgtctcaaaaaaaaaaaaaaaggccgggtgtggtggctcacgcctgtaatcccagcactttgggaggccgaggcaggcggatcatgaggtcaggagattgagaccatcctggctaacacggtgaaaccctgtctctactaaaaatacaaaaaattagccaggcgtgatggcacacacctgtaatcccagctactcgggaggctgaggcaggagaattgcttgaacccaggaggtggaggttgcagtgagccgagatcgtgccattgcactccaacctgggcaacagagcgagactctgtctcaaaaaaaaaaaaaaagcgacagagcgagactccatctaaaaaataaaaattaaaaaaaaagggacaggtgcggtggctcttgcttgtaatcctagcactttgggaggcttgaggtggatggatcatttgaggtcaggagttcaagaccagcccagccatcatggtgaaatcccgcctccactaaaaacacaaaaattagctgaatgtggtaggaggcgcctgtaatccctgctactcaggaggctgagcaggagaatcacttgcagtgagctgaggtcatgccactgcactccagcctgggcgatagagtgagactccatctcaaaaaaaaagaaaaagttatatttcccagagaaaatatggatatttgaataagaaaggggtctagaataaaaatggaatatgcacgaggcctatgtgagtatggagaaggagagagggacatacacagttgctatccaaaaggatctggtattactgagcaagaggcaggagtttatacttatgtttagtttgactcaaactctgatggtttcagtatgcttgacagagatgtgagtgtgtgatacactcttatgat

SEQ ID NO: 1645 - DNA, 1037 bp, Homo sapiens
cctctgtcctatggattgacccgtaaaaaacaacctaatgcattggataggaggcagtgtgatttcttcttcttcttatgtcttgctgtccatgctgtgccattgtctcactaactcatctaagaagggctgtgattatcttaggaggaatgtattcccccactccccccaccatgaggtgactctgagtgtcttcgcaaggtagattctctggatgatagggactggcaagttatggctacctctgtttaaccccacagtgaagggagcaacctgacccctgctcatcactacaatgactttcgtttcaagacctatgcacctgttgccttccgctacttccgggagctatttggtatccggcccgatgattacttggtaagcatctggatatcaggacactgtgactccagtatcagagggatattcccaaaggaaggccccttttctccacagtctcgctctggtttttatttagaaaagaattgcatctgtagttgatttttgtgttgggcaaggccctgatgtgtctaaatctcttagttcttctctgtttgccccagtattccctctgcagtgagccgctgattgaactctgtagctctggagctagtggttccctattctatgtgtccagcgacgatgagttcattattaagacagtccaacataaagaggcggaatttctgcagaagctgcttccaggatactacatggtaagggagagagaagcactgtccacctgtgctgctcacttctgggcaaggctggggaggctgtcttcagcagggtaaaacagtgtcagcacttctatcttaagagtgtagttcaggccaggcacggtggctcatgcctgtaatcccaggactttgggaggccgaggcaagaggatcacaagatcaggagatcaagaccatcctggccaacatggtgaaacctcgtctttactaaaaatacaaaaaattagccaggcgtggtagcgggcgcctgtagtcccagctactcaggaggctgagacaggagaatggcgtgaatct

SEQ ID NO: 1646 - DNA, 1033 bp, Homo sapiens
ctcagatcatgtttttttccttccattaggtgctgcagagcttcaagataatggattacagcctcttgatgtcaatccataatatagatcatgcacaacgagagcccttaagcagtgaaacacagtactcagttgatactcgaagaccggccccccaaaaggctctgtattccacagccatggaatccatccagggagaggctcgacggggtggtaccatggagactgatgaccagtaagtgggctcagggccactaggggggagaacataggcccacagcacttttcttttcttttttttttttttttttttttagtttcactcttgttgcccaggctgatgtgctgatgtgcaatggcacgatctcagcctactactacctccacctcctgggttcaagcgattctcctgcttcagcctcctgagtagctgtgactacaggcacctgccaccacacccagctaattttttgtatttttagtagagaaggggtttcatcatgttgggcaaactagtctacgaactcctgacctcaggtgatccacccgccttggcctcccgtagtgcagggattacaggcgtgagccaccgtgcccggccacagcactttttctttaggaagggacccagcttctggaaaggagtagccttgactcagcagttggatcagtaacattattgttgacagaagtatagaatgagcttgaacgagctttcttaatacaaaatgaaaagaagattaatttcgggtttatagtatatgtgggaaggagagctgttcaagagttaaagacttaaaaaattatagtcttaaatgcatgtctgcaaattatattagaactttattagggctgggcacagtggctcatgccagtaatcccaacactttggaaggctgaggcaggcggatcacttgagtccaggagtttgagatcagcctgagcatcatgatgagacctcatcactacaaaaactcaaaaattacctgagtgtgatggtgagcacctgtggtcccagctactcaggaggctg

SEQ ID NO: 1647 - DNA, 1086 bp, Homo sapiens
ttagaggaaggatctcattttctcctgtttttttaatgtatttttttctctttttgttttcttgatcacttattatctgaccttctggtttatggaggatgaggcagttatgtgtaggtttcacttccccatcctgatctgactaaactagccaacagattttctcaccctttcctttttgccttttccagtatgggtggcatccctgcccggaatagtaaaggggaaaggcttctgctttatattggcatcattgacattctacagtcttacaggtgaggagcatatggatcccaaattaagagagggtggatacagataaccagtcacgtttctcttttagataggtttgttaccaagttcttccggaagcaagaacagtgagttgcagtctggctacttacttcattagttttcagatggtttatttccttgattttgcctctttccccggcctttataacccttcctcccccatctccccagacataatgtataccttctgtggaaagctgagtcagtccttggaagcaccagggtagaatatgccatctgtctggctctttgcaaaaacctatgagatgagtcatgttccacatggggatacaactggaaacgttacccttttccaaggaggaaaaacaggagggtcactgtgttctgtaaaatgtattagactgtggaactaagaggcaatggagtgatcatcagggaggagctggaattgttagaccccagttttgttcctgtaaggttttaaatactaatgaggactggacggtacttgatttgttggttcagtattatcatccagttttaactaccctttccagtcttgcccatctgttccttcagctctccttttataataaatattcatgttcctgatttgtcagggacataaattgcccttttcccatggggggaataattgacttacctagaaacaacattggtctctgtgatgaaccagcactgccatgcctgttcttgggaaaaccagtgtaccagtagatgtgctttctcagcttctgtcttttcaagattttctattacccctttaaccccctaaaatataaagttatt

SEQ ID NO: 1648 - DNA, 1025 bp, Homo sapiens
atatttttggtacctcatacttggaggctgaggctgaaatagaaatttcttaacgcttgaattccatttctgcttaatctcatactccacatccttaactttacactctcccttttcagtaagcgcaaagcctcagaagacctggaacaagattctgccatctctgtgatcccaagatgtcagcccttgccccagcaatgctgaattttcttctacttggtcatcaaaaaaggagtgtaatagaagtgaggggagctgctcctccatcttcttcctgaagaagaaccttctctccttcctcttcctcatgaatgggccttagtgcctcagagagttgaggaccgcagcatcccctccactccagagttgggtggtatggattttcaactggccaaccctttgcctccactattgaatttttttcagacccccattcttcatgctggaaatgggattgctggacttggcagctttctttcccctcgtctttgactaggaaccggactcttaatttcctcaggacagactagctggcacattatccctaccttagttctttctctctgactcctggaagaatactcctgtaatctctgtaaaggtttttgggggataagggtgtttaaccacctcccagctttcttcttctttttttttttctgaaaaaaggaaaaagcacacagcacacaatttcaagccattttcagatcagaactccagaagtgttgacaagatgcctattcgtagagttccctcagaagagccatggtgtttatgaagagaagagtagtgattgctctgccagaagcagctcctctttaaactcctcctctcttgatgaatttcttaaggctgaaggaatgaagagagtgggacatggggtaatctttatcccttttgttaaaacaggaggcagccatgggctgggagatcatagcccttcctaggcagaatcctgttcactgccaggctatagtaattattactattttgcaatttgaaatatattctggttgtttttctaa

SEQ ID NO: 1649 - DNA, 1046 bp, Homo sapiens
aagaaagaaatgaggtatctcatctaaggcactgcttccgtccattagcacaggtagaaccttaactattagagctctcagggacctcagaggtcatcaagaattgatccttacaggagcttatataactgcatcacttacctgccttcttctggtctttgggaaactcgagattatatttcacattagctggatacttttagatcatgaaaagttgcagggatctaagaggtgagacttcagatccacaaaacctcatttttaccgttcagttcagctgtcaaagctgttaagcatttaatgagatgattgcattgtacttttctgcactcagtgctgccaagtgtgtgttattttatagacctcttttttttgaggcagtggcacgatcttggctcaatgcagcctccacctctcaggttcaggtgattctcctgcctcagccacccgaatagctgggattacaggtgcctgccaccacgcccggctaacttttatattttttagtagagatagggtttcaccatgtttgccaggctggtctcaaactcctgagctcaagagatctgcccacctcggccccccaaagtgctgggattacagttgtgagccaccatgcctggccctattttatagatttttttttttttttttgatggagtctcactctgtcacccaggctggagtgcagtggcgtgatcttgactcactgcaacctcggcctcccgggttcaagcaattctcctgcctcaacctcctgagtagctaggactacaagtgtgcgccaccatacctggctaattattgtatttttagtagagacggggtttcacaatgttagccaacactggtctctaactcctgacttcaggtgatacacccgcctccacctcccaaagtgctgggatgcacttgggaggcataagtcactgtgcccagcctattttatagattttttttttctttttctttttttttttttttttttgagacgaagttttgctcttgttgcccaggctggagtacaatggtgtgatcaccacaac

SEQ ID NO: 1650 - DNA, 1011 bp, Homo sapiens
gaacccccagtgtgggcctgggggtgggaggatgggacttaggtatgcctgctagacaggttcagggaaggactgatgggggtgtcatggatggacacacctctccacaattccttcaggcatggactggaactttcctcctctaggccgggccctgccctagtgcccacccccgcccccgcccccgcccaaccccaactcactggcactcaagccccctacccctgcagtgcctttcacttctttttttccccagaaatccggggcgggggggtggggggttggtagggatgagtcctgtcaagggggccacaggagaggaggggacaggctctcaggaatcctttattcttgtagtaataataatactaacaaacagttggggaactagggagaaaaccagaccattaaaactgtttgtggtcgaatctccattcaggcctctctttttctgtgacttggacaatgtggagttgaagcgggtgagagaacatggaaggcccgcccttctcagggaagaggtggtagtgaccaagacaggcagggaaaaagcaaacttctatgtagtgccttttgtatcttggacactgaggcatccgttcatacctcatcacccatctccccctgcactcccccagaaaacctggaaatgacacaagtggctaactaaggactttatttcaaacaaaaattaaaaataaaaaattgagagctcttttccctgggtttggggaaggagtcagggtagggaattccacatggctaggccagtaccctcagtacactggagggctgtgggaattcccttccttgcccatgatggggaacctcagcaagtgcagggcccacgcagcgcccgccagcaaggggagcttgggccaggggtcggtccctgggaggggtaggtccctgggaggggtagagctgggcagcagcatggccagtggccaaccacaggatcaagtcctaagtaccgagaacctactcttccccacttcctgggccccagaa

SEQ ID NO: 1651 - DNA, 1028 bp, Homo sapiens
gtgggggaaagggaagacaaaaggaaatggattagtggttgtctgcttttctcctgaaattctgatatgagggatgggctgggatcgctattactgggcagatggttttctttgtagtctgggggctgtaggtgttgacactgattccagtgacaagatgacatgactgggagtcagtagacatgcaaagagaggacaccctagaacttcttcctgaagtggctcttagcttattttctaagcagagttcattctggtgaggcaagaagtagaatgtcatctttcactctaatgctttttataccatagatttgagacaactagcctgttattcagcccaatatccccccatggttttcccccaatctccctagcctctgctgcgagaagttctggagaagcagccagtgctaagccagaccgaggcccgcgacttagtagaacgctgcatgcgagtgctgtactaccgagatgcccgttcttacaaccgggtgagggatgtgctgggaacctaattggcgggctctggctacttgcaatccctgggtctctatgctttgaagaacagattgccttacttgtgtgactcctattttcacattggggaagacctccacctgacctttcatttaaggacttaaggcgtgggcattattgaatgctctgctttcttccagtttcaaatcgccactgtcaccgaaaaaggtgttgaaatagagggaccattgtctacagagaccaactgggatattgcccacatgatcaggtgagtaatagggaaaaaattggtgacagacttgggaggtctttggcttacactaagctgggcttttctgggaggctcacccaggaaaattttctgggtggaaagttttggttggacagtacagctatttttaggaattgatccctttatgcttcacaattttattattctgtcttccttttttagtggctttgaatgaaatacagatgcattatccagaactgaagttgccctacttttaactttgaacttggctagttca

SEQ ID NO: 1652 - DNA, 1045 bp, Homo sapiens
actcccctccgcccccgtggactgccccttctgccctccagaccaagtaggcaggacctctggtctgctcctacttttcctccggaaacaccatccctccccgctcgtctcctttttctttccttagttaccctctcctcatggttacgctgcccctaaatttttccatcccaccgtgtgcccctttcctcccctcctttttgtatttctactccaagagtttaccttgctttctgacccttgcatgcctttggggtggggggcgtgggatttgacaccgtagtttctcttctcggttggccccgtatcacaccctaatttggaatctagcgtctccatcagcacacccctctgagagcatcccttccctggcctcctgccttcactcctgctctatactcatgcctcctcctagtcaggtttatggtagaccccttgtaactcctcctccttcaaaactacttcaagccctttttgggtctttgaccgctttgcttttttagggcatgcccgtctctgctgcctcttctactctatcctcctgtgatcccacacttgactttgtcctagtctttccctcccctaggctgcttttcctttcttctgttttttaaggcgccttctgctgctgcagcccaccctctctcccctgctgcagtccctcccccttcatacgcctcccccaccacatccctccatgctcttgcgggatgctgccttgtcttgcaatctctgtgcacaccgcctccattaccctaatctaggtgttacatttgcctttttgtacttcgtattgaaattcggatagtgattgccggttgacttgcaggtggtgtgtgctcgcgttgtctccgttctcctcagcagtcttcagtgctgtgtttctgcttactgaatctatgttgtgcattccttttttacacttttactctctccctccatatttcgatttgcccacttgaaatcgttctcattttttataaattttaattgtaatttccgcaaccttctgttgcctcttgtaaaacagtaggtttgcaaaagg

SEQ ID NO: 1653 - DNA, 2050 bp, Homo sapiens
ctgtgcccgctacttgtctcgatcttggttaggttgatgctaattttcctaaagcattttttaggcaatactccttagagcttttgtctgtcctccaagttcttaaagtttacctctgttgtcccaggaaagctttgcatgttgctgaagagccaggtggggtcagaattagggataggtggattatcattgtgtggatatagtttgtatcaagtcataggtgaatgtatggaccttgataattgctatttaagacttttccctattttagattcttctattgtgtttacaaattgtttttgtaacaattttcgtatttttcagttgtttggacaactgacagtggtgtgaaagaacagagtaactttgaaatttaagggcatacaaacttggacacaagtaagagcttcagtttctttgtgtttcttttaaagtcggcttaccaaggctctgtcctaatctttagtcctgaaactaaattggagcccatatggttcagtttgccttttctcctttcaaaactgtctagattctaacagggcttggtactgcagtatgaacaagccctctgggctctaaattttactgcagatggaaagtttttttgactagcaaagctggtttccaccttgtaatttttcccagtgtaacatatactgagtgttttccctttgatgtgtatgtacctggaggctaatgagtaaagaatgctttcaacaaacagaaccaaaataaatatgtctttgcactaattatatagtatgtgaagtaacatttgacttcaggttaattttcttaaggttaaagtagttccaaggactcttgattgatttctcgagagacgctgctggaaggttttagtgtgtggtggatatggatataaaactgtctgtatttttgaaggattagtttaagcatggaccactaagattggcttgcaagcattcaaaatcatgatatatttatgctagtcagtatatatgctttcctctttgatagccaccagataatagactcatcaactttccctcattaaagtcataagataaaataaaactgtgtatatcaatttgttttttgaaagtcagttttttaacttcattttatgtgagagtttgaaaatgaattaaagaggctggtgccacaagaagtatttttatgagttaagtgtgagtcatgtaacacagactaggtaccgtctcaaaagccgctttctcaattgcaactgaattctatttgactgatattttctaggtagattttggtaatgtttgaaataatgaaatcatggttattgatcaaaggaaatttgtttggcagcggttctcaggctttagggtacatgagaagcacttgggtgtgcttatctaaagtacagattctcaggctcaccttttaagggttatgattcagtagatctttcatagggcctagaaatctttatttttttactcctttgccaggtgtgggtaatgcaacccacatactcagttacatgcccagggtgatgcagtaggttgtaggccttggattctcagttcattttatcttcatgattatattgagagtaatgagctaaggttataccaacaaatagtgaattgttaggctctcgaattccaacctaagtggaaaatcagttaaatactaactgttctatctgatcgtctatactttatttattggatcttgctaagctcttgaaataaagatggatggttaagaggtagcacaagttaatattaatagttataataatcattttactgctttgcagcgtgtatagtgtgttatagtttgtagttttatttatttatttatttatttatttatttagagacagcgtttcactcttgttgcccaggctggagtgcagtggtgcgatctcggctcactgcaacctccgcctcccgggttcaagcaattcccctgcctcagcttcccaagcagctgggattacaggcatgtgccaccacgcccatctaatttttgtatttttagtagagacggggtttctccatgttggtcaggccaggctggtctcaaactc

SEQ ID NO: 1654 - DNA, 1057 bp, Homo sapiens
tagagataaatgaaaagcacaatcgaagtatagaggcaggagtgaatatgcctaagaagactggtggggagacagctcatacaaggcttttaaactggattgaagaacaaataaaacttcagagaaggggcaaggattttataggttgaggaaaactgtgaccaaagaggggaaaatgtgaaaagctcttaggctagcaaggggcttaaagttgctgtttgtctgtagacatttgtgatgatagaaactggaaaggaaggttgcagtaagattttaaaaagatggctttgaatgtaatcccaagaagtttggatttttttctctttatgagctcagaatatagctgtgtgtgcattaatacccaggacttcctgtgaattcagttttatataattatttaccagaagaagttgaataacttttccaaggcgaaagaggaaaatcactattagaattagagtaatttcagagccatctagtctcttggactgtcttgtactatataaagaagggaactaagaacaactaagctctgacacccagaactgggaacagctggtgaggagctggttgcctttaacttgtgtttgtattttatttcacaatcgaatccagcttctcagttatcctttctctttctcttctgttttaaatgactatacttactattgtgtttacaattgataactttcatccttgtgtgctacaagcctgttgtgttctagctctactttcctccaagtctgttcctctgatttgaagatgctttttttttttttgtgacagagtcttgctctgtcgcctaggctggagagcagtggcacgatctcggctcactgcaacctcagcctcccaggttcaagcaattctcctgccttagcctcctgagtagctgggattacaggtgtgcaccaccatgcccagctgaattgtttgtatttttagtagagaccgggtttcaccatgctggccaggctggtcttgaactcatgacctcgtagtccacccacctcggcctcccaaagtactgggattacaggcataagccactgcacct

SEQ ID NO: 1655 - DNA, 1050 bp, Homo sapiens
ctagttttcattgtatatagcttccttcacaagtagtatacaaatcctgactagagctttttctcctgcttttggaaatgtttatgttagctttgcagtttccctagctggccaactttggttgaatagaagtcttatttgaagccactcccattagctagcttaaggcctctctctattggggccaaatgttggtcttatgtaaaagtaagtattttattaaaattatcgcgtgtgtctttacaatgccaaagacataaaataaattagatatcatctgtgtaactaaagcaaattttcatcttatttgtggattgttggaatttttggcccccttaattttttccttcattttattatgaaaagtttcaaacctacagaaaaattgagagaattgtacagtgaatacctgtatacctatcacctagattctataattacattttgttgtatttgcttaatcgcatatgtgttagacatttttgatgatgtatttaagctgctgcctttctttataaaagcagtatatattggtagatcctactgggcagtcagtacttttgtgtgataagagaattggtgcttcactgatccagtggtcttgtgaagctggctatctgtgaaccccattgtcattggttgagagcttaattatttattttcaaatgaatttcagctagattatgttacaaagacagaattgaaaggcaagggaaattgctggtagaaaaggtttgtatcatcaaggaggtgaaaatactaccaacttgtttgcccaattgatacaaatactataacacaaatagctaccatttattgagtagttaccatgttctagagcttcctctcattttaattttcacaacaactccattagccgatgatattaaccccattttatggattagaaaattgagatttaatgagataaagtaatttacttaagggctcatccattaaacagcacaattggtattcaaacccaagtctgtttgactcccaaacccatactttgaacctgaagtctgtactgctgaaagtttctcctta

SEQ ID NO: 1656 - DNA, 1149 bp, Homo sapiens
aatgtcaaataagtagaatcataccatttgtactctcttgtatctggctttgttcagttagtatagtgcttaagattggcagacattgttatttaaaccaaatatttgtccctttttaattgctgagtagtagtccattgtatagatttactacagtttgttcatcctttcattgttcatgcacatgtgggttgtttgcagttttggactagtatgactaaagctgccatgaaataatattaaatgtacaggtctttatgtagacatatgttttcattgctcttgagtatataccaagaagtggaattgcagggtaagtgtaagtttaactttataaaaaactgccaaacagttttccaaagtggctatatcatttttacattatcatatgcagtggagagttccagtggttccataacctcttgatattttcagtctttttaattctagccattctcatggacatagtgataccttactgtggttttaatttgcatttacctaatgactcatgatgatgagctgctttttgtgtgcttaatgggcattcatgtgtcttcattgatgaagtagctgtttaactcttttgcccgtttaaaaaattgggttgtcttattattttattgtaggggttctttatacattctggttctacaagtcctttatcagatatatatatatatatatatatatatatatatcatatgtatcatatatatatcatatgtatcagatatatatatcatatatatctgatatatatatcatatatatgatatatatagcatatgatatatatcagatagatatatcagatacatatatatcatatatatgctatatatatctgatatatatgagatatataagatatagatatatatgagatatatatgtcagctatagatatatatgagatatatatatcagctatagatatatatgatatatatatcagctatagatatatatgagatatatatatcagctatagatatatatgagatatatatatcagctatagatatatatgagatatatatatatcagatatagatatatatgagatatatatatcagatatagatatatatgagatatatatatatcagatatatatgatatattttccagtagcttgaaaaagga

SEQ ID NO: 1657 - DNA, 1031 bp, Homo sapiens
cctctgaggagtatcgatgtttttgttttagctggcaataagctgtaagctgtgtcgccttctgtgggttaaacttcaaatctcagtttaattctttcagcctttgctgtgctactttgagtctgtatacatccaagaagggattagtctgagatacatgtggtgtttattcttagaattaaggatcaccttctctggttttctcttgtcttggattctccactcactctggtagcagccatggttacctagaatcttttccctatatgtttgagtcagaaagacgtcactttctgagttttagttacttaaattgtgctattttgtaacttatgcccacaagcagggcaaagccctcttaatgcaggagtgtaccccaccctgtgcatcattgctccatgttttgagtcccctccacagtctgcctgcttttagtgtgtaattcagactcctcagataattgtttttgtatttcgtccagaatttatagtggttacagcagaagggttggtctacaggaagtgtatgcactacttgaaatggagttttcagttctgtcaggtttttctttatttataatgaatattatatcttgatgaattgatccctttaacattatttatctctttatataagtctctatctgtaatatatctatctgtctttatccctggtaatattctttgttctgaagtctttctctcatataacatatgagccactaacatatagccactagtagccatgtcacctttctttcggttattgttttcgttgctatattttccatttaacctatttatacatttataattaaactgggtttctcatagaaagcttagagctgggtcttgcttttttatccagtctggcaatgtttttatttggaatgtgtagactacttacctttagtataattattgctatagttaggctaaatctactatcttgttctttgctatctatgttgtatcattatttatttttttcctcatttcctgccttcttttggatggatagagtatttttaa

SEQ ID NO: 1658 - DNA, 1032 bp, Homo sapiens
atatacaatggtaatttagaatgcttataatgtccagttcctctatcacataatggatgaacctaggcctcatatgtgagcagatatgagaagaagggatataatcacatttggcttactgagatactaataatcaacagttttatctttgttttatcaacaaaacaatggcatgaaaaagagataccttacttatattgaggttgatcttgaaaagaaattttgttactaccagtttatgttttgttgttgtttgtatgtaattgtcatttatttgcacacagttttccaatttcttttttatttgtcatattaggacctgagttcctagagagaatgagtgattcttgtttaatatgcctttattgtcccagcattttgctattttatgtagatattatgatggtaattcttaggaaatggaggtgcctaatgatcccaacatgagacatggatcatctaaaaagtaaacaaaaaaattttgtttagccagaatataattgacaaactattttacactctagaatcaaatatatagtttttttgtgttaatgtattaaatgtaggctgaatgtgtgaaactggatatttaagaatttgttttctttttaagatctgtgctattaagtacatttcttgtaagtggtgttaaaaatagaatgaagttattttagagagggaagctgatatttaaggagagactattatcagcttacactggaagggagaagctcgtatttagagataatagctgttggggcagatacaggtgttttttcccttttctttcatatatatgtatgcgtgcatgcatgtacacatacatacaaagaaggatagctatggaccattaatgcaatttttgtgaggccaagatggcagaacctctcccctttccctcctccacagacatacacctgctttttcctacagcattgtctgacttaattttcttgaaaccaatctatcctgtttaaccttaggctatcgcagcaaaggttggcatggacagtacgacagtgaattactttg

SEQ ID NO: 1659 - DNA, 1077 bp, Homo sapiens
cttaatagctaaatgatactaataatagctactgatatatactttacaaaactcttaacatctgtcatctttttcttgtacatctatgagatattccagttttacacagtgaaagggtttacatgacttatgcaagtacacattggtaggtgacagaactagaagttgaattagtctctcaatcttttttttttttttttttttttttgcgatggagtcttgctctgtcacccaggctggagtgcagtggtgctatctcggctcactgcaagttccgcctcctgggttcacgccattctcctgcctcagcctcctgagaagctgggactacaggcgcctgccacctctccccggctaattttttgtatttttagtagagacagggtttcaccatgttagccaggatggtctcgatctcctgacctcgtgatccacccgccttggcctcccaaagtgctgagattacaggcatgagccaccgcgcctggccctcttgacttaatcttgaactcatttgcctatccaactatctttccttaaaatactctgggaaatgctttccaccttgagtaccaaacatcattgatcttccttatttcattctctcttcaggttaattcatgtggctttcaaacacaaatcaaactttctttaataaagaaggagccatttcttattgcttattttagctccctgttgtttatttccttaagtctaaattcctgtgcctactttttaggatttttcataatctagtgttagtctgcctatccagcattatctttaattgtctcctgttcccttatttaaatcaggcaaatctgttttctcaaagtatttaagcacagactcattcctgtttcctatctttagcttatagtttctcttcttcattctgttctttggggatccacctaaggcttccctgataactgtaattatcaataagtgcttccattctgactgcctatatcactgtctgtaccatacatgtttgctatttcattgtaatgcagcattatatactgtctttcagtgctctctaattgtttacacatgtataaaataactggaatt

SEQ ID NO: 1660 - DNA, 1032 bp, Homo sapiens
gtaatctattatgaagtcatttttagacttgtttatattttgtaatcacccaggtaaaaactcaagtatagttgatagacagatatgtttccccatggtcttttgccattgtgtataaaatatgcttaaacatttgtggaattagattgtcttgaaaacctagtgccaacatatttctgtgtactagccacatgatatgatagtcagattttgaagaaaggctcatcaaagtttgaattttatgagtataatatgtattcaagtatcagtgttcaaaggcattagcctagccaatattaggtcatggtcaatacattgaaacttctcacatgggccttctgagcccataggccctgatgccattaaccatagcaactaagtgtggtgaacaggcctacgattaggccaggtcactacaattagtagttgtcacatcactgtgagaactgcagcaacacaatgaacttctcagttttagtttcttttctgtaaaatggggatattccgattatcagctattaagtagaatcttgacaaaatacaccaagattcttggaagataaataagctttgtgtaagttcccctgtcctccaaatcttcaaatacagaagagagctcacgtctgtgcatagtttataatacccagtgtgatcaaaaacatttttgttttttacttacttacaaagttagactgaatctcaaatttggatggttgagaatataatatacaagaaacaatgttttctcttctcttccttcctccctccctccctttctgtctcctcacacaaacagtagacatgtgtaaattatgcttttcttatgttgaagtggcctgattttgcccttgttgaacagataaataaagagcttttgtgtttctctacataatttgtattgatttcacacaaggcagcatgtatgtcagtttttctcaaagtgtggtctccagtctacttacatggaagacacttttgaagctgcttaaaatgcagatttctagactccaccccacatttactaagccagaa

SEQ ID NO: 1661 - DNA, 2278 bp, Homo sapiens
tgtgtaattttgggtaaatcagcctccctagctttcagttttctcttctgtgaaacaggaagactgaaccacgtaattaatatccaaggtcccttccggctctaaaaggctatgattctagatgagaagttatatcaagaaagatgtggccaatcagattgagtcatccaggcatacctttttagcttctgtttgtggagttgtctccagataagaggagatgtgccttcccaataactctttttttttttcctttcagaacattttccagatggcgaggtcacagcagagagatgtggccacctagcctttccttatccccttcccttcccttcacccccatcctcttactcctttcatgtcccatttcagacagagtaaccattaacaaaaaagaagagaaaaagttaaagtcgttatattcaaaagccctaaactaaatattattaataaccccctctgaatttcatgtctctggaattgaggtggtagtgaacagcagatcggtcagcaccagaagtcaactgagttaaggcaggaaaagaaataagcccaaccaacttgccaaaggtatctttgtcctttcacctgggcctcataccaacagcctctccttgtactatatttttaaaactggaactatgaacttcatccatttgcactgttcagacatatatatgtatgtatgtaaaaattatatatacacaaattagctgcacgtatatacatatatatatttctttttaaatttcatattgatggcagtaccttttttagcttgtgtttttacacacctttcactagaatccatgacctccctcgtgctctctttcttttgaaacaaactttaaaaaggaaaaaaaagcattttacagggaaaaatacctctcctcatgaaggacttgaaaagtttacaacctgcttggatttttgcccctttttttgtattgagtatagattccggctcatgggttgccatagagtctaggaacaaggagtatagtttctttatcttccaagagggtgctggggaggagaaagaggtgtgtttctcaaggttaacaggctgtagttctgcagggagagcctgaagtcctggtatgggctcttgattctgtgacaatttttttgatccatctatttctctcactcctggctttctagccacattctgcacctccttcctgctttcctagagcctcggtatgctttccctcaaccgaccctggctcaggaggttgatgccatgggaacctgaacctgaaacacttcatggtagtaatttcctgttttccttgccttttttttttttttttttttttttttctgagacagggtcttactctgtcgcccagactggaatgtggtggcatgaacatagctcactgttaccttgaattctgggctcaggtgatccttccgcctcaccctcctgagtagctgggactacaggtgtgcaccaccacacctggctaattcttcttaaaatttttttgtagagacagggtctcactatgttgcccaggctggtctcaaactcctggcctcaggtgatcctcttgtctcagcctcccaaagtgctgggattacaggcatgagccactgtgtccttccctgccttttttgcagcagggatagtactcaggaccagagttaagctgataccttaggcacacaggttggacttacatagaggaaagaaagcaagaaatgccctatgtacatgaggttttacctcctccattcctgaccaataaccacccataactacggcattctctgtgacttccttaaacagcagtgatgggaagggatccaatagtatcttcaaggccttggggaaacttgcagtgggtcagtggtctgtgccaaccaaacgatagccccatccaagccagctgagaacctaggaaggagtagtaggaatatggttgattagattggatctcccaagttttaattgaaaggagactgaacgaaaacctttctgctttctgtccgttaaagagctcctcatctgatcttgcagctagaccctttgagacttaagagctgcatcccaggatcagaagccagggctaattggggtaggacaatattcccagcccctaagctctgtagataatgcataagaagcaccaagtcaggctcagatgcaactaaaacacatctttgagccttttctttttcccttctcccctttctaaacaaaaaccttcctaggatggcatcttttgctctaactgggagacagtcataattggttgtagtcaattct

SEQ ID NO: 1662 - DNA, 1049 bp, Homo sapiens
gttcaggggctcattcattcacccacccattagctttggatatttaaaatctaagaaacactactgtgctaatggaggggggaagtgttacctttcctaagcaaagaatccataaagaagaacaaagtggaattccagaattagagttacagtggttaaagtcaaacatttattaggtatctgctgttgggggtggggtggggagattgtttgagatactgcaacagacacaaaagcaaagaaagaaacatttctgccagcttacaggctcacagaagaatgagacacttacgcatggccatgatacacagcagtgaaaggtttaagtgccataaggactagaaaaggaaggagaaagacctgtggatgagggccgttaagattttcatgaagaaagtagtgtttaaggtgaactgttttagtgtgagaaggatttcaacaagaaggcattcaacaaacatttattgagccgttatgtgccagacactgtagtaactgggaatgaaaagacatgggagaaaagggaccaaacttgcctagagaacaatgaatagttctatttgggtatgtgtaggaatgaagtggaaagtaaggcttcgaagagccttgaatgccaggctgaggtgttctatgaaaaacaacaaaaaacagcagcagagaagttttgttttttattagctgcagtttagaaagattgatgcttcagaacatagacagaaggaccaattaggaaattgctatgattactcagttaataagtgtaggcagtgataattgaaaagagggaaatgatatgagaaagtttgtggaagtgaaatcttaaatgatttaataccattgagtttatgcgaaagtactaaaaactcttgaggttttctgtctatgtgactagaaaatagaaatatatgagtcaggactttatgggagaaagttttagcattggccctatgatgatgtagatatggatgggaagtccagtatagatgtccaacagtcatttcttatttactaagcaatgtctaatatttggggcactgtttagggtgacc

SEQ ID NO: 1663 - DNA, 1006 bp, Homo sapiens
aaagcaccgtgcaaatcccagttattatgtttattatgaggttcagcatgattaaatgcaaagaatttgttccatctgaatgaggcttttaaaaatacactggggccagtaattacagaaatgtaggctcccctaaacatgttcccaattaggaagggatgtaactgaatgaactggggcatggcgggggactctcagatccttgacatgttcttggtcagctcagtcaagcttttcttgatcagaaaatggaaaaaagcagaaaattctcatcccttgtgtctttcttagaagaagataataaacccagtggccaaagaatgttaacatttaactgattttccttatgtatcaggacctttttctgaaactatgattgttaaggattttaagtaagacccaaatcagtatggggtatgattttcttgtttgtgattaaaacatatggaagtaattatagatctcaaagtaatttttatttatacacaaataatacatacgttcctgatccttgaaaaaattgaaacattacttgatgacatctaagacttctttgactactactgtctctcctgattcccttttacttttctcagaggcaatgaccattatcagtttggtgtttttctttctgagcttttccgtctttagaagtagagaaaaccaaggtggacatggtacgcaagtctccacatggttttcttctgtggtttagcctcatctcctgggccagatcatatgcttcttgagaccagaaaccacatgaactccttgatctgattccacaccactcccaggcctggaatagaatcatggagaagtgaggggaatggtgaggaacagttaactaaacgcttgtttgagaaaaattattgtcctgcagtttactcaaatagagctagtaactcggctgggcaagtttcagattctgtgtttcaaaaccacctcaacccacccagtggaaaccagaatattctcatggctttacaaaaacgcctgagcttta

SEQ ID NO: 1664 - DNA, 1088 bp, Homo sapiens
taaataaaataaagtgagagacatgtgactcttccattcactgaaacacttagaagccattgtctggttactaactggcgtaatttcaatattgtatcttagggaatagataggcctgactagagggagaaagaaaggggagcagctgatcactggagcagtaagaacactcatttatcgattaaactctctgtttcatataggaaaggtttgtggtgccctcaacaattacaagtgtaacagcaaagatcacttattacagatcaccatagcagatataataatagtgaaaaagtttgaaatattgtgagaattaccacaatgtgacacagaaacatgaagggagcacatgctgttggaaaaatggtgccgatggacttgccagacagggttgcctcaaaccttcaatttgtacaacacacagtctgtgaagcacaataaagtggagcacaataaaatgaagtatgtctgcatgcaaactcctctgaggtatacgagtaggagtagaactgctggtagacagggtatgcacatttcaaagaaatctgttccttatcctgtctctattttttcagtctgccagtccccttcctgccttctttcatatctatctaggattccatcatcacacttttgaagttgtgggcctcaatcatgttataatgcattgtgattgttgtcagcaattggtaagcatctcaaaaaagaacaaaccaagtcacccagatcactccccaaagtgggcagaagagaaaaggattgggttaaaggttgcaataacagtgaccccctcctgccaggcatgatgaatcttcctatctagacaaacttgctttaatctccttttgtttcccactctacttcctttgagagatgtcagagataatgatggtgagtgggctaaattcactttcttcctctcacttccttctccacttggctcttagcttcacctccactactccccatgcacacatgccttcagatataatatttacagctacttattgccttttatttgctgtgctctcactgctaattatcctacattatgtttcattctctttggttttgttgccaagaaatat

SEQ ID NO: 1665 - DNA, 1092 bp, Homo sapiens
gcctgggcaatagagcaagaccccatctcaaagtaaataaataaataaaaagcaaagcaataaatgagaaagagaaggtatgagatgaggggaaataatgatgaattatcatctaatttatttctatcatccatttccatctcttaataactgaactccttaaaagagcagtcagcactccttgtctctgactcccgtaactttcacttactcttcaacactttataggttgattttcacagcttctttcaggctttttgaagggcttttcttccatggtctgtgcttaaatgtttttactctccaaagctccatccttagctctttgcctgtttggatcagtttccagtcttaccatttataaagtagggtaatggagcagaatagagacaagacacattgttaattcataaatttttgttggcaatatttatgcaattggaatgtcaaaactagagcgttagaagctctgtctataaactcaagcatattgcagtcagtcacagtgatctgatgatactataagacttaatacatttctgtacaagttatgtaaaatataaaatttggcagaaacttcaaaacttgaactttcatatttaatgctctagttgaaacccaacaacaaaatttttctttaatattaaaatttaaacttacaccacttacatatgctaactgaggagggcaagtatgcactgtcctttaaaagaagatcaatattaagtagaagaattaaggtaggattacatttttaaagaaaaggttagagccagataactttgtcctcagaaagaacttgtcacaataaattcctgttttttatgtttttcttctcgtcttggtttttgagttagttcctctcctgttggtgtctcacttattaaggtaatggtcacattgcttgtcgatatatttttagagtgtagcattgttataaaaaatagtaaaaacttgtttttgcttgctttcattgttacttgccacagagctttttttttaaattagtatcttctgtgtacatgtcaatgtgatttatagatatttagacattaactgttcaaatccttaggtgaaatattagtatttctg

SEQ ID NO: 1666 - DNA, 1025 bp, Homo sapiens
gtggtttcatacaaattttaggaatgcttttttctatgtctatgaaggatgtcattggtattttcatagggattgcattgaatctatagatttcttggagtagtatggacattttaacaatattaattcttctaatccatgagcatgggatattttcccattatttgtctcctcttcagtttctttcatcagtgttttatagtttttattgtagagaactttcacttctttggttaaattaattcctagacatttagggttttttttggtattattataaatgggattataagatggatttcttggtttctttttcagattgcttgctgctggtgtatataaataccactgaattttcatgtcgattttgtatcctgcaactttactgaatttgtttatcagttctaagaattttttggtagagtctttaagttttcctaaatacaagatcatgttgtctgcaaacaaggataagttgatttcttcctttccagtttggatgccctctgtttttttctcctacctaattgctctggctaggacttccagtactatgttgaataggaattgtgaaagtggtcatccttgttttgttccagagcttagaggaaagcctttatttttccccattcattatgatgttagctgtggatttgtcatatatggcctttattgtttcttctatacccagttattgagagtttttatcatgaagcagtgttgaattttatcgagtactttttttagcatctattgaaatgatcatggctcttgttcttgattctgttcatgtgatgtatcacttttattgatttgcatatgttgaagcatatgcataggaagcttttattcctagggtgaaccccacttaatcatgataaataatctttttaatgtgttgttaaatttggtttgctagtattttgttcaggatttttacatctatgttcatcaggcatattggcctgtagttttctttttttgttgtgtttctgtctggtttgggtatcagagtaatgctggcc

SEQ ID NO: 1667 - DNA, 1031 bp, Homo sapiens
tttctagttttaatccattgttggaaagatatttgatatgattttgatttttaaaaatttgtaaagacttgttttgttctttgaaagtttagttgaatttgtcagtgaagccatctgtcctggacttttctttgctgggaaactttttattactgatttaatctcattactcattaattgactgttcaggttttctgtcttcctgattcaattttggtaagttgtatgtgtccaggaacttacatatttcgtctaggttttctagtttgttagtgtatagttcataatagtctctggtgaacatttgtaattttgtgatattagttgtaatgtctcctttttcatttctgattttacttgagtcttttttctttttttccttggttagtctagcaagtgttttattgattttgcttatcttttcaaaaaacaacttttcatttcattgatcctttgtaacattgttttagtctatatttcatttagttgtgctctgatctttactatttctttctttctgctgatttggggtttggtttgttcttactttttagttccctgaggtgcattttaggattatttgagatctttctgttttttttttttttgatgtaagtgtttattgctgtgaacttatttcttatcactgcttttgctgtatcccacagatcttggtatgttttgtttcacttttcatttgtttgaagaaattttttatctcatgttaatttctttcatgacccagtggtcattcaggagcatgttgttcagtttccatgtatttgtacagtttcccaagttcctcttgttattgatttctagttttattcctttgtagtctgaaaatatacttgatatgattttagtttttaaaaatttattaagacttgttttttatcctaacatgatccatcctggagaatgtttctcgtgctgatgagaagaatgtgtattctgtagctattggatggaatgttctgtaaatgtcttttaggtccatttgatctagagtgtagcttaactctgatgtt

SEQ ID NO: 1668 - DNA, 1030 bp, Homo sapiens
aaaatagagctactatatgatccagtaatcccactgctaggtacatacccaaaagaaagtaagtcgttataatgaagagatatctgcactccaatgtttattgcagcagtattcacaatagccaaatttggaagcaatctaagtgtccattaagagatgaatggataaagaaagtgtacctacacacaatggagtgatagaaaagaatgagatcctgtaatttgcaacaacatggatggaactggaggacatcatattaagtaaagtaagtgaggcagagaaagataatcttcacgtgttctcattcatttgtgagatctaaaaattaaaacaattgaactcaaggagatagaaagtagaatgatggttaccagaggctgggaagggtaatgaaaggtagggggtaagtggagatggttaatgggtacaaaaatatagttaaatagagtgaataagatttagtatttgatagcacaacagggcaactgcagtcgacagtaatttattgtacattgaaaaataagtaaaatagtataattggattgcatgtaacacaaatgatgaatgcttgaggtgatggatacctcatttattttgatatgattatcatacactgtatgtctgtatcaaaatatctcatgtatcccataaatatatgtatacctactatgtacccacaaaaattttaaaaacgattgtcccaaagaaaaacttagaaacctgtagttatcttgcaggaaaattgttgacttatatgtgagagaattggtcgaacaagttaaggaaaaatgtaaaaaacaaattttataaaggaaggagagaggacagagaaaaattgatgttccaagtgaatcttgttagcatctttttgggtaaactgattttctctcaacaaaaaggagcatctggtaattttatccttgagtgggcagggatatgaaagaaaacagttccagttgtttatgggttcttcagaaaacttgagaatttagctctctaaacgtctggctaaaactactttaaggtctgt

SEQ ID NO: 1669 - DNA, 1030 bp, Homo sapiens
aggaagcttcatgatgatgcgaccctgagtgcctagagccatctcctgattgttccttgtcatatgtttttctgcttgcacttctggatcctgactgcccacgggaggcatcagaccttccctgggatgtggtgtggctgtgatgagaccctgagtgtccagacctatctaccgattgctcttggtgggacccctgtcttcctcctctgcttggccccgggtgtccacgaatggtgtcctgaccctcttgggatgctgagtgcctggagctgtcttgtgcctgatcataatgggatccttgtcttcctccagtgctgggcgcagactgtccatgggtggactcagactgttcatgagtgctcacctggtagaggaaagaccctgaacgtccagagctttcccctgactggccacgtgcggactctttgtggctctgctgatggggcccagcttttccctgtgctgacactgactgtgtgtctgagtcttctgaatgtccctcactgtcactggcctgactaccactgtaccctcggtgtccactgtctctgactgcagatgaagcttgtccatgcccaatgcctgagtgtctggagctgtctgctgactggagctggtggtgggatccatgtctttctcctgcacttgatcttgcctgttcatgggatgacgcagcctgtccacgagaggaagactctgtgtgacgagtgcctgattgtctggagctgtctgcagagtgcccgtgaccggctctgtcttcgtgatgggacccagggtgtctggagccatctcttgactgctcccaagcagatccaagatggtttctggaagcagacccagaccacctctcagagtcttctgagtgtccctgactgtcactgtcctggctaacactggatccctggttcctgcttgtcctgggccctgatgattgtccctggcccacctgcgagtgtctagagctgtcggcccgagaggaagcttcatggtgacgcgaccctgagtgcctggagccgtctcctgattgttt

SEQ ID NO: 1670 - DNA, 1043 bp, Homo sapiens
accagtagaaactcagctttgtccaaaacctggaaaatgataggcattcaatcaatgttagtttcttccaaaatttggcctcatattcctcactttttatctttttttctcacctagagggtccaaggcctagaatgcttattaaagaccttgcaaaaaataatagagttacactttttaaaggtcttactagaattttctatagccatggttctcaatatgtagtcttggggtgcatgtgaagtaaaaactactttcatcataatactaagatattatttgtctttttaattttcattctcttacaagtatccagtagagttttctagatgtgtgatgtcacaacagctggaaggcagaactaggtactataatccagttgtcttctattaagctagacatcaatgagattttcaaaagtgtaaaacaatgccactcttctcattaattgttttctaaaaatagttacattttaataaaaatatggtatgttaatatgtaatggacttgttaaatgaataaatactttaaaaacttctcagttttagtttctaatatggaaaatattggtagacataatccccataaacaaaagctcttcatgtttctcagtaatttttaagagcaaaaaggggacttgaggcagaaatcctcaagaatcacttctgctgattctactgagaattacttctctgtagaaataattgttcattaaatggataaaaaatacggagaaaactatggtttaccttcatcctggacattgtcatcatgctcaatctcttgtttttatgaataacttttaacttttttctctaagtgaaatggacttttttgcaatcatattttttagctagaaggctgacaagagccaaattcataatagaaaactgatcctatatgccagaaatgctgaccaaagcttggagatctgccacacaaaataattccatttgggagtttttcataaaaatgcttggatctccaccccagttagatcttctttttaactgtactctctgatcgtgttaacactttgcctc

SEQ ID NO: 1671 - DNA, 1060 bp, Homo sapiens
taaaaccttgttataaactctatagtactatatgaattaatattatcacccttattgttattttgttaaaattcccacaatctttgattttttttgacttcacaattcttttttctccacttatgtaatatttatggtcccacacatatgatttagcttctagccttagattgatttaattatttaaaacgtgaaatgttttgtcaacctaactggactttaatttgagagacaagaaactagaattctatattgtattccttaaattcttcctaataaatgattttattcttttgttcattcaatgaacagatcagtctacgcaaatgtgtttgggtgcaatgtacctggcaatttcatggggcagtcgggaggacagtgtggctgaagcacagtgagtgagagggtgagtacttaaaacgtgtggtccagatccttaggccttctgatttgggcttttaccttaagggaggtggagagtcactgtcaggattagaataggggagtgctctgatttccttttcaaaagttccactctaccctcatgttgagaatagactgagaagggtcaagagaagaattgcagagatcaattatgaagctttgcaataatgcatacaagagatgatttgctaaatatatagttatgatcaaatttattcttatttacataaagaaagatagtaggaaaaatcttctgttaaagcatatgttcttaggctttgaaaatatggtcattttaccacatcacctacatatctaacatggtagatatataataaatgctgaagcgatgattattagttgctagatttgaaatcttgtattaaggggattaaaagttgtacaatccttctcaaagagtctaagatcatctagttttgctctttgggcctgttggtagggacacacctgggaccttttccagctggaagttttcattgtgatatggtcaagtcatgtgacataactgcctagggctgctgtagcacaaatgccttccccgcgttctagttttgctatgttgcatgttactaacaccagtcatgagcactcggct

SEQ ID NO: 1672 - DNA, 1057 bp, Homo sapiens
cactggacgtggcggccattttgttttggacaccgagcaggagctggcggccgctgcagacgaaaggcaggaaagggcaggccgggtgagcagacggatcggccgactagacagccaaccagcaacaacgaactgagctcgcatactaccgcttacgcatctaaccaaccgcccatctagctaacccgagcccctccaccgtcaactcaggttcggccggtccccggcccgcctgccggagccgtggtggcagccccgggaggagcactggcgtctgtttccttcggtgagtttcggtagtgagaaggagccgggggaggtgcggtcttgaggagcggaaggggccggcggacgcggaaagggggtggtggcatgtggacatagctacggtgttggagcgtggaggccccggggaggaggcggagcccctgcgaaggggcgggggaggggctgaactggaacctggtggcgggattgatggaggttggggtttgataggataaaaaggaaacttggcgggtagagcagaagtggaagtcttgacagggctttgaggatggtagggagattaagaagtacaagactttgaggaatgttggaaattaatggcggctttagggttaagttttgtggagggctctttgcgagctaattcccaggtgaatttagaaaacctttcctactcccccagatcgtcagtttcttgttaaagtccctacttgattctggagttgaaagccacttttgaaactaggcatgcatatatatatgtatatatatacatacatatatatatatatttttttttggggggggacggagtttcgctcttgttgcccaggctggagtgcaatggcacgatctcagctcactacaacttccgcctcccgggttcaagcgattctcctgcctcagcctccggagtagctgggattacagccatgcgccaccacgcccggctaattttgtatttttagtagagacatttctccatgatggtcaagctggtctcgaactcccaacctcaggtgatccgcccgcctcggcctcccaaagt

SEQ ID NO: 1673 - DNA, 1580 bp, Homo sapiens
tgagatgtagtcttaatggttttcttttgagaacagattcttaaaaataccctatctctgtagtgtgtccttgttcttatatatggccctgagttttgtgatcacctgaataattctaacatacgtttggctggctgactgtggagatacatttgagttacatgtttatttttaatttaaggtcatcattgttttaaaggagctgtttgcaagtgcaggcatggaattagggatttttaagaaatgtaaggaaaggagatttgactttcttgtgtttatttacatcttaaggtaaaaagtggaccgtctggaaatagattctcagaggaaaaatggagcacacgggcctttttgagaaatcaatcttgttcttaagtcacaagaactcaagtgaacttgtaatttaagttttgcccagagtgtgatgaacttcctatggtgtttgagtaagcctttgaagacagtggtagtccatgggcaggtatgaatcaagtcatataattgtcaacctgtagttcaaaagcagtacaatccaggattgaactatagaatgttcttacgaaaacttaagtttcaactggcagtgtatgacttctgtagccaaactagtgaggtaatttgtggagatgcccatttcatgggaccacacttgagcttcttggagtttctgctctggatcaaaattctgctgcttgtataacatgttctgaggcaaaggcttgcttctggtttgggatccttttgacacccacaacaggtttatctcccttcacaccagcatctcacttgcttctttttctctgcactttgagttgccaaatcctgttggattgcttttttgatctcaatcccctaacaccttttcttccagaagagcttaaagcagcgcctgggtaagagtaacatccaggcacggttaggccgacccataggggccctggccaggggagcaatcggaggacgaggcctacccataatccagagaggcttgcccagaggaggactacgtgggggacgtgccaccagaaccctacttaggggcgggatgtcactccgaggtcagtgctgtgtaccctgataattgtcgggccctactcccttcccttttctcttgggctgcttatggacacgtttgtttaacatctttaagcctgaatttgtattaatataataacttctgaaatcacatatttttaatagtgctgcatgtcttttatcaataccattccttttctgataatgtgcaatggtgagaggctatgacctgcgtaacaacaggtaattcatgtcatctccattccattttaaaacaccctgctgttgcttgaatcaaagcacattcaagttctagaaacaagtcaaacataagaaatttataggtcttttggcctatatctctttgttcctggtgctagtaaaacactgatacagctggaaaaagaggacaagttgacccacagcacttacctatatatgttcatttggggcactattactctgttccctgtatagttcttgttccctagaagaatctgttgagatcaggaaccatagcatttatttttaaatttaccataatg

SEQ ID NO: 1674 - DNA, 1048 bp, Homo sapiens
cacagcttcaagtcataggcaggcttctttgtttgtcttgttttgttatttgaaactggcttatttttcaaattaccatgctggtagtgcaaaagtctcatgatttttccaagaatcaatcaagtgcatattatagagccagattatatgccatcttcctccaagctcttgcaaatttaaattgtatagttgaaaataccccccaaaatggtcagtttagggttttgcctttctctgcccctgtcccaccaccatcaccaccacataccaccctgtagctccaaatcctggtttgagtcacatgagaatatagaagagagagagagatacaaagatgaagtagagttaagagggtggtgagacttggagctgggcattggctctgaaaccaaataaattcaatgtcacatttggtgcctgtggagaaccagagatgactttttttgcttaaggtagagagcaagatggaattattatcagttaactaactggctcttattgataatcttgcctttgaaatttattgatgtttgtcttgtgacctcatgacccagattgggaaagagtttaatgatgttgctgctgttaatactaaatctcatgggagccttctggtttagagcttagtggaaaactcccaacacctgtccagaaaaaaaacactattgaagcccctgtgtatatttgctttggttctcttaaaaggtgtcttgggtcttccataacttatgaccttgaagttgccaaggaataataactgttaggaaagaaaagttgataaccaagggcttgttttcttctctcccattatatgatacttactgagtgaagtgcaagctagtttgggtttcaggatgaaataacatgtttccaaattatcttgacttggatcctgagagacatcacgagggtgggagagactaaaatagcttttcaaaaagctgagtttgttttgttaactgaattcacactgcttctcagataaccacaattgtcagttgtcataaggtaactagaattaaaggtagaaatagctaggacaactcaa

SEQ ID NO: 1675 - DNA, 1971 bp, Homo sapiens
atttaagtttaagggattagagggcaaggggtccactgtgggtggggtgaggaccttatcctcagcttgctggctgatcacaaactttacttctcacagtgttaccgggacttagctctggtgagtcgtgatggcatgaatattgtcctgaataaaatcaaccagatacttatggagaagtacctgaagctgcaggatacctgccgtactcaggtaaggccagaaagaaaagacaagatccagctcaaagagagaggatggatcttctctctgtcaggaacgggaaagaggaatcagggctaacacacccctatcattgtgtgtctaaattgtaatgtgctcctttcagttgtaattgaattagctcccttctcaaactcacagttcctgctcttcatctgtttttccctctttcctttagttggtgtggttggtacgggaactggtgaagagtggggttctgggagccgatggtgtttgtatgacgtttatgaagcagattgcaggtgagtttgatggcaggagcataaagaagaaaggaggagagcccagagactacatagagacaatggagaatgattaagtgccaaagggatggaattcttggattgcttagactgtttccttctgatacagacatcttctggccacatatgttgtagaaataaattgattgaaaaatcatggggggccttttaaagcagtaagtcttgcctcattttctttcctgctaaacccagggcttgacagaatatttggcctattttagccagtcttcactctgagattttatagcatttcagagcaggaagaaatggggagagaagtgagggcaattaatttgttctcaagtccctgtgctttcagaaacctagacatcttccctggctccacccccattatctgaacgcttgctccctaataattaagccctttactggggccagaatgagggacaaactatgtcacagaacagaccctgacatttaggttttattctcatcttggcatcggtgacatctgtctgagctatcgcatattcaagcggctactcccaagattgcatgtgtttgtttaaaagtgacctgctactacctcaccattagcccactgggacttgcttcctctttaaaattttatgtaacactgatgctcctgttttgatgtgtatgaaccttaatctatgtgatatgtgactttgtgaacattgaattttttaattgagacctggggcaaggcatagttgtagctatttttatcctctttcctggcacttcttccctgtttggcacttccagcccctgcttcttatcccaagactggtatggcattgctgtgtgttaattctgccccacagagtttcatagcaagcactaaagactgttacctggaaataagaaactcttggcctgttgggggcctcagtgcaggactcaggacatccagttgctagactgcagctgttgtcagccacctgtacttctcaggctctatctgagatatcatcctttctttccaactgtgggcttcttatatctacttctcagacgttcattttcaagggccaaaatgttcccactccaactcacaatctgtgggaaagtagcagctctggtttctagaaaaattcagaaccttccctttccttctttctggaggcaaagggtgaaactttaaagcctgacagaacagaaggcagtttatctcagcagtgaagggatggcagtaatgggatggcagtcagggtggaccagcagaatgggtgaagagatgtattggattggctgacttgctaatcggagctattctttttttccccttttgaaatcaggtggagatgttacagccaaaaatatctggttggcagaaagtgttctggatatcctgacagagcaaaggtagcatccaccacgaagggtggggtacaggccagataatggccattaggagtgtgggtgtgggaaatgggga

SEQ ID NO: 1676 - DNA, 1049 bp, Homo sapiens
tgaatcaagaaggtagaggttggtgggtaggagagtctttggtggtcagatttaggaagcctgggacagggcaagctttgccaagtacaactgcgaatggcagaggtacagaacaattcatgtagttcctagacagcccctacttggcagactccagctgccacattactactaagaaaaaagtgagacagataactgtagtcctcctcccctcttcctggcagctccttggctcaggaggtgagccagtggccagtgttcagcttcacggagtctagcaggggagtcagaggtcaactcgtgagactgagtcagtagagggctggaattagtcctgtaagagaaggcccctccctgggaacagtcttgcctcgaattccaaggatccagcttgggcaaaatccactttggaggagggagtctccgtgtgcctcctcccgacaaggtcctttttatatccctttccctttcccagggtcctgctatgttctgaacaataactgtacagctttgctccccaccccacctcaacacacacgtgcttgtgatcgtgcatgcacccgctcccctcctacacacacacacacacacacacacacactcactctgaaggcagttgtccaggacctgggaagtcaggaaagaagaaagtgctggaaattgtagtactcttatattgaacatctatttcattgctttaagtgcctccactgtgttagacaaacatgtgttacctcatttaatcttctggacagccctgtgagtattttagtttctacatttatacataaagaaactgaggtttgaggccgggcgcggtggctcacacctgtaatcccagcactttgggaggccgaggcgggcggatcacggggtcaagagttcaagaccatcctgggcaacatgatgaaaccctgtctatactaaaaatgcaaaaattagctgggcatggtggcacatgcctgtattcccagctactcgggaggctgaggcaagagaatcgcttgaacccaggaggtggagtttgcagtaagccgagatcgcgccac

SEQ ID NO: 1677 - DNA, 1032 bp, Homo sapiens
ctgtagtggagactcactttcatttcccctggttcactcacactctaggaactgggacataacaggtatcggccctttctcctcttggtagaagttcccaggaagagggaaataaggacccagggcatgacaggaggaactgtgatctcagccgagtactggagggaggaggggtgcagatcctggacacagggtactttcctcccccttctctagatgaggccctgcctaccccacacacctccagacataaactctctacaccacctctttggccaaaggtcagcacaggttggacttctttgctgccagggatgcaaatatttattctaccactgctcccacacagaatcagccaccatggccagtcctctcagctctggctttatctctagtagttccccattcctttctgtacacacatgctttgggaagtatcagagaaaacccacacccctgatggtgtgcacacataaataacaaaacttgggggcttcaagttcttgaagtcttccagcatcatagctgttggatctctgtttaggggtttattttagggcctgtgtctggctgacccagtcaaaccttgagatgtaataaggaaggagagtgggctatgggataaaagctgaggagcccatccaggactcttcccctctctttttccatttagtttccagatgaaaccttgaggagcggagagctgctgaacatgatcgtggctgttattgactctgcacaggtgaacattgagctctgacctccccagaagatctgggaggcagcattagggacatagggcctctgctctccctccaggcctgcagacagggagcccatgcctcccaggcaccctccctcctggctacagtggtgtgcgctttcagccatggggcctgggaaggaaaagtggaacacaagcaaggcaggctgaggttaggccaatcctgcctggagttccccttattctccatattctttgggcactcctgttccacagcaaaagctgagggggttgtgattttagctctc

SEQ ID NO: 1678 - DNA, 1031 bp, Homo sapiens
cagaactgcggtcactattttgtaataaatgtggctggagctgatccagctgtctctgacctacagtatctgtcattatctctctgtggaactgctttttccttgagagttttctcctggcgtggagccacaggccccacattcctgccctgactggctgtgggccagagccccgtatctggaccttggtgttttcctctcaggagaccctgtgtgaccttcgtccttggagaacctctggtgactgatgtttgtctgtgctcctgtgtagctcgccccagttttactctccgagtgccaggctcccactgctctgtcttgggaactggaggacccgaggggtcggctcaaagggcagaggtggacagaagcacacagaaatgccacctccggcagccagcccaaactgctcccccagaatcaggtgtggccgggcctggggaagagtcttaaccagcccaaacaagtgtttgactgtgggggaaaggatgctcaagatatccctctgcctcgcagctgtctctgagaagccaatctttgagggggaagagtggggtgcccctgcctccagatgttcctactcctacctggtgactgtcagacattcccagaaggagcagtccccaggggggaccctccggtactgcaggagagtttgacggaagcccctccatggagtgaggctcagagtgcatgtggtggcaggagggatggtgggaatcaaaaggacaaaggcctctcgatccccaaatgaggtgtccagaaagttcatcatctaaaagcttgaaatgatgaagctcctgcttctcctaggaactacagtccccctctgttttgagctgtgggtccttgaaattttatgctactttgcctttccccttctagcccctctccccaacatgagaggtcaggggacatgccctactggcacacttgggtctctattgcgggccctcctgttccaaaactttacaacttgcccccttccaccagcaagcccggtgcagcctcactgacagactaggtaaggc

SEQ ID NO: 1679 - DNA, 2234 bp, Homo sapiens
ttttaccctccctcttttctcccctgcccccgccgtatcccctccctcggtaggcccccccacaccgtgtgttcccccactgtacacccccccccgagtcatgcgagccctggcgccccccacctcgagtcggcccccggaggttttgtttatggttgggttcgcggcctagtgggccgcgccagagccggggcctcgatttgggagcgtggccggggcggggcttggagcagccgtaggaagggggggccatgcggctagagcctgagaggggagagcgagaaagagcgcgagcgagcgaggcctgggccttgcctgaggtagggctctctcttcaccccggccggtgcctgcggaggagagggcctcctccctttccacccactgcgggcctcctctgatccggatccggcctggtttgggggtggcgtgggggagggagggcgatggggtggagctcccccaaactcccccatgtggccctcagtttggtgtgcgaaggattaatttgttccggctgggaggtagggaggagattggccccgtgggctctcgatgtggcgctgaggggggtgagcctcccatcctccacccgtgggcttgcgtcccctctccgtttccaggctctttgtcagctcctcttattaccctcccttctttctcaccaacccagttcttggaatatgtttttgctgctgtctttagcttcctgtttatactgtagtttgggtaccccaaacaattgtgttatttgggaagctggacatggaggcccccatagggtgtatttacgcttaagggacgtcactagagcactggggtatttgttcactcttctcataatggtacaggaatgcccagtttcttcaaacccttaaccttgtggacagcccttaaattgctttgcaaactgatgtcacaaactggagactgctccttttccaccattcttgaaatgtagccacctctggtgtaggatgttgtggaaagaaaaacaccacagtaacaggcgtttttgttattattgttaacgtttttgcctttgactctccctgattattaaatggagaaatcctttttttttgtcttctctcccatcctaccttcctccgccgcatatcctgttttggggatacctgatgtgacttgctgggaggtgatggacattactagtaaccagcgtttctagagaattaaaacattttggctgtgtatcagttgataaaactgctttgagatctgtctccattgtacttaaagattagactatcccaatgattacagagaattaaaacattttggctgtgtatcagttgataaaactgctttgagatctgacaccattgtccttaaagattagactatctcaatgattgtttcctttgtgaatgggaaatattgctggcacataaactagtgatgaaaggcctaaaaatgtcctgttttgtttttcatctttaaagctcctccttgctatgtcctaactgggaagtactcttactaactagatatcaaggtggtggggaaggggatgcaggggccatttcaacaaagcatctacagaaattagttgttctgttagaggtagcaaattttacccaactcagtctagcttcagtttctgaattgtttcttaaattagattgtaagctccctgagggcagctactaagtcatactgcttttgtattttcctgaagtattggacacatagtagattctcaataaatatttgttatttagttttttcagtgaaatttctctggctatttttttaagtagctagttttcaaaaaagagtcaagggcactcctgtgttgaaacctctgtttactctcgcacgatttccttggtctccaatacttctcaccctacttcctttaaatctttttattttctaagaaagagcaagtaagtaacaagattcttcatctccagtgtgatagctgggaatgggtctgcttgctactaattctgtgccctcaagtgatccattccagatcacttacttttgacctgttgctcagtgttgtcactactaggtggtaaaaattttcttagtcacatttcgaagcacttgtaagagggaaatgttactagcaagagtgattaggagaatttttttctttcttggttaattatatctttcaagatgactttttaatatgtttacatctgactggtacagtatatgcaatagtgtatagctagtcatgcagtttatacctgcaatat

SEQ ID NO: 1680 - DNA, 1028 bp, Homo sapiens
tacataaaaaaggttgtaaggcaggtaaggctgttttcttaggtgattgaatacagtatttaaaattatttctctggagtgtagactaatctccttcctggaaggtttttgtttccagactttactgattatctttccttctgtcaaaggtacttcagatacttgcatctatgtaaaaggcttttgattattagttaaatgtaaagtctgcttatgggggactagtaaccaaactgctgtaacttcttaaaaaaatccatcacttacacatgctttatacatttcttgttacataaaaatggattaacagccatagctccttaaggaatttatcaagctaattatgttgtaagaataaatgaatcttattgatttgttcctttgaagaagtgaaagtgtttggtggtgaaggtgctgatgagagagttaaaaacatattttgcccacatttaatacctaattttcttttaaatctttcagtattctaccttgtaaatactgttatttgtatatactgtaaatgatgacatcggtgggcactaaccgagcccggggaaactgggaacaacctcaaaaccaaaaccagacacagcacaagcagcggccacaggtaaataatccaaggcatacggattcatggatagcgttgcctgctgatactggtttccatgcagtacagcatcattctgtgctttgaactgttggtttaggttccttatttttgttttctagtccttggctctttttttacttaggtcctgataactgttcatgacatgctgtaaggcaagatgcttacttttttgttgtttaatactgtattatgaggcttagcactttattatgggtcctgtgctttttatcttttttttttttgttttgttttaagataggagctccctttgcctaggtcaaagtgcagtggcacagtcaccattcatttgtagcctcaacctctggggcttaagtgatcctcccgcctcagcctcctgagtagctgggactaccagtgcacactaccatgccag

SEQ ID NO: 1681 - DNA, 1053 bp, Homo sapiens
agacagtgtttcactatgttgcccagggtggtcttgaactcctgagctcaggcaatcctcctgcctcggccttccaaaatgttaggattacaggcgtgagccatgaaacctggcctcagatacaacagctttctgatactacagagtcactccagctaaatgcaggaggtttgtcaatttctttgagacaatgggaaataataatggaaaacttttaaaaacaattgaatttaaattggtgggttttttcttcaaaagtgttatcctggattaaattttacactgttgaccttatttgaatatttactatctggccaatcaagatatgcttttgatttgttttgggtttactctagaataattgtctccagattttatggggggaatcaggtggggctatttatgtttttttaaaagtctgaatgttttttcgcaaatcacattttatcttaccttccagcatcttctgtctagtgctataaggctgatgttatacagtatcaaaaaggaaaataagctggagaatataggtttatgttacgaataaactagctactagtgaaaccaatgggaagcaaagtcagctcccagggatattggatgtatttgggtgggtgagatcatttcagaaaactgaagtcgcctttgggaagataatagtaattctttctcctgacccatcttgtgccagcaacagatgtgcatacagaggagggagaaaggttacagtttcctgaaacttgccaggttttgagatagcagcataaattctaaaagctgttttgagtctagcttccagagtgttcctggtgtatatttagctacagggttgttctaacttactgtgagcataaaatgacccactaactgtaatgtataataggcttgggttggaagagtaggcagcaacaaactaccaagtcttgggtaggtaatctttttaaaacaaatgaattaagagatggggtcttgccctgtcacccaggctggagtgcagtagcatgatcactgcagccatggacacctgggttcaagcaatcctcccacctcagc

SEQ ID NO: 1682 - DNA, 1083 bp, Homo sapiens
gaaaagttaatccctgcatttgcttacctaagtttgatgccttaatagtggaaggactagatgtcacaaagtcaaatattaaggcaaaaataacatctagttaaaacgatctcccataaaaaccttaattcagcagcacttgggcccttactgctcaaaagctaaaaatgaacttcttttatttatttcttcatcttggttatgatctttctttgggaggggtggggctgtgaagggagtagtagaagacaaatgtggtttgggaagaggtgggagttgggaactgtaatgggaaaatatagagggattttctttcttttatttttttttttttatgtctagcatgcctgtaagttcagtatgcatatgatcatgtgactccactatattttattgggttccttgcttctactctttctttggctaaaactattgagcatatattgaagggcttgaaagtcaatccattcaggattcctcagggtagatagttttctctttatagggctttcactttttcttgatgttgaattccccttacctatgccaagtttctgactgtagcatccctgacaccaagagtgactaatccctctgttttccagctttctgagaccaagatcttcactgcctctaatgtgtcttcagtgcctctgcctgcggagaatgtgacaatcactgctggtcagaggcaagtgtgcagtaaaatttagtaccatttcttaaacacatctgctgagattactgtaaagagaagtggcactggcctttgtaaactcccatggtgtcaataataataaccaaattacattacatcattacattcctcttaagttgatggagagacttctttttttttttgtttttgagacagagtctcactgtatcggccaggctggagtgcagtggcacgatttcggctcactgcaacctctgcctcctgggctcaagcaattctcctgcctcagtctcccgagtagctgggattacaggcgtgtgccaccacgcctggctaatttttgtatttttagtagagacggtgtttcaccatgttggccaggctggtctcgaactcctgacctc

SEQ ID NO: 1683 - DNA, 1050 bp, Homo sapiens
acacatacacagttccttccaaagacagtcaggtttttggcaggtgaagcatcctctttgtcttcttaagcagacttggttgtagaaatgtttgagttgggtaatagggggtagctctaagagaggacttagttctggacagactgaatattcttataagaataagttaacattatttattgactactcattgtgctgaatgaacaccatttgccattactcttgagagaaaatcaatgacataaacttgtcaatacattttaatccttttgcagccctcattaaactatgatgggagattgtagcagttccccatttcttgatggatcagaattgtcttgtatatttacttaaaccaggtatttgtagacaaggcctccagaaacctatggtcttcccatttctgccacttactagctgtgtctccatttctatgtaaatagggataaaagtgctagtccttcccatcttcccaaaggtggctatacaagtgtggtttcagtagtgatattataaataacttagaacttatgacatattacttgttgactcagagcatttaaaacatccaaggtcattaacgacatcaaaggaatcatttaaactaaacaaagatgctacaagtaccagttttctcatagtcattgagtcctgagaagtactgctttttctttttttctctttttctctcctattttttgatggagggatactaaagttgtaagcagaccatgtgtgtgcatataattttatttttccagttagagtaattagtttaactagaaaactgccaagctagctactaattcagaactcggtcagtttttaattgttgtcttaaaatgttttttgtgtgtgttaagttagtaatttggtggtcgatgtcctgccacataggaaaggtaacaggtgagaagaggtgggaggagaagggaaatggagagaagtgttgggattaaatagaaaaagaagaaagaaaataggacaaaggttgtaagaaggtgtaatgaagatcaagaagtaactaccaacccttaaagataaatgact

SEQ ID NO: 1684 - DNA, 1088 bp, Homo sapiens
ggtggcgggtgcctgtagtcccagctactcgggaggctgaggcaggagaatggtgtgaacctgggaggcggagcttgcagtgagccgagatagcaccactgcactccagcctgggtgacagagcgagactctgtctcaaaaacaaaaacaaaaacaaaaattctccagtcagccaaattttatccctgagaagcagggagaaggaagtaatgatgatatgaagttttaatggctctgtttttttagtgattactatgtgccatacatgtattaagtgctttaatttatttaatcctcctacagctttacttttattcctatttccagatgaggaaagagagattaaaaaatagtttttccaagcttacatagccaggatttcaatctaagacagtctgactctaggtcctatactctagtggactatgctgtatactcagtgtgacagtattctttacttgcctgatctatactggctctcggtctggataagtgtctttatgagtagctgaacaaggttactggctgtaggtttctctcatctctttgttgatctacaggtgagcatgttagggaaaggatttggtgatgtcggtgaagctaaaggcggcagtactacaggctcccagttcttggagcaattcaagactgcccaagccctggctcagttggcagctcagcattctcagtctggaagcaccaccacctcctcttgggacatgggctcgacgacacaatccccatcactggtgcagtatggtgagaagatggaaagtgacttgaatctttaaagcattggagcattactgtcaagaggctagcagggggagggggtggagaatgtgtcctgaagtgaagaaaaggggcagctagttggttaccttcccacatgtatttcccctaatcaaataagctgaattcaagaagttggggaataataaaatttgaggctatgtatttctcatcacatttagaggctgggcatggtagcttacacctgtaatcctagcactttgggaggttgaagtgggaggacagcctgagccttaggagttcaagaacagcctgagcaacatatcaagactcca

SEQ ID NO: 1685 - DNA, 1032 bp, Homo sapiens
ctatagacattcccttttttctgatgagaggaattcctttcttctaaatttctaggtgctacaggctctgcagtgaaatctgattcaccttccacttctagcatcccccctctcaatgaaacggtatctgcagcttccttactgacgacaaccaatcagcattcatcctccttgggtggcttgagccacagtgaggagattccaaatactaccaccacacaacacagcaggtgatttggggtgaggatggaggttggggttggtgaatagcaataacagagctctctggtccttattactcccttgacctggcagagaccacattagccctgcttttgtcgtaagtgggtgacctaagaactgtgggaagtgaagacagaggaggcttgttttaattttcccctttcaacatccacttttgctttaactgctctctacccctggctggccattgtgcttaacatatgatctcagacctccttggtgtcccatattatgtcttatttccttgttatgttcttgactgaagctccaggtcacgtaactatagcactatggctgatggcagcctctttttttctgacagcacgttatctacgcagcagaataccctttcatcatcaacatcttctgggcgcacttcgacatccactcttttggtaagtgtgatgctgagagggatgtgtggttttcttacacttagaactgtccaactgtaagattgtcccaagagagaattattgaaaatttcttcatgaggtggcaaaataattgatttgaggttgcaggaaaaggagtaaagggatgttaggaagccaagagaggcagaagaatccctaaacattgagctctgggtcattcctaaaagccctgaaagtgactttctgatttttttcccctactgaatatatagttgggctttgtatgctttaataaattctggaagaacatacctttccaactggtagagctgttctctttccttggtcttgggtatgcccaagttctgaaaagaatcagtgcaaggctgga

SEQ ID NO: 1686 - DNA, 2479 bp, Homo sapiens
acagcttctgggcctcagaagccaaaggccagaatgttcatctggaatcctttttggtttcttagataattatgactattattttattttttgaggcagatcttgctcttttacccaggttggagtacagtggaacgatcatagctagctcactgcagccttgaactcctgggctcaagcaatcctctcacctcagactccccaagtagctaggactacaggtgtgcatccccatgcctggctaagttttaaaaatttttttagagacagggtcttcctatgttgcctaggctggtctcaaaatcccaggttcagacagtcctcctgcctcagcctctcaaataactggggttatatataggcctgagccactactcctggccccaagaattattttctctgatttgattaaatccctaactctgagtgtgtttgctggtctggcctggttagaggaaagtttcctgactcaatctgggactttgagaataagtggctgacattagtagctttttgccctagtgtatcttctgtgaccttcaagtatttggtacctattaagatgaaggatatatggaaacgttttagaagatacctgttcctgccctcatagacaaagtctagataaatttcataccgatgacacatccaaataacacagttacacatttttaatttgtggtcactaccttaaaaccctgacattggagaaaagtgaagtattctttccagaggagattatttttaagccagattttgaagagtataagagacagagacttgtagaatagagagtaaaactggttgttcgtgtatgttttgtgtctactctattggtatcaagaagccagcctactagaatcagtagtatttagctcaaggaaagcttcaagacctttcatgaatcatttaatctctgtgtactttactgctttttccttaaataaaattgaaggaaataatccgtgtcctgttctaacccagaatgaggatgaatgttctgttgaattagcttgtctcttggctccttgttttgctaacatcatgaccagttcctgttattgctatatgtctgtatctttcagccacaagtatatggttatgatgacttgcagatgcttcagacaagatttccattggtgagtatgtgggatagagctttggaaaagaaagtagtcttaaaattagtgttgggagaattatctccgtcacagacatagctctttcccatcccagccctccatacactctgatttaaggcatattagaatatagggatttgggggagggtttccaacagaagataacttttttttttgagacagagtctttctctgtcgctcaagctggagtgcagtggtgtgatcttggctcattgcaacctccgccgcctgggttaaagcaattgtctgcctcagccttccgagtagctgggattaaaggtgcccaccaccacccccagctaattttttttgtatttttagtagaggcggggtttcaccatcttggccaagctggtcttgaactcctgaccttatgatccacccgcctctgcctccctaagtgctgagcttataggcatgagccgccgcacccagccttttttttttctttttttaaatcagagttgtggcatcttagtaaatacattttaacctattctatagcccagtaaagtactctggagcactcagggtgctttctgtttgtcccagacactttaaattatcgaatgatctgttttctcagtagaataagcttggtataaactgatagggatgacacctagagggttgaaaatattggtcctcgtggactttgatgtattctcaagtgggcatacccgtagaccttgtctgactgtgctcatggccaggcaggggggacagtgtatgcaagagtaatgtggagtttgtgctaactctagccagcttaattagtgactggataaattgcacaactctcacattcttctgttttttcctccgtggaaatagtactcatgctggggaatgagtgacattgaatctctgctcttttttcccctcttttctaggattactacagcatcccatttcccacacccactactccgctgactgggagggatggtagcctggccagcaacccttattctggtaggattgggatgggactaaataaataaaaagggagatagtgttgggattgatggcagacacctgattggtagcaagaagggatgtgataaatcaggattggtagattcaaaatcctgctaaagttgggcatgtcatggcttttcctattcatcccactttgtgttgtctccctgtgatttctagatgatatcttagccaggcatggtagcacacacttgtagtctcagctacttgggaggccaaggtgggagaattgcttgagcccaggagttcaagaccagcctgggcaacatagcaagaccccatctccaaaaaaagtgatatcttgacttagtttc

SEQ ID NO: 1687 - DNA, 1498 bp, Homo sapiens
tggatacaacactggtaagctgaccttgtctctggctcggtgttatctgtggggtgttattggataaatttcagggaggaagacttggtgcttgagaaaatgggattggtgagggtgtgccgctgccccaggtatgattgttaatgcttggctgacttgggtatctgtgggagcagcaccaacagaggagcttgatactaggacatgtgtccactatttgtgacgggaatgcccaagagtatgtgttggtttttagaatatgttggttggccaaaagtgtgggtggaagtagggcaaggagccccaagattttgctgaaatgtcagtggaggcaagtgttaatagtatgtatggcactgatagtacaaaaggggggtgtattcactgagtagaaggattaaatgggttcatagctagcagcctacgataggtttggcttaaatcactttgtagcactacttttcttatgtgtccttttttattccctagctagaagacctaaactgtggagaaaaaggagtaggcgtgaccatacttaatagagtgggaattggactgggagagttgggcctttaggttccttcatttgtatggctggtctctttgcaagtctttttgcatatgtgatggcagggagggaattgtaggaatcctctggatgggtacttacctaaaagatactcagcctctcccttgcttccatacctgacatctgtgctctacttttggaggacagggagtgagaaggaatctttgaataatataattgtaccttttcagcgacttgtagatgaataggggaggagtaggtttctctgattgcttagggttggggatgggggttgtccttcaaagctgtcagctcagttacagtttcatggtgatttggatagagcagcatgtgtttttcacccttatgtgggctctgggtgggtcagttgcccacagttttcaataattgggaagagcacagaaggcagtaagggctaggaactgatagccaagtggagctttgaactgtgctgcatgagttagagtgggtcatgagttaaattaaacaaatcctgagaagccccattgagatttaatacatagactccttgtggccacccctgtcattgagcaaggttcaccctaaatcttggtggggaggattataagccttttgacttggagtggtggcccctttctgaggacattaggttgaagtcttagttggaccaggttcacgaattttaagaggtaggtgatggataatataagagaattggcatacctgattctagaaatcccaccttcttgcctcccttcagaattcagaaacgtattatatcagcccttgagaacccccagttcccaaccccacaaagggcttttgtcattccattcatttatttttatgtatttgattccttttaggaagaaaatatccacccccttacaagcatttctggacggctgagagctaatttggcccaaggctgggggctgtgttttg

SEQ ID NO: 1688 - DNA, 1068 bp, Homo sapiens
tgagtggcatttgggtggattgatttgaaatggacattaaaattaaaagtttattatattcctgctagactttggcacagaagtgttttgaaaacagtgtatgctagtgaggtttggtcatatccccttgcccaccaaaaaacaacttacctcactctctctcacgtatactcaacacgtacctgggaagggccaaagaacccttagggagcttttgtttcatgaactcttacctctcaggactaacttgaagctggaaaaccgaccaaaattcccttgcattggtatagctagaaaggctacagatatcacctcatctcaggaataagggccaggtagctagctgagctaatcctcctgtctgtttcctcctcccccaggtgtttcagtcacctccagtaacacgggcgtgccagatatctcgggttctgtgtactccaaaacccaggtaggtgcctggctctggataaaagtggaaaagagatagacatagaggaggtggagttgcaatggtagaaataacagtggacaagaagaaccctaggagaggtggcaggaaacccatcctactttttctaaatgaaaggtcttctctagacttcacttcctctaagaagttaaaatttagccctctgagaaaaaaaacgagaaacgtaataggaaggtaaagcgtggcaaattgtttatcgtgtcatgtaatttactgtgcaactctcctggccccttttcctacctactcccaacctttttcataacttttcaagagaataagtatgagagtgacaggaaactagttcattccattctttgagtaaatctataacagtgggagtgggaaaggagacgacctagtaactaatgaagcatttgagtgatccacaggtttgttatgttgcttttatcccccatcaccataaatacttaaagtttgctataaagcactgggggtctgggggggcacttcatgcacaagaccttcagcacttcaaatatctcagtatgtgtttatttcttttgaaatatccaacgagttttttttttttttttttttttgagatggagtcttgc

SEQ ID NO: 1689 - DNA, 2031 bp, Homo sapiens
cccttaaaactgccttccctttccttttcttacccttcctcaccaccaccttcacccaatccctccccagcgccagtcatgggcacacagcacatacagacacaagcgcacataacacgagcggccggcaaaggaaatctcagagaagggccgggttgaaaccttttttgcccaattcctttggtgcccttctcctcctgtgccacagttgtcctcatcccatcagacctgggtcacaccttccctctttcctctcccagccttccctcttccctgacattttagctttcccttctaatggtggagttctattgtcaaagtttgtccctttattttccatatatcctggttctgcctcagctaccatatttgcagatgattctctgttgccagcgccagcaggaggagcaggtaatgaaattgaatgatcatatgcttgaacccactccttttcagtccccatttcaccttcacagcctcagggaacttgaaaagactgcgcggtcacaaatcgggatacacaaacacaaacaccttgctgagctctctggcctccccttcctctctcctcctcccctccccaacaccctctttatctttgtacccttccccagctgtggaaaacattcggttaccagaatggaaaagattcttggggcagcatctggagcctgaggcctcagactgcctctcatacctgcctgaaatgggctcacagatgtgatgtgtggtaggggtggggatctgtggggcgatgcaagtggcctcttgagagctccattataggtggctggagctagaataagggcttccttcctcaaagacagctttccaaattgaggcattaatggggatcaatggaaatgaaattgccttgtgatcacccatctccaagagcaggggagagagggggtagtgtgagaatgtagaattgaaaatgagtagaactcactcactaccttgtctctaaaggtatcttgccctcttcatcttttccctatttaaaagtcaaaaatgccttcctgcttgtaagaaaggggctttagcagctatgcagaccaaattttctatggttctaatagtagtgaggggaatgggagagcaagacagtttgcacatctccacctgaagatgttacaaatttgtaccactaactagacacctttttcctcctcatgatcctcccattcccctgcagacgggcagcgggcaacgtagccagaccagctccatcccgcagaagccccagaccaacaagtctgcctacaacagctacagctggggggccaactgaggccctgaccctcttctcccggtcccatcttctgagagggcttctcagcctggaaactatggaaacagcatcaaagagaaaggaatgtggggggtttccgctgccccccacccccagcggcccaccccatgcctcagcttcatgtctgtcccattcctataccatccccaccctgttgtatgtattataggatttgtattttctccttttttttcccccttccattccttctcccctcttgcattcaagattatgaaactttgctatgggccctgcacttcctttgcttcctcctgttcaccctggtggtgtacggatgaggcggggaggtgggacccccaaacatatatcagcccaacagccctaagtctccttctttattattaggaaaacaacaacaacaacaaacaaaaaaatggcgtcatgaatatgaacagcattgtcagatgaattagttgaagtggttttttttttgttttttttttttttttgtactgtgtcctcaaatttaatggattaatgtgtcttgtatatataaaaagaaaacctctaccttcagcctctgcctattcttgctccgtctaggacatcctcaatttcgtcgatgaccagcttggtgaataagtattactgtaccaactgggcctcctctagcaggcccctgaaggcagtggaataaaatgaaatcttcgccctttaagaactcctgaccttaatgtggtagtagtatcttgtcc

SEQ ID NO: 1690 - DNA, 1035 bp, Homo sapiens
ctcccctctgagcggctgcggctcctgcacctccccggggagccgccccgtcgatgccactaaggccaaggacatatagacggtctgccctcccccactcaaaccgggatcatgacggtccccaaggagatgcccgagaagtgggcccgggcccaggcgcctccctcttggagccgaaagaagccctcttgggggacaggtaacgggaggcagcgcctggcagctctcccgcacccattatttcccccctccaatccctacattcacttgtccccagcctccccctacctgccttgatcctctttccagacccagagatcctggctccgaaggatccagtccctaccttcttcgtttgcatggtctttggtgattgcgcaggggacttggcccaagagagcccctctagggaagtttatgggagtgaagtggcttggtaggcagggggcactgtggcctgggttttgttactgcagtgtgctctgcaggggtcctggggtgtgtagaaagggttctggaatgctgtctttggctcccggacaggcttaaggcattaggtttgctgcctaaccaagttacccctttttgcagcatgaggtcatggtgacccccggggagacgggctggggaatctattataggacagctccttgttctgggacatgaatttgatgcctgcagtcccagacctgcagaggtttcagataggtttagctagataggtgtcactaactgagtgacagatgagccctttaaagctaaatgtgtgcagatggtacaaggaaggtccagttagagagcaactgtttcaattacatttcattcctccctcctctatctctatctcagtctgcatgacccatatccctgaaacgcaccccccacacctttttctacttgaagatgagctttgaaataaggtgatgtcatttcgggccagtcagaagcagttgctggtgacatgtgacaaccagaggctcctgtaggggggactgcacatggggctgggatgctcccgcagagcagctccagggc

SEQ ID NO: 1691 - DNA, 1043 bp, Homo sapiens
ttggtagagacggctgtgaacatcggctattcctgcaagatgctgacggatgacatgactgaggttttcatagtcactggccatactgtcctggaggtgcgggaggagctcaggtaaacaagaagcccaggggaggcggtgctgtgcgttgtgcccagggctcaggtgggggtttctggaccatttagacttgaatccctgctccccactgccgttctggaagaccacaaccgtatcatttccacctcgacaggaaagcccgggagaagatgatggactcatcccgctccgtaggcaacggcttcacctatcaggacaagctttcttcttccaagctaacttctgtcctggaggccgttgctggggagtacgccctggtcataaatggtcacagcctggtaggcatcgctatccttagcttgggcagtatctttccagtgagcacttctgtccagggcttttatatcttgttctaatttcccctgatttcagagaagactggtctcaaaggggactgggaggagctgagactcccaggtgtctcctggaaagactggctctctcaggtttctctgtgctccaggcccacgcactggaggcagacatggagctggagtttctggagacagcgtgtgcctgcaaagctgtcatctgctgccgggtgacccccttgcagaaggcacaggtggtagaactggtcaagaagtacaagaaggctgtgacgcttgccattggagacggagccaatgatgtcagcatgatcaaaagtgagtgtgggctgtgcaggtgtgtaggctgggcttgaggctggggaggggcccactgaggtctctggactgcagaagaatgacgggaagggggttgtaacttggtaggctctaaagtgtgtggccggtggccatcttcaccctcttgtcatctcttgtctctgcagcggctcacattggtgtggggatcagtgggcaggaagggatccaggctgtcttggcctccgattactccttctcccagttcaagttcctgcagcgcctcctgctggtgca

SEQ ID NO: 1692 - DNA, 1027 bp, Homo sapiens
aagtttattggcagactcccttttgacctccctttgcctccccatctggtgctttcttgcatctacaccccagggccctgtggtggggctgcagggggaagctgtgcacctgagatgaggctggaacgggaattggcctctctgctcccttcttcagtaagcaaggagccccgcccctcaggcccagcctctggcaagaggtggtggaatccttgtgccgggtagtagaggaggataagggcaaaaccaggcccaggccagtgcctggcttggtctggatgggacactgtcagagtttggccacagcctgtcctttacttcatccacacctatgaagctattccctaaataaggcatttcccaagttagtcgctacctaatcagccttgagaagaatcctttcctcttctttgatagtgggtcgggggattcttcaggaatggtttggagctgggagtgggtagggggattttaaatgttccatatgggagccccaaaggaactggatgggctgcagtgaggtgggggcgggtgggcagggaatgggagaggggaagtcttggcagggaaatcccttttggccacacagtttacaaacccagtatcatgtctgtctgtgtgtctctcaaggtgagagtctgatttttataccaaagaggaaatgattttttttcatattttgtttgtctatattatataaatatatatatacagttatatatatatatattattttttggttctctctcgttttttagggagggaagaaagtaccaagttgcattgagctgtaattaaggaacattataatttatgacacatttctatacttgcaaaaattatatcattttatggatataagagaaaaatgcctttttataaaatttcaatttctgagaagtgtgtaatttgtctcttttctgatgtttaaccaagactggtggtgaaagtaaagacagaaactgtctcttaaatgtaattgagtgggtagatctgggatatcttggacaaattggaatctgactgg

SEQ ID NO: 1693 - DNA, 1053 bp, Homo sapiens
agcacccactgccctgggcccctgctggccccccctgggcactgacccttccctgcccactctgtctctctgcttcctcttccccctctgtgcctatctgcccctcctgccctctcagcaggctagtgctctcagcttcccggcccccccttccaggccgctgccgcctgaccctgtgtccaagagactccaggtaaatctgggccagggcccgccctgagccaaggcaggtgggaggcttggtacccaactgcagttctcatccctgctccctgccagtggtgctcttcattaggtgatcggggtgcccctcagccttcagacactctgagccccagaagcagcaaagggtgagcctcctgccttggtttctaccaccatctggtggtcaatggcgggactgcagtcggccagggactgcggttgacctacaccttcctcccctgagacatcagctggcatgcctccaagccctctgcgcatgccctcattctctcctgccccctggctgactttgcatgttgacttgaacccctctggggaatctctgtgcatgtccacagcccctggttatgctctcacagccactgcccctctctctgttcaggctgagctggctgaccgacccaatccccctacccgccctctgcccgctgacccggtggtgagaagcccgaaggtaacggtggggggagagaagggcacggcctctccccccacctagggctgtggtgctggtagccatgacggtggtggccgtggcgagatgccccctcagtgcatgagggcacatatcccggtggtgcctttaatggtgacaggtttgtttgcagacaagggtgaccgctggtgctgcccccaagctggtgttccccagcaccagtgcgttgggggtgggcaacatgacacccccccacctaagccggcctcctgccttctctccctcagtctcaggggccagccaagcccccacccccaaggaagccactgcctgccgacccccagggccggtgcccatcgggtgacctgcccggcccaggggctggaatcccg

SEQ ID NO: 1694 - DNA, 1026 bp, Homo sapiens
gcccgcgcgccgcgcggcgcccgaggcgcagctttgtgtgcggcgagaccctggggcaggcgctgggcggggtggggacatctgacgtcagcgcgcccgggagcgcgggccggggaggcggggagccccccaactcgcaggccggagaaaacacgagtagctaggtgggcggccccaaacctcaactcccggcattgccaagcaacagccattcagttcggttgctgggacacgcgtcaccatggcgacggctccgcgccgcgcagtctgagtacttaaagagcaagcgcgcgcaacgcccgggcgtcggaaagcggccttctgggactccgcaaactcccgttctccctcccccctcccccttgccattccctttgccttccgggcgccaagtctctctggcctccaaggtgaacccaactccccagcgcgccccgggttcccgggtcgggccggcttcaggcggtggggagcgggatcccgggccccgggcgggcgggagggacgggacgcggtgcagtgttgttttttcccccgccaatattgcactcgtcccggcctccggcccccccggccccccggcctccccgctacccctagcggggcagcccccgccctcctggctctccatcccggcggatctttgatagactggagtgtcgccgctgccaccgtgagtaagtgggtctgggaggacttcgggcatcctccctcaggcaccctatccttcacttaactccatccagcacctcccccacccgcatccccaaatcagccaaacttcccctagatccctaacttccaccctcccaggctttctcttctactcgccgattccttccacttccccaccctatcccggaaaatccctaaaataagcagttgcactggcttagaaaacaaccaaaactttatggcaatgtgctgtcatctttcctggggttagtgcctgagtaataccccttgaaaacttctcatcccctgaagggtggggtgaccacccctctgggactgaactccttttgg

SEQ ID NO: 1695 - DNA, 1199 bp, Homo sapiens
aacatggtgaaactctgtctctactaaaaatacaaaaattagatgggcatggtggtgggcacctgtaatcccagctactcgagaggctgagccaggagaatttcatgaacccggagacagaggttgcagtgagccaagatcgtgccactgcactccagcctgggtaacagagagagaattcatctcaaaaaaataaataaataaataaataaataaaaacaaaaaataaatttactagggtagaccatgcagaaagaatgtgcctgggtactgggacctcttctagctttgctccagaaatttggggaaggagtaaagacagtagcaattccagaggctccttgaagaggagttggggttggggaggataaagttaggtggtggttggaaatgggagagagcaaggagaaaactcacagtagctgctgtatggaccctgataccctgtacctctttccttgccctccaggtcctggagtacaatgccattggaggcaagtataaccggggtttgacggtggtagtagcattccgggagctggtggagccaaggaaacaggatgctgatagtctccagcgggcctggactgtgggctggtgtgtggaactggtgagaggggtagggcaagggagaagaagtttcctgcaatggtggtgacttgggtgggaaggggagggatgggcctgaaacttatttctgggttgtgtttgtgtttctttgtctctagtgtgctacggccaaatttagagtgaatcactccaagggttaactaatgtggggagcctcttttggcattaggtatgaagatggctgtagatagttgtagacagtgtggactggggcctcgagactgggcagagaggtgtcagctctttcctctgagcagaggatggctataaaagtgacagaggaggccgggcatggtggctgacacctgcaatcccagcactttgggaggccaagggggaggatcatctgagttctggagttcgagaccagcctgaccaacatggagaaaccccatctctactcaaaatacaaagttagctggatgtggtggcacatgcctgtaatcccagctactcgggaggctgaggcaggagaatcgcttgaacctgggaggcagaggttgcgatgagctgagattgcaccattgcactccagcctgggcaacaacagcgaaactccatctcaaaaa

SEQ ID NO: 1696 - DNA, 1488 bp, Homo sapiens
atacaaaaattagctggcctagcagttggtggtggcaggtgcctgtagtcccagctacttgggaggctgaggcaggagaatcgcttgaatttgggaggcggaggttacagtgaacccacatggcgccactgcactccagcttgggtgatagagtgagactctatctcaaaaaaaaaaaaaaagaaaagctatttaaggaaccaaaacatagtttgactgactgcaagaagtatcacagggaatgttagagtgttttattaatttctttgtcagacaagtgtttaggaaactctcactccaggcctaatgctgtgctaggctctgcaaatgctaagagggggaagttactgtccctgcttccaaggagatcatggtctagtgggaaacccgacacgttcaggtaccttcagatgggcactcagaagagtaagcccttagttaatgtttaaagatgtttaaagatgtctgagactcataggtcaaagtcagatttcagttccaccttattagacctgcactgctaaggagctgctttaggtaaggctgtgttcctagtcaccagggtgttcaaacacagtgctgggggcaatgtgggaatagccttcttttatttaggaagtaatgtgaagtcagtttcatgaatagatcttactttaagcattcattgaggtttttggcaagaatagagtacggtatatgaaggtgtttcctaatctccctgacaccaggaataatctagggctcattagagatgtcaaagatctgttctagtttcttaacctaaaacaagagtgttttagttccattttataggcggggagtctgagccaaacatgttatgtcactttccaagtctccatagcacagaagtcttctgtctccccatcctgactttcccagctcatagggactgtcaaaggcagcagctctggccggctgtgatgcctcatgcctgtaatcccagtaatttgggaggctgaggcaggaggatcatttgaacccaggggttcaaaaccagcctgagcaacatagtgggaccctgtctctacaaaaaataaattaaaaaaaaaaaatagccaggcatggggtatgtgcctatggtctcaggaactcaggaagctgaagtgggaggatcacttgagcctgggagttagaggctacagtgagctgtgactgcaccactgcactggataatagtgagactctgtcccctaccaaaaaaaagcaaaactatatacagatataaagtagcagctctgttgctgatagaaggaacagtaatgaggagccctgcaggtcttattccactctttctagctgcaagctttcttcctggtggcagatgacatcatggattcatcccttacccgccggggacagatctgctggtatcagaaggtaatgtgggcaggaaaatagcagtgggtatggggacaggccacagggaggtggttatatatggcctggttgaggtgttggggtgatggc

SEQ ID NO: 1697 - DNA, 1034 bp, Homo sapiens
cttggcctgtgcagctcgggcctgccccccgaccttgctagggaggggtggagggtgaagctcccgggagctcattggcactagaggttctggccacgccctctccgcgagtccagtcccacgcgggatgaagagggcaccctccgccaagaggctgctgcgggacccgggtttcccctttccggcgccttccagcctcccaatcctcgggtctcgcctccctccgtctcctccctttcccctgtctgtctttccattggtccatgccgcccacgtgctccccggggctccgcaggcaggactgggccccggggcggtgcgctgggctacacctccctccccgcgccccgtcctctcccgccctacaggccctagcagggcaggcgggaggtgagcgcggccatcccgctcccggagttccgggatcctggaggtgggggctgtgccctgagggagggcacagggaaccgggatggggctgggggacagcgagtgctgggaagtgtgcgagatttcactccggggctcgggtcgagctaccccgtgcttcaggcggtcctgcgcctcctctccccaagacccttcggggacacagcactgcagacccgccggagacaacttgtgcgggagcccggagtcctcggaataacacttggtaagtgttaccgcgcccttcttcccttacgccagtccgtagttcgtggtccttcgccggtgtccccggagcccagcggctgtggatggcagaagcccagagtgggactggtcagctgcaggagcagaagaaaggtagggcaccctgactcccgaccccgcgcttccgaataaactgcccttcgcccccggccctgctctcaggctgtccgaaggcagtctctccacgcccctcgggcaagcctgggtaggggcgcggcctcctagcgtcttccctttcccactcctcccaggtcttctgatagccgtcagcgtctccgttgataaaatcatctcgcatttcggggccgcccggaacttggtgcagaaggtgaaggtgg

SEQ ID NO: 1698 - DNA, 1042 bp, Homo sapiens
cttcttttaggagaccatctagctggctgcccccgacagtgagtgtgttggctcttgtgaagcggggggcacctcccgagatgccttctcctcaggagcttgaggcctcagcacccaggatggtgcaaacccataggtaaggaggattggggagaatgcactagtgtgtaaccatgtatgctatcacagcatggatgggaggtagtgtaaaaaaccctgggctttaaaataagaccgtgcttagtgtgcattgcagcttttctatttattatcgatgtgtcactcatttgagccttggatttttttttttttttaagagacaagagtcttgctctgtcgctcaggctggagtgcaggggcacaatctcggctcactgcaacctccccttcctgggttctcctgtctcagcctactgagtagctgggactacaggtgcccaccaccatgcccgtttaagttttggaatttttttttttttgagatggagtctagctctgtcgccaagctgaagtacagtggcatgatctcggctcactgcaatctccgcctcccaggttcaagcaattctcctgctaagccttctgagtagctgggattacaggcacatgccgccacgcccagctaatttttgtatttttagtagagaccggggtttcaccatgttcgccgggatggtcttgatctcctgacctcgtgatccgcccgccttggcctcccaaagtgctggaattataggcgtgagccactgtgcccagccaatttttgtatttttagtagaaacggggtttcaccgtgttgcccaggctggtctagaactcctgacctcaggtgatccacccacctcagcctcccaaagtattgggattacaggcatagctactgcacccggccaggattctttctataaaaaggatatgatgcaataccttttttatggttatagagactaaacataattttttttttgagacagagtctcactctcgcccaggctggagtgtagtggcatgatttcggctcactgcaaccacgcctcctggg

SEQ ID NO: 1699 - DNA, 1014 bp, Homo sapiens
tcctctggctcccctcagggcagtgcgggctctctgtgatcacactgctgcaagacctgaccagttgagcttccggcgtggggaagtgctgcgtgtcatcaccacagtggatgaggactggctccgctgtgggcgggatggcatggagggtctggtgcctgtggggtatacctcccttgttctgtagccctgggaccctttcctgcgtatgtgtctccttcctgtcacctgggaatggaatggccagtgaacaccatcccagaagcattttccctctgcaaaatgacgtttcttcccacgtctgtttctgctaatatttaaaataaactttccttcttccctcctatacccacctgtaaggtgaaatctgctcttcttccaaatatataaaaaaggaattgccctccaggtaatccctttcctttttcccgtctatataagggaatgtcttccttcctatctatctgcaaaatggaaatctagacctccttcttcatccataagtggactgtgccagtacaatacatgcctcagcccccaagcctagaaggacctctagtctccttcctgtgtggaatcttccccactccatccctcccaagttgcctgtattgataatgtactcactcatgctgtactaggtgctgaagcctggacacccttggtgggtgggcctgtggtgatggtttgcatccttcctcctttgtcccaataaagtatgggagttgaatgtgtgtctttcactgtgggtttctggacataggctatgggggaggggaaaaaggacctcctatgggaggcataaggcagatgtttcttcctagcccaggtttagtgcttaatgctccctgaagaatagagaagtagtccctcattgcttcctgaatctcacaagtgcttctctagtctatgactttctctgtttagttagactaataggataggagcctgcataaatatgggggaggagagaagacttagcccttgaaattgtacttcatatctgaggtgaag

SEQ ID NO: 1700 - DNA, 1028 bp, Homo sapiens
tcgtcaccataaggggaaatgtacaattaggacagcattggtccaatattagaaaaaagtaatggggacatgtttactattgtattgcttaccaatcacacagcaggtgtgtgtgtgtgtgtgtatatatatacacacacacatatatatatacacacacatacacacatatatatacacacacacacacaacttggcacatttaaaaaccatcttttctcttataagaacatctaaaacatatatgcatatgtatgtctgaaaagacaacaaagctttttaaattttatttttaaagagacagtatagtctgttaacttctggtcaagagagtaggaaggaaggagacaccctggatatacctcctgatgtcattcaggagggtgagggaagatgggctaggggtgaagagaaatatactgtctctttaagaaagggacattgaaaactgtacaattaagaaaacaagagtagtgttttcaattgataatctatactcacaacaaatactctgataggtgaatactgctgaacagtttatgtagtgacttttgttgcaggggtgggtttagagttctttttatgtaggtttttaaatgattttattttgaactgaatctccatttgcacagcacagcagacacacaagaactacagcgcattaaaaacagcatgtgtgctggcgggggcctggctttctcattagaaaaaaatatgtttgacaggttatgaagggtaaaacaaaaataattgcaagaactaccgtgcccttctgaccccatgggggccttccctatcccatgattccattttggggagtagaggtagggagggggcagcagttacaagtgctttgagctgtcaactcacattttactttgacctggttgggcaagaaaggagagacaaacttccctagtcaggtatctaggaagaagcctcagctactgtttctgtttaaggtctctggggtagctcttggagccaacagagaatagatggggtaggaatagggatcctggccctat

SEQ ID NO: 1701 - DNA, 1076 bp, Homo sapiens
ggctgggtgcagtggctcacgcctgtaatcccagcacttttaggaggcagaggcaggcatatcgcttgagcccaggagttgaagaccagcctggacaacatggtgaaaccccatctcaacaaaaaacacaaaaattagccaagtgtagtggcatatgcctgtagtccaagctacttgagaggctgaagtccaaggattgaggtggagattacaatgagccaagatcacgtcatcacactgcagcctaggtgacagagcaagaccttgtctcaaaaaaagaaaaagacatagcagaaaagctgaggaaatccaaataaaatctgtagtttagtaaatagtattgttccaactttaatttcttaattttgataactgtcctatagttgtatatatatatatagacatatatataacattaaggaaagctgaatgaagagtgtacgaaagctcttcgtactacgtttgcaactcatctgtaagtttacattggtttgtttgtttgcttgctttcaaataggacctcactctgttacccaggctggagtgcagtggtgcaatcctagctcactgcaacctctagcttcttgactcaagggatcctcctgcctcagcctcctgagcagccagaactacaggcacaggcaactatgttcagctaattttttttattagtagtagagataaggttttcctatgttgcccaggctggtctcgaactcctggtctccgaaagtgctgggattacaggcctgagccaccgtgcacagcctccactatctaattttagaactttttcttttttttttttttttttgagacggagtctcctgttgccaggttggagtgcagtggcactatttcggctcactgcaacctccacctcccgggttcaagcgattctcctgcctcaacctcccgattagctgggattacaggcatgcgccgccatgcccagctaatttttgtatttttagtagagacggagttttgccatgttgaccaggctgctctcaaattcctgacctcgggtgattcactcgcctcagcttcctaaagtgctgggattacaggtgtga

SEQ ID NO: 1702 - DNA, 1111 bp, Homo sapiens
tgtttcgtattgccaaataatattccattatatggctataccacgttatgtttattcatcaattgatggacatgtgaggtatttccactttttggctcttatgcataatactgctacgaacatttgtgtacaacttttgcatacacttgtttttatttctcttttatacctgagagtggaattgcaggttcatatggtaactccatgttttaccttttgaggaactgccaaacttttccaaagtggcctcaccgcttaaaaaatcctaacagcaacatataagaatcctagtttttccagattctatccaacacatgttattatcagttcttttgaatttcatcattctagtgggtgtgaagtgtatctcattgtggtttttatttgcattttcttaattttgggggaccagtctcagcaccacccgtagggtatccgaagtccggtggcgacaaaggaatgagaagagacaggttaagtgttcataaaggtgggagccagggggccagttgcaaaatggaggctgcaaaaggcccagagttctgatctccacactgtttattgagtacagtcacttagatctaagaagcagatgttcagggcgaaacagtcaaagggaagcagtacgtcatacacataatctgtagcagtggcggtttaagtgaatctcctttgtgcttaaacaacgtatctttagttagctggtgggagtgggcttaactaggagcctgcatatctagccacattccagtgcttcagaggagcgtctttcttcttgagcacagtgtttatagataagagagcaggttgtgctcagagcatgggaacataatggcgataagaaggctttcctcctcagagtcctcttgtggctttccacaacttactgtcccatgtttttatggccagtttatgcaggcaccctgtaagcctttttcccaacatgccccccttttttcttttttaaaactgccattgctattaagacttgttcctggtgtctggtctctctccagaggcatcttccgcatctgcagactaaaagcaaacagcataaacaggtacacattaaagcaaaatttgcgatagttgattctctaacggtcttaat

SEQ ID NO: 1703 - DNA, 1032 bp, Homo sapiens
gtttttgtatctccttaccgtctttggaaaagagtttgagacccacaaatatgtcatggtaaatttaaaatcaggtagcagtttattgtcagagccaaatctggaataaccaatttagttgccatttaactgtgctagaccacacttttgtaacactgtatgcccaagaaagaaaaaaaaaatctacagatgattaatgcagttttccatcctttttaactttttccagttcagccttttctcttttctttcagcatggaggcgccattgtgtcggctttgagccagactgggtctctctttaagccccggaaagcctatctgccccaggagttgctgggaaaggtcaagtcaaaggaaaatttgtttctacttagattgttatcctgtttaaagaaaaatatttttattaatctatgtattttgacataatttcagacttagagaaaaatcatattcctgtatgcccttcccctggattcctaaaatattaacttgatcatcattgctttatccgtctccgtctttctccagagtttcttttcttttttttttttttgagacggagtcttgctctgtcaaccaggcttgagtgcaatggcgcaatttcggctcactgcaacctccgccttccgggttcaagtgattctcctgtctcggcctcctaagtagctgggattacaggcgtccactaccacgcccagctaattttttgtatttttagtagagacgaggtttcaccatgttggccaggctggtttcaagctcctgacctcaagtgatccgcctacctcagcctcccaaagtgctaggattataggcgtgagccacggcgcctggccttgatgcttctttgtctccaaataatgtctcattcctaagaacaaagatactctaatataccctgagcataattatcaaagtcagaaaattgacattgatatcatacttttacctaattggtgggatttattctgatgtagccagttatcccagtatcttttatagaaaaataaatcccagataatgtgtt

SEQ ID NO: 1704 - DNA, 1023 bp, Homo sapiens
aatcctgaagtccagaagacactcttggagtggagagagagctccatgctggtttggaggagtagacacagaaaaggaagtaatgcatacaaaagaagagtagcttgttggggtgagggtctagaagtaagatctcttgggagatgataattacctcagaacgtaatttggatatggtagcctctgactacacgatattctggggaacacagtgcagcaggaggaaactgccacttacctgtgtttgtctccattttagctcctacagaagaagggaaaaaagagctgctgttcctaagtaacgcgaacccctcgctgctggagcggcactgtgcctacctctaagccaagatcacagcatgtgaggaagacagtggacatctgctttatgctggacccagtaagatgaggaagtcgggcagtacacaggaagaggagccaggcccttgtacctatgggattggacaggactgcagttggctctggacctgcattaaaatgggtttcactgtgaatgcgtgacaataagatattcccttgttcctaaaactttatatcagtttattggatgtggtttttcacatttaagataattatggctcttttcctaaaaaataaaatatctttctaaagtgttgtgttagattaataatatggaaggagtctttagattggccaaattgcatttctctgatattcctcttgttgcaggtcagaagagatcaattctacagaaatttccagtggttctgttgaggctttatggaattcagcatgtcaaaattcacagctggctgggcacagtggctcatgcctgtaatcccagcactttggaagcccaaggcgggcagactgcttgagttcaggagtttgcaaccagcctgggcaacatggtgaaaacctgtctctactaaaaatacaaaaattagccgggcacggtggcatgcgcctgtaatccaagctacttgggaggctgaggcaggagaattgcttcaacttgggaggcggatgttgcagtgagcc

SEQ ID NO: 1705 - DNA, 1047 bp, Homo sapiens
gcggtgtggccagccaactcaaggaggatgaagcaacctttgcctctaaactgcctggaactaaatgtcgatttttctgacccctcccagggagtgctgagtagtgatggtgtctggagggtcaaatccattcccaatggcaaaggtgagacttctccagatactgatggatgggggcttgggtagagcagaaacatggagaaaggtacatttcctctgcttgtcttcaggttcctcaccactccccaccgctacaactccaaaaccacttatccctacagaggccagcatcagggtctggtcagacttcctcagagtccatctccatccccggagcatctgtatgattcagaagtacaaccacgatgggtatggggaccccagaggctttgaggcaagaaacatgggtccccaccaatgcaggatgaggctcttgaggccatcttccctgcccttccccaggacaagaggctgaggagttgagggaagagatgtaagtcttggatcgtgtttacttgtggcagggaagcaggtcggctggaggcttttggccaaggggaaagtgtcctaaaggaacccaagtaccaggaagagctggaggacaggctgcatttctacgtggaggaatgtgactacttgcaggtagtggcgtggcaatgtgcactccagggtggaagctcttctcatcctgctaactatctttcgtcactcacccccgcccagggcttccagatcctgtgtgacctgcacgatggcttctctggggtaggcgcgaaggcggcagagctgctacaagatgaatattcagggcggggaataataacttggggcctgctacctggtccctaccatcgtggggtgagtggaacttggaggagtaaacattcgaatcccattgggagagtggcttaatgcaaactggtttttttctttacgaggaggcccagagaaacatctatcgtctattaaacacagcttttggtctcgtgcacctgactgctcacagctctcgtctgccccttgtccttgggtgggagcctgggcctg

SEQ ID NO: 1706 - DNA, 1211 bp, Homo sapiens
actctcctctctcttccccatttccttgtagctttattccttgcatctttgggtctactgagcagtgggtgctgaggtgacaggggaggaaccagttgttctgtagcctaggaactgcctcagtgtctttgccagaaaaaggcaaagaggcggacagtgcagggctcctccctcctacctcaggcctgatccatcgtgcccttgactttgccgtctcaaagtttcttagctgactttggctttcacatttgttctttccagagctaactgataagagtggaggaggaatgccttctcctaagagtcagttgaaagaaagacaagagagtcacatcttagcttttgcacaaggcattcgtggtcaggaataggttagggaatggtcacttctgattttccaacagttgctccttctctgaagagatcttgattcctttgggaagacaagaatttttcttaataacaaaggtccctttatgagttattccttctttcagttcatctcactggagcacagccaagatggacatgtttatggacagtgctctagatgtgaaaacagatagaactggtttgtgggacaggggcagcttgctcaggagagggaataacgcaggtcccttttcttggaaggcttgtactatggccatgacagtgacattgccctcaccatgatccctctccaaagtggttgtctttctttaccttgtgtcttctcttgtaaaaatgaaactcaaaaataaaataaatgtgtcaaattttgaaaaaaaaagaaaactgaaaaagctaacatgaattgtgtgaaattgcataatgctgtaatgctaatctacaatatgtaatgctatcttgtatgttgaatttgttaatgcaccacacaagtgcaaaataaagactgattcacattacataggcacagtgatgtcagcctgattctctggaaagctggaggactctcagtgaggttaacactcagactccaaaaggatgttctagggtgtgttttccaaactgtggtccccagaccacttgattcagaatcatctgaggcacttgtttaaaaatgcagattccaggctcccatcctagatactctcatttgacaagtgagttggtttgctgcttgctgtagttaggacttctggtctttctgttttcctcttgaaatgtaatttctgagaccatcactaccagagggagagatgatggtt

SEQ ID NO: 1707 - DNA, 1115 bp, Homo sapiens
gtggagggggtcgggagggcggtggagtgatgaagtgcagaggttgaaggagtgcagggacagaactgggggtcggacggagagtgggcaggcaggaaaagtcttaaaggcctggggtgacttaaccgtttggggtgagggccttgagctttggatatgacaggagggaggagagaccaggatggactgggaacccaggcttccttcaggcctgggctgtgaatacagcttggggtgatctgtcctttagcactcatcgtaatttccactctgtttcctccacctctctcccattgaaaacctattcagggccgggcgcggtggctcacgcctgtaatcccagcacttcgggaggcagaggcgggtggatcacctgaggtcaggagttcgagaccagcctgaccaacaaggtgaaacctcgtctctactaaaaatacaaaaattagccgagcatggtggcagacgcctgtagtcccagctactcaggaggctgagacaggagaattgcttgaacccgggaggcggaagttgcagtgagtctagatcgcagagtgagactccgtcccccccacaaaaaaacaaaaacaaaacaaacaaacaaaaaaacccattcagtcccgtttgactccggaaattcggtgagaatgaaaataagtttttaaggcttggagagttaggcacttttagagtttcaggaaggtggagtgtaatgcaattttttcttctccctttaccccatattttctgcatttattttatatcaccctttttatgtctggatctttcccaagggaagaagggatggcactgcagcttgagggctcgaggtcagacttgaagaagaacttccataaagagttttataatagtgggtgggtgagccacagtggtaaggtgtccttttctggagtgacttgaaaaacaaaaatctgaactagtttgtaagataaagtcctgctgagaggcaaggaaacagatgaattgacttcacagacttagcaatgtggggccttgagggctgagctgtttagtccagttccctaaactgtttcttggaaagagtgaatttgcacactaatgggagtgctggaacctgagctgaggatctcagaagg

SEQ ID NO: 1708 - DNA, 1022 bp, Homo sapiens
tgttcaatcagttttagtttcctggccctggttgttctccccttgtggttgactttagccagattgtggtcttcatgaattttcattcattcgttcattcattcagccagccacttcctattgagctcctgggatgtgccaggcactggaggagatttattctgacccatcataggtcacttgaagtcacttctaggtctagactcgctgaaataaggtcattctaaacaaacagcaaataattctaaaaataattcctgttaagccctggaatgcaggtgacctctgactctctctctctctctctctctctctctctcttttgtctttcttacacaagccaggcttctggcctcatgcctggggaacaaaggaccctgttgagttgtttagtacatacacacacacaagccaggctgcagggcaggaaaggtgacacagtggagagtccaggattcttgtggaggttgggggaggagtggggtggatgatccagactgtgtgcttgtctgtgtctggagttgtatcccttcttcttccttttttttccttttgagacagagtctcgctctgttgccaggctggagtgcagtggcacgatcttggcccactgcaacctccgcctcctgggttcaagctattctcctgcctcagcctcctgagtagctggcattacagcatgcaccaccactcctggctaattcttgtacttttagtagagacggggtttcaccatcttgaccaggctggtctcaaactcctgacctcaggtgatccgcccccaccttggcctcccaaagtactgggattacaggcgtgagccaccgcgcccggccaggaattatatcccttctttcctctgagcacttctgggcacctgttatcactgtctgaacactcagtaccaagggatgggggtgcacacctaacacttgcccctccttagccctattctcagaaccctgagggagggagacacaggaggctgccaccaaggctgccttaccaagcagactggccct

SEQ ID NO: 1709 - DNA, 1272 bp, Homo sapiens
cagcctttctttccttttttttctttctttcttttttttttttgagatggtgtctcgctcggtcaccaggctggggcgcagtggcaccatctcagctcactgcaacctccgcctcctgggttcaagtgattctcctgcctcagcctcctgagtagctgggactacaggcgcgcaccaccacacccagctaatttttgtatttttagtagagacagggtttcaacatgttggccaggatggtctgtatctcttgacctcgtgatccgcccgcctcggcctcccaaagtgctgggattacaggtgtgagccaccagcccggccccagcctttttttccttaataaccctttcttgtgggaagtctgtgttgctatctaaccaccgtcctttctgctaagagtccagacagttttctctcctttgatagaatgcactcaacacattaattaatttaatttaatttttttgttttcttttttttaaccttataccagcagtccaaacctcactagcattaattaattttaatcaatgagaatatggaataaaattctgtaggccacacaaaagaaatgtgagacttgatccccaccctcggtaagacacagaaactggcctgcatgacccagagaacatgggtaagcaggattaaatgtaaggacaaaatggtctttggggtagagcacggtggctcctgcctataatcccagcaccttggggccaaggtggaaggattgcttgagcccaggagtttgagaccagcttgggcaacaaagtgagacctcatctaatttatttttattttattttatatattttttgagacggagtctcgctctgttgcccaggctggagtgcagtagcacaatctcagctcactggagcctctgcctcctggattcaagcaattctcctgcctcagcctcccaagtagctgggattacaggcatgtgccaccacaactggctacttgtttttgttatttttagtagagatggggtttcaccgtgttagccaggatggtctcaatctcctgacctcatgatccacctgcctcagtctcccaaagtgctgatattataggcgtgagccaccgcacccagcctattttattttattgattaatttatttgtttgtttgtttattttgagccagggtcttgctctgtcgtccaggctataatactgcggcatgatcttgactcactgaaacttcgaactcccaggctcaagtgagcctcccacctcagcttcctgagttgtttggtctaca

SEQ ID NO: 1710 - DNA, 1046 bp, Homo sapiens
gccccaacaggatctggggctggagcactggcgtcagccgaggtagttgccccctcctcaatttatgagtctcccctctgttcagttccctattccagagccccctggactggattctaaatgtggtcctcaccccctccctcatggttgatttcctccccaacctcttccctgtctcccttttactctccttcatccccactcatcctctgtgcccaggtctctctcgtccatcctccactcctggatccattcaccaaggggcctgagtgaggtcccaccccctaagccacacaggtcctctgcttctcccccgctacatctcactgggaccccagcctggcaacggctagtgcgtcgtcggtgctcagttagccccaacatctctttcctttcctccaacaggaaacacaccttccacctctaaaccttagctccaccaagctccaaggggagagaagagagggcatatgggaatgttttgctggaccccatactgcactcccaggccaggaagctctgcatcaggaagccagcaccattttcacctcctctggggtaggactgaggggaccatggccaagaggaaacagatgcccccttagctcctccctgggtagcctgagcgggccagggcctgagagcatgccagttttagcctgtcttcctgtccttcccagccagacccctctcatcctcctcccccagtggttttctcattacctgtcactgacggagagcccctcagaggtcaaggccaaagtgaggtgggctcttggcatgctgtgcaagcttggagctcacccggcaaagagggccaatggggtgctcctctggggcgggcctgtgggctggcttagggatagcagacaggggaatctggggagttggactaatgtggatctagaagggaggtggttgggctgcacgatgccttaagactcctcccagctctgaagttctacttctaggcaatgaatgatgaaacgctggcccaagtgcagtcccttccccatcccacagggcggagaccccagccatcccta

SEQ ID NO: 1711 - DNA, 1033 bp, Homo sapiens
ctgaacccaccggaccctagtttggcttatttcttgccaaggccagtgctcctgactctttcttcactggtcttgatgctttccttctctccttgacctcaaggcctatcaagcagctggaagcctctccctcaggccccatcccagcaccaggcccctgcctccacctcccacttctcccttcccgtctctcttccccctctttccagccttacctctagtggctccccatgccccttggcaggtcagagcacactcagctttttcccacttcagcacctctgcacagacttcctccagccagagtggcagaagacagagaagcatgtccaggatttggaccagactgcctggtcccagttctgcactgggcctgttacttacggcctagttttaggaaagtcagcctcatctgcaaagcagggaaataatttccaacccatgaggttgttgtatggacccagttgagaatgtatgaaaacatgcaacaactataaagattgttaaaatgtaagttattcactgtgtgagcattattctgctaaatgtatgcatgtatgtatgtgtgtgtgtgtgtgtgtgcatatatatatatatatacacacacacatatatatgtaattttttttttgagacagggtttctctcttgctcaggctggagtgcagtagtgcaatcacagctcactgcagccttgacctcccaagctcaggtgatcctcccatcttagcctcctgggtagctgggactagaggcatgtgccaccacccccagctaattttttttttaagagatggggtttcactatgttggccaggttggtcttgaactcctgggctcaagcaatctgcaatctgcctgtctcggactccccaagtattgggattatgggtgtgagccaccatgctcagcctctgctttatatttttatttccatagctcctaccgtgttctaacaaactataactttgtctttggtttattgactgtctccctccactagaatgtcagctccataagggtagggattttt

SEQ ID NO: 1712 - DNA, 1111 bp, Homo sapiens
ggcatgtggagagaggaacatccttgccctcagagggtggaccagggtgagcctgtatatctcctccacactctggttccaggcctggctcctggactctttggctgtgagaccttgagcaggttatttaacctctcagagcatcagtttcctcatctgtaaaatggggatgaatactgatccctaagtctttgagttgtcaggaagatgaaagataaggtatccgtgtgcctggtgctgcgtatgtgtccacagatcatggctattatccccgggggaagggcagtgacaggggtgtgtgtagatggaaggagaggcctcaattgcaggcaggcagagggctgggcctttgagcaagatacacccaagagcctgggtgagcctccccgaccttcctcttccctatcttcccggcaggaccagtccatgggcaattggcagatcaagcgccagaatggagatgatcccttgctgacttaccggttcccaccaaagttcaccctgaaggctgggcaggtggtgacggtgagtggcagggcgcttgggactctggggaggccttgggtggcgatgggagcgctggggtaagtgtccttttctcctctccagatctgggctgcaggagctggggccacccacagcccccctaccgacctggtgtggaaggcacagaacacctggggctgcgggaacagcctgcgtacggctctcatcaactccactggggaagtaagtaggcctgggcctggctgcttgctggacgaggctccccctgatggccaacatcggagccagctgcccccaacccaagtttgccaattcagggcccctttctagagctctctgttgcaggctccagacttctccacccagtaggcaaaccaaaagatgcttcctcaacagcacaaggggtggaagttagacagtgaggattgttaaaggcagagccatactcctacccggagagcttgacagtgtccctctggggtggaaatgagttccttagctccatcaccacagaggacagagtaagcagcaggccggacaaagggcaggccacaagaaaagttgcaggtggtcactggggtagacatgctgtacaacccttccc

SEQ ID NO: 1713 - DNA, 1442 bp, Homo sapiens
tcaccatgttggtcaggctggtcttgagctcctgacctcgtgatctgcccgcctcggcctcccaaagtgctgggattacaggagtgagacaccagcccctcagcattttaaattcaaggtgtgatataaccttgaacctctccactcctgtaatgtatctttgttcataagacattttactttttaagtatttcctatttcctagaaatggggttactgagtcaaagataacatttttgagggcttccataaacatactgccagattgccttctcaaagggcagggtgcattgttgaagagcaggacttgagtgtgcctgctaccctgggacatccacccacagctttgagtaaccatgaaattcccgttagggcagcctatgtttgaagcctccctaatccctgctgttggctcccaacccttggtagtgggcattctgtcccaccccattggaaacttctgaccaaaattttcatgccttcttaacctgtaatgattttgtttctgtggctctgtactttcctggtgcttcttttgtttttctgattattgcttctttcttcttcttctttctgctttcttcttcttccttcttcctcctcctcttcttcttttgtttcttcttccttttttctttcttcttccttctttttcttctttcttcttctttttttgctagctctattacttctatttagcacaatgtttcctctggggtatttgttaaaagtcaggttcctggactctaccctgaccctttaatgttaaaaaagcttcccaggaaatgtgagcattttctctggagcctgtctttagccttctctcctcacttgactgcatttacaattagagctgcatttttctgacgtgtccatcatctctacttccattctcagactagcctgtcgagagttctggacagacattctgactgtaggacttctccatctacatgcatcaacttatgtctaaaactttcttcaattaactagtcttcatcccaagctggctctcttttctgacttactttcattggtcagtggccttgttattcttcagttcactgagactgaagtcttggggattgtgcttgactactccttctttcttgtccccatgtctagtcctggtaactctagaatttctctcccaactttctcttcatacctgctgccttccctggaaaccatgcctctgttaccttcctcccagactgctgcatcagctttctagctgttccctcctgagttctcttccttcccgtccatcacatacatctctaatggactgaccttttcaacttgcgttgtcatgttcagtggcttccactgcttactgaataaaatccaaactcttcagcctggcttcagtctcccttcacagtgaaatctcttgcttctcccctaggtataggcagtctgtgctgtagcctgggcaggta

SEQ ID NO: 1714 - DNA, 1092 bp, Homo sapiens
tccactgtgttgacttttccaggttgagggcaagaactccatcatcctgaccttcagacagctgatggcagaagaagggccttggggcctcatgaagggcctctcggccagaatcatctcagccacaccttccaccattgtcattgtggtgggctatgagagcctcaagaaactcagcctccgacctgagctggtggactcgagacactggtaaccagtggtggggagagaagcctgctgttttccacactaccgtgggtcaggggcagagtggagaggacagcaccctctccaggtgctcccaccacacacccagccctgccctgggccaagtggcctatctgggatagggatagagactttgaactgctcttgctgaagaggctccacgcctggatcccttgcccccactatttaaaattctcttctgagctgggctccctcactcagtccctgtatttgatactggcctaaagaccccaccccccaccctgccagcccttcttctggcttccccttccatctgtgtccctgagaccctgagaagagctgtacatagagcttgcttactaccactggttcttcctcttgggctttcagcccagactccaagcagctgctatcaaccctctctcccttcatctcttagccttgcttatttttattttgggaccgagctgcccactagatgactctgcttttccctgcatttggggctaaggtgccaggtacttatttgcacagggagcaggagcagcaaaaaatctctggttctccagagcactcgtcctctctttggaggggttattaggttgggagaaatgttgatacttttgttttgtgtgtgtgtgtgtgtgtgtgtgtgtgtgtgtgtgtgtgtgtgttttaacatctgtgaaccaggctattagtcctgctaaagcgccaatcctgctgtcagagctcacccccttcctaagacaggtagaaaaatgtaatgtagctttttccacaagccacttccctgtcccttcagtctcaggagccctaggagagtctaagctggggcatcccctggcccagaggactcccgtggtgggcacagttctaagt

SEQ ID NO: 1715 - DNA, 1026 bp, Homo sapiens
ccaggaggcggggaagttgcagtgagctgagattgcgccactgcactccagcctgggcaacagagctagtctccaactcaaaaaaaaaaaaaaaacaaaactaaccatgctctaaaagtgcacatgcacatggttcatagcttcttagtgctgcctgtcagtccttgatatgcatccaccacttacccatttcctatcagctcctcatccataaattattccagggtgaatatccttgtacatttccacaggagctagtgctagaatttctctgagacatgtaactgggagagggatcactggatcctagagtttacacctacctctgttccatcagattactttccagaaaagctgttcttgtctgccaccttctcaccgtcactgggttttttaccattctaatatttgtcattctgccaggtgtgaaagcggtatcttgttttaatctgtgtgtccctgattcctggcaggtttgggcatttcttcatgtacttagtcattttggcttcctcttctgagaactgcctgctcatttcctccagcctttcattttcagaacttttttaaaaatgggttttttatcttgttgatttgctagagttgctagtatagaaggaaatatctattgggtgataactttgttgatgatgtcctttgaggaacagaagtcttcaattaaataaaaagcagcacacatttcaactgtttccattttcccttaagaggatgacacagaagggaaatgcagttatgcctgcagacccttcatgaactgcatggatcctcctgactccttttctcagcctcttgactaactcaaagagccatttaaaaaaatgccagatataggccaggcgcagtgctcatgcttgtaatcaccagcactttgggaggctgaggcgggcagatcacgaggtcaagagattgagaccatcttggccaacatggtaaaaccccatctctactaaaaatacaaaaaaattagccaggcatggtggcgcgcacctgtagtcccagctactc

SEQ ID NO: 1716 - DNA, 1026 bp, Homo sapiens; identical to SEQ ID NO: 1715

SEQ ID NO: 1717 - DNA, 1026 bp, Homo sapiens; identical to SEQ ID NO: 1715

SEQ ID NO: 1718 - DNA, 1026 bp, Homo sapiens; identical to SEQ ID NO: 1715

SEQ ID NO: 1719 - DNA, 1026 bp, Homo sapiens; identical to SEQ ID NO: 1715

SEQ ID NO: 1720 - DNA, 1049 bp, Homo sapiens
actgctcttagtcttcacctgtttccaaaaacattgtttgggggcgggtttcgtgaggaggcttaaagagccatgagaaagggaggacccagcagtgactccctggctaggggtggggctttgtgttgggcatcagggccctaatgccctgtttacccagtggcccgccagcctgatcctcacagccaaggagcatcctgacctacagtacagcatcagtgtgagcttttgtgtatttgaagatcttccttggttcaggcgctttctgcaagtcactcgaacaccgcttcatctgaccacacccgctcccaatttaaagaagatcgttgatacactgttagccctataactctggcctttttcttttaaaccactctctacaagagatgattatcacttgcatgtgagtttctgcatttctgccatctctccttctctactggaagctctgggagggccgtgtcagtcttatccacctcgaatacccagttcctggtgggtgatcagcatatagcagacactcagtgaatatttgttgaaggggaagggcctgagagtggacagagagacacaggcaagggagagggaggaaacaaaggggagggagaaaaacagccaaaagagttcatttaacttgagtttgtctgtccaagaggaatgagccattgggaatatactggataccattgaatacttccagctgcaaaggatttatcagtgaggagctctcagctgctagtggcagagacctgatttaaaatcaggcttggctgggcatgatggctcacccctagactcccagcactttgggaggctgaggcaggaggattgcttgagcccaggagttttttgagacgagtctgggcaatacagtgagaccgcgactctacaaaaaaataaaaataaaagaattagctggtcatggcaggcacggtggctcatgcctgtaatgccagcactttgggaggccgagatgggcggatcacgaggtcaggagatcaagaccatcctagctaacacggtgaaacccccgtctctactaaaaatac

SEQ ID NO: 1721 - DNA, 1049 bp, Homo sapiens; identical to SEQ ID NO: 1720

SEQ ID NO: 1722 - DNA, 1049 bp, Homo sapiens; identical to SEQ ID NO: 1720

SEQ ID NO: 1723 - DNA, 1049 bp, Homo sapiens; identical to SEQ ID NO: 1720

SEQ ID NO: 1724 - DNA, 1049 bp, Homo sapiens
acctcagcctcacaacgtgctgggattacagacttgagccaccacacctggccccagaaatgttctatttcaactttgtttttgagacagtcttgctctgttgcccaggctggagtgcagtgacatgatcttggttcactgcaacctccgcttcctgggttcaagtgattctcctgcttcagcctcagcctcagtctcccgagtagctgggattacaggtacctgctgtgacgcctggttaattttgtatttttagtagagacggggtttcaccatgttggccaggctggtcttgaactcctggccccaggtgatccacctgccacagcttcccaaagtgctgagattacccactgtttgttcttgacacctttgccgacaatcagttggccataagtatatggatttatttctgagtctgtattctgttatactattggttatgtgtctgttcttataacagtaccatgctgttttggttactagagccttgtacaatttgaagtcaggtactgtgatgcctccagctttgttctttgtgctcaggattattttgactatctgccattgcccaatatttaaataacgtgtatattagaatgacttgtagagccttcacacatctaacacatatcctccatgccacaattgtgtgtcctttgagggcgaacttaacttttgaaagtggcccgacatcacttggggccacattgggtgaagaaaggagaagatgatgatcaagctgaatgacacagtagcagcttggctgcaccacaatgagacagattttcctatgggctcaaagtgcatttccaagagaagctttctagtagggctcaagtggcggcatctctgtcgaactctctccatccttcatgtcagtatccaatgtacatctacttatagccacttgacagcccccttcctggggcaaacactcatattcctgagggatacaggtccccaaatttatggctcctggatctccctggtcttctcttcccaataccagttagctgtagcctgaaggccctgctgcagcttgggaa

SEQ ID NO: 1725 - DNA, 1009 bp, Homo sapiens
taactcaactgaaagtgtacttaattcaagaaagtttctcgctagaaagctctgttgaggtcagaggattgaagggccactttggggacccttgctgaagatgatgggctctgctctggggatgcccagcctaggtggtcacagaacccagcttgctataaatacttgccgaatggtggggacttcctgatgtgccttcatcctaacatgctctgcagggcccatgacttagccacagactccatccatattgtcctgggggaaaccccaggcctggagtcagggacagtggagggcaaggatttgggttttcttagatcccagtttgtctgttgtctcccattgatttcaggctctacacagagaacagagggagctggttgctgtgctgagggagcctgagtgaggagaccgccagccccagaagcagagggcagtcaaggtcaagagcctgtggtccagcatgcctggcctgggcgggctacctctgagaacggctgaaatggtgcccagtccatcagcagtgatggaatttgctggaggactaggccagagcaagcctcactgccactgtgcctttggggcacccttggggttggacatacaccccctttagattcctctgtttcttctacctggataattcttggccatgttctctcttctctaggttcaggtcagctctgcccctccgcccccctcctgctggttccccagcccttttccctggccctggcttggagaatctgttttcaatctccactgattgcccccttgctggccagcccaggggcctttaccatgttctctccacatccgtaaataaacttccttcactacactgtaatctgtgagcatgcttcctctgccctggcctctcttgggccaagacctgctcctgggctcccaaatgctggctccagtcaaggcttcagtcgtggtcctctgggagcatccaggctggggtggtttggcaaggggcttactagaccatcatgtgcagagagca

SEQ ID NO: 1726 - DNA, 1029 bp, Homo sapiens
tttttttttttacatctgatttcattcaggactagttgtagttctcttagtccattagctaattgctaaaatatctcccatcactgaaaaaagaaaaaaattctttgactcctcattcccttccatctactgccccatttctccattccctgtagagcagaactcctcagaagagatgactgagctcactgtttccccttctctcctcccattctgtcttgagcccacttccatgaggcttttattaccaccagcccacagctcttgccaaggtgtccggtgtccagacccagcacctcatcgaatccagtgggccgttctcagccctcactctaagtgactgatcatccccttcttgaaatccttgtctcacatgggcttccaacgccctctcctggtttacttcctacctcacgggctgctccttctccgtctcctttgctgggccctcctctcttcctgatctctaagtgttgggatccccctcttttcctgtccctctctctctacttgctttcaagccaccctcacccagaagcatgactaaatgccagctccacactgatgatgcacacatttctacatttcttttcttttctttttttcagatacagtcttgctctgttgcccaggctggagtgcagtggtgtgatcttggctcactgcaacctctgcctcccaggtttgagcgacgctcctgcctcagccctgctagtagctgggattacaggcacgtgccaccatgcccagctaatttttgtgtttttagtagaaacggggtttcgccatgttggccaggctggtctcaaactcctgacctcaggtgatccacccactttggcctcccgaagtgctgggattacaggcacgagccactgcgcccggccttgacaacacccacatttctatccctaccctggacctctctcctgaactctggactcatgtatctgatgcctcctgatatctcaaatggaaaacccgatggccctcagacctgctcttctctcagtgctccccagcttggca

SEQ ID NO: 1727 - DNA, 1013 bp, Homo sapiens
ccggggaataatggaggagatggtctggtctgtgctcgacacctcaaactctttgtgagtatgtggggaggggctgtgggggaggagggcgtgagggctctgggatctggggttgaattaccactttcttcctagggctacgagccaaccatctattaccccaaaaggcctaacaagcccctcttcactgcattggtgacccagtgtcagaaaatggacatccctttccttggggaaatgcccgcagaggtaggtggctccagttgaatacctccatcctacagtaaccactgcctgtgctctgctcttccttcgtgtttccaggctgagctcattttagtgcctggtacggaaggtgcctaacggatggtattcgaataagtgtgcaagagccttctcctccttcataaagtgtgctccatgagtcccacacaccaccttctctaaagcttccttgccctttcatctccctggtccctccttccactctgtagtcagatcctcttgccctagcatgcagtaaacacatgatctacccctcaggggccggagtggctgccctatctgaaacccttcctgcagatgcatggattaagggatgggaaattgggtaatttttttccttaacccattttacagatgaagatactgaggtgcagagaagtggtttgcttaaagtcactaaattgtatcatggcagagctgaaaccagaatctggctctcctgactcgtctcaggctatctcagcctgtagcctccccagtggtgggcaggcaggcaggcaccgagaacaaaaactgtctggtctcaatttggcctgaatcagtgaccaactcacactttctctaggcctcaggctgccctctgaatgagacacaatacttgtgcctctgagaatggtctgcaggtgcagaggacagccctctccagttaaggctgtttgtgcagctgctggctctgacatccttttcctgctccaccacagcccatgacgattgatgaactgtatgag

SEQ ID NO: 1728 - DNA, 1065 bp, Homo sapiens
agccacagggaggtgtgccatcctgcatactcgaacttggataggagatgggctgctgctgctgggatgtgcagcagctttggcctctctcacccacagctggctggtgagcagaacaagaagaggaaatgctctggttcatcaggtcttcacagtggacaagtgccagtgactgacagtaaagatgccccgctccaccccgaccatagtacctgttcacagtaccttcatttaatcagattaattgagagtctactatgggccaaggagttggggattcagagtggaataagaatgagatgggcccagcccagatggaatctacataggcaattatgatggaagtgttgcctgtgatagaggaagggtactcaactcagacttcagagaatggcttctaaaagtaactgatgtataagctgagctctggaggataagagaaactcagaaggtaaagggggaaagggagaagaatgtcccaagcagagggagcaacatgtgcaataacctgaagatggaagactgtcgtaccttcaaagaaaagaaacagattggaatctgttatgctaatggttaggctaaagtagtggtcctggagaaaagtgaagagatgaggctggagatggcaggaacaggcatgcagagccatataagccagtccgataaatctggattgtgtcatcctaggtcaaacaagacccagtgacatgatgacatttatgttttagagagaacactggatgctttgtggagaagtccatcctccacaaaggttggggtggggagtgagactacaggtgttcttaggaggctgctggagaaagaaattaggcaagagatgatgatggcccgaagtggggtagtagatggtaacagagatgtagagaaatgggaaagatttgctaggtaacatgtatagcccttagcacataatgaccattacatgttagcttcctcctattggtacagtagaaagtggaggcctgaagtcctgggttccagtcctgtttgccattactagccagctgtgggctcttcagcaaaccacttttcacccttttagcc

SEQ ID NO: 1729 - DNA, 1036 bp, Homo sapiens
accaggtgatcccttcaatcaatcagtagctgtctgtgttttgattgattctgttccctttgaaacttcttcccctaccagtgataatgcctaaaatgtattgattactttctatgagccaagcactgttctgcttatcaatgctgtagttatctaatattccttcgttagtaggtagcagggctgagatttatgcttagactttcaacccagaggatatggaacttttttgttagtttgttttgtgcacagggaaagaaggaacagagcctgtggaacttaacccctactccatactgcctttttgttaaacttgcagaaattggaagaaaacttcaattttatttatttattcagaaaatatcttctgggtttttgttttgttttgcttttttgagacggagttttgttctgttgcccaggacagagtgcagtggcgtgatctcacttcaagctcacttcaagctccgcctccagggttcaagcaattttcttgcttctgcctccccagtagctgggattacatgtgcccactaccatgctcagctaatttttgtatttttagtagagacggggtttcaccatgttggccaggctggtcttgaactcccaacctcaggtgatccacccgcttctgccttccaaagtactaggattacaggtgtgagccaccgcgcccgccagtaaacattttctgaatgtctggtatatccaggtgaagctgttaagttgcttcttccttttgtttggatattttttttggagggaggagtggtcccactctgtcttccagagtggagggcagtggctaaatcatagcttactgcagctttaaactcctgggttcaagcaattctcctgcctcagcctcccaagtatttgggaccacaagcacatgccactgctcctggctcctgtttcttgcttctgttaaggaaagcttcccggaggaagcacaaatgggtgaacctaaagtctctttgatgttgctagtgggactgaggagcaggaaatggtggctcacgggagcagcaaa

SEQ ID NO: 1730 - DNA, 1036 bp, Homo sapiens
catcaacggcatcgaggacgagagcgtggcgctgaccttgagcttggagggtgaggcccttccgctcccgccccattcctgtgtagcagcgggtccgcctcgcctgggtctcccagggctccttcccagtatctcctccgcacccctggggaccccagctccctctcccaggccgcgccgcccttcctccccctccgctcccatccgctggccctccccaggatccccgccaccccctaggtgtggtgtttccgtaccaacccagccggggccggtaccagttcaattactacgaggcgaagcaggcgtgcgaggagcaggacggacgcctggccacctactcccagctctaccagggtgagcggccgaacccagcacttcccaagccccgcggagctgtctcaggggcccgagagagggcgccaggcgagctcagtctggctcctgcctatgacgcctcttatccccgacctccgccgtctcccgccagcttggaccgagggtctggactggtgtaacgcgggctggctgctcgagggctccgtgcgctaccctgtgctcaccgcacgcgccccgtgcggcggccgaggccggcccgggatccgcagctacggaccccgcgaccggatgcgcgaccgctacgacgccttctgcttcacctccgcgctggcgggtgaggcgcgggacgaaggcagggtcttggggaggggtctgaaaaatgtgggggacgaggagtggacctcagcttgagatcagggcagggtctccgggtccctccaaggcaccgcccccccatcagcccgcccgcccgcccaggctccagctcacctctccaaaccctccctgcacttttgcctcgatcccccaactcctcttacccaagctcgatccagcacctctgcggtcccgcaccccaactccgcctcctgggtgtcagccgcccctctccgcccaccctgccctcggtcggtgacccgctgtggtccccaggccaagtgttcttcgtgcccgggcggctgacgctgtctgaagccca

SEQ ID NO: 1731 - DNA, 1029 bp, Homo sapiens
cgtcaggtgctggtctcccaggagtcccagggaattgattccaaagctgggaagaggcagtccctgcggtagagtggagagagagagagagagagcgcatgcatgtgcacatgtggctgaggaagccaccagaatactctgcccttgccccagtcctggccccatcgttctcacctgaactccaccctcctacaattcaggaaacctccccaagaactacccattctgcccgcccagctgggagagccagccacagccctgggtctagcagtgctggctggattgtctgcctctacctccctatcggccctggtgtgggttccctctccctccccagctcccagggcagggacagtcagttgccttcttcctccttcagttatggtttggatccctttcatgaaatctttccaaagaagcgaccaagcaagattccacagggtgcaagggagtaaaggacctgacttttaaggaagctgcctctggcctcggggaaccagatgattgatgatttacatttctggtgcagctatgagctctggcaggcagggtcagggtcacaggcgtgggcctgggaaatgagtggcacttactctgggcccagcactgtgcaagagtttccatatggtgtcctgggtgtgtctgattccaaagctttgcttttaaacacttcagaatggaatttggttgagcctggaagaggattaaggtgtgcttgtccttccatgccaaattcttaaaaacaccttctctctccacacttccccacctctccaaatcctatgcattgtatgtaccctttgaaagaaagcatagaggctgggcgcggtggcttaccatgtaatcccagcactttgggaggccgaagggggtggatcatctgaggtcgggagttcgagaccagcctgaccaacatggaaaaaccctgtctctactaaaaaatacaaaattaactgggcatggtggcacatgcctgtaatcccagctacttgggaggtggaggcaagagaattgcttgatcccaggagg

SEQ ID NO: 1732 - DNA, 1050 bp, Homo sapiens
ggggccaggtgctacctcttttcggaggtggggaggggggtctgggaaggcttcacaaaggtgatgactgaactgggcattaaagaatgagtagaattttgccaaattctgcgagactacattttggcctaggttatatgctaagaagtgatagaaccaaaacttgaactcaggtctcttccattaagctaaataagactttattgtaattacatctttgatttgctgtcactgtatttgcccacattccagacacctatgttcccttagaaataagatatttggatcttatgttacggcatatacacgtccttaaaatttagcaacaaaatatgctaggtttgaataggtaaaacatatgcatgtttttcttcccacgtttcctgatcctatttcaaagcatatgcaaagtctccctgcaaggaagtccaggatgtagccaaaagttccaaacccacatcctaccctgctgttcatctgtcctgagaacttggacaacctcctgaactctaagcctcagtttcctctgctgtaagatgggataacatgactgccctggtaactaacaacagaggcatagaatggctgcttgtcactaggggatgcctgcagttgttcccagagtcctgcatgacacttggctgtccttatgtccatggcaatatgtttcactatttttgcctttataacagtgtggcctctcaaccatagttccccttgtgataagaggcacaccaggctgctggcacaggggggcattctggaaggtcctgttgcaagaaaacagccaagcaggccctcagccacaagcttgtcaatttgtttccatagcaaattcaaacttgttgcaacagagcaactaggttctagttggtgtttactctacaatgcattccattttgaaatgcagtcagtgtaatagtccagattctatcaggctaaatctttttgttaggagagagtcttgtcacaagttcttgaagatgtttcaagaataagtctccagcatcagaacaggtttcctttaactatctaggtcatattttattc

SEQ ID NO: 1733 - DNA, 1022 bp, Homo sapiens
atcaggcctggaggaaaatgatagcaatcttggtttctatttttgaggggagttagaggagaaatcgaatatttgtttagtgcagatcatttgccgttcattggtcctttctttcaattattacagagctctgggaggtaacatactattgttttacagatgagaaacaggtgtccagcatgcacgattttacctggtaacagggcagagtgaagattaagattaaggttcagtctctctgaacctcagatctgtgcctcatattcatcatttagctatggtcaaagctaggtgagttaggatgcttgggtactgtttctagaagaggcagcgagtcttacctgtttctatatgtgacagtggaaaaatacaaggctcctggagtgagggctttggagataaaggagagattaagccttggagcaggaactgcttagaattacttaccggagagaaatttattgcccttgcttttcttcagactcccagctctgcctaggagccatttccattcgttgaacttgctgttccttaaatttcttctctcagatatcctaatgttctctccctcacctcacttggcctaaaaggcctgttttcggtgaggacttccctagcctactatgtatttaaattgcaacctcctatcacctcctcctccccattgctctttgttttatttttctccattgcacttaacatcatctgtcctcccactagtatataaactccatgaaggcagggattaaaaaaaaaattcactgctataaccctagtacttaaaacagtgcctggcacatactgaatactcccatggatattttgtgagtgaaagaactccaatatggatttttcatggaaggagtttccagagtttccctcccaatcttgtttgaaactttcttccttttttttttaaattttttttatttttattttttttgagacggagtctccctctgtagcccaggctgcagtgcagtggcacgatctctgctcactgcaagctccgcctcccgggt

SEQ ID NO: 1734 - DNA, 1617 bp, Homo sapiens
ataagtctgctggaagagttttctatcatttataaagtgtattccaaagcacacagaaatttcagggttatctggattagtatttaccaccactttcagattgtttaccaagatagtagaaaatttgaagctctgagacagatttcactaatttttgtcacttctagtaaccaaataagaattgcctgcagtggatttagctaagttttagccctagctaaagggaagggagagtgtgcttatctgtgtggggcacctgcttaatgtctgaactgtgctgggcacttactttagtttataaagaagaaaacaggagtttagagaacagaagtgatttgcctgaaaacacagtttgtgagtagctgcaattgtatttgaacctggatgagatttgttgtgtttatcggggtgtctatggaaaacatggaagagcctggggcagccagaaagcagaaagcaatacaaatgaggagtgcaaaaatgggagtgaaaacggtatcctagcagcaggtacttgagacttaagagtgaaaaagggttgatgaatgtagcaaatggggataacagtagtaatgattagggtttggagccccggggtgtggtgcttagggggcgtctgttcttgggttcttatttcctccttggcttttagtcctggaagctagtgattgctttttggagagggagtgtctcagagccagagcctgggaagataagagagaggccgccgtggggaatgaggctctgatagattagcagatcccactggacctagcttaatggaaaatgtctgtttccgttcttgctcagcagtctcggggtatgtgtgtcttgtcactcttggcagctggaacagagaggacagtggtggccattgaggctcaggttctcgtgaggccaagaagaaatacaatactttcttattaacagactcaacagtttgtgcctcaaaaccaatgtgtgcctattgtggcccgggacactctcagccctggatgctccggtgtttctagcattgtccttctttcttgatctaatggcacagacccactcagatggccatttgctggtctttagcactctctagaagttgactccacaacctccatttaatatactcttgaggaaaacagtttggcagttcctcaaaaggttaaacaaacagaatgatgatccaccaatttcacttctaggtgaaaagaatcaaaagtggagattcaaacagatacttgtacaccagtgttcatagtagcaatactcccagtagccaaaggtggcaacaacccaagtgttcatccacaaatgaataggtaaaatgtggtatgtgcacacgttaggatattattcaacctgaaaaaggaatgaaattccgatacgtgctacaacatggatagaccttgaagacattatgctaagtaaagtaagccagtcacaaaaggacaaatattttatagttgcgcttatatgaggtatctagaaaagtcaaattcatagagatggaaagtggaatagcagttaccaggggctggggggaggtggggataaagagttactgtttaatgggtgcggagtttctttctttttttgagtcaccttttttttttttttttttttttt

SEQ ID NO: 1735 - DNA, 2157 bp, Homo sapiens
ttaaaattgtctgtcttcttcctgtctcatttttaacctggaaaataagcacttaaatagcacttactgtgtaccaggcactgttctaagtgctttactagcatttaattgatttcatcctcatgatagtgcctaagccatagtgttatcatccctgttttacatatgaggaaactgaggaacttgcccaagatcagacaactagtgtgggcagagctgggattcagactcaggcaatcagacaatatatatattttttttttgagatggagtttcgctcttgttgcccaggctggagtgcaatggtgcaatcttggctcaccgcatcctcctcctcccagttcaagtgattctcctgccttagccttccgagtagctgggtttacaggcatgcgccaccacacccggctaattttgtattttaagtagagatggggtttctccatgttggtcaggctggtctcaaactcccgacctcaggtgatccgcccacctcggcctctccaaagtgctgggattacaggtgtgagccaccgcgcctggccagtctgactgttgagtccaagctcttaactgctgcactcagctccttgtaattgaaaccagaagtcctcaacaagacagtgctagtagatgatttccctgctgtttgcttctgtttcccctcatctcagtaccattatcctggcccccagaagtttcttcccattccttccacacttggtgatttatacattctaacctcatgttgatcatatgtctcagggaaaagcagaagtggtcctgcttttataaagtggctgtcttgcctggcacggtggctcatgcctgtaatcccaacactgggaggcccaggcgggcagatcacctgaagtcaggagtttgagaccagcctggccaacatggtgaaaccctgtctctactaaaaatacgaaaattagccaggcgtggtgacaggtgcctatagtcccagctactcgggaggctgaggcaggagaatcgcttgaacccgtgaggtggaaattgcggtgagctgagatcgtgccactgcactccagccttggcaacagaggaagactcagtcaaaaaaaacataaaaaaatacataaaaataaaataaaataaaataaaaaataaaaaaataaaatagtggctgtcttgtgattcaagtggccttctcctgactcagttaaagttgcttccacctctgagcagttttagaaggacgtagttgtgtggaagttagaaagataactggcaaggctgatgtttgtatttatttatttaatttttttttttttgggggggacggagtctcgctctaccgcccaggctggagtgcagtggtgcgatcttggctcactgcaagctccgcctcctgggttcacgccattctcctgcctcagcctccagagtagctgggactacaggcacccgccaccacacccggctaatttttttgtatttttagtagagatggggtttcaccgtgttagccaggatggtctcgatctcctgacctcgtgatctgcccatctcggcctcccaaagtactgaaattataggcgtgagccaccgcgcccggccctggtgtttgtatttatagtagatgaaaaaggagtcatgcaagatgttggcgtgctgagactgagcaaaggcagtcctgttaccaggatagcttcctggaggaggtagactggctcagaaggcgcccccactgtaagactgaagactgtaaagaacaatcttccaggtggtaggaagaaatgagtagatagaggaattctgagctcttaaggcagagtggggacttaggactgcaaaatgttgtagccatgaccccagatatgtgacaagtcagacacttcaaggtagcctgagggtgtgctccgccctgtacctcagtgtggttcctatgaaccggagcctctgggcgcttccaggctggaccaaatctgtgaacacacacacagcaagaagagcccagtctccacatgagcagttctgtgtggcttgactcaaatgtcttatttactctgggcatttcttggctgagaaggctggagtacactagtactctaagacagtgacacagtgaccttattccattctccttttccaattggcatttcccttagctctacagttaggccaaac

SEQ ID NO: 1736 - DNA, 1071 bp, Homo sapiens
tcgctctgtggaagagggcagtggagctgggttgggatggaagagaagaggaatgatacctcaccttgggagaagcagcccgcagaaaggcctgaagtagcaggagtcaagcccagattaggtggtctgagtggacggaggtaaggaagaaacaagggctggtaagattttaggctagagaacttatctgtaactgttgtttttggtgttgctagtacataaaatctcacttgtcatctttctttcctcctatcccacacctgggctcaccagggatccagtgaggggactggtttgtctgccttgcttccccaacctaaaaacctgactgtgaaagagactaacaggttgctcctgccccatgccttctcccgcaaaccctcggatggctcccctgatactaagccctccagactggcttctaagaccaagacttcctctcttgcccctgttgtgggcaccacaaccaccactccgtcgccctctgctatcaaggctgctgccaagagtgctgccctgcaggtgacaaagcagatcacgcaggaagaagacgacagtgatgaggaagtagcccccgaaaactttttctccctccctgaaaaggctgagccacctggagttgagccatacccttaccccatccccactgtccctgaagagctgcctccaggcacggaaccagagccggctttccaggacgatgcagccaatgccccccttgaattcaagatggcagcaggttcaagtggggccccttggatgcctaagcctggggacgactacagctacaatcagttttccacatatggcgatgccaatgccgctggtgcttattatcaggtgggtaggaggcacagagggcaggcgagggaatgttggaacatggtggtcaaggagagctttgagctagtgatacagcctctgtggtgtcactttggctaaattaaccttctctatttattaggccacagaacatacctttattctgaaccatattaatctaaattgcccaagtcttaaagtgtgacagggtgaaccacataaatgacatctttattctgaaaacaatct

SEQ ID NO: 1737 - DNA, 1321 bp, Homo sapiens
tctagggtctgcagcaacatctgggccactcgcctctaaggggaatcatgagattcctgaactcaaaatctggtaaacgaacctgctttgttcccagctttgtaagtttcattgtatcctaatagtggttattttaaatcagagatctataacctccccacccggtttagactgtttccctgtatccacaggaccaaactagaatgaggagcaggaatggcatgacgtataccttctcgtccctgctcgcatcgtagctcattggggtcttatgagcaggaggagcagggctgagggcatggtagaggtaagaggtgagagtctctcttaggaagtagctgagggagcaaggtatagattgaagcaggagagactgtctttgtttcttgttaccctttcctaaaaaatatccatctgtctggatagtgtagatgagaaaagctgtagggactgttcttgagttgtaggtcggtccttgggatctatgcctttaactggtctgtttgaggaagctgtagtatagctatctcaccattgcctctttgatgacaattttctgtttctggacagaccttaccttcccctctccaactgtgccctcagttggtgtgtttttctttcctgtttggctgcaggattattacagtggtggctactatcctgcacaggacccggccctggtccccccccaggaaattgccccagatgcctccttcatcgatgacgaagcagtaagttaagaaagcacaagtgaccatctttgaccgctgggcaccacatttcaaatctgaagccaaaggaaattaaaaaaacacacacacacaaaagacaaaactgtatcaggattaggttggcaacatgtaatggagaaactctaaataatagtggcttatataaaggaagttagtttttttcttcatggaagaaggatatgggtaggcaggccaggggtgctttggaagctccacagagtcagggatctagtccccttcttttttttttttttttttttttttttttggtagagacggggtcttgcttgttgtccaggctgcacttgaactcctgggctcaagcattccttctgccttggtctcccaaagtggtgggattacaggtatgatttaccatgcctggcttcagtctctttctgatcatcgctttgccatccctaggctgtggcctttattcttatggtccatgatagttaaagctacagccatcacattggcattggagatgcagcagggtagagaaagaaagaggaggaacacttcccctcgctttctaggagacttcctgaaagttcctaagagcacgt

SEQ ID NO: 1738 - DNA, 1079 bp, Homo sapiens
cccttctttctaggactcaagcatctggccttccagcctctgtgggccaggtgttcagtgccccggcttctctatttctggtgcctgtgctcccctgttctcatggatgcaggcgtctgactgactcttgcaccctccaaatgcctacctgcaggcagcgttcggaggtagacgatgggactctgggctccttgatgagggctgtcctcctcagtggttagcgtgatggcccgcacaaacactgcgtactgtgtccaaggcttgagggaggctagggtcacccctggctcctgggtgcggcttaggggcagctccacatccagcaggttccagctctgggttccacaagcatctggacccacgtgctctgtggcgttctggaatgggctgaacacccatccccagagctgaggggtcattcaaccccaccctcaagttctggcacccccgctctgaatcaccccaggactgtcattgtccttccagtatgcatgagggcaaagccatgactccagccacctgttagaccttggcaagggggggcggaggaggggagggactgtgatatctgtgtcagtgaaatttgtaatgatatagctcctcatccttagcagggaatatcaagttctagtttcaatgaatattgaaaaaatcttgcattgaataaataaaacaagaaagtgtgtgtgaaagagtcccctctcctagaaacagcaagcaataaggttatcctaattcccctaagtctaattgcctggaacgaggaacaggagactgctcccttcccagtgtcttcacttaggcccttgaattgactttggaggtttatgagcctcccaaactatagcaaagttttgtgcatgtgtgtttttctagagagagtgttcctagcttcaacagcttctcaaacatgtccatgaccctaaaaggccaagacccactgccacagggaaattaaggggccagaggcaactagtgctggctgcctgaaggccagtttcggggcagggcttggggaagcatcactggctttaggggtagaagagggctccctgggggagatgacagtgggcccccca

SEQ ID NO: 1739 - DNA, 1050 bp, Homo sapiens
ggagagaacatagtagagagagaaggcatttcaaaggagcagaaacccaaggctaggcaggctggcagaatgaagcctctgagagaagttgaagttttcatctctactcctgagtcatccagaaggacatttcatcgagacagtgggactcctgggttttaatccaaaaccttgaggaattgacttgctcctctttgtctcagtcctccccaccactccccactctccctggaaatctaccagcttgacactgtgggatgggatgggggactcccagaggtcccacactccccttgatgcctgaccctcccacacacacacactcgtggctggctgtgctgccagcgccagaaccctccagcattcacccccggggcagctacattgtggttgatgttggatcccagactgacgtgcctatcacacagcacacatctgggaagtctcccttcaccaggcagtgggcgaagtgagaatgcaaactcattttaatgtcagtttgagccaaatataattagaaaggaaaatctctgactttgaaaaaaaaaaaaaatctaatgcatttcaaagccaagttgaaatgacttctggattatctgcaccgctgccactctccatttatgcagaaaatcgagaggggagcctgtaaagtctgtgcctgagggatttagtttgcacacattgcctttggtttcatgccagggtcatgttttaagactggcctttttcaacacaacccggttcctggaattgggaagcacctagagtgacctcctcaccagggggcctgtggcagagtcagcctctttctcagaggggctgcttctgtgtgatcatgaccaagtcacttacttggagcctcagttttctcatctataaaatgcaaatgattacgtctatcttctagggttgttgtgaggattgaatgagaggacctatattaaggaacagtatctgaaatacaataagtactcaataaattatagttgttattaatattgcacagtccttgctttttacagtttagtccaaggcagatcttgaaaaaac

SEQ ID NO: 1740 - DNA, 1002 bp, Homo sapiens
gaagttgctttaggagcaagaactgtcttgctgaaataaatgatggctgtgcagggagcacattggaaggggtcttggggtggacagaatttccttttgctctaagggtgaaaccagtcaggtctctctctttctgagctctcctcccagagcacctggtcaggatatcccagtcatcacctccgggaagatgatgttccctggatagcccatacattttctcacctccatacctagctaacactgctgcatcagtcccaatgaccccacttcccatcctttactctctgagatctggatttgccttcaagatgcaccccccatgccactttcttaaggtagtcttctcaactccccccaaagaatgaactattatttttggggggcttccaaagcaaattgctttgaaattccaaaagatcatacattctgttttaatcatagtgggttgttaagctcctgcactagactataatgctacttgtggatagggactatgatttgtttatatctgtaacttccgtctcttgcctcttttccccagcatagagcagaatgactgccatacagtaaatcaaaaaaaaaaaaaaaaaaaaaagccgttgagtgaatatcccagttatttgagtgtggattatccacttggtagatccctataattaatgtttaactcaaagtctagtttctcttccagctcagctcctggtactatcacgtaatatgtgctcagagaatgcaaacagtttttaaatattatcttcagtacgacataattaggtgctgctaaaaattcattatcatgctttccaaagccaaaaagaaataacttttgtattatccactccactgctcttcctcagtggtgtggataactgagacataaacgttttcatcataattgatgatgggaccaccttacagggccgctggatttattgggtgccaggaggaagaagcagtggcccatatcttctgtaattctttcttctccagttgctaagc

SEQ ID NO: 1741 - DNA, 1034 bp, Homo sapiens
tacttaccatccgtcagtttcttttatcttttggaaggaaacctgtttagaacagcccccttgggactagggccccaggcagcgagtgtagtagagaagtgaggtccagatgctgtatgctgatgtaaagttgcgactgccctcatggagcctgacagcaaggactgcagagttttttccccatctctggcatctttcctccatcagcagagggtccagggtatcaggataatgacaagaccttgccctgaacagtagaagggtaaatacaaagaaaggagagaaatcaagggggagacaattcatatataatgagcacctattctgcacaagacactgctagatattctacttactgttgacctatttattttaattctcatggagccctgttaaataagaattactcaccctatgttctggatgaggtgttaaggctcagagaagtgaaggtggagctgggattcaaacccaggcctgtctgaccccaaatcctagtattttttttaccagtccatgatctgtcggggctttaaagaaccactttgatggagacaggccatgcccctgctatgtggagaccatgtggttaataacagtgattggatgtttgggtgattttagccacagtctatgtcctagtagcagtagtgtcaataatttgggaggaacatacctttgccccttagaaaggcattttactaccccaaagtcccagaaacctacagagccctacagaactacacagagccagggggaactggtatttccaggggtggatttatgcattgacagagtttaccatcatccttcaattctcaacaaatgcagagaaccagagtgtggacagatacttttcctaaaccaacagtcaaaacccagggatactggggattactaaaagtgttgtagtttgtttgtgttttgatatagaagggaccttgggccttgacattacaatgcaagtagactacggtgcaaatggcgccccctggagcacagaattagaatacagaatttccatttatttattc

SEQ ID NO: 1742 - DNA, 1278 bp, Homo sapiens
ggccccctagaggctccatgtgcaaaaggtgaggaagacagtgtgttaactggagccgatacactgcaacctcaaattcctagatccccgccagagtggtcaggtctgaatgtacgtgttagggagggaaaaagaaactcaagggacagaaaagaccctgactccctgtgctctactttgcagaccctcctacagtgaccctgtccattgagccacagacggtgcaggagggtgagcgtgttgtctttacctgccaggccacagccaaccccgagatcttgggctacaggtgagggggtcagaggctgggagcgctctggggagtgataaggaagagttcggggttagaggctgtactggggaggccaggtgtcatggatgtagttgagagggtctgaggcctgatcccacctctgtgttgcctcctcccctaggtgggccaaagggggtttcttgattgaagacgcccacgagagtcgctatgagacaaatgtggattattcctttttcacggagcctgtgtcttgtgaggttcacaacaaagtgggaagcaccaatgtcagcactttagtaaatgtccactgtgagtagctgggagggcagggacggggacagagagcaggggcccccaaagggccttggacagagtcggggactgctccatgaatggggaggtagcagggcaggaggaagattgattggagttaaccccatgagcttgagaccctaacgagtggcttctttctccctcacagttgctccccggattgtagttgaccccaaacccacaaccacagacattggctctgatgtgacccttacctgtgtctgggttgggaatccccccctcactctcacctggaccaaaaaggactcaaatatggtaagactcttactgcctgttcttttttttttttttttttttttttttgagacggagtctcgctctgtcgcccaggctggagtgcagtggcgcgatctcggctcactgcaagctccgcctcccgggttcacgccattctcctgcctcagcctcccgagtagctgggactacaggcgcccgctaccacgcccggctaattttttgtatttttagtagagacggggtttcaccttgttagccaggatggtctcgatctcctgacctcgtgatccgcccgcctcggcctcccaaagtgctgggattacaggcgtgagccaccgcgcccggccttactgcgtgttctgaatgctgggaggaaggggtgcggccacagatgggagtagatggggggctgc

SEQ ID NO: 1743 - DNA, 1038 bp, Homo sapiens
tgtctgtcagcatgcagagggatccaggaatccccccggcagcacggcccgctttccttctcctccatgctgggccagccagataagtcagggtcctggtggagaaagaaaggctaggaccatgtcctcattgacccagatactgctgtgtgctgcacagcagtgaaccaacactagagggagccacacaagcctcctctccccagtctgccccacttcctggctttaactcttgagctggtttggggagtggtgaggtaggggtgggggtgctgtaggctctttttcaaagaaaacaaaaaacaatgaaaacctcatttgggaagaaaagctgtagggattcccccacccaaatacaagtcccagtggaaaggaaaggtagtacctattcttctccatggggttcctaacaccctccattactctttcagtctccaagcactttgaatccatttttaaacattcaggttgccagacctgtcacacagtggactctgatagggttacggagggggcctggctctcagtctctactctcctatgtcccatcagttggttggaggccaccttccagggggtatgggagacaggttttggtttttaagtgtcttttttttttttcttggaccaatcagattccttcttccactttcagtgccttgagtgtcaagctttggatgaccgaccctatgtgggcggttgtgtggggagtgggtacttgtgagcctcggacacactgttaagtgttacagtgttaggagagagatgggtgaggggacctggagaggtaaggggcctggaaatggccctgacagagaacttgtgctgaccgggagaaggtggtgcggaagggcaccgcaggcattacacaggccatttctcctcctccatgtgcacgcacatccaacacacaccttccatgtgactgcttctcagccaccactttctgaccaaagagaacaggcgctccaaggagaacctgtacccctgccccagcctcgccttcctaaaaagcagtgtctggagttggctgtttcc

SEQ ID NO: 1744 - DNA, 1067 bp, Homo sapiens
gctgtctgacctgagccaggccactgcttggtgcctctacaggccactgtgcatgttgagaattgcccaaaaggattagtgaagctcctgaccctggcgaggccataatgaacactgaagtgcacaggccaagggatgtaattgaaaggcatttatttttgtgaagatgctgtaaaattagcatttaaatatcccattcccttctcttggcctcctcctatccccctatggtatttctcctcctctcctcaaggccaggctttttgtgaaaggcattggctcatctttgtcagcgtggtcctgacgttcacctctgggctgctggagaggactgagagatgtgtggtttggtaggaagggggtgtgtgtgggggttagtggggaatcccatttttttgcatcactgtgaggtagcttcaggccctgtccctggagaaataattgctgcgcagaagtcacaggccatactgggcagttctggtacaaacctgcccttattaataataacaataataataataactccatttgcatagaactgtcactcattcctgccagtctgctgtccctaccctggttttttgctggccccaaccactggccttgttgagtatcgatgggccctgagctcttctgtttgcttttggagctcttcagatgctgtcccccctgagaataccctaactctggggaaagagcagccaaaatcccaatacagtaaaactccacacaatcttgttagcaacagtgacccagaaaattttgagaagtccaatttcaccagaagaggcccagggctccctgtggtcacattttctacccagccattcttggcattgcaacctccatttctagctcctgttgaattttctccacccagaccccaaaaataaatggatccatgatgataattaagagaagagaaaaaaagatattatttttgttaggacaaaccattgtaggtttttagcaatgtgtatctgtgtgtccctcacaccttttcctattctacttttttttcctttttttaaaaatattatgtactatatttttagtctcaaacacac

SEQ ID NO: 1745 - DNA, 1048 bp, Homo sapiens
gaccactgggagttagggaaagtggtacgtgtgtctgggccccaggctgtcagagcgattagctttaattgctcttccctttgtggttaaatactccattggggaaattgccagtgatgccctaggctgcaggcttccctggttgcctacttcctcaattccgtgcccatcatgtgtggatgtattatcatgcatgaagagggtcacagaatcacagagcgcctcactctctcacacagatcctcacgcacaatgtcatgatggatatcttcaccagctggtaggcagccaaccactgaatctccaagccactccgaccaaacttactctgtcttttgtagcagggatgctcaccccttcctaattgcagctccgaatattcagatggggacagtgaagcacagatctcaggagtcctaagtattcatggctaccactaagttggataggtgagtaggaaatgctagaaggggtgaaagcctatagaaaggaggaaaagagagactgaaagatgaagtagaaaggaaatgcatgacaaagagtgagagagatggagagagacagaaatagaagcagggagtgccacaccagaagagtggaaacagagatgggctggggagagtcctaggccccattcccctcctcgccatcagccggccctcctctgctctgcctgatccagtgccagctatctcctgatgccccatcttgggtctggctctttctagaccaagggctgaaggctaatccttgtccccatgcccaaaggtaatccattttgcttcttggactgaagtgaacattttagggcccagatgtcctgcctctcgtcacttccaggctgaccctggagcctcagaaccctcaatttccttgttacaggagtaaagacaaccccctcctcccccacaaagctggataaaaagcttaaagaagaaattaattgagaatgatattaaaggaaataaactacaggactgcttgaatttggggcccagttataatttaaaataggaaagctggacccctactctctcccttccaaccc

SEQ ID NO: 1746 - DNA, 1035 bp, Homo sapiens
cagacctgatcctaagacctgctaatcacctcctgctcccagctaccctaaatataaatgttcattggaacagttatacaactgatctcatgatacatggcagagttctctgaaaatcatcttagccatcccccatatctccagcccaaatgatgtagaagagtctctcctttgtttaaagatctgagctcattcagcttttctaccttgtctgtcaggaaagtctttaattttcactaaccacctcaccctcactcctacctccctgttctccacaccttctgcaatatgggatcctgattgtctctcacccctttcttctgatgctgaaaatgagatactgagtccctgcataaggagcatttgagggaggaaaggggcagagccctggctaaatgtagccaaggctcatgccggctttcctggcagatattaccagagtatttacgacactgctgagaacattaatgtgagctatcccgaatggctgagccctgaagaggacctgaactttgtaacagacactgccaaggtagcactgagccaggctgggtgggagcctggggcacacagtgaagatgctagcatttgaggataggagaggtgggccattcagccccctcctcacctaccacaggccctggcagatgtggccacggtgctgggacgtgctctgtatgagcttgcaggaggaaccaacttcagcgacacagttcaggctgatccccaaacggtaagcagatgggccctagctccttctttctatttacacagcaagctgtccctatcctcccttgccctagtgtcccaaaccttggaattccacatgactgttgatgccggtgagaatgcctcatgccccagagagctcttgggtgggcctcatctgcatcttatgagccagctactgtctcccaactccagtctatctggccagtctggttcctgccccatgactgggtctccactgataattctttccctgggctcccttcaagtcacagggttttctctctttactgttccaatcctagg

SEQ ID NO: 1747 - DNA, 1032 bp, Homo sapiens
tcttaaatgccatcctagcttctccctttccctattcatattattaagtgaatttagtcaaccctgaagaatcttacttggtgcctactctgccgggttccatcttggtctgtcgggagttccctgagggaggagcagagtgcctcaggacttgaccacgcacctggcctccgccccatctcccacatgaactccaggcttcaagggcaagaggtagcccttaccttgttcctatttgaggctggcatcccctgtagtagaacaaagatcaccaactccatttctgtggcattccaacctgtctctaattgtcttggaaatggcctgagacttgggaaggaaaccagtgatgtccctacccctttatcttctgccctgaccagggtcatccaatctcctgtactgccaccaccatttttggcacatagaggactctttcctttccccattaccttgcttttaaccaggagcaaactttttcctttgtttacctgagataaaaggatcttttcaaagggaatttactgagaaatgtaggggaagcaagagaataaaggaagaaatgatagacatacacagatccacacctatatacccagagtcccatctgaaatgactcaggttcctgggttctgcatagaaggcctcactttctttctttgtcctgtcacttcaggctggtcctgctcttaggccagggggcttttattttggtttttggacttgaagtgcagataattgcattaattgctcttttcagcttctaacatattgtcattatagagtttttcatggttctttattctgtttcttcttttcctccagttcccactttcactccagcgccacattttaggcatcctgttgagtgtgtttgacttccttaaaagctatatgtatccttgtgcaaagttagtgttagtgtagtgatctttgttggtgttggtgtgtgtgtctgtatgtatgcttttttttttttttttattgagatggagtcttgctctgtcccccaggctggagtgcagtggcatg

SEQ ID NO: 1748 - DNA, 2051 bp, Homo sapiens
tccaagttcttaaaacatttctcttcagtggcccaacagggtttctctggggcacatggacatgactccagagagccacagtgccaaactcctccagggcagcaactggccctcctgtccctcaccccagccacaacaaaccctgggttctagggcagggatactcctgccacacagcccgagttagaaatctccttgctaggagcatttgcttccacatatatttagagcaaagaaggatcccatccttttcccagaaatctccacctaatgtttttggtttgtatggtcacgtgaccataggcaaccacgtggaaaccctctgtgaccacttttccagggacttaggggaaggtacctttcttccaatgtgtcttcctaggcagcccctgaggaggagggctgaatagatccctgaggttttggagagacccccatcactgactcctgctccctaaccctaccctcactttcgtccccgctcttcccagtgaaggatggtatgtagactcctgtacagacatagtggcttgcagaccctgacccagcccctgtggtcttagacaaatgtttttatttttgtcaccagccacccctgtcctgccgccttctctcgactccagagacctgttgcctcatctcttttggggaagagccggcagctcctcctcatcccctgccttaagtccagttctttgcctcaggggtctcgtttccttggccttccagggtccccaccccttttctccctgcctgattctctgagctctgggctccgtctgtattgggttgaggggcaaggattactgccttttgtaggtacttcacccctcaccccattttagcttccatagtctttgcaccaaatccaaattcttgataatttagatctcattttgagcaaaatttgctggccctctaataaatattttcaatataaatctgagcctttgactcagacatttttgccaaggagagtagaattaggaagtacccatatacatccagccaggatccacatggaggacctttctgatggctgcaatgactaggccattcctctgagtaactcacagtgtccttttgtaggcccttcttttccctgaaagactggttggtacttaccttgcagagcacatcctgggataagatccccagtgtctcccctgggaggctccccctctgtgtagcaccagccctgggaatgatggagcctagtgatcggggtttctcctgctgtcctttctgcaaaagttcacttgtttacccaccgcatgctagagaggagctcattggccaatgcttaccttgtccccaaaggggtgggttgtggagctcacttaggcagggcctctggctggggccagggttatgagataggcctgtatgaaatatgtcctgttctgggggtctgtctcttttcttctcttcaaaaactttgtgtcagagagtcccttctgagtcacataaatacctcactatcctggaaaacagggcctggatggtgactggggtcattgcctttgtggacaggatggagtgtggtgtggtctgaggagcaggttggggtgggggagagggaaaggatttgggatcttagttgctgccctaggttaggggctggggagtgtttattttaagatcctgccatgtttttaatcactgtgatttttttttcattcccctttcctaaaaaaaattttttgcctccaactctctaagcactaagggctgtgcctgagaatggtagcattttggtcttttgcttcagaactgtggtatctttgtcttttttcattattattattattattattattattattactattgttttttaaaatgtcaggatgaattgtcagacatatggccatgtgtttgtcctctgcttctcccctgtgggaagttgtctccatgctgtgaactgctgtggggtgtgcagctgactcagtccctctgagcagtttccccactgtgtctgtcccatcatgcgctggatctgctcattctcctgctgtgggggtatgcccacctcttacccccttgacacc

SEQ ID NO: 1749 - DNA, 1026 bp, Homo sapiens
cttccatctcagaagagtgaggattgccctctttggcacagtcaacctccagggacgctacacctgaaccttcagagagggtgtcctcttctaaatagtaccctccagccctctggtctccctcagcctctccatccccactctcccgttccttgctgacctcccctgctcctccttcagttgctgcttctgggcttctgctgtcttcaccatctccttggtcttttcttgcttcatggtaccccttctccctctgtcctttgtcctcatcctctctgactccctcagcctcttgtttctgtacaacttcccatttctcctcagcaacttgatcttcctgggccccttgctctaggtcccttccagcttctacctgggcttcctctctttgttcatcctcttctctctcaatttctttttccttctcatctgtatactcatctcctcctggttcctccacacctttagcctccatactgtcagccttcttctgacctttggacttctcttccttggcctctgtctcttccctactcccttctctcaatctgacttttgtctcttggcttcccccagcctcccctctatcctcactggcctttccagcctccaccttggtctctggacttccctctgcctcttccctgatgtctagcctgcctccaggctcagcctgcttgtcctccccaacttcccagcatgcctgctcttccccaccctgtcccagagcctgccttccacatcctgctgcctctccctccagactccctgaacccttccagattgggggtttaggtcccagaaggggacttaggtcatcataggcactcaggaaaacttcctccccattttcctcctcaacttcaggcctggggccagcggagtccagggaacagcagctgggggccaagacaaactgtgcctcatccagagacaggtcatccaggggtggctccacagagaactcctccacctgtaggcacagcattgtgactcaggaccaggaggccctgtccacccttgact

SEQ ID NO: 1750 - DNA, 2085 bp, Homo sapiens
gcgcctgtagtcccagctactctggaggctgacacaggagaattgcttgaacctggcaggcagacattgcagtgagccgagatggtgctgctgcactccagcctgggtgcagagtgagactctgtctcaaaaaaaaaaaaaaaaggtaatcttcttgagggtaaaagttcatttagtgcgagtaagcattaggtataccatttcctgactggttggccattcattggatacatttggaggacagtatatcatagtagttaagatgtttggatcctggagctaaacaggctgggttaaaatcctggttctgccacttactagttttatgatcctggaaaagtcatttaagctccatggcctcagtttatccaatgaaatggggataacgatagtacctattactcataacagttgttgtaagaattaaatcaattaaagtgcctaaggtagtgcctggcacataataaagctatataagtgttatgtattattaaaaagatattctatgcacactgactatgaaccatgaaaaaaaaaaaggtattctaggagacatagagtgagattcatgatgtctgtcatcagaaagtttagatcttccttttccccatctaagagtcctcttcctggttatagtggagattaggaaattaacaaagtatggaatggtgagttagaaaatctatagggagaggctaactccttgctatcttttgggggatcccaagggaataaccatgtggctctgaactatttcttacttctcagatgtggaccctccaaaggacacaattgtgaagaacattaccctgaactttgggccccaacacccagcagcgcatggtgtcctgcgactagtgatggaattgagtggggagatggtgcggaagtgtgatcctcacatcgggctcctgcaccgaggcactgagaagctcattgaatacaagacctatcttcaggtgtggggggtgaacaggagccttttggcgggatctggggttgctttagcctggggctttgccagtttgctgcccttaaaacgtgaggggaggaaggtgttgagaggagtaacccgttgagattactcttggttgggtggatggagggaagtggcaggggatgcttgagtcattaggatttggtttatttagcagcagtgctttgaagctggagctatactcagcttttctctggctgactttttggcaggcccctttgccattacttgagtgcctcagtttccctgctcttacgttagactagtgcgtcaaagccagtgtccctaggggcagggaaagagaaaagacattagctcgctaagtttaacagctgattcttgtatcttccagctgtctacgtttgttttcaaaacattcaatgagtcacagcaactcagagagggtttatgacagtttgccatttttaggagaactgtataacccaaatgatgaaggtcagatttgaaggagttggatctctaataggaatctgaagtttttttcttactgtcatgaagaaaggtcctgataacaggatggtaggattaggatttagatccagcccagtgtcggggtgaacagtgactagaatgtgattccccaagagagcctcggcgatgacagtttctggtcctggagtctatgggttaacccctgtagcattagcccccgtcacagtgacatcagaataagaacaggctgtcccagctagtagcgtcttagctccaccctcttcctggaagctgaagctggttcagcagacagctaggacttggctttttggcattctggaggaaggaccatttctacctgatgctctgtcttccttaaatacctcactctggccgggctcacgcctgtaatcccagcactttgggaggtcgaagcaggtggattacttgaggtcaggagtttgagaccagcctggccaacaaggtgaaaccccatctctactaaaaatacaaaaattagccagacgtggtggtgtgcgcctgtaggagaatcacttgaacctgggaggcagaggttgcagtgagccaagatggtgctactgcactccagcgcctgggcaacagagcaagactgt

SEQ ID NO: 1751 - DNA, 1032 bp, Homo sapiens
tctggtaagaatcaatcccagtaactataactccaatgaattaaacctgaccttggttgaggtttttatgaactcttctttctcctcccaccttgcaagtcttaactaacattgttgccatctcaatctccctaggctggtttggacaagatgtctaagggacacatgttggcagatgtcgttgccatcataggtacgaggcctattgtgtagtagaggtatcctagacaaaggagttcgggacgcccactggggacagaaggagaacacttcctgttcaccataggccatggcatggactcgggtcctcaatcttttgagcacagtaatgggttctggatcttgggtaacaccactttttttgtttgttttgcctcacaacaggaagataagtaacatcacttttttcctccatcctctcacctaggtacccaagatattgtatttggagaagtagatcggtgagcaggggagcagcgtttgatcccccctgcctatcagcttcttctgtggagcctgttcctcactggaaattggcctctgtgtgtgtgtgtgtgtgtgtgtgtgtgtgtatgttcatgtacacttggctgtcaggctttctgtgcatgtactaaaaaaggagaaattataataaattagccgtcttgcggcccctaggcctaaacttctggtatcttagtgtctcagtatcttagtgtccttcactcggactgtaaacctaagaatgttcattaaccctccattcctgttagattcagtcaggtcttagcaatttttcctgctcgtctccacccccttctctgactcttgtcctttccacttctctattccccatttcctctttcgcctcagttccctccttgcccaaaccttctcagtgcccacataacttggtaaaccactcaaatcaagacctggggtaaagttgggagggaaagggctatagtggggtctgagggaatgttgacgggcagtttcacacagataaatctctgaaccagccgggcgcagtgcctcacgcctgtaatc

SEQ ID NO: 1752 - DNA, 1029 bp, Homo sapiens
gaactcctggcctcaagcaattctcccacctcggcctcccaaagtgctactgtgcctggctgacttttctcttttcagggttgatagaaagtggcaggggaagggtctggttgtatggcatgaagagctggtctggtgaaaagcctcatttctcatgatgagcatttcccatggggtgcctttggtcttgtctgctgggagctgatctctagctggtttaatatacaaagcacccttggtgcctataattccagctactcagaaggctgaggcaggagaatcacttgaacccaggaggtggaggttgcagtgagccaagatcgcaccactgcactctagcctgggggacagagtgagactccgtctcaaaaaaaaaaaaaagattttacatatatatctctatctatctatctatatacacacacacacacatacacacacacacacacacacacacacacacacacatatatatatatatatagagagagagagagagagagagataaccctttaggaaggtaggactctgttcttgtgcttgggagtaaggcaaggatatagccaagacaaacagacgggattgctgtttctatgggtcattgttaatgctccattctgtcagcagttgataatgagggtgggcagcatgagatccccagttccagagacctgagcgtcagctgagaaatagaggcagaaatgggaaggtctctgaagctctacagctccagccactatctaagaattctcactcctcgttcactctgtgttgtctgtgctggattggtgtgtgtgtgttggtggcagctgggtgttggggaggaggaggtcagtaaacttcagggaaactgtggaaattgaaagagaatgactggggaggaattccagcagcctagctgagaaggtgggagcaagtattaagttagccactggtctgctgccgtgggatgaggagggaggaggcccgctgaggcacaaaggaaagcatgggctttagaggcagaaaacctgcatttgagttccagc

SEQ ID NO: 1753 - DNA, 1061 bp, Homo sapiens
gacctaatgcttggaaaggctgacgcatgtgataatttgtagtcagtgacttttcggggtggatatacaatttactgaagtgtttgcctcctgaaagatgaggggaggtcactcaccggaagacgggcaggtccttagtaaacttgatgacttgcagtaccatgaaagtgttgatgtctgcgaagtgtgtgaccagaggcagcacaggggccagggtgggcaagggctggtgatggatgaacagatgagctggaggctgcaatgatcagaacattagctagaggctctggccctagggccctcctttaggcctcgccagccttatcttggaagagttccttgctgagaagcctgctcaggctggggttctggagatctgttctcagtatcagtgcatggcatacacccctctccttcagaccagcatttttgggtgcccttttagttgtattccaacccaaatcctgtcggtgctcaccctaaactgcacaaactgttcaaacatggtgcccatgtggcgggtgtgggcccccaggagtgtccggatcagctcttcttgctccttactcagttgcacaggtgtttgctgtgcccgccgctgggcctgctttgctcgccgcaatgccagggcttctgccgacagtatcactgtgccaggcaagagatcatgacaaagctgttgagaccagcagagcatttctctctgctggtccctgatctggggcccctcagctgccctgcacaacgaaggatgggggcagtggggggaattcctgagactttcttgggcttggctaaagtcctagaggctccaggaggcagggggctcctatacacttccaccaacctgtgaagaactgcagcagaaaactgcactgtgggggagaagggaagggtggcgaggaaagtatgaaagatgtgaggaaaggtgcgagggcttttggggaaacagtgtagagggaggggtcttcatacctagaacatcactttatatgatgttttcaaataatccttcaaaaataatcaaataatcctttcaaataaacctttatctgatgttt

SEQ ID NO: 1754 - DNA, 1632 bp, Homo sapiens
ttgctatccaggaattggttgtttttttttttttggttttggttttttttttgagactgagtctcgctctgtcgcccagggtggagtgcagtggtgtgatcttggctcactgcaacctctgcctcctgggttcaagtgattctcctacctcagccacccgggtagctggcattacaggggtgtgccagtatgcctggctaatttttgtatttttactagaggtggggtttcaccatgtcggccaggcttgtctcaacctcctgacctcaagtgacccacccaccttggcctcccatagtgctgggattacaggcatgagctaccacgccggcccttaggaattgagttttgaaggatgagtttaacaggctctgagggaggctctattcagagaacagcatgagcaaaggcatgtggtcaaaagatggtttgctgtagctggacataatgtaatgttcagtgtggcagaattacagtggattgaaaggaatttgtgggaggttaggtccagagagttggccacgttgtgaagtgcgttgtttgcccacagtttggatcttatactgtaagcagcgggaaattgttaaagacttttaggcaggagaatgatgaaaccatgttattttatttatttttcagtaaattagtgttggtgttattgaatgatatgtaagagattggtgcgagggagatcagttcaggagctcttgttacagtcctagtgagaaacgaagaggatatagactatagcaatggattggaatgaattttcctagctgttaatgataggattgggtgatgccatcatatggggggggtggtgaaagaaaagaaatcaaggatgacttaggttatagtttggtagttgggtggtaataatcattaaccagaacttttgtatacaaattattattcatcatgccattcaaagttatatatctattttattgttgctgttacctagacatttatgaaactttttggtataccatcagatcaagtttagaaactcattatattacagtcatataatgtatgactataataagataaattatagtcacatcttgttttggactaaaaatggtattcagtttgatcacatagacttggctttgaataactttttttttccagaaatcaaatttattttcagtggatgagtatttttgtcaccactgagggttttaaaaagaatgtgatgcaaattctaaagacctcggggagaccagtgataatatgttacatatatatgtggtgtattgtagtttagacaatgctttcctgtatgttttcttgtgcagtcccctcagcaaccaataaggtaggtattatcaatcccattttataactgaaaacgctgaagctcaatgactcactcaagttatacaacttattctaagacttcagtcttgatttttttttttttttttgagatggagtcccgctctgtcaccaggctggagtgcagtggcccaatcccagctcactgcaacctctgcctcgcgggttcaagcgattctcctgcctcagcctcccgagtagctgggatcacaggcgtgcgccactacgcccagctaatttttgtacttttaatagagacggggtttcatcatgttggccaggatggtc

SEQ ID NO: 1755 - DNA, 1029 bp, Homo sapiens
atttctctcttctgctgttaaggacctttatgattacactgggcccgtcctaataatctaggatagtctatgttgttttgtttttgagacagggtctcgctgtgttgcccaggctgaaatggcacaagttttctacaagtttttaataaaacttgtggggcatgatcatggcttactgcagccttgacttcccaggcttaagtgatcctcccaggtcagcctcccaagtacctgggactataggcatgtaccaccatggctgactaatttttaaatattttctagaaatggagtttggccatgttgctcaagctggctttgagctcctgggctcaagctgtcctcccacttcggcctcccaaagttctgggattacggctcactccctctttatcttaaggttgtcttattagcaaccttaatttcatctgcaaccttaattcccctttgccgtaaaaggtaacatattcataggttctagagattagaacatgaacatctttaaggagactattattctgcctactacaacttcttaatacttggctgtgcatttcctcaattgcaagacagtctccaaagtacaaccatcacaatgttactatctaaaccgtaggtcccattcaaattttgccacttgtcccattaatgtcctttataggcctaagattgaacctagaattatatattacatttagttgtcatgtctctttttcctgcagtatgggagagatttttagtctttccttatttgttatgaccttgacgtttttagaatgttccttaatttgggtttgtttggtgttttatgatttatgcatttttggcaggaatacccctgcggtaatgctatacttctgtcagtacattgtatcaggaggcatgtgctaatgatttatcccattactggtgatgttaacttttgtcactgtttaagatgtgtctgctagatttctctactgtaaagttactgaataaggatgttgtattaattaatacatattttggcgggagatactttgaaactct

SEQ ID NO: 1756 - DNA, 1011 bp, Homo sapiens
ccatatccatattgctgcctgtttggggatggcctgagagtaagggtgatttttatagatgaacatttacaattgattcagtcaaatggaacactaactttgaatcccagttaagtgaaatgttttctcaacccccaaaattccattattttcattagtagtacaaaaaattgtactcagttatattttgaatttgtcaaaaatgttatggaaaaatgtttttctttaattatgcaagtagctacagaatatttttgactttgccacttggcctgcaaagcctaaaatttttacactccgcccttttacagaaaaaaaattgccaacttctggtttacaccctacaaatttaaccaagagatacctttggatcgcccctgggctctctctatccctgaggaggtaaaatattatctcactccactctcagctatctgttcaaagatcagaatcctatgagaggggacagtccaaagatagaatctgaaaaacaaaagtaaacgttaaagaaatggagaatgggaacttacctggttggcactgtagttagtggccatgatcttgtgctgtttacactcgttgcttggcaactgcagaaggccgacctcctgggactaccaatgagcagaggctgcctttctcttctgcttattattattcacttccttggctcacactgcccccatttgttttctctggaacttagattcatttttattttacagacgggaaagactgagtaaatgtgagaaaattagctgaatagccactactttttttctggcataacctacccctgcttaagaacttccacgggcctttgattggggtttttaaccactttaacaaaccatgtaaccctgagagctatgcttgttggacaacatggtgtaatgtaccacaggctgtagagccagatactggggtttgaatccttattcaacatgggaacataggagctatatgacattaaacaactgtcttgtcttcactaaatttctatcaactcat

SEQ ID NO: 1757 - DNA, 1086 bp, Homo sapiens
gcaggaggcaatagggcaaaggatttcttcctttgtgttgtagatgggctggtgatgatgggaagataaggaatgttataaaatgagtcttcagtagaggagtctagtctcaggcaagaaaattggatattaaatttgtaatctggaaaggaagtagaggaattaactacagttttgaaactagtttttatggcttccagatttcaccttttaaccttggtgctatatagtttctcaaagaggcacatttgttttgattagctacatagaaaatgaagcagaattattagtaaactattagaatgaataaaatagttcaataagattgctggctacaaagtcaacattaaaaaatcagaaatttccaccacatcagcagtagtcacctagaaaatatgagaaaataacatatcattcatgatagaacaaaatcataacatgtctaagaacaagacacagaataaatgcacataacctttgtattgagaaacacttaaaattattcaagggcaagttgagaactaattaagtgaagagatttaccttatttataaatgaggtgatttagtattataaagatgtgaatttcctccatgttctcctgcaagacccatgcgatatcaatatatcaacagaatggcttatataacttgacaactgattgtaaaatttatatgaatgcataagtccatggataatcaacggaattttgacaaaagaaaataaggagactcattgtaactgataactgggggaggggggaagtgtttgctcgagtccacgatgccagctccagacacctcccatggaggagtccagtgagctgccactggatgccaagtccaaggtcaccaactagcttgtagattttcttttcttttcttttttttgagatggagttttgctctttgttgcctgggctggagtgcagtggcactgtagcaggaccagctgcagacaaaactcctcagacaccggattaaagaaggaagtggtttatttggccgggagcgtcggccgacttgcgtcttaagagacgaactccccggaaaagaaattcttggcctttttaaaggcttaaaactt

SEQ ID NO: 1758 - DNA, 1050 bp, Homo sapiens
attacaggtgtgagccaccagcctggcctctagttattttttacataatgttcagcatacaataaaaattaggagacatgtgaagagaaaggaaaatgtgaccaatggtcaagagaaaaaagaaaacagtagaagcagaaacaaatataagccaattgtttaagttcacaggcaagaactttaaaataatcacaattttatttttaaaaaatagaggaaaagatggaaagtagatgagaagaatttcaacagagaattggaatagagacaaaaacttctagaacagaaccctctgaatgggtttaacagcaaattggacacagcaggagacaagattagtgaattcaaagacagatcaataggctgggcactgtgactcacacctgtaatcccagcactttgggaggctgaggcgagtgaatcagctgaggtcaggagtttgagaccaacctgaccaacatggtgaaaccctgtctctactaaaatacaaaattagccgggcgtggtggtgggtgcctgtaatcccagctactctggaggctcaggcagaagaatcgcttgaacccgggaggcgcaggttgcagtgagccgagatcacaccattgcactccagcctgggcaatgagtgagactctggcctcaatacagaaagaaagagaagggagggagggaggtaggaaggaaggaagggaggaaggaaccaacccatattgaagcacacacacgagttgagcctgagaccttggtcaagaaccaaacctaacaatactctggctaaagagtgaggggactgtgggcatgggggaatgcctccccacagattcccatccacgacccttggcctgatgaccacagcatctcagtaatgcttctgtagtccagtatcatttcttctttctgaaatacatacatacatacatacatatatatatatatatatttatttatttatttgtttattttttgaggcagagtcttgctctgtcacccaggctggggtgcagtggcatgatctcagctaactgcaacctctgcctcccgggttcaagt

SEQ ID NO: 1759 - DNA, 1005 bp, Homo sapiens
ttccctggcgactcttcgagcgcccctctgcttctgtagaggggtcgagccatgtcaaggtagaccctgtgtcggcccgtctccctcggatcctccgcaccaatcactgttgctgaatccgacacccggcggatccagtgcggagtctcgaacagctgcggagctgggagctacgggacatgaggagtgcgggggggaagagaagacggcggaggaaaatcccccggcggtgctcaactgcggctttctctctcggctgtgagccggctccgccctccggcttccagagcaagtggcttctgcgttcaccgccccccgccgtttgtggggcggggccgattcataagaatcggttctcaccaatggagggcttagcatgtttaacctcaggatcataaacaaaagacactgctagaacggtcgggaaagtcatacgctttgcttatcttatatatagatttctaaaattccaaaccggggacgcgttggtggtgtagtggtgagcacagctgcctttcaagcagttaacgcgggttcgattcccgggtaacgaaacgtttttgtctttccttctacgaaaaacttttctgagccggagcctccagcgcgctgtgtattcgttttacgcctcaacgaaactgcagcaatacctcactttccgtactcgcttcctgtctttcccctggcctctttctaaacccaggctttttttgaagggattaaattctgatggttctttcctcccttccttcctttgtaaacttccaactcttgaggaatctttgggatcatttcaatcctgggatgagtcttagcttcagaaaggggctcttgtgtcttcacttgcgaggttcattcgctagcctctacaaatcatcacttaagcccctaattattcccggccgaggtcctaggctaaggtcccgggccaagctttctaattagtcccaggccaaggtcccaggccaacctaaatcacgcattctccaaaacagccggcaaact

SEQ ID NO: 1760 - DNA, 1031 bp, Homo sapiens
atgacatatgatgttgagcatcttttcatatgcttatttgccgtctgtatgttttaccctcctctctccttctctcttctcttttactcttgcttgaatttgtgcaaaagctgctttattctgctttcttctttcttccctcctcctcctcctttctcctttctcctttttccttctctttattcttctgtcagctgtacttaagatatgtgtatcaagatcagaagctttcgtctgccactgtggtttcgtttatgtcttcagtctcttctgtgaaggttctcttggctttctagcactaaatcaaaatctggtgctcctggatgacacaacttcccgtaatgccccggtgaacggttgctaattttattctcaaaaccttttcaccatagggcctctgttggtgggataggtgtctccattgtccttcactgctattctcctttcctcctccctaaaaatatctaagttgaaatctcattttgtcacaatatcccatcctctacctctcctgattcctggatcactctctttcacttttctttttttcttttagagatggggtcttgttctcttgcccaggttggagctggagtatgcggtggagcaatcacagctcactgcatcttcagacccctggggtcaaaggatcctcctgcctcagcctcccgagtagctgggactacagacacatgccaccatgcctggcttctttttggctttttgaaaacattttgccactagcttactgttactttcttcaccattacttccatcatgattcttggatgatttcagtatccttagagaagatccttcagatacactgacctgtcattttctggacctcctctttatcactgatcttaccttttacccagtctcagccatttgctttcctgatcataagcctaagtcttgtcactaccaataacatctcactttcaaacatcctgctctgactgccttcgcctgttttaccagcttacttcctttagtattccagtttcaatagttgttcagtccttctg

SEQ ID NO: 1761 - DNA, 1056 bp, Homo sapiens
ttttcctgtctctaatgtccttgacagtcttaaagagtagaagtcttttattcgacaagatgatcctaaaccactaaggggttccttggaaaaatgaccaattccagggctgggaaagtgcagggaaagtgcaaaataagcctggaaaatcttgggccagaaattctcagcaaatgaacatgttaaaaagaacaaaggccccaatatgaatgaactccccgtggtcaaatctgggaaaatttggcatcagaataaaatgagggtatacattatagtgtaaatactatgcgatgttcctatgccatcatatcatcctgtgatatagtcacatgatcacttggtcaagttggtatcttctaggtttcaccactgtaaagccactgcttcccattttgtattttattgctattttgggggagataatctgacataacaccaatatccttttcttattaaacctctaaccacgagccctagcctcattaataaccccaatctatatcagttaccactctaatggttgccaaatggtaactatctaactctatcattctgtctatcattctatcattgttgattgacattgcactataagaaccaacctacctacctaccttccttccttcctttgttccgtgatgaactcattgattccttttttatttggtggttggtaaaccgctactctcattttattctgatgctcagattttcccagatttgaccactgagaattcattcatattggggcctttgttctttttgacatattcctgtcatttgctgagaatttctggcacagcaagatttccaggcttattttgcactttccctgctgcaagccctggaattggttatttctccaaggaaccccttagtggacttctgtttggtggaagatggtatttagtatccaagatctggtcacccagtattttcattgctactgggatgtcattgcttctaggacctcttagcagacagaactaggaaatatatatacatgtgtgtatatatatatatatgtgcatgtgtatatatgtatatatgcataat

SEQ ID NO: 1762 - DNA, 1049 bp, Homo sapiens
gtgtgaaaactattataacactgagtccccgagaatatcttagattttcttttcttgattagtacatataaaactctttgccctatagaactttgattttgtcttattctttaatggatgaggtgctgtttcacttaagaagtaattcaagtgagcagagtaatttgtcaatcaggttgaatatcacatcattttaggctcttattaacttgagtacaaaatatgtaaagattgcttagtgagtttcagacatttcttaaacaatgatttagcagttgtttttaccattaatcgacagaagagaatgaaggacatgatatattttaaaaaatcagtactagggattttaatggtttcatttactccatgagatactttagaatgtggcccattgattaaactgccttttaatattggctatttgaataagcaactgatactcatatttcataacatctagaatcctaaaagaaaatgtttcttttaaactatgtcaagaaactgtgtgctcaattggaaagattaagggaaatatattcctgattttacaactaacattctattattttatgcaaatcactcaatctttcagttccttagtttttctagtatgacatgaagggattgaatctctgagacccctcatgtcattcttcttccaaacggcaatagaatttcccatgctaaatcactgaagagttagagtatataagtgccagtatgtttcattttgcatgaactgggcctgttaaatttctgatgtgataaaatctttatgctgtagaaggtatttgacttatttggctgaagattgagtcagaagtttcctcaagtagatcatgcccttatttaaaagtgttgctggcactcaggcaagcaacattggtaactttacttagattaagaaagtttaaggattttttggttgctaaaacaaggctgcttaatttttttttttaagacagagtcgcactctgttgcccaggctggagtgcagtggtttgatctcggctcactgcaacctctgcctcccaggttcaagcgattct

SEQ ID NO: 1763 - DNA, 1031 bp, Homo sapiens
tctaggtttttgcacatcctctttcttctgcctagaatagccccatttttttcttgtcttggaaaactcatccttcaagtcccagttcaaaaactacttcctttatgaagcttttctctgattgctgctattggtagctctctgaggtcccacaatttctccaaatgatttaattttttaaaaaattaataattacaaaaggtagcatactgtataccctgtcctgtaccttgtttttttagcttagcaggataactcttaatttcagagtatataattttcccattatgctacataatgtttcattgcatggccttatcatgcttaatttagtgatttccttattgatgagtatttgtgttgtttttagtcttttccagacccaattaacctgtacataagtcttttccagactcaaataacctatagtaaataacctggtacataagtcactttatatttttaccaggatatttttgggatatatttcaagaggtgggattgttgacaccaaggtaaatacacttgaattttgctagatactgccaaatttctctctataggggttgtaaaattttacatcctcatcagcagtatgtaagagggcctgttttcccatcatcactccacaataggttttgttttatatctcttttattataagtatggttaaataatatctattcatatgttttatatgtttaaggcctatttgcatttctttttaaaaaatgaactgtcatttcaaatttttgttctttttttttttttggagatgaactctctctcttgtctaccaggctggggtgcaatggcatgatctcggctcactgcaacctccgcctcctggcttcaagcaattctcctgcctcctcagcctcccgagtacctgggattacagggattacaggcacctgccaccacacccggctaatttttgtatttttagtagagacagggtttcaccatgttggccaggctggtctcgaacttctgacctcaggttatccacctgcctcggccccccaaag

SEQ ID NO: 1764 - DNA, 1050 bp, Homo sapiens
gcttatgccattggcaaagcagcaaccaattatcagtttacaacctgcacccactaaaggtacctgagcagaatttaaggctgtgtaaatttatttggagggcagtaagggttgtgtcatatgatttgttttaattcaggttataatttctgagcacgtgctgtttgtcaggaatgtctttggttatgaggacgttgcagagatgactaatgtgtggttcctgtcataacaagggatatagctctccagaccagttacatctgatggttattttgaaaatctgggacactttcttggtgccattttattctggtggataaaatacaggaacacaaattttaagctagttgaaggcagagttcaggtcagccagatttttgtggctgtgaactttttttgttttgaaggaatatttaaaataatagggtccatttcaggtgtgttatagcaatagaatcacacccttaatctctgaggaggctgcatggtttagtaaacagtatattgacctggtcatgaggagacctgaactctgctttcaactagctaagaatttgtgtgtttcgtattttatccaccagatggcctcatacacttgtgattctatgagaggtttatgtcattattgaaagaagttcaagtctgaggatttggtactattcagatatgggagtcatttccgtatggagatctcttaggtagattagtcatcattgtactcatactgatatctgtatacactgggtacaagaaaacttttgcagcattcttatctctggatttagtttgttggcaccagatatgactaggcgataatggggtatgggttgtaaataaacaccaatgttacatttgtactgtatctccaattgtgaataggtagctcgttttttggagcatagttttaatgagggtaaatttgataaatttaatttccagatactcttttagctttgttctattacatggtcatagacaatatgacattgataaaaagaagacctagatgagagaatggatgaatcagtgaaaattcatccatcagtccca

SEQ ID NO: 1765 - DNA, 1016 bp, Homo sapiens
ctattcctatcaaactatcaatgacatttttcacacaattaggaaaaactattctaaagttcacatggaactgaaaaagagcctaaatagccaaagcagccctaagcaaaaagaacaaagccagaggcatcaagctacctgatttcaaactgtactacaagactacagtaaccaaaacagcatgatactggtataaaaacaggcacatagaccgatggattagattagagaacccagaaataaagctgcacccctgcaaccatctggtctttaacaaaaacaaacagtggggaaaggactgcctattcaataaatggtggtaagataactggctagccatatgcagaagattgaaactggatcctttcctttcagtgtatacaaaacccaactcaagatggatgaaagacttaaatgtacaggctcaaattataaaaaccctagaagaaaacctaggaaatatggttctggacataggccttgtcaaagatttcatgatgaagactccaaaagcaatcgcaacaaaaacaaaaattgacaaatgggatctaattaaactaaagaggctgggcgtggtggttcacacctgtaatcccagcactttgggaggctgaggggtgcatcacttgagatcaggaattcaagaccaacctggccaatatggtgaaaccccatctctactaaaaatacataaattagccaggcatggtggtacatgcttgtaatcccagttacttgggaggctgaggcaggagaattgcttgaacccaggaggcggcaggtgcagtgagctgagattgtgccactgcactccagcctgggtgacagagctcaaaaatcaataaataaaaatcaactaaagagcttctgcacagcaaaagaaactatcaacagaggaataggacagcctacagaatgggagagaatatttgcaaacagtgtatccaacaaaggtctaatctccagaatctacaagaaacttaacaagcaaaaaacaaccccattaagaagtgggc

SEQ ID NO: 1766 - DNA, 1059 bp, Homo sapiens
aatgttgggttttatctcactgacttcaggcttctaaaacacatggggatacttgagacctattgttgcttctttaggtcaaatcaatagtttcataaaaatctttgatgtccgacttaacaggatctggcaggattatctgttttttcatgtaatctgttatgatatattgtttgggttgaaataaatgaagaaaatttagactcacatcggtatgcagttggaaaagggagaactttgcagactttgaaagacttttaggatccccagagttccttggactgcttaaaaccccagtgcacacttgcccaactgctgccgtaatttatttaaccatcttttgataggcagctagggtatttccagttacttgttgatatgtgtacataaaatgtatttccatatatttatgtgtctgtatgtgtatgatagaatctagactagagctagaggttacgattatctgaaattgtgatagagtttgccaaattgccttccaaaaagactgtatccgtttacattcccactagcaggagagaggagtatccattttctcgcatttcctaacactggatattgtatttttaaaattcttgcctatcttgtggatcaaaaatgttattgttagcctgtcacattggcctgtgtgctcttcctcaaacactctaagcctgctagcacttcatggtcttcactttcattcccactgccggcagtgcccttccctcagagattctttctgtcaggtgttaagctcaaataccatgtacccctgagcttcaaataaaagttttaaaaaagtgattaaaaaacatcaagtttttttggtcaaaattaaaaaaaaaaaaaaaagctcaaatgccacccctgtgaggctttcctggactaccttttctaaatgtctatcccagctcctgccattgcattccctatcgcctttctttcttcatttttctacatagcacctctccccttcaagtatgctatgtaacttatttattttctttctctccctggaggtatttttatctcttttgttttccagtgcttagaacagtg

SEQ ID NO: 1767 - DNA, 1050 bp, Homo sapiens
tctatcatgtgtttatacatataatacatctaatatttgttactgtctcacctgtggatggatatgatatggtggaataacatgattgaacctatttgcagtcattaggtaaaatcatttatactcatttattgtgatctttgttgaatccctcccttgttgcaatttaataatgacttgataaatttccatattgcttgtcaatagcaaaaggctttaattgtataaaaatgcaatttctatattatgttaactagaagaaggtatagtggacatttttatagttgtatactttttgataaacatttccctgtgttatttagaatttgtattagagccaaatggagccaggtccttgactaacaaggcaaagggaggtcacagtatggtaactattgcacagtataatgcttgaaaattattacagatttgtttacttttatctctttaaggatttgtaggttgagggcaatctttcttcctgatttttactgtgttacatccatactgttgaaagatgatcaccacaatcctgcaggcttgtctccacttagccttcctgaaaaaactgttatttttgtggagtacagtatgccaagtcagtggaggacccaaaggattttatggcagtagctgcaacgcaacatagcaatgatagatgtcataatgttggaaaacatagcatttcctgcttttttacatgccaaaattcatcatacttcttaaaatattcaccttgatgatctcttaacggtgcccctgaatattggtagagtttaatagtatatttaattttcataagtaatttgtgcaggtttgccctacgtgttctataattttgaattctgttagtgtccacataagatccatcaaaaattaaatttaaatctaatagcctttggatttacgagagttgagatagcgtcttgctaaagaatagaacaagttatggattgaatgcttgaaattacagttcaggtaagctttacaagaatattatttattctgcactaactgcagcaagtagaagccttccacattagcataaga

SEQ ID NO: 1768 - DNA, 1050 bp, Homo sapiens
tgtgtggagaaactacgtatgttagataagtttcattcaggcatgatttatagtgcagttggctgtgagttcaagttagtgaatgaataatatatgttaaagaaggtatctctaaacagaaacacataaataaggttatatatttatcacttaacagaaatattgtaaccagaggcttgcaggaacctaaccctgtatttcccccaggaggatggtttaggattcactaattcattgctggcagtgactttttagaacataactatcacaaaatagcaagaagcgactatatattcaaaatattgtaatcagaaatggcctagtgaacaaatggagttatttcaaaggaaattcttatgactcatttattacttccatttaggtcagtctttttctcctcttaataatatttgattgatacatacaagttttctctttgaggaaaaatgaagcatttttacaggatccctttaactcttccagatattggtcctaaaccctagaaaatcctgaacacattaagaactctattagaatcatttgactgtattttttggggcatgatgtggtttgaggtattatcattttagtttttaattttagtaaggcacatacatggtacttttaatatcaatgactagcagttgttgagtgactcctatgggacaggatccatgcttggcacttgacatataacatctccagtaacagtcctacaagggttgtgtggttatactctttttattgaggaggaaacagtttgttcatggagggcaatttccccaggagtgcccacttgagaagtgaagcaggaattctaaaccaagtctgcttgttttcaagtcctaagctttttccacctttttgcacagcctcgtaggcaagcataccttcatatattcgacagggtggtgaaaaatgacttttcctcagatttaatttgtattactaaaaaaattaaaaatcgttcaaacctatgcagaaatctctctattttctgatactttcattatttttacatgctttgcaatgtacttgaccatctagtac

SEQ ID NO: 1769 - DNA, 1073 bp, Homo sapiens
ggagtgagctacaagtgtattatgcttcacccagaagttatcaagacttttttgaagccatccgcagaaggggagacacattttatgttgtgtcatttcgaagggtaagttcatcttgaaagaatagagcaaatatttttgagtgcttgccgtacacaagacattgggctgaatattgtggaaaatacaaagatgtgagaaataggaagcaatataaaataaattatgtgagtggaacagtctaagtactgtaatatatgctttactttgagctgttgagtattataaagatgaacatggaattggtgtcagactatgagtttgtatttaggaaatataaactacttgttgatttttattgtttgtaatcctgatagccatgctgtttataaaaaaaggaaaagtaaaaacataaaaatattctatttaggcttttcctatttaggcttttaaaccaattcccatttggttattgagaaacagacttctgaaatgtaggtttgagatggatcatgggctgattattaattgtggaatgtttggatctatgttcctaagaatctctattcctcttttatctcttcttaattaaacatttggttggtgaagaatgtgttagataatcagttagcttatgtaaaagtaaatgtttatactagcacttttgaatgttatgaatgttaggctaaatggaaaaaatgcatagctgtttatatttcatctactttttctataaaatgaaaatattttcttcatagaattgccatgtgaatatctctgttagagtgctgtaggttaacccaggagcacatgaatgaattagaattcctcagtggtggtttctatcccaagctgttttttctttctttctctctgtttttaaacaagagaagggacctcactgtgttgcccaggctggactcaaacccctgggctcaagtgatactgagtagctggctttcttttttttttttaagaatacactgggtatggttagaagtaagtacagttgacccttgaacaacacaagtttgaatgaagcaggtccatttatatgtggatttttctcaacc

SEQ ID NO: 1770 - DNA, 1033 bp, Homo sapiens
tagtttagcaaaaacagaagctgttttaattattggtattctagagcttctcatagaaaagagtggggtttttgtgtgtgtaaatacattttattatggattctgtatatggcgtgctagatctttgagatcagaagcatttgatctcaaactccttgttaaatgtgagttactgttgtgtggttttagaggattcaactatttgttctttgtctctataacattgctagctaacataaaaacatgttttttacttacacttttcaatcacaaagtctaaaataacttgctttatgtttgagaaaagattgttcagtagtctgtaagtagacttgtatatagccacaaacagagaacttataactcaagaataatacgaagtcttcaaaattctcagaatggtgggcagatccatctgagtcatgataatttttcaatggttcttatttgtttgctctatttggtagtcttattattatgaaatgtgtttttcatatgcatttgtttaatctccccttttcaggttgtatgctttctctgtgcagggataaagtctattcattctgttttgtcttttacaagatctattgcaatgcattgcaggctcggcagagtaagtcctaaataaatgttgactactcagaccactaactgtttatttgtgttgtttacccttattttttatgtcctactcttcaaaagattactagaggtggggtttgcagaaacaaaggaggacatttttctcaatgaatgtttaaaattacttcggtgacttggatagcaatgaaatttttaagaatatatagtcagctttggtgtgggtggactttttgctgtggaatagaataattcctgaaagacttctaaagttactttgaaaaaaggcaggaattagggtgggaggtgggagaggagcagaaaaaataactattgagtaaccaggcttactatctgggtgaccaaataatccatacaacaaacccccgtgacatgagtttacctataaaacaaacatgcacatgtacccctg

SEQ ID NO: 1771 - DNA, 1095 bp, Homo sapiens
atctgtcagatacccaaggctaaacaactataatttatcagtctttcaagtaaaagtggtgttccatgaagaaagtagctagtgcagctcacaactcagttacacaagtggttttcctctagacaacaattgtactttgatatgcagcagaaatgctttatgtgtatttcccattttgtcgtacagaatattaaaaagacttctactcaagggtcaagatttcataaaattaataacttttattgcttcatcaaagacttccttcaattacattgactgtgtgtggtatgtgcatgtatatgaacatagggcagtaatatgatgaactatataatacagtttgatgttgctgtcttaattcatgctagggcaccatcattgcttttgcatcatcagtgtaaatatcaacacagttgtttcaagataaatgatgagatttaagaaagttattcaacactgaatatttcagtactgttagtgtttgttgccaagcattcctataaaaggtctttgttgttgattacttggggctcatactgaataaatctaagcaaaacataaagtttatagattcttccatttgtaaaacaaaagcacaattctgtagttgagatattaactcagccttcgtatttgcaactaagtgtaatttgatgaattaacatatggttggaaagtgtcatgatttcttatactgacttttcagcaggcattgagcaaggtcgattatccacaattttattagtctctcagctattatatgcactttttcagtcattgcattatattaataacttacaatgtaggatacttccgtggtcttttcatttccagtatgataagctgtaatagaatttttttttagaggattcttcacacctgtgtttaaaatatccagttccattttctttgaactctacatgattggtttcagaatgacatcacaacttaattggcaccattatagtatttgaaagattttgttgcataagcgacaagaagatagattattcatatgtctgaaacaagagaaagatggctttcaatgtatggtcattttttattaacaattttgaccagtttctttgctagatt

SEQ ID NO: 1772 - DNA, 1036 bp, Homo sapiens
atagatttagaaaacttttccaaaaagatttaaaaataatattataaaacaaaacaaagtatacattcttctttgttgtatttagatagaagtttcagtagtggagtccatataactaagctccataataatgtgtttcataactttctccattattctactactagatcatagaaggcttgtttctcttaaggtttagttttttcatgcactcagaaaatagtttttcaggaagtatgtactgagtattctgaggatatgcaaggagcatgggttccagtgataaataatacatagtctctgtgctcagggaacttatagtttagttggtgctaaccagataaattagcaaaataattgacagatatagtaagcatgatgaaaacacacaatggactcagagaataacaaggatgctctcctgagacagcgacatttagctgatatctcaaacatggggggaattcaaggattccaggcagaggaaagagcatatgaaggcagttaagtaaggcaggaaagagctttatttgaggcactgaaagaaaaccaatgtgacaggagactagtgaatgggaagggggatgagtaatgaaaatgaggtttgggagattggaaggggctagttctacaaagccttatgagctatagtaagtagtttgggttttattctgagggccagcaaagggatttaagcagcagaataacacgaatgatttagttcgtagaagatgttcactgctacatggacaatgcattagagagagacctattaacagtaggagcagagagagcagagataccaattagaaggctttttcagtagctccggcaaaatgatgatggcagcaaagtgatgaatggattctaaatacattttgtggatagatttagtgagaattggagagatattagatgtgttcagatttctgtcttgaattactaggtagaaaggactatcattttttactaagatgaaaatatttggggggcacggtaatatgtttggtataaatgtggagagttatttttggat

SEQ ID NO: 1773 - DNA, 1030 bp, Homo sapiens
aggccgaggatctcgtgtccaccttctttcctcagaaggtcttggagctgaatagccgagttcaggagctccggctgcaagacctgtccagaatccattcggtgccaacctcggagcccctggccaccccaggcaacaagggagatgggcccaaccaaaatctgccagttctgctgactcagttctccatcaaggtcccagcactgcttggcagcgagggacagcttctgcggagcaaccagcatctggtggagttgactgagtgggtgaaacctgagatcaagctgctgagagagaaatgcaacacagtgcacatgtaggtgcacccgcttatcctgaaggtgcaggacggcaacaacttcagggtgtctatccaggaagacactgtggaccagctgtggaccgtggatagcacagcggcctcctctctatgcggcttctccacctactacaacacccaggccaagttggtatccaagatagtgaagtacccccaagtggaagattatcgctgcactgtagcagaggtcgacgaaaacgagtacctgagtgtgcgccagatcctgctgcacctacggaacgagtatgccaccttgcgtgatgtaatccttaaaaacattgagaagatcaagatccctcggagcaccaaccgtgataacctatactgatagcctttctccaccccatttgccttcaggagttggcggagctgtttaggcacctagaaggctggttattaatgactctacaggtcatgaaattactggaaatgtgtgttaccatttagaatttcatacagcttatcctcatactgaatcatcttttggtgtaatttttatttgattttccttttgtgaggagaatggggacaaaccatcaaaaagaaaagactgccatttttaaaagcagctttatagataaatgttggcccaaggtttctttattatggccttagcgacattgaatggttttaggggctacttaaaaactaaatcttaaagttaaatgaagtttttcctaaagttctgct

SEQ ID NO: 1774 - DNA, 1028 bp, Homo sapiens
gagttactgaaaacagtagttaatatcaaagtcataagtcatttataatcagccttagaatgcctacagatgtatatacatttttcaaaacacttatactctgccttttctgaagccaagcttctcttggcttattcttacttttagtacttgtgtgctggaaattagaaacctcagatgccctgcacagtgtaggactatacaattgtgctaggcatgtatttataattctttaactcttctaccaaactgtgtgctttttaagggcaaaaactgtacaacttctttagcatgcacctgtcacttgcaaataaatgtctaattctgtggtcccttcaaagggagaagaggaggctaagcaggcaaggctctaggccttggccctgcttcagtcagaatctttcttgtacatgttgataatttctttcttctacagatagaaaattcctgggataagaattttgatgggaaaaagagtttattgcctttaaaaaaaaagtttgagaatgactgtttaggggagatactctcagtatcttgtgacattatctagtctagcccccatcattttacaggactggaaactgaaacacagaaaggatacgtagtcttgtccagattatacagctatttagtggcagaattagaattaaaatcccttgtcttgactgcttgaccagtattctttatagtggtgctacagcatatgtgttgtaaaaacctaggagttttccaagatcactgcatagtgcctgacaacggtagacactctgtaaatgtgtattacattaatgaatgaatgattctaagctggtttgtagttaattaagccaacttcaaataaaaactataatttttcatcatcccaacgaaatattgacctcttagaagccctgaatttggcctgttctaggactaagccaattgttatatataacagattgttctttgttaattttaggatcacctgctgttaccagctaccacccataacaagaccacaagaccaaaaatgtcaattgtgttac

SEQ ID NO: 1775 - DNA, 1022 bp, Homo sapiens
ataaacacagtcatgttgatggatggatggtttaataaacatctgctgagtgtctgagctgagttctgcaggcatgccctgggcctgtcctgaacctggctgggaagtggacacttggcagattctgggacattttagggaccatcacctttcttttgactttacacttgttgaagctctgtcttgagtaagtttggtgattcagacaagatctctcagctagtttaggattgagcagagaggatgcaagtgttgacttctgtcctgttaatggtccttccaaaccatggtccagttgttgaagagtgggtgagggtggaaaccaggtatcgctgtccattccagctctaattccagcaccaggcagccacatgtcatcttctactccttacagtgctgctgggaacatgttccagttgctagaaagagggatggggtgtaacgggtggagcagctggctttaagtccactcacactccactatgggttctgcagggattttgtgtcatgaatgtgagtctgacctaaatgtcttttttcatagcccagtgtgggcaattggcaacagttataggagctgtggcatcatatcttctacaaatttcttagtgaggattgatcagtgacttacagatggagtgctatggtctgaatgtttgtgtcctccccgaatttttgtgttgaggccctaatgcccagtgtgatgctatttggaggtggggcctttgggaggcaactaggtcatgatagcgtggtcctcatgagtgggatcagtgcccttataaggtgagacagagagatgatctctcttgctgccctgtgaggatatagcaggaaggtctgtctgcaaaccaggaagaaactaaatcacctggcaccttgatctcagacttctcagtcttcagaactgggaggaataaacttctattgtctaacccaccaagtctatggcattatttttgttatagcaaccccaactaaggcactgggtgtgtgtatactctgtggcattagaatatgaa

SEQ ID NO: 1776 - DNA, 1071 bp, Homo sapiens
gtcttagaagttactgtgcacgttatgaagagaacttcacttgcctgcccccactcccaacagctgcatccttttaacaagtacagtttccttagagacgtttctctgcaatattctttgatgttgctacatagatctgtagctttttgggggggctggagggtactcatatatttcatctgttttggaacaggagacagcctttgttccattgtccgaatcaaaatcaaattcatttcatttcttaaatttcttgagctctcatgaagcttcttgcagatatgtataccctagcactagggagtaagaatggagttaaaagtgcccctgtggacagcattaatcaatttactaggacgtaatctaataatcagaaaatgctggcttcagtttcctggggacaggagctcattttatgcattttgttctgtttgcataggctgtctctccagatattgcaggtttccatacattggtcctgtctttatcagattaatgtcaggtggtagcagctagattcatctgtggatttacttgctgctgcttaatggattgcggcctgtgtctgacactttagtctgactgcttggtaagtctttttttaaactggtgaattcttgccagacaatttgccattagtgtttctttctctagacagggatgcatgaattcaggtaccctagctatcatcctctttgtttaaaaggaagggagggagacatagggaagtcaagagacacattatgagccctggcagacataactcaggactcccaggacttcctgctacccctcagctgggactgctgacctcactcctccttgtctttcagacatgccactgagcacattggtgaacaaatgtatcattgtgctccctgaaataaaaaggggggctggtgctctgaaagcaccttgtcaggctgtagctaaagtgccttttagttctcctttctgctaagatcccaactggaacgagttggggctgtacccttccagctctttcaggaaggcacggtacaggaaaaggtgcctagcccaggttgtgtgtgtgttgtatgcacacatatg

SEQ ID NO: 1777 - DNA, 1029 bp, Homo sapiens
ttaaacacaattccccttccccctcttgccagcccttgggaactacctttctactctctgtttctgtgattttgactacttcatatgaatgaaatcatatagtatttgtcctttttttgactggcttatttcgcttagcataatgtcatcaaggttcatccatgttgcagtatgtgacaggatttccttcctttttaaggctgcttaatattccatagtgtatatataccacattaaaacaatccattcatttaactatgaacattttggttgcttctatgtcttggctgttgtgaatagtgctgcaatgaacataggtatgtaaatatctttttgagatcttgcttagaaatttttgggatatatacccagaaatgtgatcgctgggtatggtagtcccatttttaatttttttgaagaacctccatactgttttccataatgactatcattttgcattactatcatatcttccttgtttattgtttaccagagattagaagctaagtgttagaacgaagaccaaactgcaggcctctgattccagatctggtactttccccctctctgtgccaactccttggtattaggtttttccatatattactctctgatctctacaatgacccagacaagaaggaagcttaagggacactccccagaactacaggatggttgtcctgctcgctctttgtttaccaaggatccaaaggtctgagaagttgccagctggaaaaggaaggggaaagtgagagaagagggaatatggctcctttttaaattgaaacatgtttttattttcttttagctgtatagcttagaacaattcacaaagttttcagggaagttctccttgagctggggattggtctgacactggcgccgcttgcttggaggttgctggttgaaggtgcagggtggctggtaatgctgaaaccaggttgctggcattgcactgtcagtccaactgtgtgaataggtgagtccagcagccagatgtttggtatgatttgcattagtaaatatgaa

SEQ ID NO: 1778 - DNA, 1048 bp, Homo sapiens
tggcccatagtatatacccagtggacacctgtacctcctctccacatccctgttgcatggtgactgggcccagaaggcagctagaattggcaactcaagcccttttggtcaggatcctttgctgggtggaagctcctcgcctactaatgcgggtgccctgtggctgaatctggtgaatccatcaggtccaggttgaaaactactgagcagagccctgctgcctctgggtattctgttcaccacccagcccttttgcatttaatgaatgtaaaaaataatggggcagctgctgttccttactctctcttcctgctgcactaagtctctgcctccctggagaggcatttaaccgcacgaaggtttatggtggaaatgacaaattgcttcttcacaacgagctcaccctgctttctaaccagttggaatcacccttgttcatgtaatattagcaatttacctgtctccttaaccactaaccatcctgagaggatttggcattctttgcagctgttaatcctctcatcacctgagggcttattaaataggtggagtgtacatctagcctttctcctacagtgaacagtcattcatgatcttttcctttttactcagcctctctcctcagctgcctgagcccaggataaggcagggtcctcccctctagaggccacagcggagagagctgggctctggaccggggagtccccggtttgactccttgcttggtcaggacttcctcaacataatcgcctggccctggtgccagggtggttgtggggctgagggaggtgcctgtgcagcccatttccctgtggaggtcagttgcccctttcctttcccttcatcaggctcaggccatccttggggcagccctgctatctgagggggtctctcccgagccgctaagacatagtcctcattcatattgggtgttgttgacaatcatcccatcctctgctgcttcattttgtgacttgtggacccaagtgggtctttgtttatcctgatccaggagagctgggaagggagacagtttgaattgctccgg

SEQ ID NO: 1779 - DNA, 1040 bp, Homo sapiens
agccccaaggttggggcttcagccagtgagatgcttgatggtattagatgggaagatgctgagttgctcagtgggagaaacttccccaggccttactcagcctacccactatcttttacccatcaccagtaagacctctctgtaaagcaaaccagaagtccaagttcagatgaacccatgacgggttgtggggagagggacaagaggagacccaagcacccaccagtaaatggcaactaaagaggaaacttgttgagcctatactggagaagaacacatcttaaattttcacattttgtgggtggtagggtagctgtagcagtagaaacatacattatgagcatcttggctttgtctgaattttgagaaatggcagtcacagagactcttctatatgcatatcatcccttgacacaaaagaatggctatcccagtctggagtgggggatgtgggcctgtgaatgggtgtgccccaagtccacatgatggctttgctattgaaaccctctagatggccatgactctgtgttgccaaattacttaacattgcaaactagtggcctacaggaataatcttgatgaggcgggtggtttaagtggaatgtcagcaggtggtcattggagattattgtcatatatcactattttctgtgacccagccaactctttggtatatgtatgtgctttcccttctgtcaggtgaggaaaggttttttttgttgttgtttgtttttgtttgtttgtttgtttgttttcatctcaaggttttgcatagattaaccaatggatggtcatgaatcatttaaatatgaatcatttaaataactatgctgatgttgagactgagccttgagattctgctattcaggcagcaaacttctctgcctgctagttgagtgttattcttaaccaaacacaagttcacccttgctcaataggaggttttttttttgtgatggggtctcagtctgtcacccaggctggagtgtagtggcgcaatcttggctcattgcaacctttgcttcccaggctcaagtgat

SEQ ID NO: 1780 - DNA, 1023 bp, Homo sapiens
ctggcagtacagtgcaatttccatgcaaatgtatttcaaagtgaaattgcaagtcttgcaaaagatgtaggattataggtagtcaataaaaggattgctggagaactgctcaaacaacttaacagacaaaagaggactgggcagggttagacccactcataattggtgagaaaaacaatcagtatgctgacaagaaactgacttcaaaggagaaggatttgaatatctttgaatattaagacacacctttgagaaaatgaaagctcttaaataatttctgcaaaaattatgctctgtatagtaatgtcatgaaagtcagagatgtagtaaaggatgtcatgttattatgtagtgatgttggaaaaaaattacaacaataaatcaataactcagtctagcctaagaattaatgcaaaattcaatatgatctaaatatttcacattttaaataaggttttacattttagataagcttatttgcataatttttacttcattttgaaagattaattctgtcagctcttattttttcactattgtgaagttctggttcttatttttaagggcttttctagtaccagctgccccctggataacagttatcaagggccttttgaattagggggtgatgttgacatgaactgctcactggagtggatgcttcctgatggccaggaatgaggggattgatttgggcacttcctttgtaggatggagcccaaaatgcccaatttatttcattcatggcttcacaagccatcagtatctcagatgctcaaagatttttgttcagtactctccttgtatcagacaggaaacatggtagaccactgagtatggtctgagttgatttcaagtgtatgcaacatcttttctggggatgacctaagaaggccagctttatgaaggactctggagaattcctggatagagttgaaaaaagtcccacttgacatttgcattgggcttgtatttttcacagtgcttctatttacattgttattttaatcctcagagctgtac

SEQ ID NO: 1781 - DNA, 1076 bp, Homo sapiens
aaagtagcaaagttttttattctcttgtttctgagtttgtagatttgactctatgggttagtcggatctgtgagaggatgggaagaccctataatctagttcaggagttggcaagctacatctgcaagtcaaatctgtgtcttcccttcctgtgtttataaataaagttttatttgacacacagccacacacatttgtctctggctgccttggcagagttgagtagctgtgatagagacagtctgtcctgaaaagcctaaatatttgctatccagccttgtgctgaaatagtttgtcaacctctgaagttaggtaagccttgttatcataagataaggggattgtgagtttttgtatcacaggaatttttttgttaatatacaagtaggcattcttgatgatcatttgcaaattaagtaggaaaggagagtgaaaatcacctattgcaaaggggccatgcagtgtggctggcacatgatattgttaccagacaagccagaagaccttgtagtgtgaccatgggcaattcattttacctcattgagcctcgatctctttgagtgtaaaatggagataaggtgacttgtttctcaaaacgtggttgcttggatccaatgaaataaagccacgagggcatcctataaatggtaagagggctgtataaatagaaggaattaaccagcacccatttgtgctgttgcagctgctgcagatacgtgccttgtaaaattaccctattatttagagaccgagaaatatttggatagtggtaatgtgctgctctgagaaaagcagtcgccagtgggatttttatcacataattagagggtttgttaaatgtgctagtgaaaagaagctgtttgctgctgccttgttttaacatggaccagggatcctgagccttctccctgaggagattctataccagcatccttgctccagtctcttttgtggtgctggcttctggccagcagaaattctgggaagttctagacgtagtgccagaggcacagtggccttagaaacccttgtaaaatcaccgtctacccacgcgacacctccgctttagacagcta

SEQ ID NO: 1782 - DNA, 1050 bp, Homo sapiens
ccagttgttctagccctgtttgttgaaaagactgttctttctccactatagtgcctttgctaaacatcagttatccgtctctgtgaggtttatttctggactctttattctgtcctatttgtctaattgtctgtcttgacactagtaccacactgtcttgattaccatagtttaataattcttgaaatcaggtagtaatagtcttctttcttttttaaaaaagtttttttattcaattagtattagtatcgtatgtctttttccatccattcacttttaggaagaaatattagagggaatggggaatgccaaatacattttaaatgttaaatgaatttttctttggcctcaaaactcacacagtaggctctctgattgttgatagtcttgtggatgtctttctagtctatcaaaatttagcaacttgtgtttaaaaacaaagaaataaactttagtccctgtgttttcggtgtcctgggtactttttttcatgtattaaattgtgatgttttggtctgtgtacatgtgaatttttatatctgtgtgtgtgtgtgtgtgtgtgtgtgtgtgtatgaggacttttttctaaaatatatatggtccattttatcatgaacaaggttatttattatgataatatggtaacatttacaaatgagcttttcatgggtacagttatttttctgccctgaagggaccactctggtttgattcactagctctgctgaagaatacatacaattgtttgtggctttatgaaacgctggcttactgaagtgttcattttagacgaatgaatttttaattttttattaagtcaaattttttatttaaatcttttgcattattcacatagaataacagaatcatatattttttaattgtggtgaaataaatatatataacataaattttgccattttaaccattttttaagcatacaaatcagtggcattaattacattggtagtcctgtgcacccatcaccactgtttccaaaacttttttatcactccaaacagaaactctgtgcccgttaagtagtaactt

SEQ ID NO: 1783 - DNA, 1040 bp, Homo sapiens
catgatcaaaccatgattaactgaggagtcctctgtatttggcttaacatttctgcctgtcaaattcttattaatctttcaacgtttattgtaaataacacatccaccaggaatgctttcctgatttcatccctacccccacagtggggatctaattaaggtttgtcctttggaccctaaggtgctatacagcccttaagtttatccttttattgtagtttatctatcatagtttttagtaggaactgtatcttatctatctttggggctccttaaccacttgtctcacacacaatagggctcaatacgtatttattccatgtaattgacttattaaacttttgcacaattcccagaaattaattacactcattctgtagacttttattcgggactgagtggatgaatgaatgaacgaacgaatgaatgaaccaacccacctatataaaaaaagtgtgttgagcactgaacacagcccatatgtgaaggtatttgagaacagtggcaaaaaatgttaacattagaacatcagaacatatattctaatagaagataacaagcagcacacaaataatactaaaaagacagcatcgcagttgagaacactgagaaacaagaagtcgaatgactttgttcagctttgctcaggaagagagcccagcacctcttgatgttgtgggtttaaccactaagcaaagctgcctttgaaaatgcacaccctccttcctctggttggccgaggatgccagtcctgtccagctactgctgtgcagttagctctttgctttagggcctgattatcttttctcgtggattatcttggcctttgactgtcttacatgtccatgtgaagagacccccaaacaggctttgtgtgagcaacatggctgtttatttcacctgggtgcaggcagactgagtcccaaaagagagtcagcaaagggtggtgggattatcattagttcttagaggttttgggataggcagtggagttaagagcaatgttttaggggcagggggtggatctcacaaagtacatt

SEQ ID NO: 1784 - DNA, 1009 bp, Homo sapiens
ctaaagttagggaaagagtctgttttttatactttaggttgagttgggaagtcaaaatgcaggaatcatgggtctcagaactcatctagtctgaatcactctctttgtggatgagaaaatcaatactgagaaaggagaattaactgtccacagtcacccagttggttctgacagcactgggattgtaactcagacttcttttctctggggtactaagtttcatggactagcagagtagaaggaaaaacacagctatctgttggaaactttaagatgcagtatgtcctgtcaatgtagaaaatcacacctgctttgaaactaaactttccttatactgagcaatattctgatgtccaaggcatcacctcaaccaaattatataatcaaagccacaaaataatgtgttggacaaaaacctaacccatctaccatttcagagccttagtactgtagatcctactgtatgtagaagtccaaatataaatgtattttcatgctttggcattgtaaattccatagattaagatcatttgatagatataagctgaatcttttactaagattccccccaacccaaaaaaatacattaaagaaacatgacattcagttctgtttttgttgagattctgtggcagttaaggtcaagacaaggacattatcttgtattgctgtgatagataagaattataaatctgtgagctgtcccacagctgacctcatggacttcagttctctaaaattcagaaccacttgtcagtcaaatttgagtacccaaaagagatgggggagagggggagtggaggaggggacaggggaatagtaaactagagagctggtagaccattaaagaaccttacttgaaagatgtgtgcccccattattctcttttctcctcttattattgtcattgtcatcatcatcttcatctggtattttgtacttatactctctacttgcttatctggtgactcttaatcctctttgtaagttgtaaagtaaagagagagct

SEQ ID NO: 1785 - DNA, 1026 bp, Homo sapiens
atttctaacttctgtagttctataagccctcaatatggatagtattttaatatccccaactttcaagcctcattaaaagtcaggaaggaggccgggcgcagtgtctcaagtctgttaatcctagcactttgggaggctgagatgagcagatcacttgagcccaggagttcaagactagcctggccaacatggcaaatccctgccatgttgcctgtattttctactaaaaatacaaaaattagccaggcgtggtggtacacgcctatagtcccagctacttggaaggctgaggcaggagaattgcttcaactcaggaggcggaagttgcagtgagccaagattgtgccaccgcactccagcttgggctacagagctaggctgcctcaaaaaaaaaaaagtcaggaaggagacaataaatgtgaaaaaatgaagtatgggcaagaaaaagagcagataaaaaaaatattgtttatgttaatttttaacatgggaaacccaagaaaataaactgagaactattagaaataataagagaattcagctagaaagtcaaagttcaataacacatacagctatatttgtgattttcatatattccaagaacagctggttagaagtcatagtggaggaaaaaaatccattaaaataacaattaaaaaaaaagatacttatgaataatcacaataaaaatgtgtttgttacctacgaaaaaatcttaaacaaatggaaaggcatgccatattcttggatgggaaagctcaacatcataaaaatgttaattctctctttgtttatctataaatttaacatgacaatacagatttcttttctttttttcttttattattatactttaagttttagggtacatgtgcacattgtgcaggttagttacatatgtatacatgtgccgtgctggtgcgctgcacccactaactcatcatctagcattaggtatatctcccaaagctatccctcccccctccccccaccccacaacagtccccagagtgtgatgttcccctt

SEQ ID NO: 1786 - DNA, 1098 bp, Homo sapiens
tacctgccttatactcagaggcatattttcctccacattcccccctcagaagatctaccgtcaaagaagcctttaaaactgcagagattcttccccatgcaaataggaaagggcatccagccccttcttcccagggtggggcaaggactgaccacatagggaccaagcagaggccagaatcctagagcagtgcttctcacagctgagctgcatcagagtcacctggagggctggttaggacatagaccgccagccccagacccatagtttctgattcagtaggtctgaggagggcctgagagttcccaggggttgctggtactgccagctgggcacctttgagaacctctatcttagatgattttcccaaacttcaagtattgtctttatttttaaaagagagaaaggggagggtgtgtgcctggtgttgctaggcaaccattagccaaaggtgatgagagccgggttctgggaaggacagcaggctgtgcggggtgacctcagactggacagaaggctgtgactaactttattggcatctctctagagacataagtaggcttcaccgccaatttgcctaaggtgttcagcaggactattgaaggcctggcagctgccggaggagagcctgtctcccagccgggccttctgctccttgctccagagggctttgagcttgcggtagtacaccttgcagctgaagccctccctgaagcccctcttgatgtggctcttgaggaagtccagggtggggtacatgcggcagcaggccacgcacttgtagccattctgctgtgctgggtgccacctggaagccattaggatgtcctgggatgtgatggagtccaggccatgcctggatttcttggtggcttctcgagggcaagtgttctctggggaggaagaggacgaacagatgttctcagccatgtcctcagaaaggcagttgtcccacttgccctcatcctgctgcacctctgggaagtcataggcctccagctggctctctttgtctgcacacacgaagtagctgtagggggagaaccagggccggtagatagtgcagttccgcctcagcttctctccgtgctgggtatc

SEQ ID NO: 1787 - DNA, 1434 bp, Homo sapiens
tatgcgtgagttcatggacacaagttgattacatggtttttagaattataattatggattcttcttatttcatggtaggttgtctttaaagatataaaaattaggatgcctttatgaagcactgattataccaaaaaaaaaagacaagttatatacaggttattaatttttttatttatttattttttcctaaggaaaaagtcttctatctttccctgctggaagcctcctcatatttccttatgtttgccatgcaggttgctgagagtccagttagaatttgcattttacagaatgaaatactttaccccattcaaacaattattgtttgacattttagttatttataattgtcaaattcaggactctcctttaatgtttattatgaaaccaaatttggcataaggaggctgatttatgaattaccaaagggtcttgtggcatgttccccaatacatgcccttagaaggaagaactattattttttattttggccctttcaggagttgattataaattggtttgttttcaagtcagaattcaagtgggcagaacccgtattgtgaagacctaaactttcctaaatgttcatatgggtagcagattttgtggtgattagaaacatcaggtccttaaatacgatgaacatgggatacaaaggaattctttataagggcaagtatcctaagttagcacatttacttttctctcccctccgcccccaaaagaaaaatccttacaaataaactgcaggtaggcttctaagcctagtcctgcagtatgctgctaacatcttgatgccaatcttcacagcattctttgattgtcatcttattgctgatacattcatacatatatttagtgcttgacactgtagaattttgttacagaagatggttactagattttaagggagctgagggaataattgatgagccttgaattaaccatgcatttaattagattttttgttgttgttgttgttgttttgagatgatgtcttgctctgttgcccaggctggagtgcagtggctcaatctcggctcactgcaacctctgcctcgcaggtttgagcgattctcctgtctcagcctccccagtagctgggtttacaggcgcttgccaccacacctggctagatgttttatattaaagccagagaattgaaaaagaaatgcctcctgtgattgaaattattttatagctcttagcccgttctaccaaagatcacattagcagattacccctccctcctgtgatattatctttcttaaacctgaaccaaatatcaaaagatacaagtttcatgattaggatgaaatatatacatagggattttggtttattgaagttattgaaagacctagaaattttctttttgagagaaagggtaaagaggtgagggttcatgtcacttaacccctacccttttgg

SEQ ID NO: 1788 - DNA, 1045 bp, Homo sapiens
ccattcttaatcacagaagaacatggatattttagtttttggagtacccagaattgtaaagattttgtttcattttgttttaggatagcttctctgcctaatactataggatatgtcatgttcgttattgtagccacctccctcagatgtttttcactatttttaaattatataatgaccagtagattcacagtagcatgtacttgacaagtgccatggatatttaagaagaaggtaaataattttaatattttttgctgtaattttataggagcagtggactgtaagagaaatatctataaatcagagagtatttaggaaactttgtattttataggtggtcattaaagtgatcttcaggatataagatagtttacacaaactttattctcctgataggaaatttttattcattttcctaccactcagcacttttgttctgccttgtactgcttatgaggattaatgttttaaatttgctttatttgtgcttttcagagagttgtcataattgtggcagttgtgtttgtggcactgtaaatgctgaaattcatgggaaacttaccaaatgactgcttgagtgttatttcccattaaattgggtagctgtcacaataaccagaagaaatcttgtggcccttttgaagaaagccatgtatgttttgttacctaggttcatagtattttaatttaaaggcaaagagaagcattctacttatttgtcttataaaccattaatcgttttttgtgcagaagagagcttattttgttatactgctttgtataatggaaataagtcacattctgggggaaaaaaactggaattgtttgtattttgtttttttggggggggatctttatgtgaaaaatcagagctacttgttaccataagcccttactatcaacaagataattatttgtaatcacttttttatcccaggttggaattgctttccccttctaagttatcttcccttaataatatttatgataccaggacagtgagggtataagagcaaatgtagtgaggtattcaaaaatcctg

SEQ ID NO: 1789 - DNA, 1050 bp, Homo sapiens
ttgaattatatatagctatattattttattagcttgggttgtcagaagattgccaattttaagagtaaagaggagagagataagtaataaaaatagaggaggggaagaaaatggctcccttactggtcttagtaatcttctatatagttaatgagctaaaaaatgatacttaaagttccaggtttggtaccgctagcatagaaacattgcctttcctacacattcctcatcattgtttcctcagaaaattattttaagagtttgtgaaaccagattaaatatctatattcagtttggcctaatttttaaaaataaatatttatactccagcttttgtgtatttggtgtacatcaccacttatgcaaatcaaggatcagaaaactggaggttagccatctccattatttccttttgcacattgggtacagtgggtggcattagtatgcactagctgcaaagtcacagcaccttatggaaataagtatgtttattataataaaaaaaagttaagctgcatctctgtagattatttactttgcagactgtaaagctgccctatcttttccagcagaatttactcttccattcttaattcttttttgaaatatcttaaataatttaacattcctttataacttcttaacagtgtcaaaactggggtagaagggattttattttttcccaaaagggttccatctttgctatctgttgatcagccttagaaaatctaagtatgatcaataaattttaatggttgatggcatcctgtgtcagctggagtagttggttgtgaatattaaaacctagtactattttccctcagtaacatgtaattgctacattttttataagaaggtatggttagaaaaaaatgtgaaagatcacttaaaccaaagccagttacaaggagtaatctctcctgttggtttaccttcacctcagaactacaagaatattacaatacatagtgaatagttgtctgtaacatttctaccagttgtttcagtagcatattggtcttggcatttcttggcactgtggttctgctg

SEQ ID NO: 1790 - DNA, 1086 bp, Homo sapiens
cccgccatgagttttgatgggaaaattattttggaagagaagaacaaagtttctatggctccaggtttgtaatcatccttatttaatggtgactagaaaggataacaacataaatcatcaaatgttgattttctttttaacatggtgattttgatatttaaacattaatatatatgtgttttttgcagcttggaaatgatttaaaaagatgaaaatgcccgttggtgtaatggatacacttttatgcttgttgtgggtgtctgctctatggagcaatttgaggagcattcagggtattctttctctataacaagtattttattttttattttttacaatttttgagacagagtctcactctgttgcccaggctggagtacagtggcgcaatctcggctcactgcaacctctgcctactgggttcaagtgattctcctgcctcagcctcctgagtagctgggattacaggcacgcgccaccatgcccagctaagtttttgtatttttttgtagagaagggctttcgccatgttggctaggctggtctcaaactcctgacctcaaatgatgtacctgccttggcctcccaaagtgctggaattacagccgtgagccaccgcgcccagccatatagcaaatattttatgtatactgcaatgttcatggctacattgtttattatagtgaaaacttggaaaccatatgctatttaataaatgagaggctaaattatagtttaaaaatagcattaattcttaaatagcattaaaataattggtggcattaaattctaaacattatttcagcaagttaagtaagagaatgcaaaatgaaaaactgcatacagtctatgattagggccactgctttgcacaattccaggtagtgcatacacatcatggtttgttaatgggacccactagaattggacagtgtattgcctgtgtagccacattcagtgaccctgagtacaacctcagtctataaaaatagacctactgacagatttatgtttatgagaatctgtacttggaggaaaggctgaaaagaaattaatagtattaacagtggtgctctctagatgtag

SEQ ID NO: 1791 - DNA, 1041 bp, Homo sapiens
agtggtgactggaaaataaacctgtgtgcgttaaaaaaaaaaaagagagagaataaggggaatctatcccaaattccctgcctagtaagatacccactgtaggtagagtacatgaagtaagagatggtgatgggttggtagataagaattgtaaataggcccatgattgatttaaataatttgctgcataatgttccccttcagtttaatctacttcctcggtagaaagtttcttttcattaagaactgtgttcctttcagggtggcaaacagtgaaccacacaacaggcttacttatccagcagtcctgcctcactgagctggactcagtgcctatatctctaattgctgtgtaaatgaagttctcaatagtggctttagttttctggatgagactgttactgactgtatttattttaagaaatcagttgttgaagaaaagtcttaactttattaatataatttcatgtctacttaggatagacttgtcaaattggggacagagttttaaacatattttgaagcatgctgaattgataattagactggacaaacaaaacaataccttcaaatagatagggatttttgagacagggtcttactctgttgcccaggctcgagtggagtgcagtggtgcaatcacgtttcactgtagcctcaacctccccagactcaggtgatcctctttcctcagtctccctagtagctgagactccagcatgccaccacgcctggctaatttttttattttttaaatagaagccagggtttcaccttgttgcctaggttgacaaatattttttattgtttgtttcttcggttggatatttatcttatctgaaccttgattttatattagtgcattgcatatagttcttttataattttcttctaaacacttaagtcagtgatgtgtgggattagtgtggtggcataccaaaatcacttgtgaggtttttaaaaattacatattcttaattttccctctgattttagtataccctcttttctcagctccccatcagcccagagccattgata

SEQ ID NO: 1792 - DNA, 1031 bp, Homo sapiens
aaagagtgaagaaattacttgacacctgcatgaaaattagcgggtagtgctacaaaggataaaataagagctattttatcccaccatagttttaaatgaaggacattctcactatcgatttcacttagcttttagacattcaagatgacttgtctactttttaaaaagttaatatgcattactttagaatatcaactccagttccaaaatatttcccattctatgccatttgtagctgtgttactgtttcatccatagtaacttaatgcgttttttaatgtacatatatacagttttaaggcatttgtaatgaatacagttttaatgcacacgtacacagttttagtggagactgttatttgatttttttttaaatataaagagatgattgggggaaagctattcatttactatttaaatatgaactgaaacttaaatgctcttcactttgaaaatcttagtattggttgttgacacatttgctcctgaatgttgtaagattttctggcattttaaatctggaacgtgattatatcttttctcctcctgcttcttagtgtttatgaacctcagttgcagcaccatgtggctcaaaagaagattccttatgtggatacccaaggacagttaattaagccagacaaacccaatggaataaagatggaaaaatttgtctttgacatcttccagtttgcaaagtatgctttgaatagtaccaataaggttaaataaatgtcttaaaatgctgcttttcactctcttaggcatgaaactgttttcaggaaacatttgatagcacatatctcacatggcattttgattgtgagtatgtagtctagattcattatagttctctggaataaaaccaggagtgtgatctgagttgcctatgagtacaactttttttttttttaaatcaactagtttctggctcctataaagtttttttcatatgtatattaaatatatatattatatatatattttatatatataatttatatatttatataatatatattatatataat

SEQ ID NO: 1793 - DNA, 1444 bp, Homo sapiens
cgaattcctgacctcaagtgatctgcccaccttggcctctcaaagtgctgagattataggcatgagccaccacacccggccacattaattaaattaattaattaatgtatttatttattttcgagacagagtctcgctctgtcaccccggctagagtgcaatggtgcaatctcggctcactgcaacctctgcctcttgggttctagcgattctcctgcctcagcctccggagtagctggctttacaggtacgcgccaccacacccggctaattttgtatttttattagagacagggtttcaccatgttagccaggctggtctcaaactcctgacctcaggtgatccacccaccgcggcctcccaaagtgctgggattacaggtgtgagccactgcacccagccacatttattttttatatgaataaatggatggagacaatcactatgaaatgcagtggtcaagagaagattggggcttgagccaaatcttggaggatgagtatggtttttatgggaccatagttgagaatgacttggaataatccaaagagtgtgactgatctggtttgagtggagagtctcaggataagtaaggtgaagtaggatagagagtgctttgaatgctagagaaaggttgacctgtagctaaactcagaagccctctgatttttattgactccagcaaagtttgagactacgtacttggggaaagcacagaaagagctatggtttgacaagagactaatatttttgtgccctgtgtcttattggtaagattcttgaagtggcaaataacaaagaggtctaatgactgcaaactcattgactatttattgacttttgtgttagataacttagaaattcagaattgctgtaaatgttaggttgtgacctagatgaaacaaatagggactttgaccttgccttcgcttgagtgcattctgccttagctctttaaaaagggacttttggtaacagagaagtactttgaaacatattgaataaattagctcagctaatctaggacatttgggttgtacagaaaaaacatgtactgggaaataatttaactgtctgatagaactttctgcagtgaaggaaatgttgcatatctttgttgtccagttttgtagtcattggccattcatggcttctgaacactcgaagtgtgattattatgactgagaaactgaattttaaattttaaattagttttaaaaattttaattaaatttaagtagccctgtgcagctattggcttctgtattggatagtacagctttagaatgtttgtcaacattaatagtaccaaggtagtggtgaagattaaaatgcaatatgaaggcttcagagcacctagcattgggcttggcatatagtatatacctagtaagtagtcacctttttatcaaattgaaacttggaaatggttaaaaatgagat

SEQ ID NO: 1794 - DNA, 1027 bp, Homo sapiens
ggcacgagaattgcttgaaactgggaggtgggggttgcagtgagcataggggtgagactactccgtctcaaaaaaaaaaagttaactctgtgagagatgattataggaaaaatgtttatcttattaactgtagaaatgatcagagtaattttctttttatatttttgttttatgcttttacaagtcagtcattaagtctactctaaaatgtctattaaatagattttgacttttatattctgcatctcaaccttttttggcatttgtgctttaaatcatcattatagcaagtccagcactgcatgacaagtgcaaattttctaattgtgtttcatttcaatcctctttttagggattagaaagttatgtggcagataaagaattccatgcacctctaatcatcgatgagaatggagttcatgagctggtgaaaaatggtatttgaaccagataccaagttttgtttgccacgataggaatagcttttatttttgatagaccaactgtgaacctacaagacgtcttggacaactgaagtttaaatatccacagggttttattttgcttgttgaactcttagagctattgcaaacttcccaagatccagatgactgaatttcagatagcatttttatgattcccaactcattgaaggtcttatttatataattttttccaagccaaggagaccattggccatccaggaaatttcgtacagctgaaatataggcaggatgttcaacatcagtttacttgcagctggaagcatttgtttttgaagttgtacatagtaataatatgtcattgtacatgttgaaaggtttctatggtactaaaagtttgttttattttatcaaacattaagcttttttaagaaaataattgggcagtgaaataaatgtatcttcttgtctctggagtgtcatttgtacttgaagaaattatttcattgagaaaatatgaaacttgggagaaactttaagataatgcataaaaacaaattgatgcttcagtgaggttgcagagt

SEQ ID NO: 1795 - DNA, 1031 bp, Homo sapiens
aaagaagttgagggtggagagtcttgttaggagggccaggataagagcaggtgggcggtgaaggaggctgcggcagaaccatgccaagcagaatggagtggaggggacttgactacacaagaggctggtgactcagctttctgcctagtattagtcctagagaagtctccctgctctgggaagaccggtgtctagcctcatgtggcttcggaacaaaagccagtgattgcatccaagggaagataatgagaaacacacaggccgtgaaaatcaggaaagcaccactaatctttttgttgcaaaactttacttttcaaagtcctggggaagggtgcagaagcctcagcacgtggacttgagccctgtactcggaaatgcaaaatggaaaccccctaatagatcacagaactgaaaatatccaagagtctgagaggctgggggaggacaggagtgagaaaaggaagggggctggagtactgatcagaagataggagaaagcaacagtgcaaaatgcggggaagggctgagtagacattcaatttaatctggacttttattttgctacaaactaattttatgaagactttttttgcccaaatattaaatatttattaattaaagatattaaaacaggaaaaactgctttcattcaataaaaactctagtaattcttcctaactccagaattgtatgtatatgttttacctattaaataatcagaaatagaaacaaattagacaagatacgtgaataaccttaaaaattttccataatatttgacttaggaactttagttttatgaatgtactctaaggaataccctgaaaaggacaaaatctatacacaaagattatacacaaatttattatagaattatgtactaaaaaaccctaaatgaccagccttgagtatatggttaaatatataagttataagcctttgggttttgagagttttagataacacaagaaggtatttatgatattatattaaatcaagataaaagtcacaatgtaatataaagatataca

SEQ ID NO: 1796 - DNA, 1031 bp, Homo sapiens
gagccattgcgcccagccagtaccacattttcagtctcagtcatgatcataattatttcatggagactaagttatgagtacatcctgatatgtgatcgatcagttggtgctgggattacaggtgtgaaccattgcacttggccagtaccacattttcaatctcaatcatgatcataattatttcatggagactaatttgtaagtacatcctgatgtgtgatcagttgcactgccttacgttaaggtaactcctttgacatttgaattcattttttacatctttcttcacataatgaattcattaagtagataaggcaagtagtgagtgacatttaacaagtgaagaaactgagacacagaaataagggtaatatgcctgggaaggtcatccaatcttatattagttgggtgggtccaagaccccagggcttctccctgcttcctaaggggtattttttttccctaggccagtaaagatttgttcacaccttcacagtaattggcatgtaatagacatttgatcaatagttggtatatgaaggaatagagtcctcagatgtataactcccctgaaagtgaacacaaaattgcatgtaggtgcacaatgcatttttctgagcagagagggctttttatttatttatttgtttttaaattgtaagaggaatttatgatgaaaaaagtccaagaaccctgcactagtctatgctgccctagggctatctggaataattaattttcaaatattgaggcacttaagagacaaagaactaccttgtttccttggacagtagaatgaaatgggtagaaacaaggaaggctttcttgatgaagatgtttgctgaataaaaatacttcacattttatgtgaattgataatcatttgcatttgcctgttccaaatgcacaagttacaaagtgaaagctagttttcttcactccagctcttctcagtgtggccttagtcctttgtaaatgtggtttctctctccagtactgctgagctattagagttttctaccgcatcttaa

SEQ ID NO: 1797 - DNA, 1045 bp, Homo sapiens
ttaaaaatctttattaagcacctactgtgaacctagcattaataatgatgaaaactctgcatttatactaggatatgtattaaggtttttaatttaatgatagtgagttaatatattttgatcttggttgaagatttttctcattttgtctaatcaatgtgtaatgtcgattttgtggtttattgcatttagatgccagtgaactctgaagtcatgtatccacatttaatggaaggcttcttaccattcagcaatttagttactcatctgtgagtaaagagtgattttattgtcttcgtctacattcgtatttatattacattaagttttcttaatgacatggttttctttggtaaggaatacctactatgttccttttcatttcatcccatatacattcattcaaactttcaaaattgtagactgtcatcaaacagaactgcctccaactgtgccactttctcagcatattttcaattgaacttctaagatactgtaagtcgaaaattgtttaccgtctttgtgaagaggtttgagttcttaaaagagtcttagtgtcaccaagtttatgtactatttattagaatctgtaactatactttagtattgcatgactacatgattaatatacagaaaaaatagatttcagtgctatagggttatacattatagtagaattctggcttcgtccactgaccttaagaaatatatccagaaatctctttctgaaaataagatgtttatatcctatagcttagcatttaatgtgcaaaatacttttcaatagtctttttgtacttcatcttcaagggactcatttttgcctatctgccgggtgaatgactttgagactgctgatattctatgtccaagtaagtgagaatttaaaacagttttaatgtctggcttcgatctaccatttcacctttccatcagtaaatgtaaaaaaaaaaaaaaaggaaaaaaacaacttcaaggaaattgcctttaaaaagtatatcccatttttaagtatgaatttttaatatcttgttgaatttctttt

SEQ ID NO: 1798 - DNA, 1045 bp, Homo sapiens
tttctcatttcaagatcttcaattatacttataaagccactttgcaaataagataacatgcacaaattccaaggagtaggacctgaacatctttgggtgctattattcagcccaccacatggtctacccttgtaaaagttccatgagtgctgttgttgatgagtggagtgttttaaacatgttaattggatccagttggttaatagcgttgttcaagcctactgggtccttacagacttttttcctggttgttctttgaactgttgatagagagatgttaaaatcttcagctatgattgtgagtttgtctgttttgtctgttcttttaatttttgttttatgtaccttgaagctctagttttagaagtgtacacatttagaattgctatatcctcttgatgacatagtctttgttctgaaatatacttgattttatattaacatagctacttcaggtttcttttcattagtattaccatgccatatcatccttgtaacttgtgcctttggattcaaaacgggtttcttgtagacagcatatggttgggtcttgctttttaaattcaacatcactatctcggtcttttaatcggagtcttagaccatttacatttaatgttattattgatatgattgggcttaaatccacctttatactatttgttttctctttgtcctgttctttagtcctgttttctccatttcctgccttattttggtctattaaaataaattttattttatataatactatatatgaaaaagatattctaccttgtctgttattggcttatcagctatatgtctttttaaaatggtatttgctccaagtttcagtatacatgtatatatctttaacataccattgtctatcttcaaatatattataccttacaataatatacttttattttctccactactggtctttgtgctattgtgtcataaattttacttttacagatatcataaacaccttaatcgatattagatttgtgtgaaacagttatcttttaaaggattttctattttgacatttaaaaaa

SEQ ID NO: 1799 - DNA, 1033 bp, Homo sapiens
tttttggtttttttttgtttgtttttctgttctttcttccctccccctacacccctgcccgccatttacgtttgttcactttcttggatatggttattgtttttatacaatttggaaaatattcaactattctgtaaaagtctttttgtccctttttgtaggattccaattacacattagttatgctgtttgatattgtctctcagctcacagatattgtattcatttttttctctctggactttattttagataacttctattatgtcttcaacttcatgaatcctttttattttaggtctgaactactgttattcccatcagtgtaatttttatttcaggtatttttcaactctaaaagcttaattcagatcttttttaaaaaatctttgcttttatttcttcatattgctgattcttttctctatcccctttatttatttataaaggttgttttcacattcttatctactaaatctaccatgtatgttatttgtgttatgttttaatatgtttctgttgattgattgtattttcttattatggatcatgtcctttttcttggcatgtctggttatttttagcagatgccagacattgtgaattttaccttgttggttaactgagaacctgaggggattcctctacagatttccagaactctttctctttacagcttcctcatcttaatactcagttccataaatcctagttgctttggcttctgcaaactctaaactctgtcttcttgacccagcaagatgtacaagttttatttgtgttctctttctctggagtacagcctgtaaactcttcagtcatggactggtgcagtaatggaattcacctcatttgtttctcttggagattgctgtcctatattgccttttatccagcatctaaaatttgttgcttcatgtatttttgtttttctagttttttaatatgggagggtaattctggtttctgttatttcttcatgaccaaaagtggtttacctttttttttaaagttattaatacaaagataattt

SEQ ID NO: 1800 - DNA, 1025 bp, Homo sapiens
tatattttttgcccattaaaaggtttatgtttttatgtagtaaaatttatagatacggcctttatggtttttggctttaattgtgtacatagaaaggacggtcctattcgtcagattattttttaatactatattttctcattgtacttttatagtttccttattgttttaaaatgtatactttagatccttgagaaacttactctggtgttatatttcccttatttttctatctttttttttgctgggaaatgctttcatctgagtagtacttactatggctcaattttattgtttatttatttctgtctcatttaaatccaagttaaaacaagcactttgtacttattaagtttagaccttttataaagaggagaaaagtgatgaaagttaacactattgtaaggaaaataacctctaatcttgtagagcattaaaagagtagataatgtggtggtttgcagaactctaagaatgaaataacaaaatatacagaaattacaggaatgcattatatctaacattcagttttggcgtctgagttagctgatcaaaaagtaagaatcttttcttttaagttaaaaatatttagacaaattacacaacacagtaatacattcctgttatgaaatattctctctttacatacacacacccacacatacatatatatatatgtatgtatatagagagaggggagtatacacacatatagagagagacagagaagggtacgaaatgtgaaaggccttctctcagcccattttaccttgaggtaatactattcccttcctttttccaacatcatatgcatacacatatagaggcacataatcatgtgtcactgttttgttgttctgtttttatagaaatgtatttatgtgttatatgttgatctgtgaattggttctttcacttaatatatctggaaaatctttcctgtcaatacatagagtcatagagggtccccaaacaatgtaaatacaacttatcaacaaatatctgagaagaaaattcataggaat

SEQ ID NO: 1801 - DNA, 1051 bp, Homo sapiens
ccttttaaatgataatcagggtcaaatgcagagagtatagttatccacagtaatgtagttattttccatgtttaacatggaaagctctaaagtaaaatttttccttgataattataaatatgtttgttcttattgtattagaatcctaaccattgtctcatgtcgctcctttgttccttaagtagcaaactttttgatgtgtttgtacaacttacagaatgaatttttaattaaagcagacatagacatgcacatttgtgtgtgtgcataagaatttaggctttaaaatattaataaatatgaataaacttggaattcttataactcatttgtagtttaggttgttgcatggaataattattattctgtttcattttctacttaggaaatatttctaaacttgaaaactgctttggagaaataccacgacggtattgaaaaggcagcagaggactcctatgctaagatagatgagaagacagctgaactgaagaggaagatgttcaaaatgtcaacctgattaacaaaattacatgtctttttgtaaatggcttgccatcttttaattttctatttagaaagaaaagttgaagcgaatggaagtatcagaagtaccaaataatgttggcttcatcagtttttatacactctcataagtagttaataagatgaatttaatgtaggcttttattaatttataattaaaataacttgtgcagctattcatgtctctactctgccccttgttgtaaatagtttgagtaaaacaaaactagttacctttgaaatatatatatttttttctgttactatcatggctgttgttttgtttattgacatagagttgtggcattattgagtccggactgtgccctcagcattgtggttgagatctcatttgatccttacttaagcaattctaggtagatatttttattactacatagataaagtaattataaaggtcctaaaagatcagatagctgaagcaaaatttgaactgtactgtctatgatactgaagtctacaatgtttcagtgtaccacagttt

SEQ ID NO: 1802 - DNA, 1029 bp, Homo sapiens
atcatttcacaatgtatatgtatgtcaaaacatcatgttgtacgtcttcaatacatttgctgaaacatttttatcgaggtaaaatatacttataaaattttaccatcttaaccatttatttatatcaattgaggcggctctcgtggaggcagctagcgcgaggctggggagcgctgagccgtgcgtcgtgccctgctgctgcccagactagcgaacaatacagtcaggatggctaaaggtgaccccaagaaaccaaagggcaagatgtctgcttatgccttctttgtgcagacaagtagagaagaacataagaagaaaaacccagaggtccctgtcaattttgtggaattttccaagaagtgctctgagaggtggaagacatgtccgggaaacagaaatctaaatttgatgaaatggcaaaggcagataaagtgcgctatgatcgggaaatgaaggattatggaccagctaagggaggcaagaagaagaaggatcccaatgctcccaaaaggccaccgtctggattcttcctgttctgttcagaattccaccccaaaatcaaatccacaaaccccggcatctctattggagacgtggcaaaaaacctgagtgagatgtggaataatttaaatgacagtgaaaagcagccttacatcactaaggctgcaaagctgaaggagaagtatgagaaggatgttgctgactataagtcgaaaggaaagtttgatggtgcaaaggtcctgctaaagttgcccggaaaaaggtggaagaggaagaggaagagaaggaggaagaagaggaggaggaggaggatgaggagaaggaggaataaagaaactgtttatcgtctccttgtgaatacttagagcaggggagcgccgtaattgacacatctcttatttgagaagtgtctgttgccctcattaggtttaattacaaaatttgatcacggtcacattgtagtctctcaaagtgctctagaaattgtcagtggtttacatgaagtggccacgggtgtctggagcaccc

SEQ ID NO: 1803 - DNA, 1343 bp, Homo sapiens
caggcattcaccagctaaattttgtgttttactagagacgaggtttcgccctgttggccaggctggtctcaaactcctgatctcaagtgatccgcctgcctcggcctcccagtgctggtttacagccgtaagccaccatgcctggccctgtttcccttgctattctcttaaagtgagaattagctatatctggccaaaagtctgggacagattggaagaagagggggaaaagagaatgggtaagaacagaggaaaagtttttaagctactttaaaaacttttaaactacaaactggacaacaaccgcttgaaaagctagaattgcatattaaggatggtgttttcttagcgtcagcaactggaggcattgtgtaatcatagttaaaaacatttcattttctctctgaagatacataagcctatccattcaacttgcaaagttccaaagcaggaaaagtagcacaagtgagtttagggcaacctgaccttttctttttctttctttttttaaattatactttaagttctggaacacgtgtgtggaacgtgcaggtttgttacataggtatacacatgccatggtggtttgctctacccatcaacccgtcatctacattaggtgtttctcttaatgctctccgtccccttgtcccccaccccctgacaggccccagtgtgtgatgttcccctccctgtgtccatgtgctctcattgtccaactcccatttatgagtgagaacatgcggtgtttgattttctgttcctgtgttaatttgccgagagtgatggtttccagcttcatccatgtccctgcaaagaacatgaactcatcctttttatggctccatagtattccatggtgtatatgtgccacattttctttatgcagtctatcattgatgggcattttggttggttccaagtctttgctattgtgaatagtgctgcaataaacatatgtgtgcatgtgtctttatagtagaatgatttataatcctttgtgtatatacgcagtgatgggattgctgggtcaaatggtatttctggttctagattcttgaggaattgccacactgtcttccacaatggttgaataatttgcactgtcaccaacagtgtaaaagaattcctatttctccatatcctctccagcatctgttgtttcctgactttttaaggatcgccattctaactggtgagagatgctatctcattgtggttttgatttgcatttctctaatgaccagtgatgatgagctttttttcatatatgtttgttggccacataaatgtcttcttttgagaagtgtctgttcatatccttcacccactgtttgatagaa

SEQ ID NO: 1804 - DNA, 1034 bp, Homo sapiens
agtctggccctcaccttggaatggtggagttacttgttcaacgtttgcctcagctgaaatactgaaataatttctgtttcccacctgtcagtggggcgtttgcaaacttacagtgaggatatttagaaagatgtttgagtttccctaagaaagtgtggtcagtaagtatgagaaaaagtttatatatttgtcttgctttgagacaggttgaatctgccagtaggtcagaggaatacatttacctagtagcctgtgctggtagggcagagagagtcagtcgtttttcctgagggcgttaggtgatttgagacctcaagtgttgtcactgtaagagaatcctccttataattaccattgttaatagaattgaaactttgcatttgtcttttatccctaacaaagaaagactcccagagagtctaatgatgagccctgcctacatccattctgaaaggcactctatggatatgagggtgtagacgttaattcctttctgtagaatttgcatgcagaggctctagggccaatgcaccctgcttacattaataaatatttaaaaacaaagagcgggtaacacaagcacatctttcctttgtgcatcctccttactagggtgcctgtaatacctaacatcttgggaaggaaatgtctgggtgggtgcgggtgggtggtgatgctgcgcgcagcaccaagtataaaggcccaagaagtaaccacatcgtgtgaggaataaattaaagcagcttcatccggaggccaattaaggaagaatgggaaaaaagaaaaaacaaaacccagcaacaataaaacccaagagatgagagagcatgttcgttcagaccacgtagaaaagagaaattgaagtcgtctggaaggagtttaaggggatgcatcacaaaataaaacttttggaaccaagaaacagtggagaagcccggtggcgagccacatggccttgtgctaagacgagatgcccttttcagaaaggataatgatgatgctgggagctggaccgtcgtagattgtcgcctgag

SEQ ID NO: 1805 - DNA, 1033 bp, Homo sapiens
taatttttgtatttttagtaaagacgggatttcaccatattggccaggctggtctcaaactcctgaccttgtgatccgcctgcctcggcctcccaaagtggtgggattacaggcatgagccaccgcacccagcccccttttgtgattagtgggtgttttcagttttgaggagggaagatctaccttccaaattgcagtggtggcccagagaacagcctggtatgcaggaccagggtgaaggtgaagctgttcatatcaccccaggtctttgaaggggaagaaaaagttcaaggcatttcatgttaaaacttactgtttagaaaacaatactgttgatattaaaaatataataatagcatcattattaccaagaagaccttaataaagaaaattttacaaaagaaaatcataaatctactaatttacctttaatcatactatcctagttcaacgtctattttcagttttcttgtgtttacattttcttgtgttactttccttatggctgtgtaaattttccatgtcttggggatgattgtgtactcagggaacatatttatccacagaacctgttatgtatcttatttatttgtttattgcttatttcatttcaaaaaggcatgcaagaagcttaccaaaagatgtgagagataccaagagatttactaaataaatgaggaaattagaagaaaaaaattcaggtagggcaataaaataacatgcaagggaatgttagtatgtaaaatggtatccataagatcctttcttattgtgaacttctcaggccttttgctagtaaggaagtagctactgtctctttgggtcaaactagtctaggaccttgttcagtccatatcctagaaaggttggctacagatttgattctgtgcttcctagtagcaaaagcaaaaaagggaaataggatccgtttcaaattgccaaacatttagaattggaaactaatcagttatttaaggagaagcagatttttttcctggtactggaccccatgcaaaatttctttcataatttc

SEQ ID NO: 1806 - DNA, 1082 bp, Homo sapiens
ctcttagatctcttagatctattggatcactccagttaagtgctcagagagaaaggtttctggtttggatcagcatgttactgaatggggagaagttcttgaatagctctctgttttctgagttaagattttgtgttttggtgtgtgaagagtaagaggggtatcatggagtagatgggggtgaggtagaatgggaggtgtgcaagagaggacacctgaggaccgtgtgaaggcaagtgataatcagactaggaagctggctggacacaaccttccagtgggagaggcggaggtgagggggcagctgcttctttaactaatcaagggctcaggttccagtaccttccttttatccccatccacagtttggcctgtctcttctcatctgcaaaatctcctcttttctttttccccctcttttaaaagctaaactaattttctgtctgttcatgttgaccttttgtccagttttcctcccatcagatgaaccaaaatactagaaaaggactcttccatctactactactgctagtaataataatagtaataaaataaataaaaccaggaagctaaaaatggaaattaactaattaatttgacatcaatgaaagaggttgtagaactggaggcaagggaaagaatggaatggacatctttctgggcacactcctcactccttccccaaccccttccaatgtgagtatgtgtaatttaaacctcttcctggggaagagtgaaagaagaattttacccacctttttccattcccctcctcccttagtgaaaattcctagtcatggtctgtgatatctcaaacttggctgtcactttttggggtcattccctggggatacccttcccccaatcccagggcagttctaatgtttctgagtaaggagtagtgagaaactcagttttccctgcaaacttccctcctcatcagccccactcagtgttgagtttagcatttgctttagtggctttgctatttatagacttgtctggggaggttggggttgggggacagtgtcaggcaaggaatctcactgtagtctttgaggggggtagtcaggcattgagaa

SEQ ID NO: 1807 - DNA, 1035 bp, Homo sapiens
ggggaagagagtatgggatgatcagtaaggagagggggcggggagagggaagagtcttctcttgaccagaaaatgatacctgtggtgtcttttcctgaaactgaaaacattaaagcgttctgatcccagagaaaacaaattctctgggatataagggttcaccttttggaggtggattacacttttcaggacaccagagaaccatagagcaaattacttcttccagagtgctaaatgatcccctggtgccctggaaagagaccgtttacctccaaaaggtgagttgtttattgccagagagtagaatattggctgtaatgcctgctcatccatccttctccatccctgcgaggtatttagggtggaggagatattatccacctgtcaccatggggaaggagactgacaaatacttttctgattcctgttcctaagattgaattgctggggaggaaggtgaagtgacttttccaaggtcttatagtgatccagtgattgaagttgaattagatttctgttcctgttgtggtgctcttgtttgtcagagaaaaataaatatcttaatgctcacacggagcctcccgtaaaaaggctgataagaaaggccaggtgcggtggctcatgtctttcatcccaacattttgggaggctgaggtgagacatggcttgagcctaggatttcaagaccagcctgggcaacatagtgagatcctgtttctacaaatagtaataataataagacatccaggtgtggtggcacatgcctctagtcccagctactcgggaggctgaggtgggaagattgctgagcctgggaggtcaaggctgcagtgagccgtgatcgtgctgctgtgctccagcctgggcaacagagcgagaccctgtgttgaaaaaaaaaaaagctgggggtcagggagcagatagaagaaataccttggccagcgcaactggaaagggaggagccaaaaggggaacactttcttgattgtcccagcctcattaggagctaccacagggctctcctgcatgctcctt

SEQ ID NO: 1808 - DNA, 1046 bp, Homo sapiens
ttcattctctcccaatagatctcatgtctaacactactctaactttgctcccctctgagaccagcatgaactccagttctttctaaattgtgtaattctttttttttaaaattaattaattattaattttaagttctgggatacatgatgtgcaggtataattctttcttaatagattctgagcttgaccttccagtcgtcttctactgctcagccacacccccctccatttttgtttcttttctctttcttcgggcaaatctgcaattgtgggcgcatatttaccttgttattttttacagtattcccatgtgaacattttgccagcggcctcttcttaattttagtcctttctggggaagggttaatagttcaaacccattgtttttcttttgagggttgagacttgttataaaagctgcctggagtgggactgtccctcaggaggggaggggcacaggcctggcatggggataactgggaatggggtttggacacaggatgcctggcgactgtagggacacttgtctcatttcttgctctgttatataatataaatgcttagggaagcttagattcaatgggttgtgcccttccaaaagcctactgctggagtgaaaactggaaatacatctttgcatatgtgttctttcattttatttttcctactggtttgctaagcaaagagctggctttgtacaaaccccctctccccgctttttttttcttcttttcttaaaaagcttctgtgctcttttgaaacaagccaacaaaagttgaagccagtgtgtgtgcaactcagacctcatgagcaattcttttccaaaccaaattttaattcacagctgccagtttaggggcaatgctaagacccaaatcgtcctggcatctgaagcacctgtcctaatgttgagtactttaaatatggtgttcccatttcctaaatctcaatttagtctgtttggtcttacaattgtgagtataattatgggaaaatttaaatgggatacttgagtcaggactgtgttaaaaaatccaagatgtat

SEQ ID NO: 1809 - DNA, 1051 bp, Homo sapiens
tttctgccctcaaaggtacttgtggaatgtttgccgttaaacggttgtaaattaagggctgagtgtatgaagcgttaatgaaggctgccattggaaccagtccacgtcccgtcccggctggcaggtttgctgtccaagaagtctcttgctggaggcctgagttcctgagtgtcgggtttcagctctcctttcttcttttttcgtcttttcttctgcagctattttttcccctaccttccttataatccgtcccttcccttccttcttccatacccactccacccctacccctttggctttttctgaaagtaaccatgaggaacagagtcagaatgaggctagggaagcagcatttttttttttcttttcctgtagaaagcagggccaaaagggtgcattttatttttttctgcttttccttttatctctttgtgtttgcttcatttctttctctttaagtcaaggttgaaattgatgtttgcaaaagacaggaattttgaataactgcctgagttaaacagaatatggagaaactttgactctgtcccatgtattaaaaattaaaattagggcaaaataatgcggatttgtcctggaggacctggccagatgtagctagaggactttcacagtgctggtataattatacctggatatgggataatcttcactttaagcaactccattatgtgaaaatacagatccacagatacatatacaaataaacacttccaaaagaaatccttgtataattcaatgtaatatgtgtttttaagctacaatatgtaagccatcaaagtactgcattatttttagataacagacttttcagtttgtttaaggtgtgattacctttaccaaacatcatttctactcaaatagaatgcttacaataaactgtatggaggatacctacataagtcatgtcctgagtttatactatttcctagagacatctcttttatacatttcaagttttaagtttagtctgatgttttatacttttcagtttagtacctgaattgtatctatctatgaaataataacagat

SEQ ID NO: 1810 - DNA, 1513 bp, Homo sapiens
tggggggacttctatgtgaccaagtttgtcttctaggctagcgtttagccacctctcgtagctctggtttctctggctctgctcgagcagtgctgctggacttggtggcgggaatagaaagggaaactggctatggcttccttttacttcctgcctcttcctccttccctcaccccatgatatctgtacctaaaaaatgtcagaaaagtcccatttttgtatttacattttttttttgtgaatgaaaagagacaaaagattctagactggaaaggtgcctggcactcagctggagcactgccctaggcggaggaagagatgcagaatatgatggggctcccacctctgttcccgtcttcctggtccctctccccttctggaggtgactgagttgctggtgtctcatgagatgtgataaagcatcctggttaagagcactggagatagtatccagcttggctttccatcctgttatgaattggcagattaaccttggacaagtgatttgaactctgcctcagttcttaatctgttgagtatgaagaaaaatagacctacctcccagggttattgggcagtttaaatgagttaatgtatacaaagtatttacatcagtgtgtggcacccagggatcactgtatgagaatttcctgaacaacaacaacaaaaaaacccttctagaaatatttttacaaattatgaatgtattttcctaattttgaaaatacaactagtagaataccatgaatactgttctgcaccttgcttttatttatttatgtatttagcttgtttcttagcaatgtcaagccttatgttccaatttgtgagctatagtgttttgttaccatccctgtaagacaaagcatctaaagtaatcacctaggtatgcatacggaaaacctttctggactgtcagggaaagcattttatcccaactgccctgaacttgtcactcttctctgagcaggtcacaccccttgctgactcagcctttgtactgtgttctctgccttgaattcattctctcttctccacgctacctggcaaactgtttttcctccttcaggaatcagctgaagtatcaggattgccgtaaagctattcctaactttctccaggctctcctgtgagcccccctagcattgtgtgtctgtctgtgagccagccttggcacacagtgttgcggttatgatctgtgtatatgtgcacgtgggggcccagagctctcccacgctgaacaccagcaattagtacagtgtctgttacatagtcatgctccatgtttttaacaaataaacaataagtactttttggtgacaacatcagtttccttgtcttccttctcttctggtgagagtgtcttgaggtagaaacgaagaaatctgactccaccctagcacctgaccaaactcttagtcccactccaaagcatgctctaagctggactttacctgggggctgcaggtagattgccccttcagctactctgtcttctcctggaacctacagt

SEQ ID NO: 1811 - DNA, 1024 bp, Homo sapiens
cagaatcactcgggaggcaaagtacaattccgttcttccttatgttgggaccttcggtgattgggtcctccttgtgtgtggaagtacatgaaagaaggatagacaaaattagagcatgttttcgagaccatttggttcagcctctctgattttacaaatgaggagagtgatgcaaagtgtggttaagtgactataccgaggacacagacctactttatgacagaggcttgggagccagattttaggatgccggtagttctaaagtatctagctgtgctgccgtctgaatttctggttcactccatcaggtcagcccatagacacctcctttttcttaggtcggacctatcttattcgtttcctcttttgttctctgcagctgccacccccactcctacctcccctattctctatgttgacatgtgacttggggcacttgcaacgtccctacctaaaattgatgtttgccacctggctgctgactggtgcgctatgctgcttcactctgcctgtttcaaccctgtgaaatatggaagcagatcataaaaaaatggactcccacacattttgcagatctaaattgggccttaatataatgtacttggttatgacaaacaggttttctagggcatgaccggcagcttaggctggcttccctggtcatgtcagttgaattctttttttctttttttgagttgggagtctcactctgccgcccaggctatagtgcagtggcatgatcttggcttaccacagcctccacctcctgggttcaagcgattctcttgcctcagcctcctgagtagctgggactacaggagcctgtcaccacgcctggctaattttttgtgtttttaatagagtcagggtttcaccatgttgaccaggctggtcttgaactcctgacctcaggtgatctgcccacttcggcctcccaaagtgctgagattacaggtgtgattcactgtgcctggcctcagttgaactctttaagattattcaactctttccttaattcttaggt

SEQ ID NO: 1812 - DNA, 1050 bp, Homo sapiens
caacatttctgtaaaaagtggctgtagccatagtggagacctcatctggcaaatgtggacaggtggtgaggctgtacctccaaatttcttaattctttttccaacaagaaggttggcttgccaattctttgatcaaaggtaggagtttctgtaatctgttctcttaaccacatttgggatgcttgtatatatgactacatatatttatatattttttatgggcaatattttgactgtttctcttttgaaagacagtgcgaatgagtatgccaaaaatcacagatgatatgagaaatgctatcaataaaagcattttttcagaaaggtgaataaagtaaccccaagataacgtaaaatttttcctaatgttattttgcaaagtcattagaaaacctaatgcttgtgaccaatggggtgatgctcgtgggacagtacgtggctgacgttgtggttttcactgggcaaaataattcagatctacgagtcttttggcatgggcatagacagaaagattgcataatttgttcttggatgacgtgaaaaagaaccctgaatatatttttcgtttctatgcttccaaagtctgagtgggatgttttacatggatgggtaagatgggattttaggagacagataatgctctgttttagatcttcacttggtctttccaacttgtaggggtggtgtggtgatcacctatttgactagtggttatgctgttttcatatttaagctgcctgtagcaattcgtgatttgctatcagtacatctgtcaatctgtaatattacactcaatatcattcttcttttacccaaatatttggtaaaagagaaagctaacatgcactaggttcctaccaagcagataagatgagataatctatgtaaagtacatagtataaccctgaaagggattattagtcccacttgacagatgtggaaaatgagccctagagagattaaataaaatagaaccttctatgactaagtgactaaattcaggtctctgatttcaaagcccatactctttcctctgagttgcattgcccc

SEQ ID NO: 1813 - DNA, 1050 bp, Homo sapiens
aggcatcttatttcagcttggaacaaggtgcatgagcccagcttgtttgttgcatgtgggaagtgtatatttttagttgccttgtagagtggctttccacctcatttatgaaattggctttttatttttatccttttctctttttccctttcaccagagttggaacgtgaagcacagtttctacttgctgacgtagtatttcctcttgatttttagtggggttggggtgttttatgagtactaaggtcacattgaactttggacacctagtcaccttgttgctggctgcagagaagagcttgagaaggagacagaaatcttctcgtcttctcatcatggctttgacaaatgcccagggagactgcaactttcttctcaacttggctgtaacactggagcccttggccacttagaaggcctgagtttttttatattttccaccaagctgctgattctaaactgtggtggggtttctttcatggccagaatggggagaaaccgtgggctgagttggggatgtgtggtttgtgtgtgtttatgtgtgatcactgaagtgtaggatatggtaggaggatggcttaggacttccattttggtttcttattacacagcaataaagtaaatggggcttagtataactttgcacttatagaaatgtagctcaatttaagaaacaaaactccgccaacaggagtgctcagtatcttcagcttgggaaactgacctcgttaattttaatgaggggaaaaattctccagctggggctgagaagaaaatgaaataccaatgaggttatcactttggatgatctcactgaattcagactatacttggaacgatgcttggagaattttctaaaatcctatggagagatttagaagaaaatgcatatgcccttgatagtattgacagactgctttccctgataggcagagccgaactctatatagtgcctcctaaaggggtcatttgaaaagttaacatattaaaaagttggaccaaagtaaaactgagagaaaaaatggattaacgtgattcttatgtgggtct

SEQ ID NO: 1814 - DNA, 1540 bp, Homo sapiens
aagtgccacataaatattggtctaatacatatataattatgtaactctagccaggtagctggattaaatatgggtaacagcaaaagcacttctgtcctgataaaagtctcagttacatttaaatacttaatataatcagctctttttcaagtaaacaataattcaggaggcaaatgttcagtacatctcatagaaattttttgtcttaatttgtttgcctgtacaatctgcattcttcttattaatttaatccatattttgaagtcagaaaagaattcatctcatttgagttagtttagatcaacatactgatattgctgaatagtttcacttccctgaaactaaacatatctattcctttcgtcttagacaaattatgaggggaaacctgtctgaaatttggctaacacatggtgtgcatttgatgccactggaggatttgctttgtcaatttaagattgagtgatggctatagaggaaagtgacggaaaaaaaaaaccttcttaatgtgaaatagaaagtataaaggacaataaaatgctaaaatgtacaggaaattcttgtaatatgactaataatgtatgagacttgtagagatcagttctgctacaggtattcttatgttatataaatgatattataatatcctattacatatattatattatcatactataccaagaatagataatatttttcatcaactggtgattcaagtgtgagtttatacatgggttgactgtggattgtatatatgataccaagcctgtgtaaaataaaacaaaaacccccttcaaactcccatatggagtatttgactaaagcaataatattaagataacatactctattccaaataaggatataatttgctgtttgataaagcaaaacaaaacaatggagtgtattggtactgttttccacagagtgggaagataagaacacatgtagagatgataaaatgtcattggctccaagagacaagcttccgaaatccatggtggttgaagaacatcaaagaggagcaattatttcagtcattagggcagttccacctgttctaattgaacatttttaggatgtagaagatgcatcatacattggtatctattcagaaggtggggacatctgctgtctgtcatgtatctgggagatgtttatctcaacaggaggcaataataatatggtaaaccaaacctaatattatcatgatgcattaaaactgggttaattgaagcaataaaatcaaagtaacagtaaatgcttatacaacatgttaagtaatatttacttcaatcttagaaatgaaatgataattttacattctagcagatgtatttcttgatacctgttctgagaggacagaaacaaggctcaaaattcatgcaagaggctaataacaacttagttgatagtaaaatatggagcattggatgtagagtgcattaaccttcttgtttaatctgagttgacctataagtgggcatattgttttttggggaatcgggagttttctcaagtagaaagaagccccactttt

SEQ ID NO: 1815 - DNA, 1024 bp, Homo sapiens
ccaccgcgcccggccttactgcttgacattttacaaaacgccatcatttgcaccatttacaattttgaaggtgctgtgggatccttaagaaaagtataagaactgatctctgccttaggggaacttctagtgttcagaagaaaagactaaaatatgtaaaccacagatgataatgttcaatgaagttgataattatgtggcatgggttaaaagtataatgatatttcagagacaaaagcagtggtttggggttcatgaaaattaaggttggcttcattgagaggaggtagggatggggtgaagaaatggggcaggaacagatacatagaaatcttagtgtgtgcagggtggggacacatggtgtagtaagaggggatagtagccagcactaaggaagcacggaagtactttggcaagggaagagggtgacaatgaggggattggcttggccgtgatgcagatttgaggttacagtagtgatggaataggatggcattagtagggtcagattatggagaggaggcaaagggaattttaagtaggtaattcacatatattttgttaaaaaccctatccatttagtattattggctccattttaaagaaaatgtatgggtagtatgcacacccaggtctgtctaaaaccaacctcttttcaattcaacatggtaccttaactcaagaaaggatggtaggcttgatgtgattggtagtggggaatcattgtgggttcttgaacagaggagatatagtgaaagggggtgatccaatggaattgtttactgcgcatgtatccatatgtttatataggatgaggatgtcctttggtggaacagatagaggaacaaaagacgcaaagctgaaggccatatgatggactcagctcctgagctctgcattccttttctgtgtacccaggagccgccagccctgtttgtatccacacaaggctctctgtgtatcacagccagcatagaaggcataatcctcctcgggtctgtgtctctataatttatgatgcttt

SEQ ID NO: 1816 - DNA, 1067 bp, Homo sapiens
cattccaagctccaggggagacctgtgtggaggtgcaagaaggaggagctctaaggttattttaatttagatttatctgagactccagaaaaatcacgtacgtggtgtggaaattatcctcacataggcagagggagaaaacactaaattcatattctacatgtatcttcttgtatcaagaccagtgttttcagaaatgagtttgccaataaatataaaaaccatccatcggttttcttcccaatactcattcttcccctaaacgttacataggtttttatactcttaattaaccacatccaataatttgtttcctaggctgggctagctggatgatgcctttttatctggttaaagaagagtcaccaggcaggaaatgatggtagagagatggaagactacaaaacccttgccaaattctgcactttttgttagtttgtttgcactgcggaaggatgaagacagtgagacagttactgagaccatcggctgctgtggacatcacagtgggagcagtctactgggtgggaggggtgctgtcaggtcttggggaccttagtaggagacaagtaaaattatgatgcagtggaaaggctcctttgaaaacaggtgatgggacacagtgtatgcaatcctgtgggcttttgctgcaagtaggcagacccctttcgtttgacctttttatttataaagtcacaatctgagatcatcagattgtcaacaactacaacaataaatccaaggtcattggatctgaaacccaacacctgtattgaatcttaagaaaaagaagacaggttgtattcatttaagcattgtctaagtaattaggagacaaaatttgctattatcgtatgtttcacagttatgttctaaatttatgcacctgtgagtagcactataggttttcattaatgtttgtgttctcatttgatctttataactaccctgtgaaataggtacttaggacaaacattgatcacccctcattttaaagatggaaaacctgaggctcagaaaaatgaagctcacaaattatgtcttatgactccaaactcctgctggtt

SEQ ID NO: 1817 - DNA, 1071 bp, Homo sapiens
ttttttcctttgtgctcaggtaatagaaaatgaaatttgtatgtatgtttataacatgtacatttatacctgtatatacatattcatatgtatttttaatcatagggaatgaacactagaaagtaaatgaaaaatgagttgaaaaactaagcatttaaaataaatcaattgacttttgatatattaagatattaatttcaaggttaattatagcctcctcttagagatacaactgttcaaagatacatcatcacagctgattgtcaggcctagatgcctgtgaggagagagactcagcttcagtaacctgttgaagccagaacatagaaagtaaatgaaaactcaattgtaaaaacattcattagtttaaaccctagacactggggcctactttagagtggagcgtggaagaggagtgaggactgaaaaactacctatgaggtactatgcttattacctggttgacaaaataattcatacacccatcccccatgacatgtaatttacctgtataacaaacctacacatgcacccctgaacctaaaacaaaagttaaaaaaaaattaaacccttttgtcctcaatgttttgatatttggtcccgggaactcaaatttgcctttgtcttaactggtaaaaatatttacccggaaatgaagaaacattaaatacactaatatgtaaagacttcagagggaacgtttaagaatccaagcaatcaaaatagcacctttaagtatttctgtagtgtatgctgtaagtactctataaaaatgtattaatatgtcttgttaaaatgccatttacatacaatggtaacataattataattacacgtctttcttacagatttattaaaacagatgtgatctaccaataatgttttacatctgatggaaagaattggaatataataatcctacttttctttaatgcattactaattcagacaggcccttctggttgttctgaattggagagagagcagacacttcagttggatttggaatcatccacttttttttgcaggtatttcgaaaaaagcctggttttggtacagctcttccagaac

SEQ ID NO: 1818 - DNA, 1051 bp, Homo sapiens
aactagacaagaagagacgtatcaggaaccagttcctccttgcctccaggtatcagacatgctagatcccagttggtcttaactttttgtctcacttacccctttggttggaatgcaggcattattctgaagctttgtggtaagcgacttggattttctagtgtcgggctcttctcttttttaggaagggagaagcgggtctgggaaattaaagtgcctgtatctcccagggcaccgattgttaagagggttgggacctcagtatgttttttttccattctgccacacctgagatagaaaaaagaaataccacggtccctcgggtagcagtagagggtgagagcaagactcctacctctgaatgccgttagatttagaagttcattttgactgctttacgatacaaagttgagtaataataatggtcttactggtataaataataagcacagagtgtttcatacatatcaaagcaatttcgtacattgtagttctcattctttgagaaacagccttgtggggttgaacagaaggaattacagaattgtgtttgacggtgttgagtgagaaatttttagctgtttttcttattttgttccctgttccctcatttttttcttatcctgagttagtctcttgatttacatctcggcattcaggactcaatgttgccagcctcccgcatctgaagtagctgagagccaggatgctagcagaggatatctgtgtagccaaactaagggcccatgtacttaagtttgtgcagttgactcatcagagcgcccaaaagccaccactcaagacctctgatttcaaatatgattctaattgtatgtttatctggcttcctagcctgtgccagactatatacatgataatctctaacatttactaagtacttactaactgagacactctcctaaatactctcaagcattcactcaggtaatcctcacaaccacactagaacacgaggtaccacaactgcctccattttacatgtgaggacagagcacaggggggttttgaaacaaggtcccaagccagtagt

SEQ ID NO: 1819 - DNA, 1058 bp, Homo sapiens
ttattagtggtactgtgacatatgactgagacccacaaccttttggtctatattaaaaacctactgaaaagtaaataatttgtaaactttaaccacatagacaaagtgcatgaaggggacatggagagaataaaaatctcttacagacatatgtttttccagtgggcagctgctatttaagaacttttaaggtgcacatgagtacacctttgttaaaaggtatagcttgtatagtaattccgttctgggggttgcggagaagagcaggagggagcacagtgtgccttgccctggctggcagtatgagacaattaccacgatgaggttttttttttaatgttctccatatatagattaaaatgtttgttgcctgaactgggcatggagaaggcatcataatgtgcacctgaacattcatgtagggtttagtgaggagaaaataagaggataccctgagctcacattcatgggcatgggctcaagctttttccaaagtcactgagatgtcattgtattgactcagccttatttgcattacctcattctggtagaactgctatgtttatagacatcatttggcatttacccttccacatcagagctttcatattggagttgactcttcattttgagttgaccaaggtgggcttcagtgtgagtgagtgtgtgcacttgtacagatacaccataatctaagaatcaccctacccccatgaacagggtgtcacgcatgtgcttgactgtgtgcttctacagtggcaggtagagtgaatgcagtgcaggaaatatcagcccttttctaaagcactatgaaaatgaaagggggaggtggttgggggatggagaggacagagggggaaatcacttctttgtctaaaagggaaatgccaggaccgtcccttcaggtctgttaagtgtctataggatgaggaggaaaattcttcttctcgttgacattgtgtaggtctgtgtgtatctgcatatgcctatattcattatgactcatcatcttactctcatggtcttttggagatactttgtctattctggagtgcaga

SEQ ID NO: 1820 - DNA, 1008 bp, Homo sapiens
gatactctgagaagtagtcacggtactcatggggcctgctacttcataatgtcagtgacgtggcagacacaggaaggctgcagcacacctaactttgttggtcacttttgtctatctgctactctcaaggctccatttgtctctgttgtgtaactctgagcaagctagtcttctttctaagaaagtggaagctgatcagcagaaggtggccatggacaaaatgggaagcaggaccgctggagaaataggcccagttgcttatttcaggaaatcctctagtcttgttcactcgaaattgtgcaaggacaaagctgggtccattgaaacagaaagcataagaaaacaaaaatagaaaaagggggaaaaacactttaagttgaataaacaactgctgagccaactcatgagttcagcgggggattctcatgtttccaggatattttcagattctgatggcaactcgggaaagaccactgtaaccttgaactttgtcagaggaccgagtttaagaccaccaagacatttcacgcagaccacccactgcaatttcttgcataggtctgctggccagtctcttattaatactgcaaggcaacctaaactatattttgttgggaaagtggaagagcgaaggcaggtgttgaaaagccatgaaaaaaagaattaaaacaaaaatgtgcctcaggctcctttcagctggcagcagaatttccgtcatctttcccttttgaatttgatattattgcaggaacattaccacggactcaattttcacttgacagtgaaataccagaagtcgtctcgggtccggagtgctgtctgcatccagtccctgttaatctgcagaaggaaagcatggagatggggtgggtggccaagctgacacaggcctcttcaggctgctgggaaagggtgctccctgggtgtgaggcccaggagtccctagaattgcatagatgcagcagtgagcagcccacctgggtgtgaatcatagacttgttttgagaa

SEQ ID NO: 1821 - DNA, 1050 bp, Homo sapiens
taacatctgctgacataaacagaagcccctcaaggataccttctgccagtgaccaaaccgggggctcaagtgaagaaatattatcattagacctgcctccaggtctagctaatgtcttattcagtatgaatagcagtggcgtttgggcagggaggtgatgagatgcctattaaggtaacagaggtgtccaatggaacattgcttgtttagccttatgacctctgtccaagggagggcttcctctgtactggaactgtggttgacttagggtttctgcggtttccttcctgaggtatatttacagtgactgtgccttcattgcaacaaattttaggttcatcctcttgagcagggggaaggagcctctctcttcagaagcatgtcaggatatctttggtaggcatcatgttctgtttacttgaaccagtgagaagatggccgagcaagcaaggataagtgtacgtgtctataaaggtttcttctaatcctgcgagtctgtaagcattctagggttcatcggaaactgtctactcccatttctggaatttgcctcttggcatcatcatgcagggggctttttctagtcatgctttgtggtggaaaggtcagctgagcacggaggaacaggggactcactgcttttctcccctttgggcccttgagcaggcatttgactgctgcatatgaacctgggagccatggggtcttaaggctttctacttgattctcagtgtggccagaattctgtttagggcactgctccaaatctcggtgacactccatctgtaaaattgggtggcagtgtagtgtgtgtgtgtgtgtgtgtgtattttcttatacaggactggaagagaatggaggaagaaggataatgacttaaaagcgaaaacaattgaattctttgagctacagtgctgtgtcctgagagtgcagttattttccactgcagtaatgctttcaaaaacatttatctagcttctctcactttctcatttgctgtcattggtgtgaaaaatcgagttaccagaaggttcacccatgttccacagg

SEQ ID NO: 1822 - DNA, 1051 bp, Homo sapiens
cagaaattgaatggtcatctatcaagggtgtgaaagaagatactttggaatatattgtttttaaggttcattttaactttcaacactgaatgctcctcttgaccatctgatcagtatgtgctttgttgtgacagtatcctatcatgtacagcacggaccctgaaaatgggcacatcttcaactgcattcagcgagcccaccagaacacgtgagtgtcggccctgccgggcaccaaagacatctgcagagtgggtgttttctgtctaacacctcagcccttagtgcgctgtatttgctgagtcatagtgatggtgacaatcatgggcacctcattaaaagtattcaaaaattatgtatgtgaacacattgactattaagcaaacttaagagtggttggaatggtgggatttcgggatattcttttcaaaaaatgtcttcatggttgcattacctactacagttttgcagcatgacccatctaaaccgatgttgactctcccaggcctagggagtgaagaggttttgaatgctgtaaggaaacccactctgactcaccaggaccttccacttccatttgttagatgtgaggtccttttactcagcatgttccaagtgacctctaatcccatgcagagcaaaggagggtggatgatagtgaccaggtcttctccctgcggtgaatgtttatttttacccccaagcttctaacttggcaaggaagatgtaaagattcatagtgctggctgggtgaggtgggctcacacctgtaatcccagcactttgggaggccgaggtgggtggatcacttgaggtcaggagttggagacaagcttggtcaacatggcaaaaccccatctctacaaaacttagccaggcatggtggcacgcacctgtaatcccagctactcaggaagctgaggcatgagaattacttgaacccgggaggcggaggttgcagtgagctgagatcatgccactgcattccagcctgggtgacagagacactccgtctcaaaaaaaaaaaaaaaaaaattcataattctacacaggc

SEQ ID NO: 1823 - DNA, 1060 bp, Homo sapiens
gtgacttgagggactggtgttattttcatttgtttcaccctcctgttgacatttaatgttacccaaaatcaactcaaacaaacaaaaaccctgatgcagtaaccttatccctaacagtagcactgctgagtgggaaagacactggggaaggcggccttctcacatgctgtcttctgtgttctctccttgcttattttaaccaaggaagtcaccccagcatgacagccaaagggatggatttttcatctaagtttttattctctcttctcaaggacattgggaacagggagacttttccctcgaagaccatgtattctgggagaagcgctccccttctttctagtggagctacacccccagtgtagcctgcagaaccacctgagcccagccctgccagtgactgacttcacatagaacagcagctgagtcttcagtcaatctcatgctcagaggcccatttgagaaaacggcatttcccctagtcctgactttggggcagttctcttttctggcctgccctgagaccggctggcccacatgtccttctcttgagctctgacacaagttccccaagatgcccagggcaagtggggggattccttctatcccacctgtctaggagaaggccaatactcatctcccaggtccacaagccaagccattcatagaagaatcacagatattttattttcccgctgaaactaacttaattctacctaatttgcgtggggagtagttggccaaatcatcaaattgttaactttttgctaacatattgtgtaatcaaccctaggtgttaaaaaaggtttgcttgtttctttcatgcaaatactaatgtagcccttttttcttagcgtatagcttctggcctgggcttggcctggattgttggacgagttctttatgcttatggctattacacgggaggttagtatatattgacatttgccaaggaaacaactttaaaattttaaatcctatgctggccaggcacagtggcttacacctgtaatcccagcactttgggaggcgaaggcaggcagattgcttgagctcagga

SEQ ID NO: 1824 - DNA, 1050 bp, Homo sapiens
ggctggtttggtccttttgctgcttttctcagagatggcattgtgtgttttccgtcacctcaaactgctgccatgatctggcccttcggaccttcttccctttcccccttactctagctagtccagccagacccactcttggcatggcaggctttcccccagccaaggatgtccgcatttgctgtctgctctgcctgaatctctcctgcttgttcactgagccatgcctagcacgatgtctggtagaatgaagaagaaaccctgggtcctgctgcctccagtagttcctatcctgctgcctttcctcaggctgtatttcttctttgttccttgagtgtctttgaagtatggtttctgatgctcactctgtttgtggtcacctaccagttcactacatagcatttgctttcatgtcatttctttgtcaaatcttgcttttatgaggttctgtgatggagacagattgtctttgggaatttcactgctgaagacctgaccttttttgctagtgggctctgtgatggtgctgttggaactacttaaggtctctaaatcttagacttgtatttcagtattttaaaatcaataaaaaggggttgagagtatacttttatatgtgagtgtgtatgcatgtctgtatgctttcgtgtccattaaaccatttcagtcattaagctgatttgtcatgaaagcattcgatcttttcatcatatatataaaatatataagtataacccatatataattatgacatacaaaataggaataaaaaatgagaaaaaggaaacatttagaaacataatttctttaatggtataaaatcttttgatactaaaatattttttatttgtgactgaagattgaaagacgttttatttttaaaaatcttgtttaatacttggtgagtcttggatgaccttggtggtgttagttttggtggtcattcaagactgaaggttttgttctaagtttagtcttctgaatttttatttaatgattatcatatttgaaaaagttacctctaaaaagatccaagtagaggaaagtcat

SEQ ID NO: 1825 - DNA, 1653 bp, Homo sapiens
gagtgccaggtggggctggcatttaaactcttggcttcagagtccaaaaaacctactctgctctattgagtctcagtgcaagcctgaaagggcacgtatgccttctcctgcagtgcctgcacctagaacggctccctcctcgtagttgacattcagtgtggatgaacacgaggtattccaagtaagaagtaaaaataaaatccttcagcacctgtggtactgtgatataataagaaatatgtgtttggtctctgccccctcattcctggcacagagctcctaaaaccctgtggataggggcactaggagaacctcttgttctaatatgttcctgacacagagcaccctcaaacctttgtaatttcctgggtgataacagagctcctaaatcccttagaatttcccaggtgataggagcatcttttgttctaacaagataactgtggtgggctcctggatagccaggatggtggctggttgctaagggaacgaaccgcgtgattacggtgttagaactttcagccccatgcccctgacctctggggaggtgagagggagaggggggctgaaggtcgagctgatcactaatgacagcattgtgatcaatgatgcgtatgtaacgaagttttcataaaaacccaaaaggacagtgtttgaatgagcatccagatagcagaacaggtgggggttcctggagggtgactgcctcgagagggtgtggaagctttgcacccttcccacatgcctcaccctttgcgtctttttaatctggctgttcctgtgtttcctttataatctttataataaattgttccctttataataaatgggtaaacataagtaagtgtttctttgagctcagtgagccaagctagcaaattaatcgaacctgaggaggggtcatgagaaccctgatttaaaaacctctgtcagaagcacaggtcacaacctgggacctgccattggcatctgaagtatggggcagtcttggggactgagccctcagcctgtgggatctggcgctctctccaggtagatcgtgtcagaattgaattacaggacatccagctggtgtctgctgatgaattgattggttgctggtggggagaaatcgccatacgttttggtgaccagaggtgaaatattctgtgcacggtagagggtaggaaaggcactttggtttttttcctacatcttcttggcgcactcttcctcagaggttagttgctgtaatttgttttcctcataaagcttttccttttcaattacaaatatatatttatgcacagatgtagtacttataaaatgaatgttacctctcttgggaaacagactttttttcttcgcaactctttggagagcatgtcccttgaggtgtgacattattttagctgtgtaacaattaactggatctgagttgttttacatcagctaaatatcagtctccttgagatttgggaaatatttaagtctcatcagcagtattttggggaagggggtgctcctgcagacagcagctgctgttttctgtttgtttgttcattgattgattgattgagacacagtctcgctctgttgcccagactggagtgcagtggcatgatcactgctcactgcagcctcaacttgctggacccaaacaatcctcctgcc

SEQ ID NO: 1826 - DNA, 1103 bp, Homo sapiens
agagtgggggaaggggcagagcataaggataaagggggagttgtggttttgtggatctcaggtgtttaccaatgaactaggtggaggtggtcaggtggtggagagcttctgttctgagaacctgaccgagaggcaaaacattgtctctatgtagtgcttggcacaaccgtgggctccgatctgggaaagagtggactcgggaccacagcagatttctctatggggctgcagtcaatgaaattgtcctgaagcaagcctggtctagggcgttctggcctctaagattgagagggatggtggacagggcagtgggccagaggtgaagtgagatgaggaaggccaagcctttttctcctgaggaagccagtgctagggcactaattatagttttacacaatgccagcttccagcctgcatagagaaacatgaaatttctgcttaaaacagagttcctttttccatttttggctctaaactttttgtgttggaagttaggaaccaattttggagagtgattgtagtgagggaatctggaaaacctgcgaaaatggagaagctcattttaggcaggaaaaatctgtctcttggaatgagtagcagagggttttcttgctcaaggtagttttcttttctgttcttggtgtggtgcctgactccacatttttcacccagctcttaaacaggttttgctgagtagctacaggcaagtcatcttctctgtaaattaggtgtagttaataacacctgttactcagagagtgactggattaacaggtaagagtttggactggagtgacccagaaatggtatgaaatagtgagaagaacttgagatcgctacgtgtcccagagaagacaccttccttagatctaagttgaggagactgaattaaacagcctttgttcatttaaaaaactgtttttatttttatttatttattttgagacagagttttgctcttgttacccaggctggagtgcatgttgtgatcttggctcaccacagcctccacctcctgggttcaagcgattctcctgcctcagcctcccgagaagctgggattacaggcatgcccaaccacgcccggctaattttgtattttt

SEQ ID NO: 1827 - DNA, 1028 bp, Homo sapiens
aatctacccatctgacaaaggtctaatatccagaatttacaaggaacttaaacaaatttacaagaagaaagcaaccccatcaaaaagtggagaaaggatatgaacagacacttctcgaaagaagacatttacgtggccaacaaacatgagaaaaagctcaacaacactgatcatcagagaaacgcaaatcaaaaccacaatgagataccaccacacgccagtcagaatggcgattattaaaaagtcaggagacagtggatgctgacgagactgtggagaaatgggaatgcttatacactgttggtaggaatgtaaattagtgcttatggtttttaaaaggcttccagagcaggggacccatatatttagtcccatagaacacatcccttaacctgcctcttagcatttcatctatccttccttatataagttctttcttctggagttgggacaggaggtgtcttgttatttgggtagaaaggagaaagaatgggtgggtatgtggacaaacggtgcagggaaatagatagcatgggaagtgttgccacagctctatggaaactacttggatattatgattaatggatagtcaaacatctctcaaataaatatcaaagagtgatcttcccttaaaggttattgttcccaagtttatccctctcttggtgccctggctctggtttcttttcttctaagttgcccctttgattacttgtcatgtgaatatcaaggcctgatccttcctctgtgtgagctccaaggggccgccttccagtggagctttgtagaatcatatgtgtcatagagaacaggttttaatgctgggctgctgttaggctttagcgctagtgctgagaggccccacaaagagctgaacctactgatgaggcctctcccaaatctaatcagagatgggggaaaatttgggtgctgggaagagcagatcatctcagtgattttaatgcccacctttatttgcaaagtgaaaggagaaatatatttccctattgcatttcctacccttcact

SEQ ID NO: 1828 - DNA, 1028 bp, Homo sapiens
attttagggggacacaggcatgccaaccttagcagcaacttttcatataatttgtatcctaaaaacagtaaaactcggccgggcgcggtggctcacgcctgtaatcccagcactttgggaggccgaggcgggcggatcacgaggtccggacatcgagaccatcccggctaaaacggtgaaaccccgtctctactaaaaatacaaaaaattagccgggcgtagtggcgggcgcctgtagtcccagctacttgggaagctgaggcaggagaatggcgtgaacccaggaggcggagcttgcagtgagccgagatcccgccaccgcactccagcctgggcgacagagcgagactccgtctcaaaaaaaaaaaaaaaaaaaaaacaaaaaaaaacaacagtaaaactcaatagctctggtttattgactgtttattacatgcctgctaagataggcattccctacctggccattttacagatgaaggaactcaggttaaaggaggttaacaaccttgtccaaggtcagacagcacatctggattcagacatcagcttgtgtgacttaagcttatttttctcttcaccatgccagtcctgcctctagcaaaatacacgcagatttcatgataccacttttaatttcagcaaattatgttatcattttcaattaactgataattagctggcagtccttggaaggtagaaggagttctgatggaagccctcatcgttttttattctttcatgacttccacttgaaggtccttgcttactgaaatggaagccataagtcctctcgtcacccttggtagaagggtgctaaatcatccttgctaaatacttgacggaaaccatcagtcatctcgtttggctctcatcaatctctttgttcatatgcacaggctcttaatctctgttttccctttctttagagtaccgtagtctcagatgataaacttctctgaagctaatttcttcactgctgccctggagtgtctcttcatgctgcattctaaacaagtgaagagcaa

SEQ ID NO: 1829 - DNA, 1041 bp, Homo sapiens
ggatttttggaatggtaaatgagcattgacttcaatttaaagtcaccagttgcattagcctctaacaagagagtcatcctgtcctttgaagctttgaagtcaggcattgacttctctagctgcgaaagtcttagatggcatactattttaatagaaggctgttttttctacattgaaaaaatctttagtgtagctaccttcatcagttattttagctagatcttctggataacttgctacagcttctacatcagcacttgccgcttcatctagcacaatatgttagggatatggtttcttaacttaagcctcatgatccagcctctgttagcttcaaacttttcttgtgtggcttcctcatctttctcagccttcataggattgaagagagttagggccttgctctggattaggctttggttcaagggaatgttatggctggtttgatattctatccagaccaaactttcttcgtatcagtaataaggctgttttgctttcttatcattcatgtgttcactggagtggtacttttaattgccgtcatgaacttttcctttgcattcacatcttggctgactccttggcataagaggcctagcttttgacctgtcttggctttcgacatgccttcctcactaagcttaattatttctatccattgatctacagttagagacatgtgactcttttacttgaacacttagaggccattgtagggtattaattggcctaacttcaatattgttctgtcgcaggaaatcatagggaggcccaagaagagggagagagacagtggaatgccccagtcagtggaacagtcagaacatgtacattaatggattcaatttgccattttatatgggcgtggttggtggcaccccgaaataattacaatagtaatgtcaaagatcactgatcacagatcaccataacatataataaaataatgaaaatgtttgagatattgtgagaattaccaacatgtgacacagagatacaaagtgaacacatgctattggaaaaatggtattaacaaga

SEQ ID NO: 1830 - DNA, 1034 bp, Homo sapiens
atgctttgtgatttgattgtttatagatgttatgctagacccctgttgactccaatagggatgacaccatgtttgagagactgaagaaaagacccggaggtatcaaatgagacatagggtttatttgggggactcacgtacagagccgtccagtggcagcgggcttggcaggaagcatgctgctaccttttgtaaaaaacatgtagctcatatagcattttcatttagcatcctccccctggcagcctcccaaaacaaaggtctccatcccctgcgttaaaagggatagggcagggatttggatgtctttaatagacaaagactgaatctccaggttggccactctcagatttcttagcctggaactccaaaccaacactcttctcattcttaggatatgcttcagttatggctatcaggtgcctctgccataaaacaggaagattttttttttaacgtaagaattccttttcttccatctataggttgttaaaatggaagatttgttttaccgaggacatgaaaggcattgcagttgcttgggcattctagaagagggtgctgtcctttgccctggtgttttcttaggtggctgtggcaggaacactaactcttaaggaaatggatgctttttctttcctggtacataatgtatgaacactagtgtgttgttttcattgtgtagtgtggtttaatagtatgataatgtagttttgtgccgttttatagacgtgaagaaaataaaactaatgggcatgaattgatgaagttttcaactgagttaccaaaaaaaaaaaaaaaaagcttcctaatggactttcctggaaagatttgtctaaatgaaaatttggtggatcttaaagaagagaataatttttattgaacatatagtttgtgctagccactatcttaggcatgtagcttattaacacttatggcccatttgtggaacaggtatggttacctgcagtttaaaacaaggatgccagtgttctaagaggttgagttgcccgagatatcactggtatgttaga

SEQ ID NO: 1831 - DNA, 1028 bp, Homo sapiens
tgtacataaataaaagttgaagaaagtacatcctctgtgatttaaaaaaagaaattcaatatacccattaaaaaagtgacaggtgtattagttttctatggctatagtaacaaattactacaatcttgatgacttaaaatgacagattcattctcttatagtgctggaggctgtaagactgaaatttaggtgtgggcagtgttggcctcttctggaagatctgaaggagacccatgcctccgtcctgtctcccagcttctgctgccatttcttgtatcaccccagtctctactttcacctttatatggctttccctcatgtctccgtgtcttcaccttttctgtttcttagaaggacacatgtcatggggtttagggcccaccctaattcaggatgatctcatctcaagatatttaacttaattacatgtgcaaagaccttttttccaaataaggtcatattttgaggttgggggagttagaatatgatcgtagattttggggggcaacaatgtaactcacttataaatggtccactgacccccccaaaatttgtcctgtgtgcagaatgcattcatctcatcccaattaattattaacactgctttgtgaggaaaaattaagaattttgaaaagtgagaagctatacctctgggataaataaaaagacaaatggcagaagatggatagtcgctaatcttttttttagataaacattttgttttgagatagttgtaggttcacaaacacataagaaataatacagagagatcccatattacaaaagacaccgggatgttgacgttgatacagtgaagatacagaacacttccatcgctactgctgttttgctgtttattacctgccccggatttcccgcccctccactgctccctgtccctaaccgtggtccaccactaatcgttccacaattttatacaaatataaccatactgtatgtaaccttttggaattgcccttttttactcagcacaattctctggagattcgtgcaggttgttgtatcag

SEQ ID NO: 1832 - DNA, 1013 bp, Homo sapiens
ggcagaggatccaactggcacattgtgctctcttgatctattcagttttttaagaacggaggaaagtcagctttcgttttgtgtctcatacccagaaggacttcagttctttctttcagtccataatttctgtaataagcatattatctttgctcagtaaacaggtccctagcaagtgggtgggttttggtgtgtcacccaggacaaggggcccagtttgttgtttttcactatcccaacttgcctcttaacgctcaagtaaaaggggaaagaaatagacccagcctcacttgcacccacaagtcagtaataattagtcttccagcaggtctcctctttgtttctgcttcttggagagggcatcataagcagcagttcaccaaagttagcaacaagcctagatccattcagttttttttgggggtgtgtgtgtgtgtgtgtgtgtgtgtgtgtgtgtgtgtgtgtgtgtgtgatgtcttttgtgtttgtcctgtggggacaaatacaaagtaggatccatagactccatattcaggcttagaataaagactgaaattaatcactattctatatggaataatcttaattcagttgcgagggatacattgccccttgaatctcaagcatagccctgttttgtctttgcttggtggtagctgttaaccaggctctgggtgagcctagaacttggtctcacatgagcagtgtagatacctctctgcctttttgtttaagatgatgtagcaggctgggcgtggtggctcatgcctgtaatcccagcaccatgggaggccgaggcgtgtggatcactttgggtcaggagttcgagaccagcctggccaacatgttgaaaccccgtctctactaaaaatacaaaaaatttgctgggtgtggtggtgcacacctatagtcccagctactcgttaagctgaggcagacgaattgtttgaacctgggaggcagaggttgcagtgagctgagatcacgccactgtactccagcctgggcgacag

SEQ ID NO: 1833 - DNA, 1078 bp, Homo sapiens
tcatagagttgatttgaggattaaatataaccaagtatatgtaaagcttttagaatagttcctgacatatagcatgttctgtgtgttagctattattatcatcactcagttaattttgaaccacttaatttccaagtgctggtgagtctaaagagcagagccaaacatgtaattacataaacccagaagtgaatttttcaaatgtcttttctagtaatagagcttaatgagattggcacttcagggaaaagtcctaggaacttgtttatgttggtgactgttgatcagccagaagatctctcagacgcagtctaacatctgcatctttctaggctggactacctttgcggcaccaacagatggatcaggaattaaaactgggagcttctgttgtggggaatctttcatcttctactgttaatagccttgtgggtttccctctcctgggtactactttctctacggagagcttggtctgtggcacaaacaggtgccgaaagggggaagaaacacctctgggtaaatatctggaggtcggcaggtgacagagcagtggtctggggacactggttcaggtgtatgttcatcaccctaccctttaaaactcacatggaaatgacttggctgataagttacttgtggttcctgtgataattaaggcagcctgttggaccaggacaaaggatttcctcagctttcaagagaacgtttctaccaagagccatatactaaggtgtgctggttatgtgagtgttgacctcagtattagtatcacttctgttgaaagtgacagaaaacctctaaaacagggtttaaagatagtgtacctcattatttcagaatgtttgtgctgctgtaacaaaatacctgacactgtgtgattcatgaagaacagaaatttatttctcacaattccagaggctgggaagttcaacatcaaggtactggcagggttggtgtctggtgagggccgctgtctgcttccaaggatgcaactggttgctgaatcctctagaggggactaatgcagtgtcctctcatggcagaagagcagaagagaatgaatccactccctcaa

SEQ ID NO: 1834 - DNA, 1076 bp, Homo sapiens
gcatgtctagtggaccctggctcctaacagctggattcttttgaacataataaacatttctagaacaggttttcttggtgagcttttagcttccttttaataggcacatcacttgcctgcctttagttctatgaagttcaacataaatgttgactttagtgatgcagtgggacaaaacagtattatatttctcatcagttccctccctgtctcccttcccctgtcattgttttccagaggtaaagtacatttatggagaacatcggggtgaatgccaaagcggcttatgttctaaaatagtgaaaagaattgtgcagttggagttagacctatggtttgagactcagctttgggactgagcaaatcatttcacgtgatcaattttctaagctccagtttcctcattaggaaaaaagaagacaaagtaatacttgttgtaatggaattaaatgagataatgtcttcagaatgccatgtaagtaaagaaattgtgaatcaccttcactgatttgttccatagattttgttttttcctttcttaaaataccttgtattgaccttcacctaactttgtatttggacaacacccaacagtcctagcagacctttaaccctcccgactccaatttcagtaatgtgttagaagtggcagggacagaatatattctggattcattcactaaatatagagatattatacaaaatgaagctgaactcacgctccagtgggcagtgtcagtttgcctgtgagacagcgctatgcagctgcagccactaagtgtctaggcactggagatggacggctagagtgggaatcctggctccattcaacctctctttgcctctatgtttgccatcagtggtgtggatatgataataattcccatcacataagcttgtggtatgcaaatgagatcattttaaagtgctgagcccagtacctagcatatagaaagaaatggggcttttattatagtgataataatttttaattgtggtaaaatacacataacataaaatttaccatcgtaaccgtctttaagtgtacatctcagtggtgttgagtatattcacat

SEQ ID NO: 1835 - DNA, 1071 bp, Homo sapiens
ggtcatgcatatttctgctttattgataaggaagagcagctctagggagctcaggattgacctgtggccactttgttggtttggggtagagccagaccagacagacgtcgggattctgtacttcctcacaaatgctttctcgtctgtatcctctttcccaaaacttttctttattttccctccttcccttccccttctgtcctttcctccctcctttcaattgcctcaggactggcggggaggggatggagttgttgagagaaaactgtgagtttctgtttttaaagttcagagtgttaggttccataaatgccaggccatgagagcattcctggagacgccttcagagaaaaaaagaaatcacatctgtttttgtctgcctttattcttcattcaacagcaggtttttttaattccaaggagaaggatgtctgccgtgtatttctgtttcatggtgaaagctcagaagtggtcaaaggagacctttgtcccggccgtgatcacccttggctctttggtggtggtccgagggctctgtaagaccatattagccaagtctttagcccccgcttgaagtctgtgggggcaaggaacccagaacccagcccagccagatgttctggcccttgttctctgtcccttgctagcccctgcctggcttggcccattatctgctctgtgctttgcaggaaggaggagacagttactgtctatcccgcagacgtggtgctctttgaagggatcctggccttctactcccaggaggtacgagacctgttccagatgaagctttttgtggatacagatgcggacacccggctctcacgcagaggtgcgttctaaaagcctcaggtggccctgttggtggccaccttgagggcgggggagctgggagcctgtgacaggaccccacccgcctgagtctgaagcccatgccttccctgaggcagctgtgtgtcgcatggtccagcccggctgcgtcagtccagccccaggatatcctgctgcccagacacttggtaacatttgagaagggattagtcacttactgtttgggataacgaaaggctt

SEQ ID NO: 1836 - DNA, 1029 bp, Homo sapiens
tctcttccacactggacacaggtggctccctcacttgtttccagaggtcctctttagagctagcacctgtctcccacaagcccccgcccccacccccccaaggaaattgaaggagaacagcacagaatgggatgcagctggggaaaacaatcttggcaatcctgcacagaccctatcagactgcagacagccatccacctattactgtgcctactacagatcctggccacagacctggatgcaaacctcaactccaaaaactagtctatggagttaaaagtcaggatagttcttactgtggggaggagggaagggaaggggttggggaggggcatgagaggggcttcagaatggtaagattctgtttcttgatctgggtggtagttactgggtgtgttctctttgtgatactctctcgagatgtacacttaggatttgcaatcttttctgtaaaatatttcaataaaagacatttattttttaaaaatccaagtttcacttcttattaattgtataatcttggacaagtcacttaagctctccaagcctcagtttcttcatcccacatgatggggccatgataatgcctgcctcacagtgtggtgaggaacacatgagcgaatgcctacaggctctcagtacagggcttagcatattgctcagtaaacactagtgtctgctgtagcttctgttgctcaggatgcactagactactccctgcatgggtctactctgcttccatgactttttgcatctccaggtctctgctcacacactgccctacctgatcttctcctcctggacccccatcaccaaatctcattcagggcacacactgaagactcttttccttaccctgggtttatccttcgctttagcctttgtttatcttgtgtccctgcagcccctggtgaacagtctactggacccttagtttatccctctctttctctctaccatcaggctaggagcacagccctctgtaatgtgtgccttggtattgcagcaagcacctggcaagcccgtgct

SEQ ID NO: 1837 - DNA, 1025 bp, Homo sapiens
gcagtctgtttccagatactctcctgtgtgcttgttatgaactgaattgtgtcccctcaaaattaatgtgttgaaaccctagtctccagtgtgactatgtttggagatagggtgttttttatggaggtaaatatggttaagtgaggtcataaagatgaggctctaattctatagggatttgtgttcttggaagaagaagaagaagtaacacagagctctttttccatgaacgcagagaaaaggttatatgaggacacagagagaaagtatcatatgcaagccagaaagaccagcctcaccagaaaccaaccctgttggtaccttgatcttagattcctagcctccaaaattgtgagaaataaatttctgttgttaaagccacctactctgtggcattttgttatggcagccccagcagactaatacagtgctcctagttccattctgtacttcatgtgttgtagcacttgccatcatacttctttactcttctgatttgaactttggaacatagtagctgctcagttagtaattgttgagtgaatggtgaatgaatgtgacttaaagacacagaatggttctcaggtcagagtaaaatatgatggaaataatgactatatctaaatacagaagggggctggtcagccccagaataacaataaaaagcctatcttaggctgggtgcagtggttcatacctgtaatcccggcactttgggaggctgaggcaggtggatcacttgaaatcaggagtttgagaccagcctggccatgatggcaaaaccctgtctctaccaaaaatacaaaaattcgctgggtgtggtggtacatgcctgtagtcccagctacttaggaggctgaggcacgaaaattgcttgaacgtaggaggcagaggttgcagtgagacaaggttacacaactgcacttcggcctaggtgacagagtgagactctatctcaaaaaaaaaaaaaaaagtaaattttagaacagtgcccatccaagtagcattcagaagagaggtgtttt

SEQ ID NO: 1838 - DNA, 1045 bp, Homo sapiens
ctcattcaggctgagaactccggggcttcctggacaaggcctaatcttgagcagtgagcaattttgcccccacccctggacatttggcaacatctagaaacactaccccctttccccacccctggatatttggcaatatctggaaacacttttgttggtctgacttggtgggggtgcgttggggactgggagatcctcctggcatctagtggatagaagccaggggagctgctagatatctacagtgcacaggatgcccccccaccaccacacacacacacacatacacacacaacaaagaggtaactggcccaaaatgtcagttgtgctgaggttgagaaaccctgctctagagcattagaagaaaagaatctgtttttaaaatatgtattttggttatagagaattatgttagggtgatcagtgaaagcttttcaagcataagaactatgataatatattaggataaaattccatagaattgaaatagaaatacaattttaagtagaaaaaataaaaaatgtgctttgaactgagtcttagtcattatggaatcagccaagggaagggaagggggttgcattccaggcaagaggacagcacaggcaaaagcactgaggagaggagcttgggtgcagagttaggagcagctcctgcagctggaacctgaaactcatggcagggagtggaaggggatcaggtataggaggccaggccaggggccagagccagccaggaggacatgcagtgctacgccagcgagtttgagctttctccttagctctgtggaatgaggccttagcccatctttctaagggaggcctcaggctctctacagccaccatgctaaggcctgagtggcctgctaagaaagcaaagctttggcatcagactttctagctctgtgaccttggacaagttacttaaccactctgtttccttacccataaaagtgaggtagtgatccccatgtccctagtttagcggattcagtgagagaatatatttatatgattgagtgtcctatacagtgcttggcccatag

SEQ ID NO: 1839 - DNA, 1032 bp, Homo sapiens
aagatatattgttacttgtgtatcactaaaaacaaacctgccaaataaactgttctttcttatcacttagaatttctatactgatgagagaatatccctaaatttatttagacagatttttattacatagaactcttgtacttacatgtaaaagaatatataagtgaaataaattggcaaaagtattttttattttgagataattttagacttacagaaaagttgcaaaaataacacaaagtttactattctctgtttccttaattgctaacattttaatacattttctttataattttgtttctaaatatatatacactttttcaaaaccacttgagggtaagttgctatcattatgcctctttatacctaaatacttcaatatgtgtttcctaagaataagaatgtttagtctacggccatagcaccctgaacacacctgatcttgtctgatctcacaagctaagcagggattggcctggttagtacttagatgagagactgcctgggaatactgggtgctgtaggcttttactgtgtgagtgcgtgcgtgtgtgtgtgtgtatagaacatttatattaccatagtgtaatgatcaaaatcaggaatgttgaatataggacacaatactattatctaatccgaagaccatattcatattgtattagttattccactgtgtcttttacagccaaaaaaattctagagtccagtccaagaccacatgttgcacttagttattatatctctttaatctggaacagttcttcagtcttattttcactttcatgatctggacatttttgagtacaggccagttactttatagaatgtttctcacttttagttgatctgtatttcctcatggttaaattgagattatgcatttttggcaggaataccacagaagggattatgtgactgactgctcagtgtgtcatatctggaggtatatgatgtcagtttgtccaattactgatgatgataactttgatcacttgtttaatatagtacctatcaatatttctctat

SEQ ID NO: 1840 - DNA, 1065 bp, Homo sapiens
cagtgataatgtctgtatttttatagtactttaaaatttatagccacattctcattttcattacctcagttagtcctttcaggcaagcgttactatacccattttatagtcgagtaaaataaaacttagattaagtgactttctcaaggtcctgtgtttttataagcattaagtgtgggtaatagcaagacttccagcttagttgttatttaggctgtgtattaaggcactttggggctctattgtggagagctctgaatcctttgtgttggtgtaagagtttggattttatttgctaggcagtaggaagtcactgaattttttttttttaatttttttttgttatggacagtgccatgatcagagcccttaaagtttagcagctaattagatgcaaagagattatcaaggttttgagtttaggttatccagaaaagagcattaccataagcagatgtagggatgttgggaaaaggagccatttggggagtaagtcagtgaattcactttgacatgtcatttgagacatgtttgggtgggtcttattgggttgtagattccttgtgaaaattgaaaattttttagtgaattaaatgtttgataaacattaatactagggttgaaatttatgctcatgccactgtgcgtgtggactgagtattgaatctgaacgttgtaaattctagatatctcattttggctttggcactgtcttctaaggttatttccttcaacaatacgatggtgataataccagtgttagagggatgctgtggggagtatcaaattgatagcagaagcatttttaaagtaactctgtaatagtttttcttacatgagcacaggagtaaaatcaggaattttattacttgtgctgctgtagagaagcagaagctttagcagccgatggattctgtggggcacctgactgtaggttgttcattttttggtgcagccagcatcttaggaggaatggacactcctaatactcttctgaaaactttatacagtggaggtgttgcattgtagcaaatacaacttaccttgatttcagggcattctgtt

SEQ ID NO: 1841 - DNA, 1064 bp, Homo sapiens
gaagctaattacacatgttaaccttgggataattttcatctggagcagcatttatatttttttgtgacccagttggtgaaatagaaaattaggatttaccctgtttacatgttattttgataaaaacataatttaaactatttcagtgttgtcaaatgagttgtgacttaaaattaatatgcaagcaaattatgcaaaaaggtggatttgtttaccactttttaccaaccacttcctttctcccataccaagctgttactaaactagggctgtagctttcagttgaggaaacatgacggttgattattgtttctaataatagctattattagaagtcagctatttcatggcattggtttccagtcattcacacctcatttaatcatgccctgcatcaccttgttgagttgttaatgctgtttatttctcaatttttcttttacactacattgctaagtccccccatcttcctcttcatagtgctttccctaccctctgagtacttgcttcttcatgctctggccaaggagagtggtgttttggcagactgttttatacatgtacacttatatgccaatcatcattagttagaaaggaattggtgaaaatgctcttatgttatgagagacatgttcaacatcacaatagtctgagaagatgaattaacaatttatgagtgttgctggaaagtatgatttcaggcgattagactataggggcaaagccattgccggcttatgctgttggaatcacatcttagtagttacataatgccatcaggaccagtacgagactggtttggtgattgagcccatttcctgggatttgttcctatgtattgcagacagatgtccacgcttaggtgtgcatgctcctgtcatgcatgtacacataatttttaaaaaaggagtcatagtgcatatcctattatatacttgctgtttttcccccattgctctctattctttagttcactcatttaaataagataaacattttaatgaaatcatattctttgcagtaacttggatggagccagaagccataatcctaagtgaattaat

SEQ ID NO: 1842 - DNA, 1145 bp, Homo sapiens
ctagttataataaatacagtgcttatctggtatagatgccactgctttacaagagtaaaagaacatatgtaaaagtgctgtccatgggcagcagttcaaggggtaattttaattcgtaccacaggtatacatacacattgtaaactgctttagtggcttaatggttgtattttgacattgtagtcaaatttgatactcccaccccaaccctcacttttatgctcattctagcaagtgctgggaatgctaaaagcagaatacatagccccttgaagaacaatatacttaaaaagtgatcaccttaatacagacatgaaagtttcctctcagcattaagctagagtttaggtgcttggaatgattgaaattgattttttaggtagaagggccagatggtgttgggacagttggccggccatccatttgaaaaacacaaaaaatgtatgtcgtcagggttatactttacaccgtacacaaaaaagaatggtggagagattaaagattagactgttcaaagaaaaactcagaaaaatactaagacaaaaatacaaataatttttatttagttttggggatggaaaggcttttttttttttctttaagctatgaataggactttatggaaaggcttttttgacatgacacacaactcaaatgccataaaaggaaaagatggatagatttaactatataaaatatttatggttctgccttctgaaagactctacaaataaaattaacataatatatggtagaaaagtattagcctgtatggaacatagagggataatttttcttactatatcaagttctcttagacattagtagtacataacaaataccccagtagtcgaagtgtatgaatagtcaattcatgtagaataagggctgtgaagatatgaaccctgactagaagcctctgctgtaaagacagaaccttctttaagtccgatataaaacaaaaggatgaagaattacaaaatgtatgctttggtagggcagtgaagaaattaaaatattagaaaaaagagtaagagttgaatactggccattgttttagaggtaattgaggaagcgtattttatatactcgtgggtaattttactactttaaaggtggaaaaaatatttaaaataatgaaataa

SEQ ID NO: 1843 - DNA, 1105 bp, Homo sapiens
atctgtccttcattttaaaaaggtgaaatttggaaataacctaaatggaactgttaaatgagctattatatacctatgtactttatggaaggagtaatactgtatttttaaaaatcatcaaaatgaaactgacccagtaatcccatagacagtaaatcgattagtttatacttttagatgctttaggatataaataaattggtaactatgaaccacgtgctatagagtttaatgctaaatgtaattttacaagtaaatcaggttatatatatatgtgtgtgtgtgtgtgtgtgtgtgtgtgtgattgaattttttttttttccttaaagaaacagggtctcactctgtcgcccaggatgaagtgcagaggtgagatcagggctcactgcactctcaaccttctgggcttaagtgatgtaactgcctcagcttctcaagtaactgagaccataggcgtgtgccaccatgcctggataattttgttttattttttgtagagacggttgcccaggctagtctcaaactcctggccttgagtgatccttctgcctcgacctcccaaagttctgtgggattacaagtgtgacctgccacacccagcctgtgatacaatttttatatctccgaattttaaaatgtttggatttgtaaaggattcttctaaaatggcatatattctaatctttacctaaatttcctcgttacccaactttttcctcatccaaagcttctttttgttgttgtttcaaacctgaaaatatccatccccacttgagtttcagttttgagctatatagtacttactaggcttctatcaattggaacattgacctgtttatagtttttttttaaaattctgtctataatacaatgatccagtatacatactattccatactgttaactttggtgtaggaattctgttgttggtcagtaaggtaagtggaatatgtctttatgacttattggaaaagacaaacctagcttggcttttctacgtgttttacatatgtacctttgaaaaggtatgcttaaatattaaacaaaaagtacaagtagaatatttataccatgcaatcaaactgtgcagattttgaatgtttaa

SEQ ID NO: 1844 - DNA, 1119 bp, Homo sapiens
aaaagcattgcaggaaattgatgtgtgattattcttttgagtacagtgccctttaagaactcagtgggtagttatgtttacttgtttaactgcatcacatttattcatgatagacaagacagcaagttagtagatgaacttaatggatgaatttgttttgctttgttataccttgcaagaaagcacaaaacaatcatctaaggctttatcgtctaatttccatcaggtactgtgttacactgatttgcatacattgctggacttatttttaacagccccctgaactttaaatagaaaaggtagctcctatcctggaagaactcacagttcggtagggaaagggaggcaaggagcaggaacagatgagtcaactgaaattataataccctgtgataaatgctgtgaaggatataaatcctgtatgctatggaagtaatggaataggttcacttaacccagtagtttgtggggaggagggagaggaagagtcaagaaagacttctcaaagaagatccccagagctgagggataataggaattaggttgggataaggcggttgaggggagtatgttccttgtagtactgaacaaacacaagagcatctaagagcatttcagtcttttaactacaataataggtaacatttaatatacagtgcttattatgtgccaattgctattccaagtgctttgtattttccatgtattaactcctttaattttcataacaactttattatgtaggtattataattatccccattttacagatgaggaaactgaggtacagaaagagaaaataacttgtctaggatcacatgatgagaaagtagaagaactaggatttaaacccatgttgtctcatttcggagttttggcttttattatgagaaaagttaaactctggattgcaccggagataagtacctggggtgagaaaaccttttcaattaattcttcttactgaaacacatatattattttcttaaaatctgaagcagtggatcctatccatttttttctgcctctgtaagaatgtttggcatcctttatcttctcatctccaagctttccctagtaaccagccctcttaaacttcagcattctcgaacttctccc

SEQ ID NO: 1845 - DNA, 1025 bp, Homo sapiens
taaaataattcagctcactgtattttttgtttcttcgttatatctttttttttttttttaaacagagcctcactgtgtcgcccaggctggagtgcagtggcactatcttggctcactgcaacctctgcctcccaggttcaagcaattctcctgcctcagcctcccgagtagctgggattacaggtgcatgccaccatgcttggctaattttgtatatatatatatatatatagttttagtagagaccgggtttcaccattttggccaggctggtctggaatgcctgacctcaagtaatccacctgcctcggcctcccaaagtgctaggattacaggtgtgagccaccgctgcaagtctcttcttcatatcctgattatttaaatcaaatgtatttcttttctgaggtcttggagttttccccatgttttaaaatgtgtttccttaccttttaacttataacagaatccctttaagacgcttttacaaatgaaggccatgctatttgctattaggattatctgaacagaccaacagagagtatatttgaccaacagtccaggtttcatgtgaagaaggagaagcacgtatgtttgtagttctttgtagtttgtgcctacaaaacagcagtcaccactaaaatacttatttgaaatattttaaagtgctgagattacatgcgtgagccaccgcgcccggcctgaatctgtttttaatgttaattttttatttttctcactgaaggggaaccagcgccctattaaactccattgttggtaatttgagaacacaaaccaattaatatctatattctgaataattatatagttaaggtgcagcttttattatatctggctttttactttgttgcaaactccaaaccaaagaatgttcataactgtcctacagcagtgaaatgaattaaagtaattctggtcattagaaaatctttaaattattttaagaatacgtaactgactgtgataacttcttgtttataacaggttaacatggatgactagtttat

SEQ ID NO: 1846 - DNA, 1516 bp, Homo sapiens
taatacaataatagtcattagacaaatagtaaattttaaaaagaataaaaattaaaaagaacacctaactgggaaagtgggagagaagccatttaaaacaataaactgaaactcttttcctgagtttccttagaagccatttggacaattaatggagagattttaaacattaaatgtatttgtgactaaaacttgccttttcaacaagacacccgaactgccaagacttcacaggggtctcattgtagagaattaaaattcaatgatggttgaaagagaaaaggcataataagattggtcagacttctatatttattcaaagattgagcatgaaaagatttggagctttacagtatttcaaggaagtaggatgtgtaaaaagttgagatgggtggcttattttctgacatgagtagattttgatttaaaacattcaagctgtgccctggggagagggatgtgtaaggagggaaggaatctgatgaaatgaggacctcagagagtttctgtggaaggcttagaactggaagtggtgaattagtgaaccatcaagaaagagaatatttttatagacatttataaatttttatttccacaaacattggaaataatgtaggaataggcaaacaatggtcctcaggtcaaattcgtgttttctgtttttgtatggcccttgagctaagaatgatttctacatttttttgtgggggaaaataaaaagcataatatttcatgacattataattatatgaaattgaaacatcaatattcataaacttttattgggatataaccatacccatttgtttatgcattgtctctgtaatatctatagctgcttttatgctgcaacagcagagttgaatagttgtggcagagaccatgtgtcccataaacactaaaatgtttactttctgactttttacacgacaggtttgctgtccacagaaataaaagaatgtccgcagtatgttagaatgaacagtatacagttttttgtaagactaggaatacttgccattaataaattcattttctgtattcttatatttgcttatcaggaataaatgctttttttggtgaatggttttcattctgaaaaatgtcaaaatagtaaatattaccttttttttttttttttgacaatgcccccttttttggctgggaatgttcttactctggttttgtaagtatgttcccacacattaggatttcaaaaaaaaaaaaaaaccatattcagaactgtattagtcagttcttgcattgctgtaaagaacttcctgagactgggtaatttataaagaaaagaggtttaattggctcacagttccacaggctgtacaagcgtggtgggggaaggcctcaagaaacttagaatcatggcagaaactgaaggggaagcaagcaggtcttttatgaccagagcaggaggaagagagagaagtaggaggggctacacacttttaaacaaccagatcttgtgagaactcactattacaagaacagcaagggggaa

SEQ ID NO: 1847 - DNA, 1080 bp, Homo sapiens
gcttgtgttctgttctcttttagacagtttttttgtgaccccattgtaatgtaaaaacatttaaatatttgccaaattagttgaattataaatctacatttttacatagggagacaaaatataatgaaaaataattatagtaacttggaagagacttcaaaagcagtatccaaaactgcaaattatgttatacagtttaagcacttagttcattttctttgtaataaaacttattccacaaatacgtaattatttacaggattcctacataaataaggaactactaagattgcatgaaggctgggtgcggtggttcatgcctgtaatcccagcagtttggcaggcagaggcgggtggatcacttgagctctggagtttgagactagccagggcaacatggcaaaaccctgtctctacaaaaaatacaaaaatcagcccagtgtggtggtggtggtgtgcgcctatagtcccatgtacttgggaggctgaggtgagaggattgattgaacccaggagtttgagcctgcagtgggcagtgatcgtgccattgcacttcagcctgggcgacagagcaaggccctgtctcaaaaaaaagtgtagcacgaaaaccacatgttctcttttgtgttgagatatgcatatgattatacccttttatcaaaatttagtaaaagcatttcttagcttttgctcaaattacagattctatatgtctgtcctaacttgtcatccatccagctgaagcgtctcaaggtcagaatcatgtctgtttcatctttctgaccccatggagcagagtacagtgcctatgcatagtaatctctcaaaattgtttgttgagtgagtgaatgtgtgaacattttatgaaattatctttaagagtagttactcatgatcagtatactttaaaagatcggcaaaacattgatgactttttaaaaagtaattttggccaggagcaggggctcatgcctgtaatcccaacactgggaagtgaaggggggaggatcacttgaggccaagagttcaaaactaggctagtgaacgtagccagaccacatcgctacaaaagaaaaattt

SEQ ID NO: 1848 - DNA, 1035 bp, Homo sapiens
gtttggatatttgtccccacccagatctcatgtcaaattgtaatccccagtgtcggaggtggggcctggtggaaagtgtttagattatgagggtggatccctcatagcttggtgcggtcttcttgatagtgagttctcatgggatctggttattttaaagtgtatggcaaccccactccccagtctctgtctctcttgctcctgcttttgccatatggcatgcctgctcctgccttcactttctaccatgattgtaagcctcctgagatctccccaaaagcagatgctgctatgttgcctatacagcctgcggaacctgagccaattaaacctcttttcttatgcattacccagcctcaggcatttctttatagcaatgtaagaatggcctaatacatacatatgccctatgagctggcagtctcacttctgtgcatttatcccagagaaataaaaaattatgttcacataaaaatatgtatacagatgtgctttacatattatatatgagtcctgtatcagaaatgtgctttgccaatatttttccccagtgttgacttgtcatcctctttacctcctatgtacgaatgtttacagcaggtttattttaataacctaaaacttagaaacagccaaaaagtccctcaataagtaaatgcctaacaaacagtgggacattgctgagcatggtggctcatgcctgtaatcccggctacttgggagacagaagtggaatgatggcgcttgaccaggagttcaagaccagcttgagcaacatagtgaggacttgtctctaaaaaaaattgttttttgtttgtttgtttgtttgtttgttttttaattagccaggtgtggtgacatgctggtagtcccagctacttgggaggctgaggcgagatgatcgattgagcccaggagttcaaggctgcagtgagctatgattatactacagcactccagtctgggcaacagagagataccccatctctttaaaaaaaaaaaaaaccctgaaattaaaaaacaagcaaactgtgg

SEQ ID NO: 1849 - DNA, 1210 bp, Homo sapiens
acagaagtagatataacaatttgaatttccccattgtaatctgaatctatgacttctgtacgtacttgcactccttttaaatttaaactagacatacctagaagtaatcctaccatcctcactggcaagggttgacagattcctgttggcactttttgtgggggttccccaggcagaaggctcacagcttttgggcagcataaatctactgcagcactaccggctgtggcgggggacaggcattgtacaggggtgagggaatggcctgagccagaaatgccccggtttgggcgctacttgccgagaccaggtcggtcatggagaccctaacccagtggcgctagaggaattaaagacacacagaaatatagagtgcagagtgggaatcagggctgacagccttcagagctgagagccacaaacaaagctttacccacatatttattgacagtaagccagtcataagcattgtttttatagatttagattaaaacgggaaacaaagagatgggctctggctggttatctgcagcaggaacatgtccttaaggcacagatcactcatactattgtttgtggttcaggaacaccttaagcggttttccacactgggtgagccaagtgttccttgccgtcattccggtaaaccaacaaccttcagcatgggcgtcgtagccatcatgagcatgtcacagtgctgcagagattttgtttatggccattttgggggcctgtctatggccagatttgggggcctatcctcaacacgttcttgtcttcccaattcctatgcctgtgcctgaaagcacttagtaaatacttgtggaatccattaatgattgaaatcagtgacttggcaaaacactttaaactagaatgaaagaaagacagttatagaagtaaagaaacagtatggtaagataggatcatgtaggataggctagacagataagtttagtgaaatggtaaaactttaatagagctacacaaagatttaagcttttacaaccaagaaattcaggattggattttgtaatagatttagttttaaagaatgccagattgttagagtgaacagtagatgagctatgtatatagctgtaaaaatgtaatatagcacaggttaaaagagaccagaaacatgtcatttcaaaccgctttctggtggagtagctttctcagtgagccaccacttaaatgacttgatgag

SEQ ID NO: 1850 - DNA, 1062 bp, Homo sapiens
actctttgacatttacttagttaacaattcaaaaaaaggaaagaaaaatacctttttggaatatttttaacacatcattttagaagtagaaattacatctcttactttcagttaatagtaagtattatttaaacagtcttcccattgtgcaattttatttttgtgtgtatgtgaagtaatgttttatttttgtgtgtatgtgagataattttgttaaatgcttttgaagctcttgacagttcagtagaagaatctgagatgattcacttaaaatacctgtgacatagtctttatagatgggaaaattagaatatgaattgtacaaagtcaggctcatgacttgttaagaattatgcttatttctgcggtgcccacatatgtgagaaaactgttactctttttatgaatgttaactgattgatcattttttccactttcctttaaaattcatttaaaggaagcatggagcagtatgtatgctaatggtatattctattacatttgttgtgatctctgttgactttcatgagattttggttgtcattcagaaagctgatttttcactaagttgtacacctgttcctttcaaaccttagtatgctttcagatgatatttaaatttctctggacagtgagaagaaggaagttgtagaactgccctcatttatgaccacaaacatatgaattttaaccctttgaacattagaagaccaaaccaaagttatgacagaactgcctaagcccataagacaagcatcagttacagaaacttttactgtattggaaaagctattacacatcttcttgttggaaatgaaacttataaaagaaagactcctgattttttttctcatctgttatgcatggggataattcgactgtaaagaacatggttgagaattctgtctagtgattgttttgattttctagttagatgtttaagcagatgaaaaaatgtgctctttggtcaaaaacagtatagtttaaatatttgttctctgttaataactaaagttaaatggttcttaacttatttaaccactaaataagttaatgtgggta

SEQ ID NO: 1851 - DNA, 1045 bp, Homo sapiens
caatatagttcttgttaaaccagaatggagcatttgcaaatttcagacacttaaggattattttccttttgaacttacgtttatccagaggccatttttaatattcttactgcttttattattattttaaaatttattacatattttattgtgtagactacattctgccctggccaagctgctcttataagcctgagagtagaaatactaattttgtttggagtacctttatagctaatttttaattagtgggtcattgaaagtggctgaagcatttccagagagcctcaggagctcagtgaaggatcttggtggtttagaagcaaataccaaacacctgtaggaaagatagacctccctctagtgtttgatttaatagatgtcagttacaggatatggcttctacaagattctgatcagtacgtattgagaaacttgccctggctctgcccactggtgcacatggggattttaaaactttaggtcaggggtgggggtcaagggggagaagggcgctataattactgaagctgtgcgaataggaagtgacatctgaattaagattatacttttgttaaatgactgaataagcaattgatctttttgccatgaggtaacccagtaacaaatttagaattttaaaggtagtatccatttttgttcattactaatagaaattgagaacattaaagagagggtttgtttctaaaatgctgttttcagtacagattattagagattgtctataattttctcccttagagagcagcttagttttatttcatgttacttttttcattttttttcctaacagatattaaagaatttttggtataaaagaattttccagccatgttatactttacatcttgcttgaagccaaaaactagactacattattctttcaattagatccattatataacatcctggcatagagcaatggcaatagaagccaggggtcaattttttttttttttttttttttttttttttttttttttttttttttttttttttgaaggaaggaaagggagtaatttaa

SEQ ID NO: 1852 - DNA, 1051 bp, Homo sapiens
atctgatattcaatattttttcatttttattatctatttcccaactagaatgtaagctccacgaaggacattatttttgtctctccactgctgcatctctgacacctggaacagtgcttgctatacagtatatgctcaatacgtattttttgaatgaattaatcagttaatgaataggcctgagaactacttaagagcagtgactgtggtgtattcatttttataacctcagcatctggaatatcaattctcaataaatatttattgaatacagcatttatttttacagcaggatcttttgctatgtgatattcctggttctcatttgttgttgtttttgtttgttcctaaataattatataaaaatagaaaatgcacataagcaaaaataattgtttcattcaaaataggagatgattcagtcatagtcttgtgtatatgggcgtaataattttatctaaagccatttcttataaaggtaaaactgttcattcaagggaagagaaatttctactgaactgtaaacatgaacacatcagttggctaagatttaagaaaacagctgaatatttttatattcatatttcaaagtaatcattgctttggagtagattaaaaataaaggttgtatagggtttcaggtgagttttgattaataagaaaagattacatacacatcaagttagattaagttcccaataagccaatgatactaagtattattgggaggcaaagtcatttcagaacaggtgtactatacttaatgtagtttcccttgccccctgcaagtaggatcatatcagatgagagaataaaaagagtaccttgcctttttacatattcaggattttggtctccgttgagaatgaatcttttttgttcttttgttggaaatgggctatttacaaatattttccagggttccagaaaactcagttctctgcaaccaactttcttactctgatttaattctattttgtcgtctgtgtgattctgatacttagtctgagacctatagtaacaaatgtatttccatgcatttagctaaaga

SEQ ID NO: 1853 - DNA, 1050 bp, Homo sapiens
gactggcagaattaatcagagcatttatgttaattagccttgctgcagtccccaaaacaggtggtgagaaatatgcaaatctatgcagaattttaatgctttgcataaccagttttaattaccgtaaaattttctcttcgtgcccctctctcttgactgcagcattttctctctgagcttgtgtgttagttgatgggagttgctagatttaccgttctgtaaaatattaggtggaaagttctgtggatcaagtgatcattctctgagatggtatatggagaagtttcagactgaccaccaggtgtatgttaaaatattggtttggaaggtctaatgtagaggtgaattgaaaatatattcttccctttaccccctatttctagagttgaggaattgggggctatgaaaaaaatctataaatttgtgggggatgactttatttttaaaaattgtaatagcagctttgctggcattagaattaacaagtttaaaaacttggtatgtgaaactaggaaaatacaaataaaagaaaggaggtaaaccagaactcatgactgaataagctcatgttttaaatgattcctaaaagatggggttttaagtacatttcttttaatcaaccatttgcaatcttttatttcctacccaccccacctcagtctaaatctaatgaagaatcgggggattcgcagcagccaagccagccttcccagcagccttcagtgcaggcagccattccccagacccagcttatgctagctggaggacagataactggggtaagtgttcactgagagaattataacaaactttttctgtgtcagaactgccattggccaatagctgattagaattgttcaccatagctggtagtaacatggctatgcctggcactattgtgtctttaaggaacttcctacactgtaggtagtaagttgctctgaaaaaggaattatctttgtcgtaagttttcaggatatcttttattagaattgtggatgctctggataaattaaaaaccttattaaacccctgtttcaggtgttgctt

SEQ ID NO: 1854 - DNA, 1035 bp, Homo sapiens
gaatggaagggctcgcggtgagctgtgaatgtgaataaagaactgccaaactttatttcagcctatgaacaggaagcaggcaggcaagcgaggctttctgtcatacttttccaaaatgaggggtatctttcctcatgcatgcaagtacctacactagaatccttagcgttccatagtcagattttattttctttcaagagtaggtgactttggttctgttcatttgagaggtctggtagaaggagggaaaggcccactgtgagagctattatgtgaatagcccttgaatcaccctgttctctgaccctatttccatctacctcagtatctgacaaataactctgagctgggactctctgtgaggctccatcagagtgaataatttcctcctctatcatagtcttctcctgtgcccttctggattatggttgatttctccaccatccagttttatcctttttctcatttctgcaaatctgtctaaatctcaaaacctctgatacctgtcaccagagctctttttcccttttgtatctctttactattatttggaataggattttagaaatgaagggaaaaaccatatccttagcactatcttctaagaaaaatcatgtttgattgatgtggtcatcttattttcccataggtacgtttgacacataataggtccttggtaaacattctaaaatagatgcaagtgagcattgccatactcctccagaaagacgagtgttccattgtgtctcaaaaacttgtaaaaattccacagcccttaataatctcaaccaaacatgccccgcccccaattcattttccaaaatatttttcatagtgacaaaattgttgattcctcaggaagatatagcaactataattatatagccaccttaacaacaaaggcccaagatacaggaaacaaaaaggaataaaattcaaagaagaaatagacaattcaacaataacagttgcagacatagtatttatttgagccacgttaaaaaaaaaaaaattcaggccatgtgcagtggctta

SEQ ID NO: 1855 - DNA, 1027 bp, Homo sapiens
tcaggcacttttttctaagacctcacaaataatttcttttttttttttttcttgagatggagtcttgctctgtcgccaggctggagtgcagtggcgcaatcttggctcactgcaacctccgcctcccaggttcaagcgattctcctgccttagcctcccgagtagctggaactacaggcgcgtgccaccacgcccagctaatttttgtatttttattagaggcagggtttcaccatgttggccaggatggtctcaatctcttgacctcttgatctgcccacctcagcctcccaaagtgctgagattacaggtgtgagccaccatacccggcctacaaataataatttcttagatcttaatttttatgcttttatgagattcatagtatcattgtatgttgtttttttttttaccacaatggactttttgagagctaatttttattacagaatagttgtttgaatgtagagaaggcatgtagtcatttttatactatgttgttgttgatactgaattcttagaaaagcatataactttctgtttttcttctccttgttttgatttttctgaggagacccctaaggagatttctgaatgaaaagagctttacagaagtttttcttcttttgctttctttttcttccccagagcagttgtattccataattagagcttctatgattcttttgtttcttgaataggaaacaggcaatggaaaacttctctgtttctttcattgctcatatctcttaaagtagggttcctagctgtgatcctaaaatgtttggttttgtagttaatttccataaaagcactaaactaggttattaaaggacagctttactaggtggtaggttaattattccattgattatagagtttggctgagtaaagccaccattcttccaaaaccatttacaaaaggtcatcttctaatctgtttgtcttttcaggcacttcagacaccacctccaacaacacagcaaccgtgatttccacagcgcctccagcttcctcagcagtcacg

SEQ ID NO: 1856 - DNA, 1003 bp, Homo sapiens
agacatcactaattaattagaatttttttcttaaaatagttttgctaagaggctgaggcaggaggatcacttgaggccatgagttcaagactgcagtgtgctatgatcatgcctgtgaataaccattgcaccccagcgtgggtaacacagtaagaccctgtttctaaaaaaaaaaaaaaaaaattaaagtgttttgtgcataaatgagaattctcagggccaaaaataactattagccaacctaaattaagattaatatttcacaggtaatatctctaacagtgtactagagaatgttaattacagacaaaaccaaaccatggcctagattaccttacattatattgactttctgattgactaaatcatacctgaattggttagctctaaagcttttgttatataataatttttttttgcaatagaatttgtgataaatcactttttcttctgctttattgaatgtttctgtgctgtgttgatactacaaaggcaaaatgtcttccctagggcatgattgacactctgaaaagatactaagtttggaatctcagaaaaacttcaagctgcactgtctcactgttctgtactatttgtatgagcaaggccaaagtcagaggcattcccttcagctatattttatgtaagaaatcaaatgtgtaatgccgttagaaaatccctcaaatctacatgtaggagtgaggttatatggctagagagatttaggaatgttgccagacaacaggttgagatactaaatgagagtctcgattattttaaataaaatgttgatgatgccttctttggggaagcaacagcatcatagaaaatttctcacccattaaagcacatcctagacttagatcacccacctacatcattatgtctaatttcctgctacaatagattcatcattctcctttgcacaagtcatagaaatcaagtatttagcctcaggaagtgagaaattaattataccttttaactttatttggtgatacat

SEQ ID NO: 1857 - DNA, 1050 bp, Homo sapiens
aaaatagaaacttagtcttataaaatatgtatattttttactccaactccaggatatccactaggcttagatgctgccaaaagaaaaagataaatgttaagtgaaagacagctatgtgcaaaagaacataaaatgcaagtttgtgttttcattaagtctaatttatttacttattcaacgtaaatgaacacctactgggcacaaggcactgtttatgtatgggatgcagcagggagcctagatgctagtgagaagtgacagacaggaaacatctactcaaataaataataccaaaggacagattaaattcccaacaatcacaacttttaagaaaatatgattgatctaatatgaaaatttgcagcaaatttttgaaaaatggaacatcttatttgtattataaaatatttttaaaacttataagggatatgttatagggtttctttaaagattggtctttcccactgagttttaaaaacatgatttaattgggaaaaacatagcttttcagaaatattgctgtttcccctctatccagtagatgctggtctacctactaaatatttctcaccatccactttgcatccacactggagctaatatagtacagccacagtcatgtctctactggatgattagagccttctaactggagcctgactgtttttgagttatatcttttatctgagaatttgaattatttgtgtaagacatacatctcatgtgtacctcaaccttggaaagatttttaatcttgctctctaagaccacagatgtcattttaaaagggagagtaaaatggtaagctttggcatataatttattatagattagtctttagccccatcgaagacggtataattattagaagaactagaagcatctcctgaggtctcaagtgtcatatggctctgagacttgacccctaaggctggtgatattaagccttcatgtatcttgaatgatattccttttttccttttccactcttactttgctaagtcgtttgacattagcagtgccctagagtccagacaaaagtctttggaa

SEQ ID NO: 1858 - DNA, 1051 bp, Homo sapiens
caaatagtttttttagagtatgtgcaccttcatggttcacattttgtacctcacctttaggagcctcctgagacttaagtctagttatagatctagaagcaaagagaggcgttgggggtaggtcctgaggagaatcagcagtgtcttgcaatgcagctgcctcaggggaggccattaaagtttcctcaggcacagcaggtttaattgcctcagatgtgggtggatggctgcttccactggcaaaaaagactcataagaatttagggattcaatgtttccagctccataagggagttcccacatttctccattccaatattcaggatccctttccttcccaatcaatgccctcactttagtagcagacaccctgcagacgttgggaattcagtttgtgctgtagttgagtcatttgcagaataagattctggatttgattttcagcaatttcagctctatggctaacagagataaggatatctttcagacataaagttttctgttcagatatgtagtgctcaagctgggaatttgaatccctgagctcatccatttcttttctcactttgtccattgtcattaggagtaaccaacaaatctcattatactcattagtttgacaaaaatgtttaaaggtatagtatatgtggtcacccagaaccttattcttatacgtgtttgattaaaagtacccaatggtgacattttgcatatctccattgccacatcatacccatacttttactactggaaatagtcattagtgtcctttaatccagttagagagccaagtcctgaaaccctagaatcaattcagagaactcatccttaagattctgctcctttagagccactcttaaaaccaaaattagggttctccagagaaacagaaccagcaagatgtgcatgtgtgtgtgtgtgcactctctttttctttatataaatatagatagataacctatctatatcttgctggcatagatagatagataggaattcgctcatatgattgtggaggcttggtaagtccaaaatctgcagggtaggctgg

SEQ ID NO: 1859 - DNA, 1012 bp, Homo sapiens
aaacatcagagcagagagggtgaaaataaggaagcagaacctcccagaacttaagatcttaagagcagggtagtaatcagtcctcaactttgtactgtagacactggatttgatagtgatgtggctcagggccaggatgaggctggggagggaactgggccaagatcaggaaggggttgaggggtggtgttcaataagatcgtaacgtcagtttaacttacagtgaactttataaacgctggggggctagtatattttagcagatcgggttgttagtacattctctccctgtgctgagatagattgttctcacaagattgcccagggaatatgggataagcccagtagatgtttattgaatgacctcaatggctctggccatcaagctatcatagcctaaaacacccctttcttcacagtaggaatataactgacaggtgcattggattagttacattacctcttcactgggcagtgatgcagtgtgctgacaatgacactttagatatgaggatatggcctagaaacattgattggcctttttctggatcttaaagagatttcctggatggagagcctgtcatttagagtagattatctctacagagaaccaatatcatccattgagtactgagatttcttgtgtttttttgtttgtttgtttgtttgtttgttttgagacagagtcttgctctcgctcaggctggagtgcagtggcgcaatctcggctcgctgcaagctccgcctcctgggttcacgccattctcctgcctcagcctcttgagttgctgggactacaggcgcctgccactgtgcccggctaattttttgtatttttttagagacgaggttccaccgtgttagctaggatggtctcaatctcctgacctcgtgatccgcccgcctcggcctcccaaagtgctaggattataggagtgagccaccgcgcctggccaagatttcttgttttaaaattcattacctttttttgatttaactaaataatcaggtc

SEQ ID NO: 1860 - DNA, 1034 bp, Homo sapiens
gtggctcgcgcctgtaatcccagctactcaggaggctgaggcaggagaatcgcttgaacctaggaggcagaggttgcagtgagccgagatggcaccattgcactccagcctgggcgacaggacgagactccatctcaaaaaaaaaaaaaaaagaaaagaaattaaatgtatgcaatacttagtttttaaaaatatccctcacatatctaaagtcaatttgcaggtttatacatgtaaaaataatttcatttgttagtagtattgtttttgaaagatttagagatgagtcactcatggaaatttttctatttttccagtattggaggcagaatgaaactaacaaaaatcctttggggaaaaaattattccaataaattttccagtaattattccaaatgtctcttcttttcctcccttttttgtgtatctttacaactcaaccaaaaagtccactgttactatatcaagcctgcttaagaatcctccgtgatgcccacttcctacaggatcaagttccagctcatctgaattcagactaccttttcatcttaaaacttttcctctattccagccaaattcatcttcataattcatctttaaacatcatctcatgtttttctgtctctgcaaaatgccctttcaatctattttgagtcttctcagtataccagataaaattcaagtgcatctttcataaaatattccctgacctcttcatttttcaaattttgactttaattagctacatatagtctatttgctacttcagggggatggtttagtaggaacttaccttagggaagataaggtggcataaataacaataagatacagaccaggcagtgctgactccctgcttggagggccattttcccatgccctgcactgtgccataccctgcacactgtaggacacaaagtttgttgtacacattcttgtgtatatttccatgtacagtatctaatgagactcatcccactcagaacttaggacttattatatattcaataaatgaattgttcagttgatactgt

SEQ ID NO: 1861 - DNA, 1028 bp, Homo sapiens
tgagctaacccaacagctattatgatttgtccatgaatatgtcacatgtttgtattggaaacatgttgagcatactatctggatgaaattggattgtgaagttacatagagtttttatgcacatctgaatatttgtgctcttcatgtaaaatgccattgtgtatgtgtgtgtgtgcattagttttcttttttcatatatgtattatgttatcaatatttaagatcctgactgattatgtattagaataattaaaccattttggttcagagcatgtagcctcccatttcacagaaggaacagtttgcagaatgcatggtatgctttggtcttagtaatgacactttaaatgtgattctccccaaactcctaagttttaaaagtatatatcaaaaggctttaagctgtactgatgacacatctcattggaaaatccctacgctgtaccccagctttcttacttcctggcattcactttccctgattcatttatgagatagtgcttgttgttaaagactactgtcaccgtgaaaaggttcagcctgtgtgacctggcattccctaatttctcattcatgacttcctgagtttttggggggatttgattgtggtattggtagggaataaaaatatggagagaacaagataagccaagacttgcctggatatatatctgtaatttaaaacatacattcagaagaggtttgcctttgattataacaaaagtgaattgccattaagctaataaaaggtaccatagagcttgttcccttaaacctttatcccaaaggagggttgatggcagggggaaaagacaaacagcaaaaggataaatgtgtattgtaactagaattccaatatgatttttgtaaactgggttgaagaggttgtaccatatttgtttctgtgcctcccccagtgatgagttcattgacttagaagaatgagtgagtgtcaggtatagaaaatagtttaaaaacatgtgatcattttgacacccattgttatgttgtcttttgtttttatatat

SEQ ID NO: 1862 - DNA, 1046 bp, Homo sapiens
tcaggaggctgaggcaagaaaatcacttgaacctgggaggcagaggttgcagtgagctgagatcatgccactgtactccagcctgggcaacagagcgagactctgtctcaaaaaagaaaaaaagaaaaaaaagaaagtgaacagagcttcagtgagccaccggacaatatcaagcaatctaattagaatccgagaagaaaaagggagagaaaaaaatatgtaaagaaatagtgaaatttttagtaaatttaatgaaaaacataaacacacagaaagcaatagcgaaaattgctgggcgcagtgactcaacgcctgtaatcctagcactttgggaggctgaggtgggtggatcacctgaggtcaggagttcgaaaccagcctggccaacgtggcaaaaccccatctctcctaaaaatacaaagattagttgggcatggtggcaggcgcctgtaatcccagctacttgggaggccaagacaggagaattgcttaaaccacagaagcggacattgcagtgagccaagatcgcgccactgcactccagcctgggcaacagagtgagactccatctcaaaaaaaaaaaaattgactctttacagcaaaaataatgacagcattttatgaggctataacatgtggaagtaaaatgtatgacaacagtagtacaaaggatggggtggaaggatggaagaatactgttgtaaggtccttatattatccatgaaattataatttgaaggtagactgtggtaagttaaagatatatgctgcaaattctagagcaaacactgaaaaaaataaaagagatagatacagctaacaagctctatctccgaatggcaatactgataagaacaaaattctgacatatgctacaacatggaaaatggtaaatgcggatggtaataatatcaacgttggcatcagaacaagaaatagaaccagagatagagggactttttatgatgataaagcgatctacttacaaagaagacataatcctaaatgtttatacttgtaatagtagagcttgaaaataagtaaaa

SEQ ID NO: 1863 - DNA, 1026 bp, Homo sapiens
ttatatgtgtattatactttctctatgctctaagtctcttaacctctcttgcagatctttcattgtattgtctttctgccattttctgcataatttcttcatctgccttcattcactaattccttagctgtgactagtctactgtttagccccttttaaaagtttttaaacttcaatttcatattacaggtttattttctagaaattttatttggttcttttttaaatatacctggttaattttgatagttccttataacttcatattttcaactatcttatttaagcatgttaaatattcttattttatacctcaaaactgataattccagtgtctgtagtctttattgatctgactacggtttttgtttctatatttcttgctaatggtggctattttctcatctcatgggtgttttataatttgaagactgtacttacgttcttggcactttgtacaaattgattgagtcttcatttaaaatatatttactcatgagaagatttgtatttcttctgcctgtgtcttggatactaccaacccagtgagaagaaatgcacaggaggtaaaaaaattttgagaacttgaatggtagactataatggccccacaaagaggtccacattctaatctctggattctttaggatatgttaccttacgtatcaaaaaggacttggcagatgtgattaaattgccttgagatagggagattgtcttgggttatctgggtggctccattgtaaccataaaggtccttagaagagggaggcagaagggtaagcatcggggagagactggaagatgctatactgctgactttaaagatgaagaactcatagccaagaaatacaggcagcttccagaagctggaaaaagcaaggagacagattctctcctagaacctgtggaaggcacgcagtcctattgacaccttgatcttagcacagtgaaacacatttcagacttctgacctgtaaaactgtgagataattaatatgtttttaacacctttaaaattgtctt

SEQ ID NO: 1864 - DNA, 1086 bp, Homo sapiens
gggcccagtcatatatgcacagttagaccactccggcggacatcacagtgacaagattaacaagtcagagtctgtggtgtatgcggatatccgaaagaattaagagaatacctagaacatatcctcagcaagaaacaaaaccaaactggactctcgtgcagaaaatgtagcccattaccacatgtagccttggagacccaggcaaggacaagtacacgtgtactcacagagggagagaaagatgtgtacaaaggatatgtataaatattctatttagtcatcctgatatgaggagccagtgttgcatgatgaaaagatggtatgattctacatatgtacccattgtcttgctgtttttgtactttcttttcaggtcatttacaattgggagatttcagaaacattcctttcaccatcatttagaaatggtttgccttaatggagacaatagcagatcctgtagtatttccagtagacatggccttttaatctaagggcttaagactgattagtcttagcatttactgtagttggaggatggagatgctatgatggaagcatacccagggtggcctttagcacagtatcagtaccatttatttgtctgccgcttttaaaaaatacccattggctatgccacttgaaaacaatttgagaagtttttttgaagtttttctcactaaaatatggggcaattgttagccttacatgttgtgtagacttactttaagtttgcacccttgaaatgtgtcatatcaatttctggattcataatagcaagattagcaaaggataaatgccgaaggtcacttcattctggacacagttggatcaatactgattaagtagaaaatccaagctttgcttgagaacttttgtaacgtggagagtaaaaagtatcggttttattctttgctgatgtcctttctgcttgaaataacagtcaccatacagctaaaggagaggagtttctttccttctaagtaggcagaaatggtatcattatgttgccgctctccaatctcccagagctcgctctctagagaatcaccttctttcgcttttttttttttttttgaggtagag

SEQ ID NO: 1865 - DNA, 1050 bp, Homo sapiens
atcaccttctttataaagcgtcagtcatgcttccagcaagaggcagcatcagtcatggctttataacagcttcatggtgcctcaaagactgttgaggttaatgagagcctagattagacagtttggctgtccttccctaaaacttgttttctcctattcactactccccaccgcacttaaaatctatgagtttttactttttactgggaatggaaagtgtggtgaagatcattcaacacttatgttgtcatttctcccattttctgaatttttttttaaatttccccccttttaaaattgttcgaaagcccacagttatggaaagaattactgtctagatggtctgcagaacgtgtttggggtgagtgggagtgaggggcaatgttactttttctccctgtagtttggagtccattatgagctgctgctttttcttctcatcttgtcatcttctggggatgtttgaaggctgagttccaacagaattcacaaagggaataaaacaggattgagattttgaggtgtgcacaaggtggtaagataaagggcatatgagcttcaaaactaatgctgttgcatacatgaagccttttgttttttgaggagctatttttgttattcttgtaacgctccaccttacatgccacatctgtgtgagtcaacagggatcaggtttggtcaccacacatgtctgaagctgggcagcgtctgctctgtgttctgtgtggaatggagaaaaaaacgcctgccctgctgccttccatgttcataggcccagcccaagagagtgacacacagtgctggccctgagacatttccacaaagtggtcaactctgccttgcatcctaaaactttttgggcatctattttgaaaactataggagcctttggaaggcctcttatgtttggaggggaagggtgttgagattgtcaccatccttcaagctgagactcctggtgagcctttgccaccatgaaaaccacatagctgaccagggctgtgcttgaggtacagaggacacacattgtagacaggcctgtgtcatgtt

SEQ ID NO: 1866 - DNA, 1096 bp, Homo sapiens
caaggaaactgaatttcaatactagagtacattgttggttctttctctgcctttgaatagaattattttttaaattacaaagtttcttttaaaagaaagaacttttaaatatattttgtagggaatctcttagaaggtacaatagattcataggaatgtggaacatttggccgggtgcagtggctcatgcctgtaatcccaacaatttgggaggccgaggcaggcggatcacttgaggtcaggagttaaagaccagcctggtcaacatggtgaaaccccatctctactaaaaatacaaaaaattagccgggggcggtggcatgctcctgtagtcccagctactcgggaggctgagcggggagaaggggagaatcacttgaacccaggaggtggaggttgcagtgagctgagatcgtgccattgtactccagcctgggcaacaagcgagactccgtctcaaaaaaaaaaaaaaaaaaaaaaaaaagaatgtggaacattttacaaaatctcgtccatgatcttgccggcccagcagaatcccagatgtttgtctataacgcgtctggatgttcctatctgagaaaaagccttagtcttttacttgtaagctattcctgaagaaggttgcctcagcaggggaaaactttctgaaaagcttgatcaagtacctgggtcccaagaatgtcaagcatctgtggaacacacagttcccagcagccagcaagtcccacactgctcagtgtcctgcagccaaggaagctgaactgagctcatggggttacaggaagatgaaacaacactgcctcactggcaaggagatcacactgctgagtgctgcctgagtccctctgacacaccaggctcttggagaggaggtcgtggtaatcatttaatgctgactaattgaggttgagcaagagagaaaaatacccgagggagatacatgaaataaacttaggaggagagcttgtacttggctggaaataactggccttcttccatatcctctctaaaaaataccataagagaaagtaaaaaatttgtggtttctattgtaaattgtgttgattcaaattaatttcaagcttttagattg

SEQ ID NO: 1867 - DNA, 1064 bp, Homo sapiens
caaaaacactgtgagagaaatgaagaatgcctttgacaggcttattagtagacaggaccccgctgaggaaagaatctctgagttcaagagcatatcaatagaaacctacaaaactgacaagctaagagagcaaagactagaaaagaaaaaccataacagaatatccaaggattgtgggataagtacaaaaggtatactagatgcataatagaaatatcagaaggagaagaaagaggaaagtaacatcagaaatacttgaagcaagaaagactgaaatgttttccaaattaaggtcaaacaccaaaccacagatccaggaagctcgcagaacaccatgtaggatatatgccccaaaaccccaacacataggcatataatttgtaaactacagaaaatcaaagataaaaaattttaggtcaggcacggtggttcacacctgtaatcccagcactttgggaggcagaggtgggcaggtcacttgaggtcaggagttcaagaccagactggccaacatggtgaaaccctgtctttactaaaaatacaaaaattagtcaggcatgttggcgggcacctgtaatcccagctactcaggagtctgtggcaggagaattgcttgaacccaggaggtggaggttgcagtgagtcaagatcacgccactgcactccagcctgggtgacagagtgagactccatttcaaaaaaaagagaaaaacaaaaagttttaaagaagcccaagggacttctataaaggaacaacaacaaaaaaagaattgcctttcacttttcctcagaaaccatgcaagcaagaagacagtgccatgacctgttgacaggaaaaaaatccctagaattctttacccagtgaaattatccttcaaaattgaagacaaaataaagacttctcaaactaaaattgaaggaagttgttgctaatagctctgacttgcaagaaatgttaaagaaattctttagagagaaggaaaatatgtagttcagaaacttagatctacataaagaaagaaagcattgaagaaggagtaagtggaggtaaaataaaaattttc

SEQ ID NO: 1868 - DNA, 1033 bp, Homo sapiens
gaagaggtggcaagtttattagtaagatgtaaacatcatctagggagatcatttcctgaggtcaattttgactgggatgtgtatggggcttggggctggagaggatgagtcagtgaagttggggcagagatactggagcaaagaatgggacttgagcatgttaaagatatgcctatgactggcagtcctgagtaagggaggatgagagagagccagggccacaagctatttcctccctcttgtgttctcagtggagcacatctgctgtgacagcccaagggctccagaatggcctccctactctgcaatcaagctctgcatgtgaattcccacgcgagcctgttgctcatccacattaaacaaacatcccttttgcacttgcctgaaatatcaacaaacatcaggactccgtcaaaataatccataaagggtcgctctggggagaaatgtccatagacaatgaggtctggtaaatgagctgctattctgactatgggccagtcctggaattcttcttttggagtgttcatgttcaagacaaatgttcaggattttatggtgacaggaagcagtctccaaataggtcttctaaaaagaaaattgaaatagaggaaatctgatatattcatttgctcattttcctattgctctttctccatttgttttgttctaacctgcggcctgcttatagtggtgaaaatgccagagttgttgagccacacttcaaaagggccaatttctatacagaggaagaaccctcccaccctgaacagctgttgcataagtgagctccattacaaagaggctggggtgaaagagggtagctgaacggctcaactcatttgcaggaaggggtaggccctcgcagggcaagtccagttgtagtgggctgttaagctctattcactcaggccagacttctttttcttctgtcctcatgtttccttttaccctctctctaccttggtcttttacttttttctctctttaaaaaaaaaaaaagtgtagatgtgattcgtgtgtgtgagtgtat

SEQ ID NO: 1869 - DNA, 1006 bp, Homo sapiens
atcctggctattctgaaccctttctatttccataaaaattttagaactagcttgtcaatttctacaaaaagacttgggattttgtgttgaatctatatattatttcagggagaactgacatgtttacaatatgaatcttctcatctgtggttctggtttgtctccgtgtattaagcattctttgattctctcagcagtgatttgtattttttggtgttaggtttatccttaaatatttcatatttgtaatgctattttagatgatatttttatttatttttactttttatttgtacaaatttatgggtacatatgcagttttgttacatgcatagattatgctgcagtcaagtgagggcttttaaggtatccatcacctgaataacgttctttgtcctcattaacgaatttctcatcatcctcccacctcctcattcttccactccattatgtatcattccactctgcatctgtgtgaacacgtttgtttagaacacacttatgagtcagaacatcatacttgtctttgtgtgcctggtttgtttaacctaagataatgacctctagttccatccacgttgctgtatatgtcatgatttcattcattttttttttgagatggagtctcactctgtcgcccaggctgtagtgcagtggtgagatctcggcttactgcaagttccgcctccgaggttcacgccattctcctgcctcagcctcccaagtagttgggactacaggtgcccgccaccacacctgactaactttttttttgtattttcagtagagacagggtttcacagtgttagccaggatggcctcgatcccccgaccttgtgatctgcccgcctcggcctcccaaagtgctgggatcacaggggtgagccaccacgcccagcctgatttcattctttgttatggctgaatagtattccattgtgtatatataccacattttctttacctgttcatccattgatggacacttaggttgattccatatctt

SEQ ID NO: 1870 - DNA, 1031 bp, Homo sapiens
cggtgtttcactgtgttagccaggatggtctcgatctcctgacctcatgatccgcccgcctctgcctcccaaagtgctgggattacaggcgtgagccaccgcacccggcaaatttttgtatttttaagagctttattgagatatgatcagctgtacatatttaaagtgtactatttgatatgtttaacacatgtaaacatacacaaagtcatcaccacattcatgatgataaaatatcaatcatcccctaaaagtttgcccatgtgccctctcattccttacacatcaccctcaaccccagtcaaccaatgatctctattctgtcactataaatcagtttgcattttctagaattttaaataaacggaatcattgactatgtatccttttttcatttggctttttttactttaaattttacttagaataattattttgggattcatgttgttgagtgtatcaataatttattactttttattgctgaggagcatttattgtatggataaatcataatgtttatctctgttcacctgtcagtggacattgggttgtatccagttgaggactattacaaataaagttgccatgaatattcgtgttgcgtctttgtatgaacatatgcttttattcttttttgataaatacctttgagtggaatgaatgggtcatatggtaggtacctgcttaactgttaagaaaccagttgttttccagtatcgttgtaccgtttaacattcccagtgttagtatgtagaaattccagtgggtccatgtcctcaccagcatttggtgtggtcagttttttttttttttaaagacattctaacaggcatctagtagtatcatgttgtggttacatttcctgccccgttaatttttagatattcatctgtattctggaaacttcctgaactctcatattcattcaagtagcttttttttttccttaagattttataggatattctatgtaaataatcaagtcatctgagaattaagttagttttacttcttttctagtctggatt

SEQ ID NO: 1871 - DNA, 1012 bp, Homo sapiens
gttggatatttgggttgtttccattttttggcaattatgaataatgctgctgtgaacatttgtgtacaaatttttgtgtgttgtaagttttcaattatcttggctgtatacctagttgcagaattgctaggtcatatggtaaactgatatctcactttttgaggaggtatcaaaactgttttccaaagagctgtaccattttacatttctgacagcaacatacagggttccagtttcttgacatccttgccaactcttattttctgtttctttaaaaaattattataatcatcctagtggatgtgaagtggtaatttgttgtgattttggtttttatttctctgatgactaatgatgttgagcatctttctatgtgcatatgaaggtatgagtcatttacataccttctttggagaaatgtctatttaaatcctttacctatttttaattggattgtttgtctttttgttgttgagttgtgtttgtatattctgggactcttgtcatgggactcttatcagatatatgatttgcaaatatttcccttcattctatgggttgtctttttgccttcctcatagtgtcctttaatgtacaaaagtttttaattttggtgaagtctaatttctttttgctgtttgcttgggctgttggtgccgtatttaagaaacttgcttaatcactggtcgtgaagatttatacctgttttcttctaagagttgtatagttttagctcttctgtttagatatttgatctattttcagttaatttttatatggtataaagtaggggtccaaggtgtttttttttgttttttttttggtggcgattatctagttgtctcagcaccatttggtgaaaagacttttctttcattgaatggtcttggatctcttgtcaaaaaatcacttgaccataaatagaagagtttatttctgaactcttaattccattacattgatctgtatgtgtttgtttttgccagtgccacacagtcttgattactgtagt

SEQ ID NO: 1872 - DNA, 1548 bp, Homo sapiens
gcctcccgggttcatgccattcttctgcctcagcctcccgagtagctgggactacaggtgcccaccaccacacccggctaattttttgtatttttagtagagatggggtttcatcgtgttagccaggatgtcttgatctcctgaccccgtgatccgccctcctttgcctcccaaaatgctgggattacaggcgtgagccactgtgcctggcctccaggagggtttttaaaattttattttccatatagatgatcttgttatctacaaagaccgttttatttcttttccaatcttcatacttttcctttgcttttccttccttttcttgtcttactgcattagctaggacttaaagtatggtgttgaaacgaagtggtgagagaggacatccttgtcttgtttttgatattctacaggttgagtgtctttaatttgaaaatctgaaaattgaaatgctccaaaatttgaaactttttgagtgccacatgatgctcaaagtattttggatttcagaaatgctgtaaaatttcctctgagaactactttgttgcacctcacagattttaattagtcttgttttgatttcattgaattcagaatcttttaaaatttctcttgagatttcttctttgaccgatgtgttattttgaacttgtgtgtattttgggattttccagttatctttctgttactgattttagtttaattccattgtggtctaagagtagacactgtttgatttttattcttttaaatttgataaagtgtattttaaggcctcaagtgtggtctgtcttggtaaatgtttcatgtgagctttagaggactgtatattctgctgttgttgaatgaagtagtctataaatgtccgttatattcaggtaattgatggttttgagtttaactgtgtccttactgattttctgcctgctaggtctgtctgtttctgatagagggaattgaagtctccaggtatcatactagattcatctgtttctctttatagttctgtcagtttttatctcacatatttcgatgctctgttgttaagcacatacatgttagggattgggaaactatgttgtcttggggaaactgacctctttatcgttatgaaatacccttctttttccctgataatttttcttgctttgaactctggtctgtctgaaattaatgtaactactcctgttttcttttgatttgtattagtatgatatatttttctcaatccatttacttttaatccatatggatctttatatttaaaatggatttcttgtaaacaacatatatttggatcttgttttttgatccactctgacagtctctgtcttaatttttaggctgggtgcggtggctcacccctgtaatcccagcactttgggaggtcgaggtgggcgatcacctgaggtcaggagttcaagaccagcctggccaacgtggcaaaactctgtctctactaaaaatacaaaaattagccacgcatggtggcacatgcctataatcccagttacttgggaggctgaggcaggagaattgcttgaa

SEQ ID NO: 1873 - DNA, 1050 bp, Homo sapiens
ttcaaacccagcaacatagcatcttgagatctctttctttttctctctttttccatcatcttgtctccttctctgactctgactctcctgccttgttttgctcagtaagacccttgtaattatattgggcctctgtggataatttaggataatctccttatggtcaaaatccttaattaatcacatctacaaaatcctttttgcagtataaggtaaagtattcgtaggttctaacaaataggatgtagatatctttgggctactattattctgcttaccacaataatagtaaaccttttaagacaaaagttttccaagtaaatttttaaaaagtataaaacacctactgaaaagtgctggcatcgtgtatttgtgcaacttgattaattttcacaaagtaaaatatatatgtactcagcatctagaacaagaaacagccccccataagtcctttgtaccccctcaaagggtttactgctttctaggctcttaaaagtacaggttagtttgggcctttttacgattttataaaaatgggaatcatactgtgccttctcttttgtgtctggcttttttcacacagaaggtttgtgagattcatttatgttgctgagaatagtaatgatttgttcattattactgatgatttagtactttattttaggaatagataacaatttaatcccagtttattgttggatatttgggttgtttcaagtgtttggctaatataaatagtgctgctgtgaacattctagtgcatgtttttacatgccccatgcaggcgtttatttttagtggaactgctgggttataggagaagcatatgatcagctttaatagatattgatacatagttttccattgcaattgtaccattttatactcccatcagcaatgtgttccgtaactccacatcctcatcaacacttgatattataagtcttttcattttggccattcgggtatggtatagctgtatatctttgtggtggtaatttatatttcctcgatggctgagtttgaatacctttcatatatacagtgttt

SEQ ID NO: 1874 - DNA, 1257 bp, Homo sapiens
tatggtatgtgaattatatttcaatacaaaaatgtttaaaatggatcagatgtggtggctcatgcctgtaatcccaacactttgggaggcagaagtgggaggattgcttgaggccaggagttcaagaccaacctgggcaacatagctagactccatctctaaaaaaatttttaaaacagctggttgtggtggcacatgcaccaactactcaggaagctgtggctggagatcttattagctctggagttggagcttacagtgagctaggatgggaccactgcaatccagtctggagaagagtgtgagaccctgcctggaaaaaaaaaagttaaaaatgtaaacattaaagggagcggtcaagagtgataggtgccataaacatgtcaaataagctctgaaagatgctgtttgagttggcaattgattattgatcatattattgaacactttataattgatcagtgaacttggcaattgatcattcactggtgactggtgagaatgaagttagtggaaagataggaaatcaatggaaagattgactacagtggattgaaggaggagtggtagattgaatatagaattttctcaagaagcttaagtaaagtgatagcaagagaaaggactgtagctgtaaaactgagattttatgaagttgaaatattgttttttttcttaaaaatgataagaacctttagcatgctgtggcaaagagccaagagagagaaaatggatgtaggtatagagaagagagaataattggtcaagcaagatactcaaggagttgaaggaatgaaataaaaagcacagatggagaaattaggcttaaatagaataaatgatacacccttcaagaaaggctggaaggagttagaaagttgtagatgtagatttaatttatagaattcagctgaagaaaatgatgttatttttattttctctgaagtaggaggaaaaattgttaagagggcaagaatgagggcagcaggatggaatagatagcctgaggcaagtcataaagggtcgcaatagattctgtttgggaaccgaagagtaaattgtcaataatgagtaaattgtcaataataaataaaaataatgatggttcccattgttaattaggtatgtgggtaatttaactagactatatttatcatcacaatagaaaactaaggctcaagatggttaaaaatatcttccttttgtcagctggaaggtgatacaggtgggattagaaatcacatatacatgatttca

SEQ ID NO: 1875 - DNA, 1843 bp, Homo sapiens
aacatgctcttattatctcctttctttaaaaattttctcttaattatctcacattccccttcagctattgccttatttctctgctgctttcgtaatgagaatcctcagaagagttgttgatagatgctctctccattttcttgccatccttcatttatttattaaccaacccccatctgcttttcaacccccttttcctctgaaacttttaatcaaagtcactagtgacattcaccagtttaaaggatatttctctgttagtaccttactagatttttcgacccggttgcatttaacataggctgtcactccttcttgaaacactttcctttcttggtatctatgatatcatatttgcctatttactcttattaattctggtgggttttcagtaactgttgttcgtgtttcttgttctatctccttctgaatattataatcaaaccccttagtttgggctctcttctcttctctttacatacactctttctctgggtgattgtgtcagttcctcatagcttttaatatctcctgtaaattcatgactcacaaatatatatatcagcaatctgatcttctaccctgaattccagacccttatgcctgatgtctgactgctattttgacagtatgtttttgttattgttgtacatctttttttttttttttttttttttttttaaagacagtctcactctgtcacccaggctggagtgcagtgcacaatctcaggtcactgcagcctccccctcctgggttcaagcaattctcctgcctcagcctcccaagtagctgggattacaggttcctgccaccacacccagcaaatttttgtatttttagtagagatggggttccccatgttggtcaggctggtcttgaactcctaacctcaagcagtccatccgcctcggcctcccaaaatgctgggattacaggcatgagccactgcacccggcctattgttgtacgtcataaatctacatgttcaaactaaaacttaatgcagcctcctacccttcctgttccgtaattggctccttcttggtccatttgcttatttgaataacctgtgagtttttcttgattccttccttttcctcaagtcccatgccagctcatcagcaagttcttttgttcctgtatctaaactataacctgggtcttttcatctcaccatcatttcttgtctcctaattaatctgcctgtacctactgttgttccattataatgtattctccatgcaggagccagaatgagtattttaacatgttaaatcagattatataactttgctgtttaaatcccttcagaagttcctaattgcatttggaaatacaactacaaaagaaaaaaaaatcaaactcctcactgtggacgtataagaatttatatggcctgcccttccctgtctctctagcctcatctcattcaattttctcagtacttgatgattgttacactctagatgtactactgatttctttcggttatcagagaatttccgtgccaaattctgccctgccctgccctgccctcccccgccccaccccgcctccaccctgcccccaccccctcccctcccccctccctccctcccttcctcccacttgcttgctttctctctctctctttctctctctcttttctttcttttcttccttcttttcttttctccttccttcctttctttctttttcttctttttagacagagtcttgcactgttgcccaggctggagtgcagtggcgtgatctcggctcactgcaagctctgcctcctgggttcacgccattctcctgcctcagcctcccaagtagctgggactacaggcgcctgcca

SEQ ID NO: 1876 - DNA, 1041 bp, Homo sapiens
aaaaggtctttttggcctatacagattattttctatgtaagctcatttctcactttggcccttgatgccaactttgaactctctccctataacaaaattataatggatacaaactatatccattttttaaattctaggtatctgtcataaaattgtgtagaactgtgggtgtgaggttaatactacctcgttgcttatgtaggataagttatttaaacacagtgatattctatattactagattgctttagtaatgatacttggttttatgtctcacttatctggtagccaaattcctggtagctttaactaaagactatagttacgaacccagaggtaagctcaaaagctgtcagtcagaagctcccacttccacttgtacttttcaatgtgggaaaggtatagaatcaatctccaagccttgaatagagcctgatgaaatgaacgcgttacttatttatcaggctttattactagcgatcaaatatagcacagagaaggattagtagaggaagacattctgacatgaagggacatctgaaaaggctggagataggaagactaaaaactaaaaaggctatttagtgttagcgcaaatgttttactatctcacctcagaatttaatgaagtattttaaatatattgtgacaaagtgtgataagtaatcttagttaagtctttaagaatgatttaacacgatattcactttctctatttaaaaaggcagatagctggacgtggtggcacacgcctgtaatcccagctacttgggaggctggggcgggaggatcacttgaacccagaaatttgagaccagcctggtcaatatagcgagaccccgtctcttaaaaaaaaaaaaattaattagctgggtgtggtggtgcatgcctgtagtcccagctaatagggaggctaaggcaggaggattgctagagcacaggagttcaaggatccagtgagctatgattgtaccactgcactccagcctgggtgacagagtgagacccccatctctttaaaaaaaaaaaaaaaaaagaaca

SEQ ID NO: 1877 - DNA, 1044 bp, Homo sapiens
attttaaaaatagttgaaaggttgaattcatgggactttgagactgataagttagaaatgaatgagagtatgataaccaggtgtcttgatagggtgataatgaaccatcagccaagatagagactttaggaggaacagctagctgatttgaggggagaagaaagtatgtgagtttttttttaatgttaagtttgaagtgtctttggatatccacgtggagagatctcatagatggttggatggctatatgatgctggaagtcaccaaagtgatctgaggtagaaataaaggtaaggaatcattagtttatagatagcagttgaaaccatgggagtggatgagattgtctagaaaaagagggtagtgtgagaagagtagagtgcactacaggagcaagtagagaaaaggatctagctaatgagaccaaacaggaatgatgagagaagtacgcagggcagaaagaatgccatatccaaaaccaggagaaaagaagtgcaaggagggacaggttagtaatgccatgtaaatcaatgataccaactcccagaaagtctgataaatcattttttaaatttggcaacgtgattgctttgacattgtagtttgagatatgatgtagtggaagcagaagccagatagtagtggtttgaggagaaaggtttgggggaaaaaggtagagactttgttatgtctcttttcataagcccaattaagaattgaaagagcaaagataatgtcaggtataggtggtggtaggttcaaaactgagcatgtttatagagtaaacagattgtgtgttcaagatgtaagggatagttgatgtccccagatatgctattatttcaaaattttaacctttaccaagattcttgttctcagttttaccatggagaatggaaaaagtagtacatttaataagtttcctatttgaatatatctctgactaatgattatttcagcatattttaaatttgtttttcatacttttaacaaaacacgaatgctttttaaaaattgatagttcagttttatgtttatgtcaca

SEQ ID NO: 1878 - DNA, 1045 bp, Homo sapiens
tcaggaagagaaacggaaatataccaaaatataacaaagtatattttagaaaatatcaaagcactataaataccaccctcttctccatcaggtgcagactgtgattcctccctaaattatagatctgtgagtttgaaagaacagaaggaatttgataacatttcattgcagcaaagtttttgccaaaccgcttttcacagagcccttgtatcttacatctcagtgtttctgaaagagccaaaattagttcttattgatgctcaagcaactgaggaattatgagcattccattaaataagggtaccagtttgtaactatgtcattgcatgttaatactttttgattcccctaatgactaaatatggttctcaatgtgtgtgatttccatctgaatcaaagggagtcatgtacacaaagctagaacttgatgtagtgctactttgaaatataaaagagtatttccacaacacatgccttcaaactttaaatgaaacccataacagatgtgaaaaaagaattatgacaaggacaacctaatataagttttataaattttaggaaatgtcatctttttactggtttcagagactttttcaaatgttttaaacacaattttcagataacaataatgaaaagctgagccccaaaccagggacaggtgaaccagttttaagtttgcactacagcacagaaggaacaactacaagcacaataaaactgaactttacagatgaatggtaagttaatatttttgtaaagatgttcttagccattttgtaggattgtattagattttaatttttaacacttcgtcatctttatgttttgttttgctataaggtattggttttcaaacttgagtgtgcttcagaatcactgggagagcttgttaagatgcatattactggaccccactctcagaattaggtttggagtgggggtctgagaatttgcatttttaaaaactttccagatgatgccggtgctgctcatcctagaatatttcttctgatagaaaatgcaaaagataatactaataataata

SEQ ID NO: 1879 - DNA, 1034 bp, Homo sapiens
ttcttttttccttgagacagggtcttgctgtgtcgcctaggctggattgcagtggcatgatcatggctcactgcagttttgacctcctaggctcaggcgatcctcccacctcagcttcctgagtagctgggaccacagatgtgtgccaccactcctggcttatttttgtgatttttttgtggagatggggtctcactatgttgcccagcctggtttcaaactcctgagctcaagggatcctcctgtcttagcctcccaaactgctgggattataggtgtgaactgctgcactcagcctaggccttttacaaaatatctttcagtaacattttatttttctgtgagcaggttttgcatatattttttataacttaaagacactttttgttgctgttataaatgcattccttttaaaatttaggctaattgtcccctgctgatatttagaaatgcagttaacttgtatatgattatgtatccagctacattccttttctattatttgtattaattggcccgtagatattttgagttttggtttttgttgttgttttaagagttgttttgttacccaggctggaatacatggcatgatcttagctcactgcatcctgtaactactgggctcaagccatcctcccacctcggcctcccaaatagcagggactacaggtgtgtgtgtaccaccatgcccagctaatttttttcatctttttttagagatgggatcttactgtgttgcccaggctggtcttgaactcctgggctcaagcagccctcctgcctcagactcccaagtagctgggattactggggtgagccaccgtgcctggcctagagcatactttttaaatgaacatttatgctttgatacagttctcgtttattcataattattaccacctcatttactaatgcagccttaattttgtccatacatcttgttttaaatgatttgaagctgggcatggtgactcatgcctgtaatcccagcactttgggaagctgaggtgggtggatcacttgaggtcagg

SEQ ID NO: 1880 - DNA, 1058 bp, Homo sapiens
cacctgatgtacctccttagaaacctagactccaaagaacactgtttgacaaccactgcagtagaacataatatatcaagattttaggagtgggtttcttttttcatttttacatgttttagaataacatgcataatcaaagctaataatactgtgttttctttactcttttatttgcctctaaagacatccacacatagtggtgaactgatttttaatgcgttttaaataaaaggcattgaaaaatattaataattgtaattactaaaagtatttctctttgcgattctcttatctgtgtttccagaccggttggagggtgacagatcagaaggctctggtcaagagaatgaaaatgaggatgaggaataataaactctttttggcaagcacttaaatgttctgaaatttgtataagacatttattatatttttttctttacagagctttagtgcaattttaaggttatggtttttggagtttttccctttttttgggataacctaacattggtttggaatgattgtgtgcatgaatttgggagattgtataaaacaaaactagcagaatgtttttaaaactttttgccgtgtatgaggagtgctagaaaatgcaaagtgcaatattttccctaaccttcaaatgtgggagcttggatcaatgttgaagaataattttcatcatagtgaaaatgttggttcaaataaatttctacacttgccatttgcatgtttgttgctttctaattaaagaaactggttgttttaagataccctgaatttgactttttatttaatgccttgctactttgacccacagttttccaatctctcctgtagcatacgatgactatttttctatattttctagatttaacaaccttttccttttttgcttgtgtgggatagaatcacatagaaggacttccttcatttctccttccacggtacagctgacccttgagcaacccaggggttagtggcaccagcccccctcacagttgaagattcatgtgtaactgttgacttcccaaaaatttgaccattaacagcctgtt

SEQ ID NO: 1881 - DNA, 1050 bp, Homo sapiens
agcagagcatccctcttccatatggagaacaaggatctcctccacagccagagacatctgctgctgagaaggttagctttttgtgtagaggaaataactgcagtaggttattactcagtaagctcagtaggttcagctggacttcaacatccagcttgacaaaggcacatatgtatccacattaggaaacgtcgtaaatgatcaagaggatagaatcagagctttagccaaacaaggtcactttatgacttccgaaaagtgcaagggtcttagtttctggttttcagttatgtaccttgctcaagacacctgacttctctgggtttgttccctctctaaagggggtggtcatatttgccctacctatgtcacaggggctgttagggcaagatgaagccataagattgacgaattgttatacaggataactgaaaagacgactctaagcacacagtatgtcattccttccactgtagtaagacagtaacagggatgtgttatagcggggtgttgggaaattgacaggacagaggatactggaggactagtggggtgaaggagtaactgtcaggaaaaacaatagaagaaagtcaaaatggtattcatctgctctagtgcaggatgttgatgggggagagtggggctatgggaactctactttctctcagttttgctgtgaatctaaaactgctctaaaaaaatttttttttaaagtatttgttggccaggcacggtggctcacacctgtaatcccagcactttgggaggccgaggtgggcagatcacgaggtcaggagttcaagagcagctgaccaacatggtgaaaccctgcctctactaaaaatagaaaaattagccgggcatggtggcatgtgcctgtaatcccagctactcaggagactgaggcaggagaatagcttgaaccgggaggcagagattgcagtgagccgagatcacgccattgcactccagcctgggcaacagagcgagactccatctcaaaaaaataaaaaaagtatttgttaaatgaactgggtcccccacccacag

SEQ ID NO: 1882 - DNA, 1051 bp, Homo sapiens
aaatatgatttcattactgagattttagaataattgagttttctgaaaattctcttttggaatatgttataaaattatttattctaatgatattaaactttcattaactgcttatttataacatgaccaaaaaaaaaaaaacatagacaaacccacaagtgaagcaaatccacccccagtgggtttttgtttgtttgtttttgagacagactctactctgtcgctcaggctggagtgcagtggcatgatgtcggcttactgcaacctccccctcccaggttcaagagactctccggcctcggcctcccgagtagctgggactacaggtgtgcaccaccaagcccagctaatttttgtatttttggtagagatggggttttaccatgttggccaggctggtttctcacttccagccttaggtgatccacctgccttggcctcccaaagtgctaggattacaggtgtgaaccatcgttctaggccccccagtggtttttgaataggaataaggtatgttgatatgttgtagtctctaaaactacctctagttcacctaagacactacactgttccttcttcatgtcttctccatgagagaatcttggccttctttcttggcctttcacatgagaatcctatgaccattccagtctggtcattagctcctttctctgtattctcatagcacttcatacatatgtccatttgcattaatgacagatttatgcatctgtcttctaggtgtagaagtaaattccttaagagtaagcacccaagcaaggcatggtggtgcacacctgtaatcccactcctagagaggctaaggcaggagtattgcttgtgcccaggagtttgagattagcctgtgccaaaacagtgaagtcccatctcaaaaaaaaagagttagcagagcatagcggcacgtgcctgtagtcacagctactcaggaagcagaagtggaaggattgcttgagctcaaagaggtcgaggctgcagtgagctgtgattgtgccactgtacttcagcctaggtgatagagtgagaccctgtc

SEQ ID NO: 1883 - DNA, 1033 bp, Homo sapiens
gagacattttgggaaaccatgagtggggctgtaggttcatggtcctttcaagcctatacgacctcagagtgagaggggtggtggcatagttggaatctgtaggttccaagacatttctgtagttctttcaaagtttatcaagggatggtatctgccagaacagtttcagtatagatgtgactcacctatttttgaaaaaaatgtttgctacagtgtaaagaaaggaggattgtggacattttaaagttctgaagaattggttaactcctatttggtagaaatgaatcttgagactgtaagcttaactcccatccctccctttagcaattttggacttttgaataaatatagttacaaattgccttttggaatttactgtgttgacaagtaattgagcttctgtacatgttaagtataagatatggagaaggatgctggtgtttgtgtttatgtgtgtgtgtgtgtgtatgttttttttttttttaaatgacatgcacatttgagtggtagactgtttatattttgatttttcttccagggcagaaattggtacctatatacacacaccttgctttgcttatagactgattttgaatccagtttcagaggttcagcattcatatgggtccagctgaatggtgatattcccttcaacactcatgtgttctgactgtgtttgcttttctaagggctaacttacagtctgcctgacacacagtgcctggttctttagcattatggagcctgttccttgtatatggtttccttctaagtgacagggctgagctaactggaatttaccaagatacctttggacgtactacattttcactcatagagtagttggtagcatttttttcttcttcttttttattctcttttctcttcttttaaaattaataggagcagagcagaaaatttatcccaattaggtagaagttaaattctgtttagaatttataaaatgttaggagttcaactgtgccaggtatgggtggctcacactgtaatgccaagactttgggaggctgag

SEQ ID NO: 1884 - DNA, 3643 bp, Homo sapiens
ttacagacatgtgccttttatcttgcagcaatgtgttgcttgtgattcgaacatttgagggttacttttggaagcaacaatacattctcgaacctgaatgtcagtagcacaggatgagaagtgggttctgtatcttgtggagtggaatcttcctcatgtacctgtttcctctctggatgttgtcccactgaattcccatgaatacaaacctattcagcaacagcacataagccttgggtgcaagtgattcccaggtggcaaaaggcagccccatcagagatcacgggagcaacagtaagggacagagttttggggtccacttgtccctcagcatggaagccatcaccgtggtcctgcatagagtgagtctgcttctactctggcatctgagaacaagtgactctgctttagacaagcccctggagagcctggccatggagtgaggtagaaaagaagcactttttggtggtatatgctgtttctgaatttgaatctaagcattcttggtgttctgattctgcgcctgactgtggaatgtattttctgacattaggtgcagactctttttctcttgggttttatttcccatccctccctccctctccctgcatatctttctttatgacctcctggcactagatggggaaagaacagagcagcagcagaaaatgctgctgttttttttttggacgagagcccataggagttgaaaaatcctgctgctctcagctatatttttttctccattatttataaatgtttgcttttaaactgattttattttccattctcccctggagttgggccaggggagagtggggtgggaagacagatccctgctgtgcagccagcaggaagtaggcacgcctgcccagtgacctttaaatagtcccagtgtttgcacttagcctgtgctggggacactggggataaactgcaggtggtctcatgtcagcctgatgcctaacctacaaagtgcttttgtgtccacgatcttacctggttcttatggagagccttgtgaggaagcagggattgttataccactgtgcagtcaagggaatcaaggcccacactggtttttggatccacccaaagccacagcttcagcctccttcatgaccccagagtttcctggcctgtttctggttgtgcctcctgtaactgcctgtgactgtttccctcgttttcatcagccaagccatctcctccctggccctccctgcccatctcttttggaagcttcttcctggatctgcaggatgttcactgtcccttgtgttccctttcagctcctccttgttgcctgactacgattagtgccctgtcttgtcagccagcattcctggccctccaggacctccagagtcatcctacaaatgacgtttatctggattgcctttctgttctttgcacagggccaactggtccactagggctcctcctctgtcactgctaaaccaaaggaagtggcctgctggttgtcccctttcttgtggctaattgctgaacctttctttgtcctactgtggctaagaactctgactggtttttttttttttttctttttgagatggagtctcactccgtcgcccaggctggagtgcagtggcgtgatctctgctcactgcaacctccacctcccgggttcaagcaattctcctgcctcagccttccaagtagctgggattacaggtgcccgccaccacgcccgtgctaatttttgtgtttttagtggagacagggtttcaccatgttggccaagctggtctggaactcctgacctcaggtaatccgcccaccttgacctcccaaagtgctgggattacaggtgtgagccactgtgccctgctgatcttttcttctgaggctggggaggtgtgaacaagcctgacggggccagagagaggagctagtcttcccaggttctttctaggctattgatgacatccagtcatctgctcaggtcactaacctgtcctcagccaggaaaggaaattttatgctacccctctggcttttgtgggattctttcacatcccaggtgcctcttggagacagatctcagaagggctgtggtgtcagaagggacatggaggaggtcaggagggctcatggttccttttctttagaactgatacgaggcttggctagtcactgtgagctccagcagctccagcagcctggaataagacacctagaaggctcatccctccatgtccatgtcctttttttttttttagattgaacaaccatgctttgtttaaaaaataatctcagcaaactagggatacaagagaatttcctcaacctgtcgaagggcatctttaaaatatctactgctaacatcctatgtaatgatgaaaggctgaatgttttcccctaagattgagaataagacagagatgtcaactcttaccacttctattcaacgttgtactgaaaattctagccactgcaatcatgttttaattgggagtagggggaaagagggagggaaggagaaaaatgaaaggcctttagattgaaaagaaatgagtaaaactgtctattcacagatattatcatctatgtagaaaaccaaatcaaatccattactaagttactgaaaccagcaagtgagtttcgcaacacagcaggatatataattgatatacacaaatcaattgtgtttctccatgttagaagtaaagaattaggaattgaaaatttaaaaataataccatttacaatagcattaaaatataaaattcttgggaataaacccgacaaactatgtggattatctgtacactgataactaaaaagcattgctaagaaaaattaagacctaagtaaatatcttgttgataggttgagagactcaacattgttgatgttaattctttcccatattaatctatagatataatgcagtccccatccaaagccaagcaggcttttttttttttttttttgtagaaattaaaaactggttttaagattcacatggcatgcagatgatctagaagatccacagtaactctcctgctgtgcagctggttcctaacaggtcatggacctgtccatggcctgtaggttgggaacctctgctacagaggatccagatttaaattcagaagaagcttcatctatttctgtagtttcattttcttgcaataactgctgcatcaaacttgaacttcgcaggattttctgaagctgctcaatttggccatcttgctttttaattgtatttcttaacactagaattttctatttcaagtttttgtacgtggccttgcgtctccttagtacattttatagtcgctgtaagttgattccatttttcttgaaattgaattctcatctgacctaatttcttccttgaatcctacatctcactttctcaatggacgcagtgacgcaatgaagcatccagcaaagcttttgttgttgattgtttaggacgtcaccctgtttttgttgaagttgtctcacaactacttctctttctgctttctctctttcatattgacattgtttttctttcaaatgattaactttattgatcatcctcttgttcttctagcaaaagacggtgctttatgcactcagcttgaagattttgtgctgtagcatcacatttggcttgactatcaat

SEQ ID NO: 1885 - DNA, 1069 bp, Homo sapiens
tccaatgtgccgaatgtgcaatcaagtgtgtgaacctgtgctacagaactagagaaggcaaagaaaatgttgtagctcccagcctttcagccaggcaccagagctcacaggcggagaccaggaatggaagaattaatgttaacaaccaccatttactgagtactacatgctaaggaccatatactcctcttatttaatccttgtagcaatctctgtaaggtaggtaaaattatgaatccacatcttgaagatgagaaattgacactcagagatattaaataatctagccaaggccacagagctaattaagtggtagagctgggatttaaacttaagtcttctgacagtgatgtttcctggttattatgccacattggccagggagagatcatatgcagaaatcatacagttttaatacctttttttctactgccctgccaattttacataggctgcaagggagcccagataaatgaaattctgtgtctaaaaccaaataattcgctggtggccgggccagtaccagaatacttaatcttatcattattccaccatactttgctgcttctcttagcttttctgcagaaacaggaccaatctgcgtcatagctagaaataaagccatggccagaagccctcctgtaaccatgcccttctcagcactgtgtacatgcttgtcaggtggcactccttccttggagtgccagtgaacattcccttcccctctttctctgtctctgcagcccctacccgtgcctgtggaccatcagcaatggtgccggaggccccagtgggccaggcccggaggtgcacgccagcaccccaggagcatttctcctcggaaacccagctgtgacttcacccccttctgtgctctccacccaagcacccacttcggctggtgtggaggttctgggggagccctcgctaaccagcattgctgtgtccacctggacagcagtggcctcgcatcccttcgcgggctggggtggcccaggagcgggtgggcaccattctccttcctcactggatggttaagcaggatcctaggagcctctttgcacagcga

SEQ ID NO: 1886 - DNA, 1039 bp, Homo sapiens
ctttaagtttctttaccacattgttcatatgatacttatttttgattaaaaagaaatggtttatttgggccgggtgtggtggctcacacctgtaatcccagcactttgggaggctgggcggatggatcacaaggtcgggagttcaaggccagcctgagcaatatggtgaaccccatctctactaaaaatacaaaaattagctgggcatagtggtgcacacctgtagtcccagctactcaggaggctgaggcaggagaatcgcttgaacccgggaggtggaggttgcagtgagccaagatcgcgccatcgcactccagcctgggtgacagagcgatactccatctcaaaaaaacaaaatcaaaaacaaaaacaccccccaaaaaaccaaaaaccaaaaacaaacaattatataggtatgtgtctttgtacaggatcctagcttctgtgatagattagagccctgaatctcagtgaattcacacagtaagacttcagtttttacttatgtgacattctgacacggcttctggattgaagaaaccatttcgtggctcttccatttttaacacaggctctcaagtttcccttggtggtagtggtggtggatgtcttctctcttttacctcagccagcaggagaaagtacatagacaaagtgtatatggatgattcttctcagcaaacactggaaacaatgcctattgcttcctttcatattccattagaaatccatcacaggccacgagagggggtgggaaatgtctaggcctgtgcccacgaagaagaggaaacgtgtttggtgaccagctgggccgtttctttacagattgtgataatttgcctcttttcccattgttcctttatcaacccttaaagaaagacactttctctttaggagattctgtccccttgaagaagttttggggacaaaaaattctgccacctctccatttcacctgcttttttctatgggagaagaaataacatatagggaacccagtgacaatcagatgcccactggaccaggttaagcagagatt

SEQ ID NO: 1887 - DNA, 1023 bp, Homo sapiens
aggtgactgctttgaggagatggcatgagaagtcggtgacagaccttcttcactgcatggcttgcagggctgtggtagagtcacacacacaacaacacaaggcaaagcacagaaccagccatcagagaggagcaaaggggctcacagagaagacggcaactagtaatgccctgtttataattaccagttgcaaagactgtgaatgaaataatcaatgaatcctcacaatgagactgtggggaatgcagggtggacattattatttctttttcacagagtggaaatcaaggatcagaggtggtctgagatttgcccagagtggtggtgttaagtttttccctagtacaccaatttctcattctttttgaaacagatcttgaagattgagaattcttttttgttgtcttatactgtgagagaagattgacaatcagaaattgacggaaggaatggagacaaagcattcaagaaggagggaacaatattagaaaaatcacagatgttgaacattctaggatctgggaatcaaagcttcgagttcattagggctagaggaaatttagatcatttaatccaagtcctttattttatagatgcagaaacagacccagagagatgaagttaccctgtccacaggctcagggctggttaatgttagagggattagctgggagcaggcctttgctcatatctacttcacagcattcctatagcatcctatgaagtggattctggaattgtctctagtagaggaaattgagccttaggagattaggaaatttaaatttgctgtgctactgaccaggaaatctaggatttaatcctgtgtcttaaatgatccaaagcctgagctcttcattatggtcttctcaagtctttagaaatagttttggaggctgttgctgggactcagggaaagcatcacagtgagacgctaacagcagggttggaactggtgtctacagagttgaaaggcagggcagctcttttctactacattaaagacttagtgtaattttaagg

SEQ ID NO: 1888 - DNA, 1529 bp, Homo sapiens
gataaagttggaaatgtggagtattttggactgggcaactcccctggttttcctctgcagtattatccgtactatggcaaactcctgcagcccaaatacctgcagcccctgctggccgtacagttcaccaatcttaccatggacactgaaattcgcatagagtgtaaggcgtacggtgagaacattgggtacagtgagaaagaccgttttcagggacgttttgatgtaaaaattgaagttaagagctgatcacaagcacaaatctttcccactagccatttaataagttaaaaaaagatacaaaaacaaaaacctactagtcttgaacaaactgtcatacgtatgggacctacacttaatctatatgctttacactagctttctgcatttaataggttagaatgtaaattaaagtgtagcaatagcaacaaaatatttattctactgtaaatgacaaaagaaaaagaaaaattgagccttgggacgtgcccatttttactgtaaattatgattccgtaactgacttgtagtaagcagtgtttctggcccctaagtattgctgccttgtgtattttatttagtgtacagtactacaggtgcatactctggtcatttttcaagccatgttttattgtatctgttttctactttatgtgagcaaggtttgctgtccaaggtgtaaatattcaacgggaataaaactggcatggtaattttttttttttttttttttttgttttttggctctttcaaaggtaatggcccatcgatgagcatttttaacatactccatagtcttttcctgtggtgttaggtctttatttttatttttttcctgggggctggggtgggggtttgtcatgggggaactgccctttaaattttaagtgacactacagaaaaacacaaaaaggtgatgggttgtgttatgcttgtattgaatgctgtcttgacatctcttgccttgtcctccggtatgttctaaagctgtgtctgagatctggatctgcccatcactttggctagtgacagggctaattaatttgctttatacattttcttttactttccttttttcctttctggaggcatcacatgctggtgctgtgtctttatgaatgttttaaccattttcatggtggaagaattttatatttatgcagttgtacaattttatttttttctgcaagaaaaagtgtaatgtatgaaataaaccaaagtcacttgtttgaaaataaatctttattttgaactttataaaaagcaatgcagtaccccatagactggtgttaaatgttgtctacagtgcaaaatccatgttctaacatatgtaataattgccaggagtacagtgctcttgttgatcttgtattcagtcaggttaaaacaacggacaataaaagaatgaacacattcctcgtgtgtgattcactcttgtctaaatgtcccaacctgtgacttctttactttccacaccactaattatccaagatcttgaagaagtattgaacctgaaacggagaaacaca

SEQ ID NO: 1889 - DNA, 1657 bp, Homo sapiens
caacacaccacctcaaaatctatttattcactatttatttattcatgattctgtgagtctgcagtttagggtgggatgtcctgagacaactttctctgatccacctggggcactagctcacccatgtgacttcagtgacttcattcacatctggctgttggcagaggcagaagtacttgagaaagccatgtgcatcatccagcaggttcaccctatctcagatacctgatgccagtggtttcagggtttctaagagtagcaaaagtgtgagcaggtcgctgtgtgctagcacttttcaagtttctgcttgccttaattttattattgtcccccgggccacagcaggtcatagcgtttagcccagagtcattgtagaaaagtgtggattcacaaagggcagtcattgtggccatttttataaataatctaccacagactgagtaaaagccttgcatgaataccatggatattaatttgaattcttcctttttagattttctttccttagcaatttgttttgtcattttggattagaattatatctgtagaatatttcagttataatagggtacaacttttattccactgaacatctttagttttatttaggtcatctggtaggtataaacttcagaagttaatattcaatatttataaaaaccattaacaagtgtgacacttaaatagtttaaataattcttttgacacaactgtttccaagttgtgttacgtattttaattcaatcaaatgttgaaattgttcagtagatagttttaattataggagaaactcacccccatgacatttggatgtcttaaaagttctgttatctttctttgcagttattcattctttattggatatctgctctgttatttccagtatggaccatgcatttcatgccaatacttggaagtttataattaagtaagtttgtttgttattttttactttttagaaaatgttttccatattccccaatcttaattattcatgattctttagattgcatttaaaacattttgtgtgaatttaatgttcactgacactgctgtctgataatccagatattctacatgtagctctcaagccaaattggacttctttaccctgtggcctctaaaattaaaaaaaatgttcttcctagttagctagtacttcagaaataatgggccatgggccagactagaacttaaccacttttcttctgctactgttgtttaaccagctatcaagtatcctatttctaggattagataaattgataactataattaaaactgaatataatcttttcattaggtacttttaagttgttcacacttaattccatttgtacagtaattttaactttctgaaactgaagcattttaaagggtcaccagggatagtgcctgtagcattcatcagattcttaggggtgagaggagatgtggttgagatgtaaaaatggttaagaatatctactttatacacatacataaaacattaaaggtcagtgtattttcaggtcttaggtacttttcttgtactaccaggacattaagttgccattcagtggttaagagtgttgcctgggagctgtatcacatgtgcttaaatccattcttgaaatcatttactccttctgagcccttgggctatttggttaatttc

SEQ ID NO: 1890 - DNA, 1035 bp, Homo sapiens
aagttattactggaaaggggtcctgatccagaccccaaaagaggtctggatcttgtgcaagaaagaattcaaggtgaatccatagagtaaaatgaaagcaagtttatgaagaaagtaaaggaataaagaatggctactccataggcagagcagccaaatatgtcacattgcatacctatgctagtatttctatagactgtatttccagaaattgaattgctactcaattaaggtgttttaacatttcaacttttaataataatgtattattttatgctcccaccaatggtaaaagaaagtgcttgttaacttacttccttactagtgcagggatattatcagtctttttaatctttgctaatcaaataaccctcaaacctcccccttcccgaaatatatataattaagttataatttggatatttttcagtagcagtttgttttgtcttttttgtgtaatgtgtttttatgtctttacctgttttcttttatatatcattctttctttgatttgtaagacctttttcttttgaccatccgttaaattgatccccatgtaacaaagaataaggtatttaaatttctttcactttcagatcaactgagaaggatcacctcttttgctatcgtaggttaagatttcttttcttttcagtaatgtagaatttaatttaatacctctgttgtcatttgttatttgtatcgcacctaataattcaaagaggagttatattttctcggaaaaattttatactgtgtttaagaggggttttttttgtttttgtttttagaaaatattgtctcatttgtaagcttagctaattttatattcttttcttatttattatgctttcttatttccctttttggatcaggataatgctgactacagattatttcagaaaacactcaaattgtgtcgtttttttgccaactcccttttgcactacgctaaggtaaggctttattatacgttactttatttaattgtagttctctcagaaaacgaattattatccctattccacagaatag

SEQ ID NO: 1891 - DNA, 1072 bp, Homo sapiens
caggctttctgtaccaacacttcatcaaaatagttcttgttaaggtcatcagtgaccaccacattgctgcatccagtagtcaattatagtccttctgtaacctgtcagtagcacttgatcctcttttttgaacactttgttctgttggtttctagggcatgtctcactcttggttctcttctagtcttactagctgctccttctcagcctccttagcaggtttctcttctaagttaagtgtgtcccagcacttactcctcaggcctgttatctgtctattatcatttagtctcaagactttaagtttatgtctcctttaatgtttaactactagtcaggacatctatactaaattgtcccaaactgaactcttgatttccacccatatcatcctcatacccaacaaaatctgttccttttgtaacttctttatttcagtttaagtggcagttcttcaaattgatcaggccaaaaaaccttgccctattaacatgttctgtcaatgttaccttcagtgcacacacgcacacgtacacgcacttctcatcacctgaactgctaccatctgatctgaccccctattattttcttgcctggattttgcaaaaaactttctatctttgcctcgcgctagtttgttctccacaaagtagccaaagtaaatgataaaatacataaatcagatgatgtgacttctctgctcaacccctcaaaatgactttcatcaatggaacttcttgtctttctttccttgttttatttttcttctttacagcattgaattaacctctgctatattatgtatttacttgtacacttgtctgttaactgtcccctttcattagaattgtaaactataaagacagtgactttgtatattctctttattactgtatcacccactcgtggaacagtgcatggcatgtatacataggcacttagtaaacatatgtcaaattaatttaaaaatagttgattgaaaaaataaattcttgcaatgatgctcagtagatgtaattcaagtctgtggaatttcattactatgttttatttgtatatgtcttttatttat

SEQ ID NO: 1892 - DNA, 1050 bp, Homo sapiens
aaatagatttaatgataaatcatctattatgacatgttagagacactgatttcccctagccattcttttttacaattaagaaatttttattaagtttcttttactttcttttcttgaaacatatttcttatttaaaaattatacctggctgggcacagtgaatcacacctgtaatcccagcactttgggaggccgaggtgggcagatcacctgaggtcaggagttcaagaccagcctgaccaatatggtgaaacgccatctctactaaaaatacaaaaattagctgggtgtggtggcatgtacctatagtcccagctactcgggaggctgagacaggagaatcgcttgaacccagacggtggaggttgcagtgagctgagattacaccactgcactccaggctgggtgacagagtgagactctgactcaaacaaaaaaaaattattcctttacgtattaatcagatttctgctgaattaatgtgtttttattacatgtaagacctgccatgtgaactgcagtttccacaatgtcttcttctggttgttgtcatggataagctgccatctcagcctaaggaagtgcaaaccctgtggtgcacagacagccaggtctcagaaacgacaaccaggtagcaaacatgtttttatccagtcatattaccaatggttaagaaggccctgttgtttggaatggtcttgaaattaagtttgtgtgttttttttttaaatcagatatttatgttaatagttattgtgtagacacacatatatattgctactttataaaagcagataaatataaaatatataaacctatattagatgctaaaaatattttaatatttaattttgttcagtattgcttaatggtcagcattataaacattgattgtaatagagtagctataagtagaaacatttaaaaacgagctctgataaatagaacactagacactgtaaggtatatcctggcaaatttaacctttaatcatcttccttgccaacaccgtagtccaggctctagtttctttcttcctggattactctg

SEQ ID NO: 1893 - DNA, 1815 bp, Homo sapiens
aagaggtttctctcttctgtctctctaatatgccttagacaagtcgactcttgattttgttgtattttttttttaagtcaagatgatttgagaggaacttgagtttgacattgatagatacttttggcaaaagaagtcatgttttatgaatgggtacagacagaaaattattttataatgatttcatcatcttaacattaacattttttgcttttaaattctgaggtgttttatgtgttccatataagatgattatgacctatttgttacatatttttttccctggcctttaagatcttatgtgggccatacatcttttgttttctaatagtcttattgtatcatatatttcttggtttacctttaaaggattttgtagatcagatccagtgaggtgtgtaataacctgaacagctgacatctatgtctccatggctgatggtctggattatcacttacacactttactaaatccttaacatatctttcacaaagcagataaagagtgatttttatgttatgtgttttatgtctgaagtttcctttaaataaaagctttcttagtgcattatgttgtaggaatggatttcttctagttcattatgataaaattgattccaggatggaatgatactatattatgataggaattgataaaattgaatttataaaatttttttgttagtggtggtttttttcttagagacagggtctcattctgtcacccaggctggaatgcagtggtgtgcaatcatagttcactacagcctcaaacttctgggtgcaaatggtcctcctccctcaccctgctgagtagctgggactacaggcatgcgccactatgcccagctgatttttaaaactttttgtggatatggagttcttgctgtgttgcccaggctagtttcaaactcccgggctcaagcagtcctcccaccttggcctcccaaagtgctgggattacagttgtgaaccaccacactcagcccctgtaacatcttttaatgaagcttctgtcttgtagagttttatctacctctctactattgtagttagatcttaaaaagttccatgaattgtctttgagtaggaggactgacatacccagttatcatcaaaatgataattagaaatagaaattacagtgttaaatatgtcagaagttcaatctcattctaaatttagattcattgaagataagaaaagccccaaattaaaagtcaatattacctacaatcttttcccctagaaagagctgctattaatattttggcatattctcttcttgtaaaaattctgattctaaattagtcagtctctcctctctctctcatgtctttttccagataaagtcatgccctggagaatgttatcaactcatcaacctatcaatactgttgaagcgtctctttttcttcatggcaccaccccatcaggcaaggaaggatatcatctttgtcactgtctgtgaagctgctcagagttggattcagactcctttgatagcctttttttttccatttttaaaaatttatcttattattttttttgagacagagtctcgctctgtcacccaggctggttttacagtggctcgatcacagctcactgcagcctcgacttcctgggctcaagcaatcctcccacctcagcctcctgagtagctgggactacaggcacacaccactacgcctggctaatttttaaaaaaattacttgtagagactgggtctcactatgttgcctaggctggtctcaaactcctgggctcaagtgatccatctctgccttccaaagtgctgagattgcaggtgt

SEQ ID NO: 1894 - DNA, 1050 bp, Homo sapiens
gtcttatggtcctcggtttgaatcctggcataccatgaccttaggcaagtcatcctttctgaacttcattttccttgtctgcaaagcagaagatatgtataactattttgaaaaagtttgtaaagacttggaaataatacatgcaaaacaggatagtgctgggtttaagagggtgctcagtaaatgctaggagttatttctgactagggtttttgcctcaagtccaagtcttttcctgccctagagtggttggccaggaaccagaggtactacacctacctcttagccttcttttcgtagccccacctattagccctctaagagcacggggagcttgcttgcttacaaaagaattttctactccagatatcttagaagaagtgggactgggagggaaagggtcacatgtcataagactttaagaaagtcactttcctttttttttttttttttttttttttaaatagagacagggtctggttatgttgcccaggctggtctcaaacttgaactcagacgatcctcctgcctcggcgtcccaaagtgctgggattagaggtgtgagctattgagctcagctgtcactttccttttaacctcaattttcttatttatacaacaggaataaaattattttcccaaggtggttatgaaattttaacttttaaaataatataactcagaatgaattagctatgaggtctagaagcagtgttctaaattagataaattatagtttatgcctagagatctcttactctcagttttctaaatttttccaaataattgagactatcagatatgtaaattataggtaaatgaggggttacttttaatttgtatcttcagttatcaaatgcagattttctttatgtacaagttattgtgataaaatttaagaaaacctgaatctgcatacctattttaagagtccttaggagagttaattataaaattgagatagatactaatactcatatggcagttaagaaacttgataagatacacatatggcatgaaaagaccatttaacaaatgttaggtctcctc

SEQ ID NO: 1895 - DNA, 1042 bp, Homo sapiens
aatatattctctttaattgtattttctaattgttttctgctgatatataaaaaatacaagacaaaagaaaagtcaacaaaagacatgaatagatatttcctagaaaaggaaatatgaagagatgctcatcaccaccaaggagcagagaattacaaatcaagaatacagtgaggtactattttacacccatttgattgacaaaaattaaaacatctgacagtatcgtgtattgaagagaaagtgcatccacaggatcttatacattactagagggagcacactttggaaagcattttcacatttcttctaaagttatattttgtgactcagtagttcttagataatatccaaagcaaattcttgtacatgtaaaataagagacacattattgaaatttacaaaagcaaaaacctgtaaccaacctaaatgtctatcagtggaagaagatcaatagactctggtttattcacacaatgaaatgttatacaacaaaatgaatgactgctgaaacatagacaatatgaatgactattgacagtgtaatattaagtaaaacagatgtacagcacaaaaccctttttataaagtcaaacaactaagtaaatactttttagaaatatttgtagatgcaatatgactattagagaaggaagagaataatcaacatatgattcaaatgatagttttctgaggtggagggagcagggcttaaataaaggatatggagtatatatcacaaactggtagcccattagcttaatttaacccaaaaatgtatgtggcttttcagctttgcctcctttctttccccttctttcttttttccctcctttcttcctgcctgccttcctttctttcccttcttccctccctccctctttcattcctttctttcttctttgtctctctttcttttatccaatctttacatttcttttagttaataatggtgataatcattgtgttatttgctaagccagctatacctgttgcctttgtttgggggtaggtccatgtactaggttagccattgcattgtgag

SEQ ID NO: 1896 - DNA, 1022 bp, Homo sapiens
tccaagttgggctgggcacagtggctcacacctgtaatcccagcacttagggaggcagaggcgggaggatagcttgagcctaggagttcgagacctgactgggtaatatagcgacaccctgttctccacaaaaaggaaaaaagaaagacaaaaaaaagtcttaagagttgggaaaaagtgagcaaattgaaagaaaatattaatatatgaaataaacattggttattgtctgaaacatgttaaggtggtggagactttatagaaaactctaaaaggtataaataatatgacatcagctacaaaccaatttttattaatctccattctgcatataatacataattaacttacacaaatttctttgtactcctaaacacatgccacagtattctggcttccagtttgtggattcctagattatatatataatggatttcagaggtccaatttatgtaagcctctttactttagatcgtagtctttgttcccattagagcaaaataatgaactgcagatgggtttcttttaagaggacttttgaaagaacatatacataaatcttcttgattaaattttatacttagaggactgagactggtaaggtgttggatagggtagcagtttctttttctttcataaactcatttttatgctttttttgccccctaggcaagaaaaatctcgttgggaagtcctccaacaagaacaacggctaatggaagagaaaaataaacgtaaaaaagctcttttggctaaagctattgcagaaaggtgaggcacctgaaccaggagaggctgtttgtaacctgtaaccagttgtgtcatgtgttatatttgttttcccatgtctcttttaataaactgatattttttcttcaaccattacttttaagactaactaaacaaattatgctttataagtgatactgaaatactagttataatttattaaagagaactttttaagcatagagcatattaaatttgtaaatatagttgcagttttaaagaccttcattagt

SEQ ID NO: 1897 - DNA, 2233 bp, Homo sapiens
ttccagtctggtggcccttccggccacccctttaaccccagctttccctcccccttctttcgatcagagatcggcggagaccctcgaagtgcgcaaacttgacactcaccctgaccggtaaggaaagcgagggtgtgggggccgcgatcaaagagggccccatcgggaacggccagagtgcggcctggggcgtgggagcgcacccagaccctggcgcccggaggctagggggccgcgtggagagggccttgggtccgggcatttcccttctgtttggttaccatcatctctgtgtctggggaagtcggcctccagcttggggagcgggaaaccggagtcagacccgccccatgtggtctgcagcgggagttctggaccggtctgtcttgctcccacctagaccccagtcctggccctgcgaggggattacgcatgttgccgggtaagcgaagggggtttccgtcttcctggactggcggacgtgaagtcttttttttttttttttttttttagtgtcgggtatgcgtttccccaaacaactgaaggactcagccggggctttcactgtctacctcttcctgtgtagtgagggtgggacttgcaatgagcaatgtatgggagggtctggtttaaagacctggttagatgagaggctcttcggggaatcaagaccaaccctacttccgctagggaagtgctgcccaactccggaggaggatttgggtagtcttttcacactctaggccgctccatcctctaacttgcgtggtgaatctcggtagctccctgtctttgagatagcgttgatattggtggtgtcagggtaaaggccccgttttaggactgaagaaaagggcatggggccactatagagacattgatagagtcttccttcctttgcatgagaggagtacctttaatttaaagggatgtatgtgtgttttgacattatttgggatcttttgagggtctgacatgcctgatgtttgctggcttataaagctacctggatttccgcattggctggttttcagcctgggttcatagattcatacctcgttagagtacttagaattgtacagtaggcggctctgctgtaagattttcatttggaatgcaccagaagaatcggaggattttttgattgttgagtacttaatagcttactcctgcaaataaaaataatagggtgatactaagcacctaccaagcctaaccccaccatttttcaaaactagatttcacctcccatattggtaattaagatgctgctttgactggagccatttttaggtgtgtgtcacagatgcactgcagcatcttttctggctcaccccaaatgcattgatcccctaaaaaattaggaataaattgaacttgaattttgtctttagcatgtagtcaaatagtaattctctccttttctgtaagtggattttcagaatatagcctttttaagtgattgtgtttgctctgcttagcttatgtgtggctgttctccattaggtgaccttttgctatacactgagcacagtaataagtccttttcatacattttttttttaatctccacaacagacctttgagaaaagtgctattaagatcatccccattttacagatgaggaaatgaaatctgagagagtagtctgaccaaggtcacatagcagttattggtggtattgtgtaggttcaattccatactgtctgaacccaaaggggatgctctaaaccttcaacctgctttttaaattataaactacagtaactaaataagataaagcattattaactagtagtttttctttagcttgactagtatatgaatattgttgcatgctaaggttaaagttttgaaagttgtaaaaatggaatatatccactttggacttggggtagaggctaatttttttgtgtccttttctatttgagtgcttagagataacttaaaactaactctaccatgtcgtagatataatttttaaatttaggcgtctgatctatattattggtagaatattccctcatctgtaaaatggtgatgataataggacttccctcagaggcttttataggagtaaaaaaagataatggataatgtatgtaaagggcttattactatgcttagtgcatagtaaaaggtcaactaatagtggagggagaatggtaggatattggtagaagaaaatactctcttccaagcaataaataatctgtaaattctcagggtgatg

SEQ ID NO: 1898 - DNA, 1028 bp, Homo sapiens
atggatacatgtatgtggttggagaatgggtatctagataagttaataattcattttttcttccctgtttgccagtgaacaatctgaaggtacagggctgctatatatggttatgcagcttgtatactgcccaaagatgctggactgaaggaagcaacaagtcagcctgtgttctgcttacagagtcctgtgccccagcttaggcctcgcagagggaactgtgcctccacttctctctccaaggcatcagctccttgccaaaagtgtctgtatttccccagaaggatgtatttttcctagttacataaaggccctatggagagcaatggatgctctgaaagactccttaaggagacatattaaggatacatttagaacaacatcaaaaacaattgggaaattggagaaatggtcactaaggaacaaaaagctttgaactttttgctgagatgggttaggtggttgggcaagtacagaattctcatttatccagtgtactttaaagatctgtattgtagcttattaaatatttttattaatcaagaaactatattaaatatcatagtttatcatatttcaaagaagagtgataagagtaaaacaatacttaacacaatttaatcttacccaaaaactttgtaattttggggtttaaattaaaatttagatttttggtcatgtggctggtagttttatatataagtaactttttaatgttaggttttataattaaagctatataaattttatagctcttaattgaagaagcacaatagggaaggtacacagttacttctgaaggttaggaaaatggaacagtggcattttattttgaaaacagaggacattgaaaacaaaggaggctttagacaggtgaattttaagtttatatttggaaatttgatttgtggtgtacagttctttaagttttagtacgtatggatttttgtagcccccacaactaggatacagaatgtagaaagataaaacatctcccaactgtagaactagagtcttctggcattttg

SEQ ID NO: 1899 - DNA, 1042 bp, Homo sapiens
ctcactgtagcctcaacctcctaggctcaagcgatccttctgtctcagtctcctgagcatctgggagacaggcatgtgccaccaggcctggctaaattttattttttgtagagatgaggtctcaccatgttacccagattggtcttgaactcctgggctcaagtggtcctcccaccttcgcctttcaaagtgctggtattacaggtgtaagccactgcgcgtggccctaatcgggtatttttacgttatactatatctttggagctcagattttggtggggcagtggggggatacaaggtctccttttgtcccccaggctggagtgcagtggcacaatcatggctcactgtagcctcaacctcctaggctccagtgagcctcccatcttggcctgccaagtagctgggactacaggcatgagccaccatacccagctaattttttttttttttttttttttttaagaaaagacaaagtcttgctgtgttgcccaggctggtcttgaactcctgagctcaagccatccttccgcctcggcttccgaaattcctggaattacaggcatgagccactatgccctgccaataattactattttattgctagagcttttagtcaaccttaactgaaatcaccagtcctttctgctctcctcctcattctcttctgacttcctctcttagtccattcatgctgctgtaacaaaatgcctgagactgggtaacttataaataacagaaattaatttctgttggtactgaaggctggaaagtccaagatcaagttatcgacaggcaggatctccgcctccaagatggcaccttgttcatgtcctcagatgacagaagtgcatagctagttccctccagccctttcataaggcacacatcacatctgtgagggcagagcccacatggcccaatcacctcctaaagaccccacctcttaaaagtgttgcattgggggttaagtttcagcatgaaatttggaagaaacataggcattcaaaccattttctttcactgtctggattagacttca

SEQ ID NO: 1900 - DNA, 1027 bp, Homo sapiens
cagcactgtgttgaatagaaatggtaaaagtggacattctagctgtgtactagatttcaggaaaaagccttcaggtttttcccattgattttgatgttagctgtgggatttttgtaaatgacctttattatgttgaggaattttcctctgtacctgttttgttgagagtttttatcatgaaaggatgttaaactttgtcacgtggttttctgcatttattgagatgatcatttggtttttacttttcattctgttaaactgtggtatatcacattgatttgcatatattaaaccaatcttgcattctagggataaatcaaacttggtttaatgtgttattgagaaggattggtattgtcttgattttaagtagggaagttaaggttcattttatgattcttttaagcttgagtgttctgcgatggctagagttaaatcggatgttctataaccctgtggttaaattgtgtattactactttgtgttccttcataagaatatggagaagctgaacttgacattttattttgatttttgtttagttgtaacgttggacattttaatacgcttgcttactaacatttctctagtgaattgtctgttcaaagctttactctttgggctgctttgatttgttgagttcttataacatatttacattttgtcaagtgttgattattttcttcactgaccatcaatttaattttttttttctttttctttttccttttttttgagacagagtcttgctctgtcgcccaggctggagtgcagtggcatgatctctgctcaccgcaagctccgccttccaggttgaagccattctcctgcctcagcctcccgagtagctgggactacaggcacctgccaccatgcctggctaattttttgtatttttagtagagacgggtttcaccgtgttagccaggatggtctcgatctcctgacctcacgatccacctgcctcagccccccaaagtgctgggattacaggccaaagccaccgtgcccggcccaatttgatttt

SEQ ID NO: 1901 - DNA, 1207 bp, Homo sapiens
gtagctgggattacaggtgcctgccaccatgcctggctaatttttgtatttttagtagagacggggtttcaccatgttggccaggctggtcttgaactcctgacctcaggtgatcgcctgcctcagtctcccaaagtgctgggattacaggtgtgagccatcgtgcccggccagaaacatggttctgcgaaccgcagtagcagtaggtgtaggaaggaaagtttggatgttagatacaggttggtttggagatttgctcctaggaagtttaaggagttcttttctcatgatgttgctttctctctaatatacagaaagggtcttcaccaagagtgctgcttgagtaataatggtgttcagaaaagtccaagatttcaggattcttagttaaataacttaagcaagttgactgtttttcttgatacatcagttcctttttttttcacctgatgaaaaagctctttgaattttaattttgtcaggtagtgaatatttactgtcctcttttgtcactgtagatgaatattctttctatatctttgtacatgttactggtaaatttgccaataggatagattttggtagtacattctcttttcacaacatcatcatcattagcggtcttggggtaaaattaattgtatacattcttctacatatagtagcaaattgtattagtgtagtcctattggttgtaggtcagtcttttttcaggttgtcggttgtctcaaggaaagatggtttattgtaaacgtatacgtgaaaagcgaaatggttatctacactgttatgtgggaggaggcagcatagtgtaatggattgaacccgacaccctagtttcaaattcaatctgatttagtctttatgtgtaaaaatcaagacagtaactacattgtaaagttgtttgactgaaatgagataatagaggtgagaatgcctgataaattttatggaactatacaaacgttgggtggcattttacatgcatataaaatgacatctctgctgattctgtaattgacaaatataaaactaacggatgaaacgaaatttataaaagtaaagtggatataggctttactttgatgctttttgcttggtatacctattctatactatctttggctcctgtgtttcagttctcaatgttttcagctattgatcgtttctatggtagaattagccatcttctaccctactgctacaa

SEQ ID NO: 1902 - DNA, 1027 bp, Homo sapiens
tgttaaagaatgaagcccttcccctttctttgtagggaacttatgtttgagtacctgctatttgctaagtgttatgctgtctgtattacatattacatattttatactctttaaagtcttttgactatagtaacttttggttaattttccctattaaaagtatttcaatttgtcagggtagaacagatgacagaattgggaatcacaaccttgcttatgtcatagcctttattaggctccccgctttcatactaccaccaactcaggtattccctttccaatatgattaagagttgactccgatacctaaattccatgatactaaggatgtctgtctgccaatttactgtgtatctccagcattgaaactgcctgatgtttcataggtgctcaagtaataatttgtatatactgtagcaagaaagttaggatagaattaatagtgtccatcttagtcatccttctttcaacaactatttagacttctgtatgtcaaggattttgccagactcttagctaattgaatgaccaagcctaaatagtggtaatttaaaaaaaataagacaagccattggatacttgatgttttcttgcctatctcttatcaaaattctatactcctgcctggggagatttatatagtaaatttgactacttctgtagtaatgtatcaaatacgtaaatgcttgttagctgtagtaaaattattttatagtaatgagtcagttataggtatgagtgtcccagaaacacattgcattttgtgagcctcttaactactttcttatttttaagcattacctcattacaagaattgaataaaactgtacaccctttcaaaacaccttttactcatgtgaatgcattaggcaggttgctgttacctctttgaataacagtagtaagtacagtggtgatcctgttgactgccaggtggggagtttgcttagctttagccctcaactaatttcaccagtccagactgtatgtatgtttatactgctatttttaattataagtgttcact

SEQ ID NO: 1903 - DNA, 1042 bp, Homo sapiens
actgtgttttggtagagccataaagcattgttaaaggatatactcaaggctcttaaaaaggttttttaaaaaatctcttgggctagctaagttccaatgtcaagagccatgtatgagtcaatgatattggttaaggaaaggagtctttaagataccctgtgccccacatcattttatctttacctctgcatatccaagcaaagcttgtaccttcaaagtatccagccatcgcatagattgttagaaaccatactcatttttcatctatgtccccaacatctcctgtttcagacatgctgccacgattcctgagaggagaagagctagaaagtagccataaagcaccactgctgtaatattcccctttcccccaaggaatgatggaatccccagcagaatttagttttcccactttcgaaacaggaactgtctataaaacattctatggaagaaccaatctgggccctcaagctaacaaaactagctgttttaatttatagaagtacaaaaaataggtagataggaagttgggtgaatagtgaggtgtaataatcttagctgtaaattaaatcaaagtaaagtaaatgaagcaataaattaaataaaggcattttagcctcatcttgatcttggggtctttattcatcaaacactatttcagtaatatgatttgaacgaattctgagaattcttagcagaggaatttgatgtgtattgaaaatgtaaggagtcataatgaaagagaaacaagctcttcacttgcatggtcatcttaaatgagtcctctggaatggtactggtagattactgtcttagactttcatctcctcatggctgatcattagcttttcaaaggagtctaggtgaattttaaagtgatatggctatgaacagtcatcactgaaatgtggaataatttaagagaaagaggcagagagctctatcctgggagggtggtttgtattatcttcagtataaaagttacctttaatgtttttttaaaaaaatctataggaatccaagtgaatagtcagtttcagca

SEQ ID NO: 1904 - DNA, 1043 bp, Homo sapiens
gaatggccagtatgcacatgaaaagatattcagtgtctttagttattagggaaatacaagttaaaaccactgagattttactgcactgccagaattaaagactgatgacaccatgtgttggcaaggatgtatagagcagctggcacccttatacattggaaaaccttataaccactttggaaaacagtttggcagtttcttgtaaatgaaatatctatttaccatatgacacaggattttcacttgtagctgtttatccaacagccaggaaaacatacatttacacaaagacttacgcatgaatgttcatagctgttttattcatagtttaaaaactggaagcaacccacgtgtctatcatacatgaaacaacgtgcccacaatggaatactatccagcagtaaaatggagcaaactacttatacataaaataacctcaatgccattatacttagcaaaagaagctagcacaaaagagaatataattttatacatgtatataaaattctaggacaaacagaactatacaaggttagggttggggtgcttggggccacagggggaggcagaggagtgatggaaatgttgtgtctgcgttggagcagtggttacacaggtgtatcatttgtccaaactcatcaaactatacacttaaaatatgtgcagcacagcacattttatgtaaattttacttttatgaagtgagttgtgtaaattaggcactaatatatttggtttttcagcttatctctgagctgtggatgaagaaactcagcacaagagagatgaagtaatttgcatatgatggcactattagtaaatggtagtctgcattcatttaaaaagatagtcaagtgttttcgttgtgtcattgtttaatctttttataagcattccagctgggttacatatggctcttaagatttcttcaccctagtagcttttaaaatcaatatgttaaaaacatttttttaattacttttattgtttttgcatagttgcaagcagtgattttaaaacctgtcattgttttataacacatt

SEQ ID NO: 1905 - DNA, 1840 bp, Homo sapiens
gctgcttctaaagtatccatgctaaatttcctttgtctctaaatttagattttgagattcactgttgtgcttctagttttattcagcaaatactgaatgagcaacaacgtctggcacaataataggtacatactcagtaaacattggaccgctggattaattattctggtcttagtttggtgaattatctagatgtaatatatttcccatcttatgtgttttcattttaatgtgtatgttcatcagagaaatttctgatatttttgtggggtttttccttctccatgcctgatacccagtgttagtcagaaatagagttgtcataactcatctgataccttaatgtttcagcatccacctccagatcgacaggcagtacctggaagaccaggcccctttccctccaagcagcaagtagctgatgaagatgaaatatggaagcaaagacgaagacaacaatcagaaatttctgcagcagtagaacgtgctcgtaaacggcgtgaagaggaagagcgaagaatggaagaacaaaggaaggcagcttgtgcggagaaactgaaacgattggatgagaagcttggcatcctggaaaaacaaccatctccagaggaaattagggaaagggagcgagaaaaagaacgggagcgtgagaaagaacttgaaaaagaacaagaacaggagcgagagaaggagagggaaaaagacagagagagacagcaggaaaaggagaaagagctggagaaggagcaggaaaaacaaagagaaatggagaaagaaagaaagcaagaaaaagaaaaagaactagaacggcagaaagaaaaggaaaaagaactacaaaagatgaaagaacaagaaaaggaatgtgagctggagaaggaaagggaaaaattagaggagaaaattgaacccagagaacctaatttagagcccatggtagaaaaacaagaaagtgaaaacagctgtaataaaggtttgatagtattcttcattctcttttaaaaactttacaaagagctttatgttggttacagtttggggtttgtatattttaaatatatgtaatcaatataaaagtgattgttttatgatagcatttgcagtacaaaatatgggctagagccgtgttttctaattctgtatatgaacagacgtctctgaagtgtttctcagttattagatgagcttcatttctgttttatctgcagaattgtattggcttcatagtcacatatactgattctccccctgcttttttctgactccaagacatttaactaaacaaaatctcatttgttcacatgcattaatacctctaaaactgaactggcatagagcttaatgagtatgttggattatcataattaaatgactgcacctagttcataatttcaggtttgctgtttaatcagtttaaacatgcaagcttccatggtgtagttgatatgctattaaactgtaatttcctggagtaattatactttaaaataaaattctttttctagatctaatcaacttttttgttcttctccgagttggcttgtagactgattaatggcattcaaatatagtataaagccttggcaaagttaaagttcagggttttcgttttttgtttgttgttgttgtggtggtggtggttgttgttgtttttgagacagagtctctctctgtctccaggctggagtgcagtggcggaatctcagctcactgcaaactccacctcccaggttcaagtgattctcctgccccagcctcccaagtagctggggctacaggcgcgtgccaccgcacccagctaatttttgtatttttagtagagacggggtttcactatgttggc

SEQ ID NO: 1906 - DNA, 1012 bp, Homo sapiens
cttgctctgttattcaggctggagtgcgttggtatgatcttggctcactgcagcgttcacctcccaggctcaagtgatcggcttacctcagcttcctgagtggctgagactacatgcgttcaccaccacaccccgctaatctttgtggggttttttgttttgtttttgtttttgtttttgtttttgagacagagtcttgctctgtctcccaggctggagtgcagtggcgcgatctcagctcactgcaagctctgcctcccgggttcacaccattcttctgcctcagcctcctgagtagctgggactacaggcacccgccaccacgcccagctaaatttttgtatttttagtagagacggggtttcaccgtgttagccaggatggtctcgatctcctgaccttgtgataatctttgtattttttatagagatggggttttgccgtgttgcccaggctggtcttgaactcttgggctcaagcagtctgactgccttacctcccaaagtgctgggattatagacgtgagccatcgtgtgcagccacttgggatgtctttattgtagagtaggtgtgaagaaatttaggtgtatctacaatgcttatataatatagctagatgtaatttttccattagtgagatgtttctttttaacagtattttagggaacatttttaaggccaagataaggagaaatacaataatacaaagttaactttgaaatggcgcacaattggtgatgactgtaataatttatagccatacagttggaacttcctgcccttttatgggctatatttttttggtaatgttttataatgttttataattatttgtaattaactgggacagataagcttactcaagtgtactctttcattctaggtggaaattactggtcttgatggattagaaattcacatcagcatggtcttaactttgtttttccttaaggaataaacttcatttatttatttctattttttatttttattttttgagaagggtctcgct

SEQ ID NO: 1907 - DNA, 1020 bp, Homo sapiens
agagaggcctcgaccagattcaagaccagcagttaaaaaagaatcaactttgcctcccaggacctattggaaagaagctagagagagagattggtttccagatcaaggatacagaggtcgaggccgaggtgaatattactccagaggtcgaagctatagaggttcttatggagggcgtggcaggggtggtaggggacacactcgagattatcctcagtatagagacaataagccaagagcagagcatataccctcagggcctctcagacagcgagaagaaagtgaaacacggagtgagagctctgattttgaagttgtccccaaaagaagacgacagcggggttcagagactgacacagacagtgaaattcatgaaagtgcaagtgacaaggacagtttaagtaaaggcaaacttcccaaaagagaggaacggcctgaaaacaaaaaacctgtaaagcctcattcttctttcaagcctgataatcatgttcgaatagataatagactgctagaaaagccttatgtaagggatgacgataaagctaaaccaggctttcttcctaaaggagagcctacaaggagaggcagagggggaacattcaggcgtggtggaagggatcctggaggccgtccatcacgcccttccactttacgaagaccagcttatcgggacaatcagtggaacccaaggcagtcagaagttcctaaaccagaagatggagagccgccaagaagacatgagcagtttattcctatagcagcagataaacgacctccaaaatttgagcgaaaatttgacccagctagagaaaggcctcgaaggcagcgtcctactcgaccaccaaggcaagacaagccacctcgatttagacggctaagagagagggaggctgcttcaaaatcaaatgaggtggtagcagtgcccacaaatggcacagttaataatgtggctcaagaaccagttaatactcttggggatatttccgggaataagacaccagatttatctaatcagaactc

SEQ ID NO: 1908 - DNA, 1009 bp, Homo sapiens
aatttttgtatttttagtagagacagagttttgccatgttggccaggctggtctcaaacttccggcctcaagcagtatgcccatctcggcctccaaaagtgctgggattacagacgtgagccactgcacctggccagttttaggatttttattttcaactttaagagtatgaaatcttttcagatctttacaatgaatggccatgcaatagggtgagaaataggttatacactataagttataggaactaggcctttggctagttttttttttttttttaagtactactgtactaaacatttttattaattttcatttgaaaaacagaaaatatcttaaatcctttcccacacccacaggtgttgttataattgatgatcatcctgaagtaacagtaattgaagatccccagtcaaatttgaatgatgatggttttactgaagtggtatccaaaaaacaacaaaaacgtttacaggatgaagaacgccgaaagaaggaagaacaagtcatacaggtttaaatcttgtttcaacttgttgctagttatctagatttgttgcccaaagtgtatcagcaaatgttcaaggtttttatacttgtcaaggctgttttcattattcaagtgttaaaagtgacatcatcttcccaacttttaatcattttgaccagaatcaaaggaaattttaaataaaatataaggactgtagctccttatattttgacttacagcaaagaccatctttttttttttttttaaatactgtaagttctagggtacatgtgcacaacatgcaggtttgttacatatgtatacatgtgctatgttggtgtgctgcacccattaactcatcgtttacactaggtatttctcctaatgctatccctcccccctccccccatcccacaacaggcccaggtgtgtgatgttccctgccctgtgtgcaagtgttctcgttgttcagttcctacctatgagtgagaacatgaggtgtttggttttctgtccttg

SEQ ID NO: 1909 - DNA, 1023 bp, Homo sapiens
aaaaatacaaaaattaatgtcatggtggcgcacgcctgtaatcccagctacttcagtgactcaggcacaagaatcacttgagcctggaaggcagaggttgcagtgagctgagatcatgccactgcactccagcctgcatgatagcgagactcaaaaaaaagaggaagaagtgagcaattaattcagtttaaaatgtattttttttctattactacttcacaggagtctgtaacagactatactacaccctcttcttctttgcctaacaccgtggctactaataatacaaagatggaggatactttggttaataatgtaagtaatcagtttgagatgtggcaagtttggattggaacctggctattattatcaagcacattatttcatgttttatttactgtagtgatcaatatttaactcagggaaagagttgatagtaaatttgtgtttaggagtactgtaatataattagcaaaaatagtcaaagctgagttttttatttttcctctgaaagccatctgctttccatttaagatgaaggtttgtggtgcgtaggcttggtttcgtgtaaatactaatcttattaacctggtattggtaagaagttgttttagctctcacatttacaaatttaacatgaacggttggtgattttgttcttacataaaacctttttataattcagtgaaacccaacttatttaagataactaaaattagaattaaaagacaactatagaattcccaaagaatcaagtatgtctttaaaaaagaaaaaataccagcgtgttaacaacattcttgttgtgtagattgagctatattgtattgtatacataagtacgccaaacactctgatatgctctaatataaggtgatgttaagtcatgttgtaacttaggacctagttttccagagcaaccatgttactaatataattcaaggttgtgttaaaagtctgtacagttcatcattttgcttagctcactgtctgatagatgaaaaattgttagcccagaaacat

SEQ ID NO: 1910 - DNA, 1038 bp, Homo sapiens
gttagtattactcagtagtacaatcatcttgtatcttgaatgtcttgaagattaaatgcaggtggccttttggattatcatagcacagctgctttcaacatgtatgaaagaatctccattaggtagtccatagtatcacaaagtgattatcttaaaactctcaagcatcccagttatttttcctgaacaactgaacgaaccatccaaaacgtaatacataataaagtcccaagatccagagataaaggcagtgagtttctaatatcttaaagtttctaacaatatttgccataattattactatagcagaacagttttattgtaatgagatggtgctaacagtccatactttcttcccaagattacttttgttcttgaatcttgttataaaagttaaccatattgcaggaaagagattaattttttatatttttgctgtcatgttaaatacttctggtggaacctgtagatatatggtgaaggttttattccttagagctttgctacacagtatgcagcctgtagaccagcaccatcagcatcacctggcaacttgtttgaaacccagcatttcaggccttaacatagaccaattgaatcaaaatctgctttttatcagcatcctcaggtgatttatgtacatattaaaatatgagaagcactgccttctgagtatacaccttatatctggtgcagactctctttctgccaacttaacgtataaaaaggcagataataatttcccttcagaagttttatctgaggtatccttaattaccaactactataaacacaatgtgactcttaagtaatcacatatttctgttagctctgatgaaaaataaacactacccttagaacaccttagcattgtctttaatggggctttcgtagtagacacatagttagattgtgatatgtgttgcctaccttttcaggtgcccctgcccaacacccttcccctccctaagagggagactatacaacagagctccagcctaacttcagttcctcccactactttcagcctcaccttca

SEQ ID NO: 1911 - DNA, 1068 bp, Homo sapiens
cacagcacctccaattgcaactggagtcagcagtagtgccagtggaccaagcactgctaattacaattcgttctcaagtgcatccatgccccagattcctgttgcttcagtcactcctacagcatcactatcaggtagaactttttcgttctgtttctttaaatatcttacattatttaaaattttttatgatctcttcttgtttactatctctagccctccgaaaatagtaatattcaatcttcccacctcagcctcccaaagtgctgggattacaggcatgagccaccacatgtggccagtaattgctttttaaaatgtcattttcctctaaatttttctaggaagttcaccttttgattgtcattttttatgtatgtacaactaactagatcagctcaaaaagaacagagaatcacacctcttttaaatgtttgacaatctgtatctaatttgaaggtgctgttggcctaaacctgttgggataacgtattttctggtaaagacttagggatggagaattttcagcctctgctatttgagtgatgtaattcattggatttggctttagtttggtttggattttgttttattttgttttttaggagagtcctttggtgcccaaagttagaaggtgcttttcttgctctttttccttagattttcttaaatttttactagtgtgtaatcttttcattgaactatctcattatttggaggccttacggttcttaaagaaacacagatgtttccaaaatgcttgactctagaaaagtacacccttttccttttaccatatgtagaaccaagtttcttctgttgaaaaaataaaatttaatttcaagctttctcagtattatctgcttccaaagcagtaggaagctcctttccagtgatataaattactttgtttgactggttctcattcaatattgctttttagtattccagcccaccgtgctatttttaggtaccaaaaagctggtcttaggtttatacaagttattttgatattgtctgtaatcagaagtatatattaacacaaactcccgagattctacgctgcat

SEQ ID NO: 1912 - DNA, 1041 bp, Homo sapiens
tggttcctagttctttctttggaacccaactaacccgtttccccaggtctagatttcctccactgtgcttgactaggataatttttttaacaaggcccttattgcctagtcatcctactggtagatgattcactagaaggatagaagcacttgaattttggtccactctcaggtggaacatcatctgaagataatgacaacttatacattactttttaatcaaataccagtattgacattttgggctagtactaaagtcataatagctcactaatcaataaaacaaattaaccctaacacctaagttttataattctatttacttattaagtagtttatttaatttgttttaaaggtattactatataccaggtggttttgttttgtttttgtttgtttcttggttagttgtttttggagttgtgtggttttttttgttttttaagagttgatgtcttgctctgtcgctcaggctggagtgcagcgatgtcatcactgttcactgcagcctcaaactcctgggttcaagcaatccttccatctcagcctcccaagtagctgcgactacaggcaccaccatgcccaactaattttttaattttgtgtagagacaggatcttacaatgttccccaggctggtcttatactcctggcctcaacatgtgccagtttttgcaggagagagaaatccagccttaagtttatgtgacattttaggaccagttgagatctttcaaggcccatgtatattcataattatttctaaggtatagcacttttctcttttgtgtccttatatctgtggtcataagtgaatgaagctcttgattatatatcctattctttgtgatgattaaaaaacaaatcatttctggctaaactataacagttacataggctctcagcctcattttattaattttgtgttttgtttctttcttgttttgattttctgttgtttattgttccatattttctagtcatatttacatttggtgataattaccttttcttttataagctacctcatctacttttggc

SEQ ID NO: 1913 - DNA, 1162 bp, Homo sapiens
ctaaagaacctaaaagtatgtgtgccatctggctaccaaaaactataaatctgaatctcctctatgtacgagctgaggcatggcagttaactacatcatgttagggggtgcagggcagggtggaatataacagaacagagaggggtaaatatcaaagcatggaagtaatgatgataaatatgctgtgtagtgaagaaagcattttttccaaaaattcactcagatgcactgtaagttacctttgcaactagggaaataatgaaaactgatttttattgaactttccttatatatgatagatattcagcctttcacatacattaactaaatttagtcttcacacaaccacctaagataagtcaccctcatttaacatgtggatgttaggacttgaagagggtgaggctttttttgttttgttttgttttaacctgaggttatacataaagtggcagaccctcagtgtctctggtttccagtttaatgagggaagaagagtgagtaagagtcagatagtaggagcagtgcatcatggcatagctgtcatccatactcatgatggtggccttaaatcatcataaagaaaaataagttacattcaggacacttagtttaggaaggctgtgcatttgtttttaggaatttgttttcagaagtgggttcagatagaatttctatactttatagattaaacctgtcatcagttaatacagtatgttttatattaccataatgatactcctagagaagccaggttcagctaatgaaactttcttaacagagagcctagtcattagtaaacctcataaatgtggcttttatttttaccttttgattaaagatgctttagtaaaatttaagacacctgtatcattacttatatagctgttgtaggtcttccctcctcattttactctcatttaatttcgttattttctcccgttagaagccccaactagaagctaaaggaagtcttgtattgaatttgggattatcttggaatttatattaaaaataaaacttgaaaatttctgacacaggaatagcagctagatttaatctcacaagccagtctccttttaaattgtattggctgcttgaaacactgttgaaaagtttgcaaccgcttttcagtactgtgaaaaagagtacagtgattaat

SEQ ID NO: 1914 - DNA, 1840 bp, Homo sapiens
aacttttacatgtgaagcttccttgtatacagggctttaaatcttgaaataagttgctttagacacagtctgtattctctgcctcttttcttgatttctgagctaattagagtgcatccaagtatcagtgatggggagacattctgaagtatgcatcctttttcaaacatcatagagtgtacctacaggaacctaggtggcatagcctgcagctatacacctaggctgtagagtacagcctattgtgtctaattaggctataaacccgtgcagcattttactgtacttaatactgtaggcagttgtaacacagtggtaaatatttgtgtctaaacatagaaatctaaacaatctaaacagaaaaggtacaataaaaatatagcatacaagattaaaaatggtacgtaccatgtatagagcacttaccatgaatggagcttgcaggactggcagttgctgtaggtgagtcagtgagtgagtggcgagtgatattactgtacactactgtggactctatactacactgtgggtacactaaatttgttaaaaaaaaaaaaacaaatttttcttcaataataaattaacctcaacttactataattttttgactcttataataacatttagcttacaacacaaacacattgtacatctgcacagaagtatttctttttttgtttgtttttttgagacaaggtctgtgtcacccaggctggagtgcagtggcacatacagctcactacctcgaactcctgagctcaagccattgtccagcctcagcttcccaagtagctaggactacaggcacttgctaccatgcccacctaattttttatttttttgtagagatgatgtcttgttctcttgcccaggctggtctcaaattcctggcctcaagcagccctttcacctcagcctcccaaagtgctgggattatgagcatgaacaccatgtctggccttttcttttgtaacgtttttctgttttttaattttttaatttttttttaactttttaaacttttttgttaaaaactaagatgcaaacacacacattaggctaggctacgcagggctaggatcatcaatatactttcatctacctccacatcctgtcccactgggaggtcttcaggggcagtaacacatacagagctgtcatgtcctatgataacaatgccttcttctggaatacccgctaaaggatctacctgaagctgttttataagttttaagtaaaaagagtacactctaaaataaccagaaaatgtatagtaaatacataaactagtaacataattctttttatcagtatcagatattatgtactgtatgtaactgtatgtactgaactgttaggactgtaggtgtagtaggtttgtttatatttaatactagcaccagcaaaaacacttgagtcatatgttctatgatattagaacagctatgatgtcactaggtgataggaatttttcagcttccttatgatcttatgggaccatcaatatatatgtggtctgttgttgactaaaatgtcatgcagcacatgactgtattgggtcatttgggatttgcattcttaagattttcagattccagatgaaattaacttctaacaatattttctctttaatccttatgtagatctcagccagcttttatgcaaagcagtttatcccagccatctgtggtcctttctggtactgctattcacaactttccaactgtccaacaccaagaacttgccaaggcacaatccggtcttgcctttcagcaaacatcaaatactcagcccattcctatattgtatgaacatcaactggggcaggcatcaggactag

SEQ ID NO: 1915 - DNA, 1056 bp, Homo sapiens
aattattatagacttccccattttctttctttttttttttttttttaatatatattttcttcccccctttcccctgactctcctcctcccagcagcttaaaatgtaaatcatggttatatgaaaactctggaatgggtaagatgtgttactatcttagtacttttttccattatgagtcatcaaagtacagttttcttctcaaactgttttcatacccttattggcctaccacatgaggtggttgtattccacagtggattgtgcagttatagatgaagaactcagaaaagcactttgggatccttcatgatgaaaggcactgataaacatgaggtttgctaatgcagaaagagtgcctttaggagtctgtgtggggacagttttgtagcataaaccttacatgtctgccagtacagccagttgaatccgtttatttctatatttactttaggcttgactttcagggatcttagtaatttttgcctgttttgtcactacatatgtcatcagatcagactagaacaaagaaaagcttactgctttcaaacagggaaatgtgcatagtaatgctttactctgaattagaaacatgtttatgataatcctattagaaaatttgattgattgattaaagtgtctttttgggtcgacatccctagtgtttctgatcctgagtaatcaaatttaaagactacccagcagcaaaacttttattaaataattatctacttttattaaggctgtatgcctaggatttccatctgtttgttataattagaaataccagtgtgagtaaaaatcttaggaagttatttggccttggattccagttctactcctggctccttggctcttgattttcgcatattcccatgttggaaataacattagagcttaatagtagtaatggggtgggagagggtacaaacttcttgaaaattgcttcagatctttggatagtacaggttacctatagaacataaagcatttttttaatatgcaagaaggatggaaacttaagttttaattgtgaatgttacagtggtaaaatttac

SEQ ID NO: 1916 - DNA, 1808 bp, Homo sapiens
taagtatatttttgggggcacatagtcaaaactaagaaattatttaccagctcagaatgtggtaggagctatcagaacttagtgatcaagtgaagtcgtagttactaatttctgatgctcttcccctgcagaagagagctgtgggaagaggactcagccacaagacatttggtcctaggtgttggtaatgccacaatataagtgcttccttttcattttattgtagaccacatattgataactagaagttttaagtgttacatgtatgtttttagatttgcaagcaggttccctaaataaaatttaatatgagagggcagaccttgaaaaggtggtgggaggtggtcctgtggttttttttttttttttaaatcacatgaaatatttcaaaaataggaagaaatctattcattaaaagctcaaagatcaatgaggtacttttggctttggccaaaccagtgtggggaaaactgatttgtgattggtaaaagaatttgaaccaagattgatttgacaggctttggtaatgctgcagtattttcagttgttctttctcattttttaaggcaaagcagagagcagaggttcttcagtccacgcaacggttcttctctgaacagcaacagagcaaacagataggaggaggcaaagcccagaaagtggacagtgattcaagtaaacctcctgaaacactgaccgaccctcctggggtctgtcaggaaaaagtagaagaaaagccaccccctgcaccctccatagccaccaaacctgttagaactggaccaatcaaacctcaggcgatcaaaaccgaagaaacaaaatcttaaaggctatggtttattgcaggggattgggaggggggcgggaaaacatggagaattaagtcagataatgctggcagccaaaggggcaaaatggcctgtgacattatcctgttcagagcttggagatgtacaagggacataggagcaatttacactgacacacagctgctgtaccagtgaaaacgaggctttgcaagcttgtacctactatataacatgtgcttggttgatggccatgcatcttcagtcagaatttatatataaatgtatgcacccatttttttgagtgcatataatttagacctaaaaatccttatgattagatgaaacaccaaaaatataaggaaaataacacagcagaggaatagctcagcctgaacagtgtgatggtcccagctactacatcagatgcggtttttttgctcccttatgttcttcggatatggttatggcatttgtaggcttggaggtaaagaactgaagataactggtgctggatagaggagccttattttttattatggcagcttgctatttttataacatggtgattgagttgaacacaatcaaagtacagtagtaactgatgtccccttcttcctggatgaatgagcagataaatattgatgtcagcatccttgaaccatatcaaagtgagcagtgtttggctactgcttctatttgaaatggtgctgtgttttggttgtggtctgaagctttgaagcgctacttagcatctcctttcttccatggagctctcacgattcaaacatgacagatttggtaaaatgctggttaggttgagtcttccttgcccccactcagtcatctttgtatgaatcccatgatttgggggtttttttctttttttttttataccagtttttagctggtgtttatgaagaacagtgagtacctagaactgtgccactaattaaaggaaatcctaagaaggtgcatttctttacagagctgtgtcatgcc

SEQ ID NO: 1917 - DNA, 1037 bp, Homo sapiens
cacctgaagtccctgaatgtgccttcttggaataccctatacttttgtcctatcttagtgttgatgtatgtcactagaatctcagttcttagatttaattctcagggtctgtctccttcgggtgacttttgttgtcttcctttgatccccctgtggtggctgtgctctgtgcttaggagtaggagttgggcctttgttttcctgtgatttgtggaacttgaatggcttacccttacttggtgagggtgtctgagaagacggtgtggccttttgagtcaagggcaagggacattgcacctctgctgccttgtaatcatgagcaagattgtttggccactcttcttccctttcctagagagggtctaataattcttatagtgaagaagtctttttttttgagacagggatttactcttgcccaggctggagtgcagtggtatgatcgcagcttactgcagccttgacctccttaggctcccacgtcagcttaccgtgtagctggtaccacaggtgtgtgtcaccatgcccagttaatttttctactttctatagacaggattttgccatgttgcccaggctggtctcgaactcctgagctcaagtaatctgcccacctcggcctcccaaagtgctgggattacaggtgtgagccactgcccctggccactttgagatctttaagagacaataataataacacactagttcatcttctggatctagtcatcatgaatccaggattcagttatcagatgtcaaattcactcctagatttctgaaatgagacagggagacctctaaatcttgtatcccctgaatggagacagtgagctgactttcccttttgccttccctgaggctggtacagaattttccagtgaacaggtggcaatgtgatgctctattcttttcttacagagatcccactggcattgttggtggtaggcctgggcgggggcagcctccccctctttgtccacgatcattttccaaagtcctgcattgatgctgtggagatcgatccctccatgttggaa

SEQ ID NO: 1918 - DNA, 1032 bp, Homo sapiens
cacatcttcaggtatctttatagcagtgccgcagtccaccggtaccaatttactgtattagtctgtcttcattttgctgataaagacatacccaaggctgggtaattgacaaaagaaagaggtttaatggactcatagttccacgtggctggggaggcctgacaactgtggcagaaggtgaaaggcacgtctcacatggcagcaaacaagagaagacagcatgttcagggaaactcccctttataaaaccatcagatctcatgagacttattcactatcacaagaacagcatgggaaagacctgtcctcatgattcaatgatctcccactgggtccctgccatgacatgtggcaattgtgggagttacaattcaagatgagatttgggtggggatgcagccaaaccatatcacaggttatgatgtgtgtgtatgtgtttgtacttgtatttttatgtgtatgtgtatgtatgtggaggcatctgtgtgtttgggagaacaaggaaaagggctgtgatgttcctgaaagtgagttggaacagaagcttggaagtgagaaacactgtgaggttgctggagtatatagtgtgtctgtgtgagtttaggttggagtgggatacacaaggagctcgtggacaaagggaatccatcaaaggtgttggagcaaggggatggtatagtcagctttacatgctgagtggattgctgtgattacaatgggcaggatagatggaacatggcaagatttggggtgtgactgtggagtaagctgtccagatgagaggtgatagaactaccctcacttggccttggtgatagtgatttggggagggggagatcaataaatttttagaaagtaatgtcagatagatatacctatcttatatatcttttgttacattcgtttctaagtaccacatagtttctgctaatgttgcaaatcatatttctaaaaaattatggttttgaattaattctcatggttgaatattatgtagcagtaaaactattgaactgcagccatgtgcatcaa

SEQ ID NO: 1919 - DNA, 1059 bp, Homo sapiens
acaagtggaaacaggttcagagaagcgacatgatgtgcccagtggtagagtcaggactaggactcaggtttcctgccatgcaatgcagtattctcctccaattcctctttgctattttctttggtggcatgtccctcctgtttcttcttcctctttttttttttttttttttttttttgagatagtcttgctgtgtcgccaggctggagtgcagtggcactatcttggctcactgcaacttctgtctcccagattcaagtgattctcccttctcagcctcccgagtagctgggattacaggcgcaccaccacgcccagctaatttttgtatttttagtagagacggggtttaaccatgttggccaggatggtctcgatctcttgacctcatgatccacctgcctcggcctcccaaagtgctgggattacaggcatgagccaccgtacccgaccgtccctccttctaatgacctcaatttagtctttactttttcccagtgtcagcacatatgatccaaaaggccttctgaacttctatcaatattttgatagcttctattctcaactctttagtaactattaccaaatgaccattttttttttgccataactctatctcttaagatactaccatatttccctataaaaatgcattaacaagttggtaacatgttgaccatggtaacatcttgagcccaggagatggagtttacagtgaggtgtgattgtccactgcacttcagcctggtgacagagaaagaccctgtcccaaaaaataaatataaaaaattccaacatcttatctcaccattcagagaaaacctcttttaaacatctgtctttcaatgaaaatgcatgaattatatatatgatatatatatgaattatattatatacataaatagaattatgctatttgtgccattctacaatttgattctttcagtcaagaaaactcttggtgctctttccaccaaatatagatttattactctcttttatagttacacagtgtacttttgtatgaatttattgtaatttatttaaccagcatcctat

SEQ ID NO: 1920 - DNA, 1071 bp, Homo sapiens
tagagattaaatataaatatatgagaacaaaatccttaatgttctcactttcaaattataaagtactttttttagtgggaggaaaggggaatgtgcatttcaaggatattagctgtatctgagaatacagggcaatatatgctaagtgaggaaaaaaatacatggccgaagaatgtcatgagaatggaaaagggagccctcccatgggcttgtaaggccagaaagccttcctggaggaggtggaaattgagctggactctgaagaggaggtaggaaccaggaagagagcaggatctccagctggggtaatgtcaagtgtgactggttatctttctcctgccaagtggagatatcctagtgtgtagctccctttcaggatctgagtaggtacgagggtgcagccatgaagccagtggtctaaagaccgtggagttttcttgagactactagaacagtccatcaaacacagggagtttatacagtgctcaagagaaaaaggttaaaaagtgctgttgatgagcaacctgctggttcacagatgctctttactattcaaaatataattctgattaaagcaaggaattaaaatccaaataaaaagatgcatagtttatactttgagtttcatacttgtacatctctatagttataacttctttttttttattattatactttaagttttagggtacatgtgcacattgtgcaggttagttacatatgtatacatgtgccatgctggtgcgctgcacccactaactcgtcatctagcattaggtatatctcccaatgctatcccttccccctcccctcaccccacaacagtccccagagtgtgatattccccttcctgtgtccgtgtgatctcattgttcaattcccacctatgagtgagaatatgcggtgtttggttttttgttcttgtgatagtttactgagaatgatgatttccaatttcatccatgtccctacaaaggacatgaactcatcattttttatggctgcatagtattccatggtgtatatgtgccacattttcttaatccagtctatcgttgttggacatttggg

SEQ ID NO: 1921 - DNA, 1030 bp, Homo sapiens
tggaatagaaaggggggaagggcggggaaaggattgagaaatcggatggttgccatgtctgtgtggaaagaggtagacacgggagacttttcattttgttctgtactaagaaaaattcttctgccttgtgatcctgttgatcggtgaccctacccccaaccctgtgctccctgaaacatgtgctgtgtccactcagggttaaatggattaagggtggtgcaagatgtgctttgttaaacagatgcttgaaggcagcatgctcattaagagtcatcaccactccctaatctcaagtacccagggacacaaacactgcggaaggccgcagggtcctctgcataggaaaaccagagacctttgttcatttgtttatctgctgaccctccctccactattgtcctatgaccctgccaaatccccctctgtgagaaacacccaagaatgatcaataaaaaaaaaaaaaaaaaaaaaaaaaaaaaagaataagggggcagtgctaaaaaggagtatgtttcttctgggtgactgttagatattacaagaagaaagatacaatgagagtaggggtggaacataagcctggagcattcgtttatctataagtaggccatccagtgctgtgtatacccagagtgttacatgtcatgggtatttattttccgccaatgccatgctatatgcagttttatattatgcacatggaaccatgcttttaattttttcctaagcagcaatatttttggcatctttccatgttaataaatgtaaatcttagcatcattttaaaaaaaaacagctttattggggtatagttgacatacaataaattgcatgtataataaactacatgtcaaagtgtataatttggtaagttttgacatttatgtatctgaagccatcaccacaataaagataacaaacatatccatcattcccaaaagtttcatcatacctctttgtaatttctctcaaactctcttcccccacagcaattacagatctgctttctgttactataaattagtttaca

SEQ ID NO: 1922 - DNA, 1090 bp, Homo sapiens
actcttctctgaagtttgggactgaattagctatagcctccaaggtggtataacttgaagaagtaaataataaagtggaatcagaacttcagtagttctgattcaaagaactggtctttggcacaagaatgtcttgagtttgactataatcatcactgctttctaaattagcttgaaattggcccattttgaaactagttttttttcttgtttttaatgtgtacatagtatccacaagctagaattgtctttaatcttaatagaaactccttttctttttgctctcaagtagttactagttataggaaatatgtcaccagaatactttgcctgtgctgagagttggatgtcaaagagcatccacactgcataaacattcttgatattatataatttacttaactactaaaaagggagaagctgttatcttagagcagcattcttggctttgtgtgtatggcttcctgattcttttgtttacattcttgaactaaaacatttaaatcttttacatcagcaagatttctccatatcactctgattttcttgttctttgtcatgtgaatttgccagacctctgcctactttgatattggcgcaggtctgcctttgctcttaaatatgtggttttggtttttgttaaaatcaccctatctgctaaagggagataggtgcatgtgcatgttgaagagaaaatgtagtttttacttctcaagtattttttgtggaaaaaaagtagatcctagaaggaccattttcctagaaaatgtgggcatgcttcagagatagtacacataggaggaagtctttttttgttggtttatcttctgttgtattatataaactcttcaacttcagcagcctggaaaaatgtttgttttctttatcaaaaagagacattggagcactgaagactgagtaaataatatggagatatttggtctttaggaccaaatattaggagcattttattcctaaaggaatgaggcgggatgaataagttgcccaattcaaaaatttaaaagttgactaatccaggagaaattagggatatttatctctagtttggcaattatattcaaagatgtca

SEQ ID NO: 1923 - DNA, 1029 bp, Homo sapiens
aattgattttttgtttttaattttaaaagtactttccagtgacaaaacacttttattaggctggcaacaagtttgaattatctatactcactttcaccttttttcggttgcttaactttagccactttttctgcttgattcccagagggctcatggaaaaaaatgatagtatatagaccttaaagcttttagtggaatttgaccagatatcacttaagagtttagataagtgaagacagagatggactgaactggatgattgggcacatttgcagtttgctctcttttaaacaggtctcggcatcctagttctagttgtaataatttctgcttttaagtgccagagacagtgccaattcattaagacaccaggcctggctttttaaacctatttactcttttttttatcctctgtgtgtccattgtctgtccttagggcttctctaccaacgttttgcaaacatctaggcacaagtgtccagagttcctgaaacaccaccttttcttacatctcttaaattgaaatgccactaataaggtgtcaccaaggcagtcttatatctgaagtaggaaatttttctaatccatacatagaattaattggctaatcatgtgtgtgtgtgtgttcatgtgtaacatgcccacttagctaccccatacctgctcttacttttccctacctccatctgcatcccaagggaaccacagaaattactaaattttacatagcagaagataaatagaattgtattgcataggcctgaataagagtcactttcagaaaaatagatttgtctcatatatcaaaatcagaagtatgtttccattactaagtggaataagtaagaaattaaagctgatttagaccaattcttacttcataggtaccgaaaacaaatggaagaaatgcaaaaggctttcaataaaacaatcgtgaaacttcagaatacttcaagaatagcagaggagcaggttggtttctacatcccttatttactttttatataaatttccactgaattctgtagg

SEQ ID NO: 1924 - DNA, 1043 bp, Homo sapiens
ttgtagaaagataagccttaaggaactaaggttgatctctaagttttgggcttacgtaactgggtggttgatagttcattttataagatgggaaagactgggtaaaagcacaattattttttctccttgaggaggagatagtgtaaatggaaagacaaacaaaatgtgacaaaatgttaacaattggtgagatagataaaggtgtaaatatatttcttgttttatttctaaaacttccataggtttcactcctatagaaagaattggaatgctgcaaagaattttttttctttaatgtcatagtttattttcaaagagcatgccctgcatttctggtctttgaagcacattaaaaaaatacttaaaatgatttgtcctttgaattttagatacccttatatttttcctaatatgatttcctatgattattatttaaccctcttctcatctcaggtttcagatcgacaaagctatcttgtcatatctttggttctttgtgttgtcttgggactgatgctttgtatgcagcgttgtcgaaatacttctcaatttgatggagattatatttcaaaacttcctaaaagtaatcagtatccaagccctaaaaggtaatatcagcattatatttcacaattttattttttttactatgctttgtatatttttgagaaattttaagcaaataaagggagactgaggtaatttctttccctatatgattatcttgaaaccaaaacattaaaaacatcattcgatagtaagatggtcctatgcctaacctggctctgtagactataatagagaaaacactaatagtaagtgcatgaaacccctgaaatatttggttgagaaagatgcttaaatgtggaattcaaaggaagaagagaatactattttaatacagtaccttttagacaaagatctctaaatttttttttccacctgtattagcaataactggagtgttagagttagtcccgtgtggtatgtacagttctcaataacctctgtgtagcctcaacaaaagagtaaattatatgtgc

SEQ ID NO: 1925 - DNA, 1029 bp, Homo sapiens
aggaatgtttcttttcttatcaggtaaaagagtgaggctgggcccaaagaaagatcgttattgtattggttgataaccagctactagttaacaacttaaggaagtatagttatttgaagacgaccagtcaagcataggaatcatatcatcttccaccttgcctctttttgcttactaatttaaaatgcataaatatatagttaacctgatacaaattcattggttctattactagaggataataaggaatgaatgatttgtcttattttagtgtttaattatagcaaatccaccaaatccactttacattttacatctgcttttttttttttttacttacagtagacccaaatgatttgtacattgtagaacccctcaagttttctccagaaaagaaggtaattgtttatttctttttaagtttattgctatgttttgtgataataaatgaagaaaagaggttgaaaggtttaaggtaattacctttaagtagtccttaactgaatgtttattttctatcatgataatgttgtaaataaatattaacaggggtcagcaagctgtgacccacaggccatatgggccatgagccagataggttttctcatttttaaagagtgataaaacagaacagcatgcaagagagaaaatgtgtgacctgcaaagcctaaaatatttactgtctgacccttcacaaaaaaaatttgttgatccttggatgattgtcattatttattaccgaatgcatgccaagcacagagcatgcaccgttcctctaatcctcaccacaacctgaagatgatgttatcctcatttttttttttaataaaaaaacagcaactcagaatgtacttaggattttttggcttcaaagtctttgctttttcattttgcctttcaaattaagttatactaattttagttgtaatttcatctaggtgaaagaacttgggctttgtaggcaaatagcctaagattcattctcaacccggctgcttactacattgtaacttgggcaaagaaccaaac

SEQ ID NO: 1926 - DNA, 1061 bp, Homo sapiens
ctgggaacaaaggcttaggctcttaaacagtcttccgcattaaatgtgtggtctctgtcttactggcctcaggccccaatgggagcctgcttattagagaagcttttgccaattgcttctctgctttaagatagtaaaaccagcattcagcctttttggctgtaattttagtgttctttcaacacttcctccatgaaagaggcagaggagataattccctttctcaatattccctcttcttaggaaaaaaacacacagggctttttctcctcaactactagaatgctaatgttttcatgtaatagtttcataatttgaggtgttagatttaagtatttatccattttcgttttatttttgtataaggtgagagatacggatcaattttcattcttctgcatatgaatactcaattttccctgcaccatttactgaagagtctgtcttttctccaatgtatgttctccgcatttttgttgaaaataagttcactataggtgtgtggatttgtttcgggcttctttatactgtttcattggtctatacatctggttttatgccactaccatgcagttttggtaactatagctctgtagtataatttgaagtcaggtaatgtgattcctccagttgtattatttttgctcagggtagctttcactattatggatcttttttgattccatataaattttaggatttttttccattttatgaataatgtcattggtattttgatagggattgcaatgaatctttagattgttttgggtagtatggacattttaacaatattgattattttcaatccatgaatatggaatactttttcatgttttggtgtccccttcatttcctttcatcaatgttttatagttttcattttagagacgttttacttctttggctaattcctaggtatttaattttatttgtgactactgtaaatgagatcactttttaaatttctctttcagagtgttcactgttggcatatagaaatactactgattttggtatttcacttttatatcctgtaaatttactgaatttattagttc

SEQ ID NO: 1927 - DNA, 1048 bp, Homo sapiens
cactctgcgtaggtgtgccttcagagattccagaacttgcaacacttggagggaaggactttctgacgctgttccgctggagtggcctattcttgctagtgatggccgttccaggctccaggacacgtgtactccccaactttgagactctcttgttttccagtggcttgcccctcactgtcccctccgctttctaccttgcttctagcacatgagcttgctgatgatagccaaattgatgacctgtgatctgacttggcagttttaccattatggataggagtagtaaatcggtgttgcccttttttttttttaacagctcctgaatcagcaaactggaagttgcttagttttcatcagaagcattccaggcatgtctagttatattatggttctggagtactagtggtcccactacactgtggggctccaaggcttgacaacagttcttccccagattatatcctttttatatacagtatccagggagacaggcttatgaaattaatcagtgattggacagggctgtgcagagaaccagggacagattcttacacatcatatgcctatccaaccctttataacctcttaagtcccttttccagccactgaatagggaaaagttaagctttgtgaaagataggactaggccagaaaaaggttgagaaatggaatattcaaaccttgaatgcagaaaaatactttagaaatacagcttatggccattcttatacttaggatctaggtagtaatatttctccagcaatccttgggatttttagagttgtgttccttcccatttctacctgcagccctcatcccccatccccatgaaacataaactatttccagaactcttagcttgtatagattaaatattagcataaaacgtatttactgtgccaacagttataaatgctgtcactttttaagctaaccatacttttttggggttttgttaatgtttattggcctctagatccatctagatttgatcaaaagtggtactttatcagggagccatagttaggaacacggtagaaatatc

SEQ ID NO: 1928 - DNA, 1046 bp, Homo sapiens
ggtggcaccataattattaaaggaggcaacaccttaacattagtctttttaaatatgtgtcatcttgaatttcatgtctttgattgaattgggctataagcataggcttctctggaggtaagtagattgaaaagcactcctcaacagaaaagcttaaaagtaaatatcatcataagcattcatttaaaaaagaaagcctgtttttgatccagaagttgtgacttttcattctctgtgatgttggtgataactcttaattcaattgtgaccttgtttttcttcctttcagatggggcattctcttctcccaccctcgggactttaccccagtgtgcaccacagagcttggcagagctgcaaagctggcaccagaatttgccaagaggaatgttaagttgattgccctttcaatagacagtgttgaggaccatcttgcctggagcaaggttagtatcaattggcatgtgctttgagcctgagattataggtcaagttataaattatggagtacttggttttgaggttaaggtacaagtaagccttaggttcaaagttcactaattatttgaaaatttcagttgaaccacacagtgatcacattgctaaatccattggtcagtcaattctcagccctcctcttggcctgccagcagcattcaacccagctgatcactgtacctcctgaaactttttcctttcttgacttccaggacaccacattctagctgttcctgctcactgattcttcatctcccaactcctaatttatgctgaagttaccctgaacttatttcttggacctcatctcttttctgtctgcactctttcccttggtgagctcatccactcacctttaaataccatctatgtgctgtgattctcaaattttcatctctatgccagactcttccaggttcatataaccactgcctacctagcatctctcctgggatgtccagtcatctcaaacctagcatgtctaactaggcctcattcttagatccagagttttactcatctaagctaatggcaactacatttttata

SEQ ID NO: 1929 - DNA, 1064 bp, Homo sapiens
ataaagttttactagggaaggagggaagtgtatcatttttctttagttcagacttgaaatgctttgttttctctttgaatttcaccctagtttaggtttacttctgcctcttcacccatttatttttgacttgtccttcaagtatatattcaactctccattcttgtgtttgctttgttttgtgatttgttttttttttttttggtcatttcttatttgtcttgtaacttagcatctgagtcagggtgctttatgaggtagggaccagatctataagattttctttacatatggcattatttctagatgtgatggatttaacaaacctattgttatctgatgatttttacagtatttgggtacccagaggtaccttgtatttggatctaactaaattattgcaattttaaaggggttgctgctattttctcatagcagtaaaagcatgctgaatttaagagaactgggcatgaaaacagctttggtccatgattacaacctaagtactgtactctgctgttattcctggcaataattggaatgaagagtgttcatctactcactttttaaaattaaaattgcttaaagaaaattactgtgatttggtcctctttcctgtcttgcaaggtgatggctgttaactgatgaaattcagagcatgtgttgggtttagattcctctttccccttttacttgtgtttcaggatatcaatgcttacaattgtgaagagcccacagaaaagttaccttttcccatcatcgatgataggaatcgggagcttgccatcctgttgggcatgctggatccagcagagaaggatgaaaagggcatgcctgtgacagctcgtgtggtaggtcatacaaattcattttgtagttagcttaactgatcaggctgtatgtccgtgtaaatgctggtaccagctagaggagataggggaatatctacgattatgaaataactgtgtattggcgacaatatcactgattatctgtaatgctgatgcaattttcagctaaattttccaactgctttattcatagttcatggaaatctacaaaaa

SEQ ID NO: 1930 - DNA, 1091 bp, Homo sapiens
acaccgagcgtgagccaaagcagggcgaggcatcacctcacccaggaagtgcaaggggtcagggaattccctttcctagccaaggaaagaggtgacagatggcacctggaaaatcgggtcactcctaccttaatactgcgcttttccaacagtcttagcaaacggcacgccaggagattatatcccgcgcctggctcagagggtcctacgcccacagagcctcactcattgctagcacagcagtctgagatcacactgtaaagcagcagcgaggctgggggaggggcacccaccattgtccaggcttgagtaggtaaataaagcggctgggaagctcgaacgtggtggagcccactgcagttcaaggaggcctgcctgcctcagtagactccacctctgggggcagggcatagccaaaaaaaaaaaggcagcagaaacctctgcacacttaaatgtccctgtctgacagctttgaagagagtagtggttctcccagcacgcagcttgagatctgaaaacggacagactgcctcctcaagtgggtccctgacccccaagtagcttaactgggaggcaccccccagtaggggcagactgacacctccaacggacgggtactcctctgaggcaaaacttccagaggaacgatcaggcagcaacatttgttgttcaccaatatccgctgttctgcagcctccgcagctgataccctggcaaacagcctctggagtggacctccagcaaactccaacagacctgcagctgagggtcctgagtgttagaaggaaaactaacaaacagaaaatacatccacaccaaaaccccatctgtacgtcaccatcatcaaagaccaaaggtagataaaaccacaaagatggggaaaaaacagagcagaaaactgaaaattctaaaaatcagagcacctctcctcctccaaaggaacacagctcctcaccagcaacggaacaaagctggacggagaatgactttgacgagttgagagaagaaggcttcagactatcaaacttctctgagctaaaggaggaagttcgaacccatggcaaagaagttaaaaaccttgaaaaaagatt

SEQ ID NO: 1931 - DNA, 1068 bp, Homo sapiens
cctccactcactgcaacctccgttcaagcaattctcctgcctcagcttcccgggaagctgagattacaggcgtgcaccaccaggcctggctaatttttgtatttttagtagagacaaggtttcaccatgttggccaggctggtctcgaatgcctgacctcaaatgatccgccctccttggcctcccaaagtgctaagattacaggtgtgagccaccccacccagcctacatttccttttaaattcacttcttagtattttttgttgctatcaaaaataggtttttctcctccattatatcttctaactggtaatcattaatgtatatgaaagctgcctcactgaattttttaattatttgtgttacatttaccattgattctttagagtttttttggaatcctattatatcacctgcatatcagtagttttatttcttcctttccaattgttcatgcttctaattgttttcttttgtctagttgcttgataactctagtaaaatgttaaatggtaatggaaatattgtacatacttatttgtttctgacattagtaggaatgcctctggtgttttcccattaagtaatatactggctttaggattgaggtatagatattttatcatgtttagaaagtatttgcttgaacccaggaggcggaggttgcagtgagctgagactgcgccactgcactccagcctgggcaacagagtgagactttgtctccaaaaaaaaaaagtattcatgtccaacaattcctattctcttgaatactttttattaggagcagtgttgaattttgtcaaagactttttcagtttttatggagataatcatatgaactttctccttaaacccattaatgtaacttacattaatggaatcctacaagtgaaaacatctttgaattattggcatacaccttttgattatggtggtgttagaatctattcgctaatattcagtatttttacatcaatattcataaatgatattagtctttaatttccttgtactgtctttgtcaagttaagtatgaatattatacttcatgaaaatgagttggaa

SEQ ID NO: 1932 - DNA, 1033 bp, Homo sapiens
ctgtgtcgactatgaacttgacagctacttaaaaacttttatgatgaaattgctgatgacattgatgaatgcctttttaattgtatagtgaagtgtgtcaacatgtggaagatctgcataattcatggaatcagtttttctaaatgattaatgcacaggttaagatgtatccaaagcagaagatagaccaacagatctaatgggaacaatatgaaaggtctattgatatggttttagatttcagcagtcacttgtcaagttttgatgtaatatcaagaagaatatccataattatcagaaaagctattaaaatcctcctcccccttccaatttcatatttgtgtaagccatattttcttgacatacttcaaccaaaataacattgcaaaagattgaatgcagaagcaggtaagaactcaattgccttctaatatagccagatattgaagaatcatacaaaaatgtaatttttttgcttttgaaataaaaaaatttgttttaaaaatgatagtctgggccaggcacggtggctgatgtctgtaatcccagcaccttgggaggccaaggtgggcagatgtacttgaggtcaggagtttgagaccagcctggccaaaatggcaaaaccctgtctctactaaatatacaaaaattagctgggcgtggtggtgcacgcctgttagctccttgggaagctgaggcagaagaatcccttgaacctgggacacggaggctgcagtgagacgaaatcatgccactgcactccaacctgggtgacagagtgagactcagtctcaaaaaaaaaaaaaaagcacataaataggtttatttttgatgcactaatttttttaaatttctcaattttaatttctaatatggtaaatcactagatgtaatgcatgtaaacagaagctctttgtgtcctcaagtttttgagactttaaagggatctcaaggcaaaaatgtttgagaactgctgctctaaatcttccagtttacaggaaatacaaaggaacagaggaatgtgttaacttca

SEQ ID NO: 1933 - DNA, 1047 bp, Homo sapiens
tctctactaaaaatacaaaaaaagttcgccaggcggggtgatgctcgtctgtaattctagctactcaggaggctgaggaaggagaattgcttgaacccagaaggcagaggttgcagtgagctgagattgcgccactgcactccactctgggcaacagaacgagactccgtctcaggaaaaaaaaaaaagtttgtcccaagtaggtggatatttttcccataagtttagtgactgtttcctgaacccaaatctgaagagggtttctgtacctgttcctgatgctgaggatagtatgagaaatagaggttggatgttaaaatgttggcatttctgggaccttttgatgattcatagaggtattaaattagtagttggaactcttccagaaaatgttagattgtatctttttttagaaaaagactatattgctatatttcaaaaatgatccatcagatgtttctattatgctaaaatactatctttggattttactatatgcaaagtttccaaatttaataaaattttcttaaaaggacttaagccaatgaaatttcttttaattgttcatctataataatttttcattaataagccatctgtataagattaatataccaggtaagtagacaataaaaattgaaactgaaataaaaaacaatcttttttttggcaatgagctacatagataacaattgcatgaatgtaactaatgaaggtacataattatcataaaaaacatgaaaaattataattatcataaaaaagaaacatgaaaaattgcatggatttttgtttgctttttattttgtatgcttcaactttggacttagagattttatcttaaaatgtttcttttccccccccccattaatcaggcaaaacacattcttggtcctaagagatttcgatgggcttgttcaagttatcattccccaggatgaggtaatagaaaatttcctgttattatctaaaagcttctttgatgctattgctggggtaagctaagtagttagatgaatatgttagaggttttaaattcagaagttt

SEQ ID NO: 1934 - DNA, 1302 bp, Homo sapiens
attaaagaattagataaaataaagaacttccatcatacttactgggcaaagttggtttctattgcaatttttactaacgcttgtatgcctaagaaaaatattatttattcagctcttaagttttgaaataaataaagagcaatgaattatcttttagggatcaacatccagagatgagtatagctaaccctggagaactcctttgactctgacccattattgctatgggatttaactgcccctaagactaaccctggagacaattgcttttcaagtatgtgggacttgtttgcactaataatagtcattcttacccttattttcctttaaggaaagtttttttaaagctcttaactaatagttttacttgctgtattatatagagtcaaaatggggatgcagtttttactaaatttggtaataaagtcattaaggagcagccccagcctttatggtaattaagctgtgactattaacgttttttaaaccatctacttataattactgaagattcctgtaagttcatttgtttctcagaactcttttcccccttgttctgtagtcggcagcctctgtgaagaagattttatgtgaagcccctgtggaatctgtggtgcaagtgtctggtacagtcatttcccgtcctgcaggacaagagaatccagtaggtagtttcgaagatatctgtgtaatttttgcttgtatgcatttgcaccatctgtgtacacattctggcaacacatgactggacattaggcactaaagttgaataaattctacaaatgaactgacagatttcaaaatcttgactataaacaaacacatctatgtaaatatgcatgctaagtctcactctgtcaccaggctggagtacggtggcgtgatcttggctcactgcaacctctgcctcctgggttcaagtgattctcctgcctcagcctcccgagtagctgggactacaggtgcatgccaccacgcccagctaatttttatatttttagcagagagagggtttcaccatgttggccaggatggtcaccatctcttgacctcatgatctgcccatctcagcctcccaaagtgccaggattacaggcgtgagccaccgtgcctggccctttttttttttttttcaggacgggtcttgcagtattacccaggctggtcttgaactcctgggcttaagtgatcctcctgtctcagcctcccaagtatcagactgcaaggatatgccatgacatttgttgatatctgaacacatcagccacatatgcataagaatgtcaaaatcatgcacagaca

SEQ ID NO: 1935 - DNA, 1035 bp, Homo sapiens
cattaatagcttaaaactgcagatcttaagtcaatattgttcaaatccccatggcctcacatacgcactcattggagtctggaaagcactgctccataatgttcagcttgtatgaaaacaggaagatgccagtgtccttctgattgccatggttactcactttgcttgttttgtcaaagcaaggaagagtaagaaattctaggaagctcacctagattgtaggccccaacaacagggacttccttctgtgtttatggagttccctgccaagcaccaaatacactgttgaatctgttttagggcctttagtaagcctttactaggaacactaatcgctgtgacaatccaagtagcatgtgaacattagtcctgaatacttttccagaatgagatagaaaagaacctctcaaacaaacaaaagttctctaaaaaggtagggaacgatggttggctacagtttgttaaagattcttatttaaaagttttctacaacttttatagaaaaactaagttatttccaacattagattacatttctcatctgttatctttgtattttactcacagggttagacagactgatatgccttgtcactggatctccaagcatcagagatgtcatagccttcccaaagtccttccggggacatgacctcatgagcaataccccagattctgtccctcctgaggaactgaagccctatcatatccgagtctccaagccaacagactccaaagcagaaagagctcattgaatcatgcataccatgcagaaagttgagcttttaggttttgtcctctttgcttccccaaggctaaagtcagatctagagttctgccacaggtctaacaatcaagtctttagatggaaggaatccaggcaacattcttcaccacaacgaagaaacagataaaagatacccaattttgacttgatttcatgcatcatttggattttttttggttaggactttttttgaagttcctttttacttaggtgtgaaagatggttctttgttgaaataatatagtggt

SEQ ID NO: 1936 - DNA, 1070 bp, Homo sapiens
tcttgaactcctggactcaagagatccaccttcctcggcctcctgaagtgctgggattacaggcatgagccaacgtgcctggcctggaaagcttactattaaataatttgatttcttggagatatcagttgtattttaagtttacaaataggtgaatactcttgtggtatggaaacattgcatggctgctgaatctctttcaacaggagtttctattgggtggctacatggatcatattcttgagatagtgaaaagttttacctacttatcttaatcccattctacctctacacctccagcatgattttgtgctcgaagatgaatcaattcctttcattcttgttacctttcatacaggaaaattcatcgcccaattttatatgttgttaatcttttaaaattggcagttgttaccagcctctctcatttaaaataacagatcattgaagttttttgatttttggttagatgtgtcagatttaggatgccttatttaaactcgtgctgtcttactagactgttcctgctctgagaagaaatatggacagagaatgaatttcattgtccatattgatgaaccccaaatcaatacacttcttaagaaaggtttgagattatccagtccatgtgcaatgaatccttggagcattagctgtgtggccttcctactgataatctgcagttatcacagtaaagagatctctgttcctaggtcaggccttagcaattacaaatacaggaaataaaggggtactcaatgctgaagacttaattttgggtacctacaaagtcctgggaagggaaaaagaagaccttggcatttgtatttgcataaccagagatggaatgtttgaggcttttaggcataaagattaattagattttatcatataaagattagggcaaattatttttttttccagttcattcttaacatgttaagggacaaattttaatgaataaaaatttaaaggccttaaaactttcttttggattcacatttccactctggtataatccactctggtgtagtctgccctttatgacagagaaagcctttgaaaatatt

SEQ ID NO: 1937 - DNA, 1025 bp, Homo sapiens
taccaactgaggtggagaaaagtgtaggcagcttgctttgagaattttagagctaaagtacagtgaagggtaattttaaattttacttcttttagaaggttttatttataattaaattgcttttttggttttatttgaataaatataaaattatacattcaaataattatttcttgaaattttctcctttattttaaaatgctggttagtatgtgatagttgtagcacatttaaagaagaatacaagtaaaaagtgcaattctacttctccctatacattgtttaataagcatatgccttttaaaaaatgaccttataatgggctgagtatattttggatattgttctgtggcagcataataccacataacttaattaactgtctccttattgttaaatgtttagattccctccttcctgcaccccctttgaaagcaatgctgacatgtgtgtccttgtaattgtactttgatatattggcaagtattttcctgggacagaattttgcagatggatcactggattattgtgtacatttactttaaaatttgcttaaagtcggggcgcggtggctcacacctgtaatcccagcactttgggaggccaaggtgggcggatcacctaaggtcgggagttcgcgaccagcctgaccaacatggagaaaccccgtctttactaaaaatacaaaattagccaggagtggtggtgcatgcctgtattcccagctacttgggaagggtgaggcaggagaatcgcttgaacccgggaggcggaggttgcggtgagccgagattgcgccattgcactccagcctgggcaacaagagcgaaattccatctcaaaaaaaaaaaaaaaaaatttcttaaaaattttcttttaattctaagagagttttatgttgacttctagtgctttttgggcgctgatgctcacacttattttgataaagatgaaagatgtttaccaaatagaatattggacatagaaactcccaaggaaattctctacgtagctgaatttcaggc

SEQ ID NO: 1938 - DNA, 1041 bp, Homo sapiens
acagggtaattttctttttacaagactgaagcctctgtgaaggcaagggccatccatatatattgggtttaccatagtgtaatagcctttggttagagcagtgtctgctatgtaataagaagcttaaatatttgtagacttaatcaaatgtttattatttatatataaagtgtcaggcactgtggggggcattacttagtaaaatgccacttagtcatctcattgatagcctatagtacattttaaaatggaagtgtgtacatccaagtatgcatttaatgaaatatgggacatttaaaaaagttttcagatgctaatactgaagagaataatgcaaatttactaaaataattaggaccctttttaaaacatgggggcaatgttgcttatctttttaaaaatagtcatttatttttcgttcactatcttaagaattctgatcatcttgtaggaaacttagaaacactaggaaggtcataggcactattattaataattatagaattgttttcctctaaattagagttttctttgtgaccctacataacgtaatgatatttgctctctggagagccaaatgggcctgaagtatagaaacagaactgaaatatagataattaaaactaaactaatatactataattctgattgttatgtcttaagatttgttggccttaataaggtgtgctgggataaacaaaaaggaaggcatcatttgtaaaggttttcttctttaatcccacttttgtttttgcatgaccagaaattctctgatatagcagggtatactttatataaagactatgggcagtaagtgtttagtgtttgtctttatattaggtctatagagtgtggtttcttgattatgggtgaggaaattagcctttcaaattccattagctgtaaagtggatttggatttggtatttgtattggttggctaatttaattcaaatcttttaaaattctcgtgctgaaatgatcttaggaagatcaaaatttctctaacagaaattattttggtctttgaagtgtataaatt

SEQ ID NO: 1939 - DNA, 1044 bp, Homo sapiens
aagataatattttgagagattcaaaagtatgaaatggctggctctggaactctgacataagatttaggattataaaatcctagaatcctagattttaaatcctaaaattttaaaatataaaaggagtgaaaatacagagagacctagattttgtttgaaatatttcatttctttttgggcattggcaagattataatgatggtggagttttgcaatgacttttgagtgtttctttttttgtttcttcagaaatttctacacccagaccatcttctccaggtggactacctgaagaagatagtgttttatttaataaactgacctacttaggatgtatgaaggtttcttccccacgtaatgaagtagaggctttacgggcaatggcaaccatgaaatcttccagtcaatacccctttcctgttaccctgtatgtaccaaatgttccagaaggttctgtgaggtaagctctaatttgtttttctttagacacatattaagtcttttgggtggtggtgaagatgttatagcatcatcaggtgtagaacttactgtgaactcacactgtagacatgcagagtaaacatgtttaggcttagactgtgttcattgtttgaaaggggcatttgaacaattgtattagtctattcttgcactgcaataaagaaatatctgagattggataattgataaagagaagaggtttaactggctcttggttctgcagggtgtataggaaacatgatgctggccatctgctcagcttctgggagggaggcctcaggaggggaggcctcaggaaacttaaaatcatggcagaaggcaaggggaagcagaattgtcttacgtggcaggagcaggagcaagagcgagaagggggaggtgccacacgcttttaaacaaccaggtttcatgagaacagctatcatgagaacagcaccgaggggatggtgctaaaccattcataagaaattgttcccatgatccaatcacctttcaccagccccacctccaacattggagattacaatttgacatgagatttag

SEQ ID NO: 1940 - DNA, 1045 bp, Homo sapiens
tctggcactccctagtgagatgaacccggtacctcagatggaaatgcagaaatcacccgtcttctgcgtcgctcacgctgggagctgtagaccggagctgttcctattcggccatcttggctcctcttcgataatttgtttacttgcattgttagtaccactttcctctccctttctctgtcttcattcactacattccagttatactagcctctgtattcattcttataggacttaccagtcatatttcccgccccaggaccttggcatattatctttatactccctaagtaaatctttccctgattttccaatgctttttgtttcatcttagtaaacattttatcataagaagccttccttggttatatcatgtaactctctttcctcatactgggccatttttttttccttcgtagcacttttctttgaattgatattatatttatttgcttattggtttattggatatcttcctcactagattataagcttgtgagaatagtttctttatatttttccctgctgtagcttcagtggctagggaagtaagtgattcattgtaagattttagcaaatatttgctgaatgaacaaataagcagaccaggtcaaggaaatgaggttgaatttgtctggagcctggaatattctctgaaagttgctttaatcttttaaaaaccctttctgatttgcctcattctctaaagtttagaatgtgggaaaacttttgctaaattccaagtaccaaaatattggcaatataaatttagaaaattttggtaaaaatgctttgaatttttcaggaaagggtttgcatgtatattgtttatatgttatcgtctaaaaatgtcaaaatgtctttttaaagaaaaattgttttcaaagtgtcttctatgctatctgtttagcttcaatttgccaaacacaccttgacagagatttagtgttttgacttgcctctttattcctggggttgtccccttaccctcagtttctaaatttgagatcttgaaggggtcttgaatgtgtagatcagtccagga

SEQ ID NO: 1941 - DNA, 1051 bp, Homo sapiens
aactgaacatgcacagacacatataatttagattgtaactgtagaaattctctatcagaacccatgccttctgaaagaagttgaagttttgtgttttgttttttagataaggctttatctatttttttcccagcacttacatatctatgtgtatactgacttcttgttcaaaatggtctgatagacaggagagtgaatgagtataagtatgctgctagtgtgcctagcatatagtagacagtgaatataaatatgctgaaggaatatgtatgtttctgtgaatgaggggggctatttctgatccttacgaactccactacagaggtggggaagcagatggtagaatcctggcatttcatgttggcagccatcatttaacccacctgtgtgatttccgaatcactggagctcaacagcaaggaaatgagctttgaagacctggaaaatctgctgcttggagagagagaaatgctgctgcagaaggatactgaattgctgcaagaagtttccataactaatggtatgaaactgtcttttggattgtagcattcacttgggtttagagtaggggaagtgtttatttttgagagcttatcatggtaggtaagtagtggaagaaaccctgggaagttcttggccagaccattttggatatagtattaaataaatgctgtttctatagagcatattttttccattgcacgttgtaagaaagttatctccatctattatttaattttttgagtgcattttagaaagtattacattatgggggcattagtggtaaaatatattgtttgaaggagaaatacatgacagtggtcattaaaccttattatgagacattatttctttttaaaaaaaattttaaaaatcctcctccaggtaatgaatgacacatcagttctaaatgaggaataacccaatataaatagagagcttatgccaggcactgtgctaagcgttcatttgatactcataacagcccgtgaccaggttggacttattagacaagtgactttatgtttctctttgcctggagcagttctat

SEQ ID NO: 1942 - DNA, 1039 bp, Homo sapiens
aaaagaaaataaaaggtgcttaaaattccgccgcagttaagattttggtgtatctccattccagatatctacatgtgctctcctccctgcctcttcaaaaacaacagcaacaaactcaaacagatatacagttttgtgtttagtattttctatagatactgttttctggagaaagattgtattatttatcaataaaccttttccttctgcaaagaaatgcccattcaagactatttgtgtgtatgtgttttaataagtgtgacatgtattgaagtgtttgccatggtatgtgtttttaatttcctttcttgatgtacagttagcccactatatttgtggattctacatccatggagtcaactaaccatggctttaaaatatttgataaaaatgtatggtttcatctgtactgaatatctatagccttttttccttgtcattagtccctaaaagatacagtataaaaaccattcacatagcatttatattctattaggtattataagtaatttagagattaaagtatatggaaagatgtgtgtaggctatatggaatattacacagttttatataagggacttaaacatctatgcattttggtatctgggagttttggggggtcctagaaacaattccccatgggtaccaaaggacaactgtaattggttatccagtttgttataagatactgatagtcattgtttctgaagtttatcttgttaattcttggattactgtttcagcttattcacagactctagaattcacaatatattttaactcttttggtagaaatggcagcttgtaagacatagtattaaatgcaatttgattgctgttaatgaaattaatgtactgtcgtgttctttctccaaaagagagatagatggaatcttatttttttttctccatcattctgtatcactctggctcagctccatacgcttaacctttctataaagaattttttgaagccttgccagatgctttagaatttgccaagttctttgactttttttgatatggccttctgatgtg

SEQ ID NO: 1943 - DNA, 1049 bp, Homo sapiens
gtctaaaagtatgctcttctcacttcctttgctttggatttcactgttttacaggcacttatgaccacccaaccagctaaaccagacatgtgacagtcttaagaacttcaagtaaacattattcctaaatttgttttaaaactgaaatttatcatgttgtcattttttttttttttttggagatagagtcttgctctgtcgcccaggcaagattgcagcagtgcaatcttggctcactgcaacctctgcctcctgggttcaaccaattctcctgcctcagcctccccagtagctgggactacaagcatgcaccaccactcagctaatttttgtatttttagtagagatggggttttaccatgttggccaggctggcctcaaactcttgatctcaagtgatcagcctgccttggcctcccaaagtgctgggattacaggcgtaagccaccgtgcttggccatgttgtcttttttaagatcttgcttttaactttggttagcagacaaaatataaggctcttgtaaactcaatttagaaattaataatgactgtgttgctgactataaagtttatagtcaaataaaattaatagtttgctgcctgtggcaaggtgagagtttagtatatcttaagaataagggtgttgttgcttaaatactttgttgttttgttctaaccttggaataggttattttatcattttattagattattggtaattcctattccttttgaatatttcagccctgtgcctaaggatagagataaattttatttcaaattaaagcaaggaatagagaagaaggttgtgattacagtgcagcaactttctaacaaagaattagctattgaaaggtaagcagcttgctcctaaatgctaccaaaaacttgtattgacattgttactgtctcagatgcattgctcagtgtggcttttcactatacttcattttctccaattaaaaatgaggataattaataatactttctctactttaacttagatgtaactggtttcattgaaaatcaattgctggggtaagtaaaca

SEQ ID NO: 1944 - DNA, 1044 bp, Homo sapiens
taacttgatgttagaccattctgagggtcttttgctggatttacttagtacttatttttacttttgccttagcaagttgttacagttttatttaggtaaaaactcaagttactatcttgaagttgcctagatgtcagtctgatttggatgttttattctcttatgtgaattagtacgtttatgaacttttacagcaaaataaagaattttagatgttataataatttctcttagaggatatcattcctccctttcctgaaaatgggaatagattagtgggatgacccatattctgcataacattttaaaagctaccctgtgagcttactcacttgtcctttttgtgttttcttttaaggcagtagaaggataactctctttttccataggaaaacaggtattacttacttatacaaaagtactttcattattctctgttaatgatttcatgtgacaattgatagaaagctattggcattttcaggtgaataatttggggagtggataactggaagcttctatctgactctcagcctttgaactgaaacttgtaatcaggacagaattttcagcatcttttcattgctggcttctgttggcacccagtggggagaggcggcatcatggtttaagtattaaatgtggatgtagtactattacgtttttagcattgtattttaagaaatacttttaaaatatgagcaatgaaaacatatattgttgtctgtaatgtgttctcataagttgattgattctagatgttttggagctcattaaaaaaaattccagtttgaagtaattgtagatgcacaggaaattgcaataatagtatagagatgctctatgtgtgcttccccatttccccctatggtaacatcttacataaccatagtacagtatcacagctaggaaactggcattggtacaatttgcagacctctattgcagctctttttgaatccttttataaatcacagtatacttctataatataaacatttaatttattggtttaagaaatttggatatgtagcctggctgcta

SEQ ID NO: 1945 - DNA, 1043 bp, Homo sapiens
ttttaaggctaattttctacttgtatactctattttattccattttgacatctcaaagacattgtttaagcagtctttcttctaccacacttgcttgttagattagcccatccagtctcatgactttaaatatatctatgactggatgattccaaatgtttttctctgacctgaggtctccaaacttatatattcaacaacttcagatcttcatctggcatctcaaagttaatatgttcaaaaatcaaactaaaaaatcaagtttgacactgtcccaaacttgttcctcctgtaatttctcacagtctttttaatttgtaacttgatctttccaattattgtagatgaaaaacttggcattttcaactccattttctctcactctacatctaattcttcattaaatcatattagttctacttccaactatgtaaagaaagaaaaaccctagaggaaagggattaaagaaaaaatacgaatagaaatgggaaaaaatatagactgtagataaaagaaaaaaattagaaaaaaaaacaaaagaaatgacaatcgagagaaaaagaaataggaactccaagtctaatcactagttttcttattttatcaaaagttaatgtaggtacttttgctataaattttctcataaaattgaattcatcattttttgcccatgttttgttcaaccctatctacatgtgttttatgagtgataatcaggaatcagtagcctgcaaaatgagcctttatgaaggagaaaaatggacttttgttaatcagctgtagctgtacaggggaagatattccttttctttatgcttttagatgtttttgaattgtgtttacaaatacattcaattgtaaaaatacttgtaaattagcacccgtttattttgatgcatatagctagtatctgcaaaagcccaaataatgtatcactatctgaatgtcctgtattagtcttactgaatggaaaagcaaaataattgattttaaatgttttaagcagggattaaaccatgtcagactttgaaatttattggttt

SEQ ID NO: 1946 - DNA, 1032 bp, Homo sapiens
agtggtatcatgtttccctgattctttgtgatcctcatatcattgtattagtgtctgcacaatttaggaagtgatcacctcttctagcctttacatgttcactttggcaaggaaagatctttactagtctgccaagcctgggcttctggttgggccagctggtagcatatgcaggtaagtgaggctggggtctctgatctggtggggctgctgccgttgctctaaggttgggtggagctctcttgttgggcaggccccctgactggtatctgaggtcaagtgggactgttggttgggctttgtaattgcctctggttgggtgaggctgcaggctgtgccccaaagttaggcggggttgctggctgggctctacagctggatggcattacagtcaggtagggatactgattggactccctgattggttggggctggaagctgtgccccactgtttgatgtagtcattggctaggctccctggttgggtgggattgcaggttatactctgggctgctggcttggttccctgcctgggcatggttgccatctgtgctttgcagctgggctggattgctgactgggaaacctagacacccagtactgccaaccatactccctggccagactgggtgccaggattgctttgcaggtgggaggagctgctgcctgggctccttgtcaggtgaagctgtcagcagggatgtgtggtgccattgccaagatacatgtgcttgttgcatgtggtctagtcctgacaattctcaatattctgtaggagaagagatataatttggccttttgggaagcatgctggaatattgggaaagctagatgttcaccttgtgctgctggtgaaaccatagactcagcaaatctctcttggcatgaggctgttttggcctggggtagtggcaacatcatcaaattgaaattgctccacttatacttccaatacaacttttctaagttttgtgcttctggaatttttgcaaagatgttcttgtatgtagatagttgctagttggtatttct

SEQ ID NO: 1947 - DNA, 1031 bp, Homo sapiens
ctccagcacctgttgtttcctgactttttaacgatcgccattctaactggtgtgagatggtatctcattgtggttttgatttgcatttctctgatggccagtgatgatgagcattttttcatgtgtctgttggctgcagaaatatcttcttgaagtatcttatgagaagtttcaaatgatctcctgtgactttagaattttcatgattgttacgtcatgtcctgtttctcatttgacatcattcaattcttgtttttttttgttgctgtaccccttaccactgcttttttttggaaatagtggggtatctgctctatttactacatggttgctgctgagcaataactgacctcacaaaaagcacatatcatatggctctgtgctcaatactctttttatacaaactagagctaaatgacagatgtttacttttaagaccttgtatcatgtgcttctagggtatggtttattaatagtaaatttcttaatttttattatctttgaaaaaagcatcttagaattctcagtcttgcttctgtatgaaactgtttttttctatgattgccataaacataataattatttttagctaatatttatttagtgcttactatatgctaagaacattccaagtatttcaaatatgttaacttatttgagtcttacaatcccatgaatactcttattaacttggttttaaggatgagaaactgagacacagagagcatcatcacttgctaagctcactcagcttaaagtgacaaagctgagatctgagtccaggctatctgactttaagatttgtacttgtaactatgacattattcggtcaagttagtcagttgactaaaacatgagaacagctcacttttaaaactaaggtaaaattcacataacatgaaaataacatgaaaacttaaacatgtacaactcagtggcattttagtacattcacaattttgggcaaccatcacctctatctagttcttaaacattttcgtcatccaagaggaaatattatacctattaag

SEQ ID NO: 1948 - DNA, 1933 bp, Homo sapiens
gcatcctggttgtgttccagatcttagaggaaaggctttcagtttttctccattcagtatggtactagctgttggtctgtcatatatggcttttattatgttgaggtatgttccttctatctcaagcttttttgagggtttttaatcatgaagggatgtggaattttatcaaatgctttttcagtatcaattcaaatgatcatagtttttttccttcattctgttgatacgatgtatcacattgatagatttgaaccatccctgcatcccagggataaatctcaattggtcatcatgaatgatctttctataatgtattgttgaattctgtttgctggtattttgttgatgatttttgcgtgagtatttatcagagatattggcctatacttttcttttttttgatatgcgtttgtctggttttggtatcagggtaatactggccttgtagaatgagtctggacatttggaagagttccctcgtcctctgttttgcagtagttcgatttggattggtgttagttctttaaatgtttgatagaattcaacagtgaagtcatcggttcctgggcttttctttagtgggagacttcttattattgcttcaatctcagtacttgttattagtctattcaggtcttggatttcttcatggttcaatcttggtaggttgtatgtgtctaggaatgtgttctattcttctagattttccaattcattggcatacagttgcgcatagtaaccactgatgatcctttgaatttctgccatctcagtgataatgtctctgttttcctttctgatcttatttatctgtatctttttgctttttttcttagtctggctaaaggtttgtcaattttgttgaacttttcaagaaaccagtggtttgtttcattgattgttcattttttaaagtttcaatttatttgttctctgatctttattagctctttccttcaactaattttgggtttggtttgcttctgcttttctcatttttttaagatgcatcattagaaggtttatttgaagttcttcctttttttgatgtagacagttatagctataaacttccctctttgtactgcttttgctgggtttcggtatgttgtgtttccttaatcatttatttcacgaaatttttcaatttccttctcaatttcttcattgacccactggtcgttcaggagcgtattgtttaatttctctgtatttgtatagtttccaaaattcctctttttaacaatttctagttttattccactgtggtcgagaagatgcttgatattatttcagtttttttggaatgttttaaaacttattttgtgacctaaaatatggtctgtccttgagaatcatctgtgttctgaggaaaagaatatgtattctgcagccattggatgaaatattctgtaaatatctatgaggtccattaggtctatgatgcagattaagtctgatgtttctttgttgatttttttgtctagaaggtctgtccagtgctcacagtgggggtttgaaggtattattgtgttggggtttatctttctctttagctctaataatatttgctttgtatatcttgatgttccagtgttgagggcagatatatttaaaattgttgtatctttttgccgaattgatccctttatcattatatggtgactttctttgtctctcagagttttctgtcttgaagtctatttttccactataagtatagctattcctgctcttttttgtttgttttcttgtttcagttggcatggaatatctttttccatctctttattctccgtctatatgtgtccgtgtaggtgaagtttgtttcttgtaggcaacagatcaatgggttttgctttttcattcatttagccagtctgtgtcttttgattggagagtttagtccatttacattcattgttatcat

SEQ ID NO: 1949 - DNA, 1058 bp, Homo sapiens
cctcaaaatgtaagaaatgaggggtgcagaagagatagattagagatattctggagataaaattagtgaggcttataaatgaattggatactatagatggcagaagaaagagaggagaaagactcaaaggttataatgcaatttttggtttaggtaactggatgatcttgatgccagcaaatgagataggaaacacaggggggaggaagtgtgggtttggaggtgggaggaaaatgtattcagttttaaatattgatgagtttgagttcactgtggaacactgaaatggaactatttttcagttattagaaatagtcttaaactgtgagaaaaactttacaactggagataaagtcttcagagtcatcagtatgaagcaatgagaatggctgaaattatctttgaggaaaatgtgggagaggtgggttaaaagtagatgttaggacatcactaacatttaaggggtaggtccaggaagagaaagccctagctaaaggatctgcagaaaaatgatgacaatatgagagccaagacagggatagaataagggatggagattgtcaaagaagaagtgatattcggtgttgtcaaataaacaaggaggtttaataagataaagaccaaaatctgttcttacaagttcattagtttggggggattatggaacctctacaagggtgattttaataaaactgggaaagaaacctcattgtagtgcattgaggattgactaaagataaggaaggagagaacagtgtttaagtaactcttttaagaaatataagaagaggaaagagattagattgagaatactgaattatttctggccaagagaggacaattttagggtgtaaaagacttgagcttctatgtggttagaaaggaagaactaaaaatagagagaagttcacccatcctgcacttaaccatacagtttcctgacatgcttctgtgtcttagcaaatgctatttactctgcttagagttttttcaacaaaggcatgttaatagtgggggaaagaaagtaattttagcatcgtggcagtttctcagacatc

SEQ ID NO: 1950 - DNA, 1048 bp, Homo sapiens
gagcagaatacagaagggtggacttgtagctgataggcagtgggtaaatgactacaaaagggtaaaagctgggcctaattctcatttacccatttatctggtccaattgaattaggctttcctgatacccaatgtttttagatagagatttatttattaggagcactgataagaaaaaaaacagcaccaacaacttgtcctaatcttcttcatctttggtctgaaagtgtacttttatggtccaaccatgtggatgtgattgatagtattggatgtaatggtagcgtatgcattgataccacagcttggctgctactgttacgtggtttcttcctttcccacttcaagttatttgctgggggaaggcttaggaatttacatggacctccatgcatcatagaaataagcaacgtgtctcctgcggcagctctactctctggacagagtttatttgtccctgattctctggtgaagaacaggggcatagtcttccgttgtggccacttcataaaacaaggactcccttcttactggctctcacattactgagaattgggtgcttactttttacgggcccaacacattctttctagtatagcaaaatacacaacacctaaaactaataccttatactccaattgaaattaatcagcaaaacagctcctagatatcaatatataggtattgtagaaactaattttctttggataaggtgtttcttcttgtccgtaatttactcccaaaggcaaaataatttcaacttgataagatctatcggaggggaatataatttaatgggaaaaatacattacgcttaaactcagaactgaattagacttccagttgtagtgctaacttgataggtagcttgcacaagttatttaacatttttaggttccatttttccagtgaagcttttataaacctgctcatgtatgcatgctttgtctttcagaagtggaataatgtttgcaaagtttttttgtgtgttttgtttttctttttcctagcccttagattgagaaaataccttaatttttattgtctt

SEQ ID NO: 1951 - DNA, 1029 bp, Homo sapiens
acactttgtgctttggggaaatattttttaaagtgaggatacagtatatatgctcagtgaaattttaaacgtgtttgaaaagattttgaacttactcttaaatagctagatcattcttttaaaaaagcaaaacatgaataaagtcagaattcttataattaaatacactatcagaaagatgtaaaggaaaaatatttcaatactaatttgaaatcattagaaaaaataaaaataatatagaaaactaagaacagactgtataaaaagttcagtactggaggtctttataacagattggagatacaggtgtattgaaataactacatgaaaaaagcacataagctaaagaaagaaaggttgagagagagagagagaaaacatttgggataggagaacttgtaaaaacaaaactaaacgtggtagcaagatttcttttatatgttgaatatattcagaatggtaatgctgatgatttaactattatttaaataatttaaaggattaggcagaataatatctggataactgcttcaggttttgagatgcatggaaaacttaaaaaagtttaaagacaaaaataaaggtagtgcttactgtgaatacttagtaagtcaacttttagcaggaagaatatgcaggaagattttctaaccaaaaagactaagtgaacattggaggaaaataattgggtattggattattacatcaagtaaagtcaccttcaaatcggtcattcttttttattgagtaagagaaaattggtacatagccacctacttccacctcctatcaaaatttctgtaattccattggtgacttttcagtggtcacattcaatgacttttatccccctcatctcttgctttttctgctgtttttattgaataagagaaaattgatacatatttagtaggcattttaattgtattttcatggctattcattacttatcagcagagtgggaaaatgtattctgaattaatatgcttttcatcttcataatgacctttaatctatcctttttcttga

SEQ ID NO: 1952 - DNA, 1031 bp, Homo sapiens
caccaccctaggtcttaccacctaattacttaatctactctaagtactgtattttaaaataatagtaaaattttattttttaatttaaaggaacctctcctcataaatgagatttttataatcaagactttgttcctcagactatatgaacttttagaactttttatctgctgtaatttctttttacttttctttcctctttgcctccttcccttccataaatattttctgagtgcctagtataattatcactgctgaattcagttttttttttttaatttaactttttttttttaaattgatggcctctgcattggaatatgcaagatgatccattggtgtgtgggaaaaaatgtccaaagttccatttgtatttcttttaaataagtacaccaaaggatactaagctgtactaatatttggtgtgccatagtactgaggctttatgaggtccttgggtccagtggccactggtcccacatggttcaggagtgaccttagggaagaatggaacttacacactttggaggaataattgtggggctcacactcgtatattaacttccaaaatattataggtttcttgcagtttgcatgtgttagattaagtggatttacaggttatctagatgtaacttaatcctcataaaatgtgtgattggcttaaaaagattactatcacaggatgctgcatgtcaagttttttttttaatttaatatgttccttcagggaagaattaatattatgataatgacaaagcaactacttttggaaacaaactcatgtaacaaagatggacattttgaaacatatggcggtttaaacacctctgtgatttttttcattgaaataacatgcatcactataaaaaactcttacatcttcacacttaaaaacctggaatcagaaactttaaatatgtttaaaacttatacaagtagttgcagagaatttggaactgattgttaaaagcatataaacacaacaccttctgatttgttcatatgaatatctagaagctggtgtggtg

SEQ ID NO: 1953 - DNA, 1135 bp, Homo sapiens
gtcttgtaaagatcctttagaaaaactctatatttttctgatcatcagttattaagagtaataaagaaaaggttgaagaaataaaagcactatctcatttctatatactgttcattgtatggaaatgaaaatttataattcagaaactattctatcaggaaacacatataaaccttagaagtcagtgagtaagaaagaagttctaaagcgcctaacttcaagtcatctcttttaagatgagtcttgagccttcaaccattgtctgttgttacatgattcctgccactgagttgtagggtactactgctgctgatgaatcactggaagacttttaccacatatttctgaaatcctatgtcctttattgtttatcattgagatgtttttattattcctgttaagctgcatttttcataacgtttgaggtgatctgaaacgacaatagaaggatcatgaccttgttcctgtgtagaaacaagcaaacagtatttagagcttctgaaatgagtacttcttaattgttggcttgaggacccactaagcaatgatcacattttcacatattcttagccatttgaaatggagattgtgtatgttttagggcaagtcaaattttatgtagcatgacagaactgtgtgtgtactttcagtaattgtatgacatatatggtatagtttgcctatcatatctgctggtttatataacataggaaatattagattgtagttgtgtggtcttttgtaaaaatgatcttgtatgtaacgtgtgtactgtatactttgttaaaatcaaaagatgcttttaattgataagcttttagaaataataatgccatgaggtgtttctctctaccacttgaattcctgtttttctcccaaatgaatcttttctttcgaaagtgtatgtggttatatatgagagtgtgtgtgtgtgtgtgtgtgtgtgtgtgtgtgtgtgtgtatatatatgtgtataccatttcttttcttctctcttttttttttttaagagacagggtctcaccatgttgctcaaactggagtggtggctcttcacaggtgtgatcatagtgcactgcagttcattcttttaaaaggatttaagtgctagtgtttgatagacctggatttaaga

SEQ ID NO: 1954 - DNA, 1085 bp, Homo sapiens
cccagctacttgggaggctggggtgggaggatcacttgagcccgggaggcagaggttgcagtgagccaagatcacgccactgcactccagcctgggtgacagagtgagaccctgtatcaaaaaaataaaagaaaaaaagaaaaaagaaagagaaactaagaattaatgaaagaggttctttaagaaaatatacaatttattttctcttttcttgcataattatatatttgcttatggttaatttttttacagaataatttaaatcaaattttcttgatccccatcctttgagatctttcatttactgtctgtctatagtgatatctacatatataaaaactgtaattatatgtgaatttgagaagtaacagttttcttctcaactctccaacactgtgtataaaatttaaaatatactctaagtattttcatgtacttaagtgatatattctattattagtaacaaatatagtttttgttatccttcaaatgtgtttaatagttttgaggtaaattaaggaagatataactttttaatattaccttcattttcatattatggaattagagtaggagtatactgttttgaagaaagatgttagaggttattgttgagcatagatcatttcatggcttacatggtttactttttaaaaacttaaggcagtgttagtcaaataacaatactagatttcactgagagtcagaggattgcttaattatacgactgccttgttctttgtcatcaccttgtgtagttttgtaggctttaatcagtaataaaatcagtacttgcctgggcatggtggctcatgctttaatctcaatactttggaaagccaaggcaggaagatctcgagtccaggagttaaagacgctgtctctacaaaaaatacaaaaattagctgggtgtggtgccacatgcctatggttacagccactcgggaggctgaagtgggaggatcacttgagcctaggaggctgcagtgagctgtgattgtgccatttgccattttaatgacaaaacccacaattacttttgcatcaacctagtctcatattttcaagagcctgggattacactc

SEQ ID NO: 1955 - DNA, 1078 bp, Homo sapiens
tctgcatatggctagccaactatcccgtaatagcagggataatgtgtggctaagtcttttcaccatttattgaataaggagccctttccctattgcttatttttgttgactttgttgaggatcagatggctgtaggtgtgtggctttatttctgcgttctttattttgttggtttatgtatctgtttttgtaccaattatcatgctgttttggttactgtagccttatatatagtatgaattcaggtaatgtgatgcctccagctttgttctttttgcttagaatgctttggctatttgggccattttttggttccatatgaattttagaatagtttttttctagttctgtgaaaactaatgttggtagttgaatagaaatagcattcaatctcttgctttctttgggcagtatggccactttaatgaaattgattcttccaatccatgatcgtggaattttttaaaaattgtttctgtcatttcagatttatttgagcaatgttttgtagttctccttgtagaaatcttttacctccttggttagatgtattcctaggtatatttttttgtgtatgtggctaattgtgggattgtgttcttgatttggctctcagcttgaacgatattgctatatagaaatgctactgatttttgtgtgctgattttttatcttaaaacttttctgaagtcatttatcagttccaggaaccttctggcagagtctttagggttttctagtataggatcacatcatcagtgaagagagatcatttgacttcttcttttccaatttggatgcctttctttctcttgcctgattgctctgggtaggacttccattactatgttgaataggagtgatgagagtgggcatccttgtcttgttcattctcaaggggaatgctttcagtttttacctgttcagtatgatgtttgctgtgggtttgtcatgaatggttcctgttattttgaggtatgttgctttgattcctggtttcttgagtatttttatcatgaagggatgttggattttatcaaaagcttttttcacatttattgagatgatcacatggctt

SEQ ID NO: 1956 - DNA, 1065 bp, Homo sapiens
cagtcttgtgactatatatcctggtgatgttcattttgtgtagtatctcacagatattctctattcttgtatctggatgtctacctctctagcaagattagggaagttttcttgaattattcactcaaatatgtttttcagattgtttactttttctcctttctcaggaatgccagtaattcatagatttggtcattttacataatcctatttttatcaaagactttgttcatttttaaaaattcttttttctttatttttgttgactgtattagttcaaaacactggtcttcaggctctgagattctttcctcaacatggtctcttctgttgctaacacattcaattgtattttgaaattccttaagtgaattttttaatgactgaagctgtcattgatttatttttaaagatatttctctcttatttcctggcttgctttagacgtttgtgtcgattttcaaccttgtcttgaatctcattgagcttccttgcaatccatgctttgaattctttctgtcatttatgagtttccattttagttggggaccattgcttgacagctctaaggccatcccttggtagtgtcactacattgagatttttcatggtgccagaattcttgtactggttccttctcatctgaagacactggtacttctaatttttgtcattattttctcgcaggtatgattgtttttctttcttcatttccctatagtgttattttattttttctgtaccctcctccccccctttctctatgggtgagactgcagagaattctggttagggtcttttggctttgcttctatagccctatgcacttctttgggcaagttttatattgggctgtgcaatttaatgtacaagccagtagatgacgctaggcagccaatgcagttgggtatatacttgattcttgtttattttcggaagctctctgttgtgtcaggcagtgtactgattctttgaatgcacagtggtcgagctccctgcttaactaccataggacagaggccatgaaggcagggatagaccagcacatctgcccacacgtcccct

SEQ ID NO: 1957 - DNA, 1047 bp, Homo sapiens
ccttccctatagcctgttctctacagtgcagctgaagaaccctttttaaaaatgtttcagtgacatattcaggatatagaataaaatccagaatttttaaactattttcagtgttcttcattcattcccaaaatctaagtttctctctgctgtcatttctcttgagcctgaaataatttttttagcacttcttatggttcaggtctgttggtgaaaacttctcttagatttcctttatttgaacattctctattttgcctttattctttattcttgcagggtgttttcactggactactgagttgacagtttttgctttcagcattttgaaaatgttccactgccctctggtcttcatactgcctgatgaaagtttgtgttttttgttgttgtttgtttgttttgtgtgtttttgtttttgagacggagtctcactctgttgcccaggctggagtacagtggcacgatctcggctcactgcaaactctgcatactgggttcaagtgattctcctgccttatcctcctgagtagctgggattacaggcatgtgccaccatgcctggctaatttttgtatttttagtagagacagggtttcgctatattggccaggctggtcttgaactcctgacctcaggtgatctgcctgcctcagcttctcaaagtgctgggattacaggtgtgagccaacacgcccagcctctgatgaaagtttatcatcattccaggattggtttcataggcatgtgacctatgttgttgcataggtacccgtacttagaaagatcctgtgtttcattaaatgttctactattgctatcttgatacgcttaatggcttttgaacaagggccctgtattttcattttgcactgattctgtggtttcttctattttatatatattatacatgaaacaaaccagaaaatcttctctgcctattgggtaagaattgtcttgtatctaggctgcctgtgctagataataaggatcatcaagatttaagtagatttttttttaaacattcgaccaacttccaaaaacagt

SEQ ID NO: 1958 - DNA, 1867 bp, Homo sapiens
tcctctctccttcctaactctattagttcccagcatctattgttgctatctttatgtccatgagtacccaatatttacttcctacttacaagtgagaacatgggtttttggttttctattcttgcattaatttgcttaggataatagcctctggtcgcatccattctcctgcaaaagatatgatttaattttttatggctgtgtagtatcgcatgttgtctgtgtaccacatttctttgtccagtctgctagcataaaacataatattaaaaatcaattttaaaaagccccccatttatctgggaaatgtaagatccacgtaccttaggttttcgtagactaagccttggtaatttttatgttactttattgctaatcacaggattttcctaaaaaacatggtcaggttcagacaatgatatttcttttcttttctttctttttttctttttgagaaggagtctctcactgtcaccaggctggagtgcaatggcatgatctcagctgactgcaacctctgcctcctgggttcaggcaattctcctgcctcagcctcctgagtagctgggactacaagcgtgcgcctccatgcccagctaatttttgtattttcagtagggacagggtttcaccatgttggccaggatggtcttgatctcttgacctcgtgatccacctgcctcggcctctgaaagtgctagtattacaggcgtgagccactgtgcctggctgatatttcttttctttaatgtactttaaaaaaggaatggtgagggagttggcaattcaatagaaaagagaaagtgttattattaatttccaaaactcagcatgttacctgtggttgcagtttctgaaggaaaaacgattagatagaaatcttactgatggtaaaataatatgcttatcttactatcagtgagctttgaatgaatagccactgtatgctttacatgctttaagttttagttttcataaccaacttttaaaggtaagtattattatctccattttaaagatagaagctgagatacatggagagaaagatatacccaaggcctcatagttaatgagtggtgcagccatcatgccaacccaaatctgtctgactataaagcctacattctttcctctaagtcatagtatctccttgtcttcaaacttaataaatgtttattaaaggtaataacatacctagaggaaaatatgagaagaaaggtcatactgtgtatggttttattttattgctctgcatactgttttgacctattaattttgttttaaacacatattttgtgtttgagactttctcccactaagaaggtggtaaatatacacgtaaattagtatttttgtctccatttttctttatgatcgagaaacatagtggaacctctcaaagtttttgcttacttggcccattgtcttagatctcagctagctagggcagtctcaaagtgttgtataactggcatttgatatgtcttttctcagtgtctcacttgcagctgggctgttgtgtcttgagtacaaacactgagccatgagtcagatatactgattgagtgtgaaagtatgtgcaggctggatatacttactccatccaccagtatctgttcttttagacattttagtagctctcattctttatggcacattgctacaaaggattctggtatgtttctttttaaatatcattatactatataatttcctggcaatgccttaaaattcactcaaataatttagggctctcatttcgtggctttacacagaactcgaacacttgattacatgcaaatgccatctcagccttttcagtctcttcagctataacttacacaggtcttaaatgatacattttaat

SEQ ID NO: 1959 - DNA, 1059 bp, Homo sapiens
ttgggaggctgaagcaggagaattgcttgaacctgggaggtgaaggttgcagtgagccgagatcatgctattgcactcctgcctggtcaacaagatcgaaactctgtctcaaaacaaacaaacaaacaaacaaataaaaaacgaacaaaaaaatgaagtagctagtacagtcagttgctaaaaagaaaaaactactttgagctgctgaagctttttttttttttttaaagttggtggaaagaaagagggaggcttagtgggtcaaaggcactgcttctgaaactcttcatctcatgttttcatctccctttagaagcatgtgcaattatcaattatttatagtatttgtagattcaaatagctaccagtgattatttttggaaacaaactaaagggatttagtatgtgaaattttctgaatgatattttttgccattttcctaattttataaatattatgattcaaaactgcttcaaatatgtgtaatggctatactttttcaatggtttggtagtaaagcttagcatttaacttttctttacaaggaatgtgggacctatctacattcacgaatatttatcaaatataattttattttaaatatttatttttcttgtactagagaatatctgattttgtttgattttaatactattatctctgaaagtcaaaatatttccctataaaataggactttctagccttttgtataaaatttaaatattgccttttcatccttaaacatagtattcacttgaaaatcgttattctaatgtatcttacaaacgtctcatttctggtaatgagaaatacactttctgttctatattcacctaaacctccaaagattttggcagtaacatggttttctctgaaaggaagttcaacatggaggaaagaataggaccttctactctttaggaataatttttttccaacttttattttagaatcagggagtagaaatcatttttacaattaataatacataatagttatatatggggtacatgtgatattttgatacatgcatacaatgtgtaatgatcaaatcaggg

SEQ ID NO: 1960 - DNA, 1125 bp, Homo sapiens
caaagcaattttaaagagccacaatttatatttacacaaaattaagccattttaaaaatcttgatgattcagttaatcagaggtatttgatacattatttaataatatttgctttggcagtactattgttttaaactattaataatccattgggaagttttggttttcttcaagtttagtaaatcagtaagaaaatgaataaatgatcttgatgtttttcttgaaaatacagttcacggagtctgttagaataaaaggaaacacttacacagttgtccctcattatctgtgtgggattggttccgggatgccccaaggataccaaaatccacagatgcttaagtcccttttatataatcacatacaataacctacacacacccttccatatactttaaattatctctgagttacttacaatatctaatacaatgtaaatgcaatataattagttgtattgtttagggaatagtgacaagaaatgtacaaatacatttcaagtacatgtacaagtctgtatgtgttgaacacagatgcgaccatccatttttttcccctgaatattttcaagcagtggttggttgaatcgatggatgtgaaccctatgaatatggaggactgactgtatatgcttttatgctttcagtactgtttaaagtcactgagatagtagagccatcattagaacccatatagtcagagtgaataccttaataatgtttattgtatgttttcccaaacaaatgaatagaaaaattttatgtaaaattgtgtattaaaagattgtaaatggtcaggtttccattagtttgattttgagagaaagatttcagagaatcattaggtccttctgcctttttcagaccagtcaacggactgaagggtcttaagaaaagacctcagggatttcttatagagataatttgagtgacaaggtatattgtttccacgtttttatatacccaccagcttgcccttccataattggcaccttttaatttctgacaatgttgtaaaaggatgagttatagcaaatcattattaacttatctcaaatgtttctaattctcatccctttcacataattaacttcctttttttcctcctcattcatttagttatttt

SEQ ID NO: 1961 - DNA, 1035 bp, Homo sapiens
ctccaggagcatatactatgctgccttcaatgagccttcttattctggggttttcataaaaattgaaacctgaacaatttcaaaggaaaatcattattaccatttcttattccttacactgctcatctctttttttgttgttgttttgttaatgtcattagtaccactgccttcttatatttccactttatagccctgtctgtttaataaatgttaattgaaaaaaagactacctggattttttttcttctaccttaatcactctttcatttagaatccagtttatacacttcattcttcactgtcttttaagattctttctctgggtaaccagatcacttttttttttgcttcttccatagaaagattaccttctttttttgaatctttatgtatagttttattatattctctatgtgctttgaatgataggaactttaggttaactgataacttatggatacagcctcctaccatggctaaaattcctttcataactagcaaggtagtctcttcaattattataaagttctgtgacttagaaaatacttcctaattaatgagccccaaaatcttcctattgatcctattgacataggatcaaatgtccaccatttgatcccatgtcatatctctgtggaaacacagaaataagtctccctttatgatgtagcttttctggcacatgaaaactactgttatatctgccttctcttctcagattaaacatctttatttctttaacacattgctaattcattcattcagcgaatatttattgagcattttttttgaggcggagtctcgctctgtcacccaggctggagtgcaatggtgtgatctcagctcactgtgacctccgcctcccgggtttgagcaattctcctgcctcagcctccagagtagctgggactactggtgtgtgccaccatgcccggctaatttttgtacttttagtaggctctgggtttcaccacattggccaggctggtttcgaactgctgacctcaggcgatccacccacttcggcctccc

SEQ ID NO: 1962 - DNA, 1102 bp, Homo sapiens
acatatgtacattctatgtaaatttgtttgtatcagagaagtggtaatgctaccttttgtatacaaaggtgatgatactgaattaaatttccagaagtaatgatgagtttttattcatgcatccatgttgtaatctctggccttccttgaattcaggggcattctaaaatgcagtgttttggcctggcatagtggctcaggcctgtaatcctagcactttggaaagctgagacaggtggatcacctgaggtcaggagttcgagaccagcctggccaacatggtgaaaccccgtctctactaaaagtacaaaaattagctggatgtagtggtggatgcctgtagtcccagctacttgggaggctgaggcaggagaatagcttgaacctgggagatggaggttacagtgagccaagatggcggcattgcactccagcctgggtggacagagcaagactttgtctgactggaaaaaaaaaatcaaaataaaaactaaaatacagtgtttagttagagaacagaccataccaattaatttttacataaattaaatccatgacttgcctggcattttgccctagccaaattaactagcctcagaagttggattttgcctctgtgtttgtttcattttctcagtcaagaattaagagtactgacattacatattaagcttttttgtatcccctggggtaactaactagcatggtggcttatacatagcaggtatttaggaaaaaaaaacacactttgatttactgatattgattatgtttcaatacaagggcagttcagctactttgcatggacttctttgggaaggatttactatgatttctatttctatattcgtgtatgtttttgtgtttgagttcagtcatacttattacttacccatcttcttattgaacctcccttttgatcgaatgtgattattgcattggtggtatattagttgttttgaagaattaatatttctttctaattcaagcctatgatgtgactcaggctggtgatacaatgatggtattaagacaatgttcatccccttcaacagggaaagtaaaactgttcaacttgcttttgaatacccagtatacctgt

SEQ ID NO: 1963 - DNA, 1051 bp, Homo sapiens
tacttaggattggggaggaaaaagactctactaatttttaaagtagacctaaacaatttgcactgcctgtgtctttgacctgattttttactctcacctttctttatctgtccagttacctttgtatactaccaaagctttaaccttctgtcctctcaaacttttttaaattttactttatttaactaccaatttatcaaaacagtcatttacacttgacgccagcccactccgaaacagctgctgtctagcttctgctaccagcacttgactatgcttatttgaagatcatcagtgatacactaattaaaactccagtgacttatctggctttgtgttccttcatctatgccacagttgaatcattgaccactttttgcttgaagttctcagctcatgctgctttctgttgagtgcttctcatgctacctcagtggtacttgttaaatgttttccttttctactttccctccatttagtcgcacaaagcccccaccctctatactcgtctctgcctatttaacagatcctacctatgctctaaggcctggttcataggccatcttccctttaaatctttgagctaaaatgttttctcagttctgtagtttttaatctaatttttacttggagcacttttaggatgactgttgccttgatagtatgattttgtacacatttcttaactactctagcagatgttaaaaaaataaaaaaaggagagaaatcatcactgtagcttctgcaatgctgtgcattattagaaatctttaaatatttttcttaatatactgtggtagggagaataatggcaccccaaagatccccatgtcttattctttgagttagtgggtgcagcgcaccagcatggcacatgtatacatatgtaactaacctgcacaatgtgcacatgtaccctaaaacttaaagtataataaaaaataaaaaaaaaaagaaaaaaaaagaaaaaaaaaagaaaccactgaatatgttaggttacagggcaaagtcaaattaagttggaattaaacctgttaatcagttgatctta

SEQ ID NO: 1964 - DNA, 1057 bp, Homo sapiens
catagtgacttcacgtttcatccatgttgttgcaaatgacagtatctcattattttttatggctgaatagtacttcattgtggatatgtaccacattttatttattcattcatctgtcgatggacacttaagttgctttcaaatcttggctattttactcctgtaatcccagcactttgggaggctgaggtggtcagaagtttgagaacagcctggccaacatggtgaaacctcgtctctactaaaaatacaaaaattagccaggcattgtggcaggtgcctgtaatcccagctagtcaggagactgaggcaggagaatcactggaattcataaggtggaggttctactgagccatgattgcaccactgcacaccagcctgagtgacaactccatctcaaaaaaaaaaaaaatcttggttattgtaaataatgctgcaataaacatttgagtgcagatatctctttgatattctgatgtcctttcttttgtttatatactcaatagtggaattgctggatcatatggtagctctatttttagttttttgaggagcctccaaactgttctccatagtggttgtactaatttatatttccaccagcagtgtaggaaggttcccttttctccacatcctcgccagcatctgttattgcctgtcatggataaaagccattttaactggggtgaaaagatatctcgtagttttgatttgcatttctctgatgatcagtgatattgattacctttacatatacctgtgtgtcattcgtatgtcatctttggagaaatgtttattcagatgttttcccattttttaataagattgttagatttttcttctatagagttgtttgagaaccttatagattctggttattaatcccttgtcagatgggtcgtttgcagatattttctcccattctgtgggttgttgcttgactttgtacattgtttcctttgctatgcagaagatttttaccttgatgtgatcccatttgtccatgtttgctttggttgcctgtgcttgtgtggtattactcaagaaatttttgccc

SEQ ID NO: 1965 - DNA, 1034 bp, Homo sapiens
ttattcagggccaaagggttctttagtccacaggtgatgggatctgccatgactgggtacttcctttcaagtcaatgcgttcccttctggctgagggagtttctcaaaatactttctgggagctaaggcctgaaatgggggtctcacaacattgtctggtaccctatcctactgtggctgagctggtatccaagatgcaagttaaaatcctctttactcttccctttcctctcctcaagcagaagcaaggggtcccttttggagccacaaggggtctcttttgcagcctggagctggaggagggtggtgcaagcactgtattaaccattgtgtctggtgtctcagtaagttacatgtccccccagtccactggctctgacaccagcccagcacaaggactcacctacgacttagagtccttatggcctagattgcctttcaagtttatttaggtgcccagagcactccatcctgcagtggcaaggcttgctggaactcagattttgactgctcagatgggtgattcccatctggctagagccagtccatatgctccttccatgagtggctgtcagctaagtacagcctggttctgcttttgctatgacaggacagcactgaattaagtgcagcgtgtcacaatcactgcattctttctccccagatgcacagattcttcttgccatgcagccactgctgggggatgagggaatgattgtgttggcagttcaagactttttcctgccctattcaatgcctctttctgtaatattcagttaaaaccaggtagtgtgaatgcttacctgatttttggttcttagaaggtgcttttttggtgtagttaataaatttggtattcctcttgggaagacaatcagtgtagctttctattccgccatcttgctccaccctctatgtcgaattactttttttttttttttttttttgagacaaaatttcactcttattgctcagactggagtacagtggcataaccttggctcactgcaacctccgcctcccaggttcaagtg

SEQ ID NO: 1966 - DNA, 1018 bp, Homo sapiens
tcatagaaacaaagtaaaatgctaactaccagaggctggaggctggaggattgggaagatgttggtcaagggacacaaaaatttcacttttataggaggaataagttcaagagatctattgtatatcatggtaattatacttaatgataatatattgtatacttgaacattgctaagtgtatatttgatatttacatattgtctatagccactctggtgctaccatggcagagataaatagtcagaaagaggttatacggcccacaaagcctaagatatttactgtctggccctttacagaaaacaaccttgtgatacacaataattaaaacaaatttaaaaaatcaggaaatggcagtacgtcatttagaaatatatatgtaaatacaaaaatcagttgtgtttctgtgcagtaacaaggaactgtttgacaagaaatgaagaaaacgattccatttacaatagctacaaaaaataggaataaatttaagcaaggaagtgaaagatctctatacaacaaaaaaatgataagtatattaggtaatgcgtgtgttaaatagcttgatttatccaccttacagtgtatgcatatatcaaaacatcatgttgtctacgcattgggtaaagtgtacactgcttgggttatgggtgcaccaaaatctctgaaatcactgctaaagaacttaattcatataaccaaaaaccacctgttccccaaaaactattgaaataatagtaataaaaaaaactcacacctgtaatcctagcactttgaaaggccaatgtggttggattgcttgagctcagaagttcgagtccaccctgggcaacatggcgaaacctcatctctacaaaaaaaatacaaaaattagctggatgtggaggcgcgtgcctgtggtcccagctacttggggggctgaggcgggaggatcccttgagcctgggaggcggaaacttaccttatacaccataattttaatttttacttgtcaatttaaaaagaatttaaggaacaatg

SEQ ID NO: 1967 - DNA, 1097 bp, Homo sapiens
ccaggttcaagcaattctcctgcctcagcctcccaagtagctgggattacaggcatgcaccaccacacccagctgattttgtatttttagtagagacggggtttctccatgttgaggctggtcacgaactcctgacctcaggtgatccacccacctcggcctcccaaagtgctgggattacaagcataagccactgtgcccggctgtgtccttttcaatagcatgtaattttcttacatattgtgaagtgttttagatgattttttccaatcctttatttatttaatattttgcttgataaagtataattgtacatattcatgggggtacataatgatagtttgatccacataatgtatagtgatcagggtaattaacatatccattgtctcaaactagatgatttttaatgaataataaactgatcttatttctaactagttaggaaaaacaaagaattcttcattatatttatgcacaacacaagggtacttatgagaagataacacttaccatctgggacacaacatttctaccctagtattctattcatggtgatagctaataactgacactattctcagggacagtagcagtggtagtattgccactattatagcccctactctagtcactgccttccagcaaacatgttcttgttatatattttccaattaacacttacataatgtctgaaatgtatggtggtaggtgttttagcctgttttacttcaaaataggaacgtaaggaagataaacatatacataagaagtgagtgtttaagcccatactaaaatttacatgttatactttagcacaacaccttcttcgaagtaaaggggacaactgaaatgtatcatcttgccatgtataaaaaggcatgtttcaaagcataatgaccacactgtaagccttcactctttctctaatcttctttaaatttgcacatgggtaacaggtcagacattcagaatagtgtagccaggtaaatcagaattttcattatctggatttgtatgcctcactgggtgcactgggggaggcctctatgacaagcatgttaaatgtgtacttttctggagcccaaaatgctgaa

SEQ ID NO: 1968 - DNA, 1090 bp, Homo sapiens
attcttgtttcattttgtagaggaaaggctttcaacttttttcggttcagtatatgttagctatgggtttgtcatttatggtctttattattttgaggtatattccttctatgcctagtttgttgacagtttttatcatgaagggacattgaattttgtcacacttttttctgcatcagttgaaatgatcgtatggtttttgtctatcattctgttgatgtgatgtatcacactgattgatttgcatatattaaatcatctttggatctctggtataaactccacttgatcatgatgtattatttgattttcgtttccctgatgattagtgatgttgaacattttttcatatacccattggtcatttgtatgtcttcttttgagaattgtctattcatgtcctttgcccatgttttaatgggattatttgtttttctattgtcgactgagtttcttgcatattctgggtattagtcctttgttggatgaatagtttgcaaatattgtctgttgtgctgttgaattacggtttgctagtattttgttgaggattttacatctgtgttcttcaaagatattgacctatagttttttgttgttgttgttgttattatgtccttgtctggttttggtatcatggtaatgctggattcatgatatgagttagggaaaatttgctcctcttcaatttcttggaatagtttgaggaggattggtattagttctttgtgtgttcggtagaactcagcagtgaatctctccagtcccggcttttctttgttgggagacattttaattattgcttcaagttctcgttactggtcttttcaggttttctgtttcttcctgattcaatcttggtaggttgtatgtttctaggaatttatccattttctcttaagttttccagtttgttagtgtatcgttatttataatagtctattatgatcttttgtagttttgtggtatcaattataaagtctcctttttcattttttaaaaatttgggtcatttcttttcctggttagtctagctctagtggtttatcaattttttcttttcaaagaaccaatttttcatttcattgat

SEQ ID NO: 1969 - DNA, 1050 bp, Homo sapiens
atgttatcaccaaggcttctggctagcagtaggctactagtagttgagtttttggggagtcaaaagttatacatggatttttgactgtgcatagggccagtgccccaactcctgcattgttcagaggtcaactctgtgtgtgtgtgtgtgtgtgtgtgtgtgtgtgtgtgtgtgtgtgtgtgtgtccctaaacaatatttagcaagttgactgtttttaaactttatatcaatggtgtatattaaatatgatcgtctacagtttgcttttacagctcaatagtttaaaaacaaaacaaaacaaaaagctgcagtaatccccctgccgttattcatgaggattacatttcacgacccccagtggatgtctaaaactagattagtactaaatcctgtatacattttcctatacatatgtacctatgatggtttaatttataatgtttgcacgggagattaaaaacaataactaataataaaatagaataactagagcaggccaggcaaggtgactcacgcctgtaatcccagctctttgggaggctgaggtgggcggatcactggaggttaggagttcgagactggcctggccaacatggtgaaaccccgtctctactaaatacaaaaattagccgggcatggtgtcatgtacctataatcgcatctactcgggaggctgaggcaggagaattgcttgaccctgggaagcagaggttgcagtgagccgagttcatgccactgcactccagcttggatgacagagcgaaactctgtctccaaaaaaaaaaaaaaaaaaaaaaaaaaaaataattagaatagtatgccagtatcactaatcttgtacattgtactttggagcaattattagggaaaataagggttacttgaacatagcactgtgatattgtaatagttgatctgatgacagttgaatggtaacccagaaggtgactaacaattagtgtatacagtgtggtttgattcattgaggttatgctcacatcatggtcaaaagatgaaagtggaatggtttatatctccttgttctcag

SEQ ID NO: 1970 - DNA, 1062 bp, Homo sapiens
ttctcccattctataggttgtctatttaatctgctgatagtttgttttgccgggcagaagctctttagtttaattagatcccatttgttgatttttgcttttcttgcaattgtttttggcatctttgtcatgaaatatttacctgtgcctacaccgcaaatggtattgcctaggttatcttccagggtttttgcagttttacgttttgcatttaagtctttaatccatcttgagttgatttttgtatgtggtataaggaaggcatccagtatcaatcttgtgcatatggctagccagttatcccagccaagatatttcactagtgaattttaccacacattttaggagaaattaacttcaagttcacaaaatctcttccagaaaagagaagaggagggaacacttcctgactgattttatgaagctaatgttattactctaaaacagacagattgtacagaaaaataaaactatagaccattatttctcacaaatgtacatgtaaacattttcagtaagaatcataatgcagaaatcctcaacaagaatcatagaattagggtcaggcgcagtggctgatgcctgtaattccaacacttaggaaggcagaggcaggcagatttcttgagcccaggagtttgaaaccagcctgggcaatatggcgaaatcccatctctgcaaaaattagctggacgtggtggcacacacctgtagtcccagctccttggcagggctgaggtgatagaatttgggccggggaggtcgaatctgcagtgagctgagatcatgccacttgcactgcagccagggtgacagagtgagaccttgtctcaaaaaaataaagaagcatagaattagaaggaattacaatcaatattcctcctcttcaagattaataaagattgcaactttaatggcaacctcaattctgtgctgttttagttactcctcctatagtctgaaaatgaattgatttaaggcaaattcagtaggtttttacagtttcatttgtcatcagtgtttttcaaatataagtacttttgcaaattggaccaaattctt

SEQ ID NO: 1971 - DNA, 1030 bp, Homo sapiens
agtgagaatatgcggtgtttggttttttgttcttgcgatagtttactgagaatgatggtttccaatttcatccatgtccctacaaaggacatgaactcatcattttttatggctgcatagtattccatggtgtatatgtgccacattttcttaatccagtctatcattgttggacatttgggttggttccaagtctttgctattgtgaataatgccgcaataaacatatgtgtgcatgtgtctttatagcagcatgatttatggtcctttgggtatatacccagtaatgggatggctgggtcaaactgttgtggggtggggggaggggggagggatagcattgggagatatacttaatgttagatgacgagttagtgggtgcagtgcaccagcatggcacatgtatacatatgtaactaacctgcacattgtgcacatgtaccctaaaacttaaagtataataataataaataaaataaaataaaataaaataaaatataaaagtacaatatgagaagaaaaatcacgtcttccaattaaataatatacagttaatcaaagagagagcaagaatttgttcaactgtgtaccattataatcagacactataaagggattccaaaagtttgtgggaaaatgcaattaaaagaataaaataatgtgaacttttcttcccaacataagctccatcagggtcaagacactttccaaataaaaagtaatgagtacatagtaggtatatatatttatggggtacttgagatattttgatacaggcatgcaatgcatgacaataacatcaggggaaatgaggtattcaccatctcaagcatttatttctttgtgttataaacattccaattatactctttagatttatttatttatttattattttttgaaacagagtgtcactttgtcacccagactggagtgcagtggcacaatctcgactcactgcaacctccgcctcctgtgttcaagtgattcttctgcctcagcctcccgagtagttgggactacaggcgtg

SEQ ID NO: 1972 - DNA, 1029 bp, Homo sapiens
tttttttaaaatagtgttttctatattaaatataatataatatattatatttaattatattaattaaatataattttagattatattaattaaatataattaattaaaataattttacatttgcagagtactttgacatatattacctcatttatttttgacaattcctcatcaatggagcctacactggagatataatatgctgtgctcttaaattgagcagaaattaagagaatttcagtgacaataagtttagaaatcaactctgttttcaaggatacaacaatctgactttgtagttgaaaagttttctgtggctctggtgaaaggagaaatgatttgaactgtcacattagagggaagactgttaaaaactcattgtcatgttttaatggccctgtcaattccagttttgcctcttaatatctttcttcagagtaggaggaaatcgaaatgattcaaagcttcttctgttgtcattaatttgtatgggggaagttgagctgaaagtattagtagaattcataggtttctgcagatgaagaggtttgcaaattaatagatttctgcaaatgaaagtttctgaaaatttggttcttccctctttctctccctgtctttcctattggttaggtcaataacatattttaaaagaatgtccatgagacagggaagaatatactaccaccccaaatatattttgcatttttattatttaacatgagatgtaaaaatctgctataagttgggagacaggttggtatagtttaaagcactgggcatcaggaaatctggttctggttttgattctttcactaagtagatctaagaatgagggaaatttgtaagggtgtggtgtcataagattgttccggttccaatgttctgtgattctcagtgttgttcaaattttttttcctgacatataacacataaatgcagaatttagcagttaaatcctgcgtcagttattagctctggctctcaatactaaagatgtaaaagggtcttctccttaaatctgaagat

SEQ ID NO: 1973 - DNA, 1039 bp, Homo sapiens
ccttcagctacttatgcagaggactaataacatgaaggaacttttttgacattctggcaaaatgccacttatttatattgtatatgtatatatttttctgtagatgccagaggaacaagcattctgtgttttggtgaaaatcatgtacgactatggtttgagagacctctacagaaacaacttcgaagatcttcattgcaaattctaccagttggagagactaatgcaggtaaataaaaattaggaacttttatcactcagggatttgttgagtcatagaaaaagcctaatagagttggtaagcaataatgaattatagaagtttaatggaatattatagaaaatgtacatggatttagtttcagaccaatatctacattggtctatcataatatgtttatttagccattttactattttaaaaatatctcacattttaaatgttcaagttaaatatactttgaagtgagaatctaatgagtttaatcattaagagattgccaagtattgtttgtagaggaatggagatatttacagagtaaaaattgaaatacctaagagctttctgcatactaattagcaccacttccttatttgagtccacgtagaacacttggaaaagccagaaagatattcataagagaataaaacatactaaaatactgtagggatacatttaaaaatttttaaatataattcctaatctcaatgttgttgttgtgctttacaatgcgtatttataaatgtgtgtgagaaacatgcatccttttatatataccaaatattacacagtaaaaaagattgtgaccacaggcaaagtgattgaccagagctgacaaaaggaatttttaactagctttggagttctacctgaagttgataatcttaaatttataatgggtttttgtggcatgtttatgtgactttgtttaaaaggggttttgggaatccaagagaaatgtgaaggagatacatggatggattgattccatattggggaagggtaaaatggttgaggaaggaggttcgtggaatgtga

SEQ ID NO: 1974 - DNA, 1022 bp, Homo sapiens
tttaaaacagcatgtctcaatttgtatacaaggctactatgttggtctgtgaaatacgtaaaaaaaaaaaaaaaaaaaaaaaaaaagcgattgattttcagtgctgcaatcctgacctctagtggacattcagaacaaaacccaaacatcacattcttttatttagttactccatcaagcaccattagccaacctaaaatattaaactttcaaagagattaaaacatgagaagcagaataaagtaaaagaatttttggctaatattctaaatattcttgctgtagaacctgtatttaagagcagctagtattaacttatttctttttgcgtgttaattatctgtcactttcactactttctttgaaacaatgcattgctttatagatcatagcagcaagaaatttatcagagaagccaaatggattttcttttgattacctgtaatatataacaagctatacgaaaactgagtggctttaaaaggacaatgatttttatagtgagacatatagtgatgttatgtaacctcctgatagaatgcactgagaagggcacagcatcacttctgtggtatttgtgcccaaaatacatattctgaatttaatcataaggaaccagtagacatatcgagttgagggacattttataaaataactggccaatactcttccaaagcatcaaggtcatgaaaaataaacactgaaaacggtcccatatgaaaggagactaaggagacatgacaaccaaattcaatatataatccagaattgcatcctggaccagaaaaagggcattagtggagcatttgataaaaataatagtttcttggttttgatcattatactatggttatgtaagatgttaatgtttgggtaaaactgagtgaaggatatgtaggacttcttggtactgtttttgcaaagtttttctaaatccgaaattatttccaagtgaaaaaaagtaattaaaaccaatcatttattttcttacaatctcatgagtcagaaattttggaattcaa

SEQ ID NO: 1975 - DNA, 1050 bp, Homo sapiens
agagtgagaatccaaaaaagttaaaatgattaggagagaaaactcccaaaagaccctggagtacattggaggtgagtaggacaatagcagtcttttcctttgttgaggacaggggaggagtccctactcggttgcaaactccggatgagggctggggattgagggcttcccagaaagcatcacaagaaggtgtcacaccactctcgaaggcatctgaagcagtcctgggactgcttggcattggcaccaccagtgtccctcagccattctcagaagaggtcttcatctttctttagcaccagaaactggccaaggacaacataggccttgtcaaagcacccttcctccagcttcttgtccataacttcaccaatcccggccaggctccctactggcttttcccccacggactctgccacaaagtctcggtgcttttgggaggttgtaatcttgttcaggtttaattgtcagcttcagttcccataatggttcctcctgccacctggctgctcctgcctatacctcaagccactagaactttcccctgtaccacaatttatttaaccaattttatatttagtttttatggacatttgtttccagaatttcctgttaaataaaaccgtaacaaatatccttaaacttgcatctttgcatacttatctgatatctctggggtaaatttctagagatggaattgctaggtcaaactgtaaccaaattttaattttggatacatattacaaaattcttctctgctagcaatgtgagagtacattttcccatactcttcaaaaatttctaaacattaagcacctttatggaaatcaaaagcaagttataaatataaatataatatataaatatataaatttatttatacataaatataataaatataaatgtaaaacaaagcaatttaaaagtaatgatttagtaattttttattactaaatcatataaataaagctcttcagccagctttgaagactccagtattttcttttttggggagaatatccagtttctttagggaagcagtggatcatg

SEQ ID NO: 1976 - DNA, 1025 bp, Homo sapiens
ttcaggtaatatgaattcagtatgttagtttgttcattaactcttagattgcttctgtgatttatggtgatttatttcagcttatagtaacatcatctaaatattgaaatgttagaaatatcttcttaaaatgtttggaactaacttagatcttagctataaaagtatattcaagaaaatataaattctttttgaaatatatttgtcctcaaagcaggctgaaatgtaatgacgattcttgatgattattttgcagacctcaaaggaagaccttctgcaggctgattttgaaggtgctttaaagttctttagagttcagcttccaaagagatacagggcagaggaaaatgcaagaagactgatggagcaggcttgcaatattaaagtaagaacatgagtttttatataataaaggtaaaatatgagtgcagaataatatgacaaattatgtaaaaatttttttatatgttgcaaggtttgattatgtttaagattagattgtgtatgaactgatttctcccagatgtgtttgtcaggctaatgtgtgtatagtagctgtaccttctagtaggacttaaagttggcaggctcagattataacaataggaagataaacatttatctcataggtggggctctagagtgggctgctgtgatagtggtttccatggaagcagacttagtatttagcttttgccatctgttttaagattatttaggacaaagcaagaaaagcttgcttaggcaatgctttcatttctctaagtgacttggaaagtttgagtcttgatctgcccattcccatcccacacctgccaaatatctgtggatacattggtccatgtcacatgtctgataaagctaaacacattttataaatcaatttgaaattgaaaactctttccagaaagttgtagtattaaggtgagagagcactcttaaaatatttggaaccaatttactgatgttaattcttatacctctacaatataccagggtatctttttacctaaccataacgtaaa

SEQ ID NO: 1977 - DNA, 1069 bp, Homo sapiens
gcaagtcagcatcaggagtccatagcatccatcatcaagtgcaataagactgtgactctctgttactgagttgtgatgctttttctttttgccagtaagttacatggtccagttttttctttcttagatgacttcagggacttgttgtaagcctgctgaggtcaaggaatgcttctgccttatgtgcagtgtattataaaaagatttatctgtgataaaagtggaactcggctgggcatggtggctcacacctgtaatcccagcaatttgggaggctgaggcgggctgatcacttgaggccaggagttcgagaccagcctggccaacatagtgaaaccccatcgctactaaaaatacaaaaaaattagctgggcgtgttggcatgggcctgtaatcccagctactcaggaggctgaggcaagagaatcacttgaacccaggagacagaggctgcagtgagctgagatcatgccactgcactccagcctgggtgacagagcaagatttggtctcaaaaaaaaaaataaaaacaaaaaaaagtagaacccatgaagaaaaatttaaacaactgattttaatgactgtaaaggagtatcactagtagaaaaatgtttctatattgttaggataatcaagtttctttaaagataatattgatcatttttagcagaagtttgttatttatctttaggaaatgaaattaaatattttgctttgttttgtttttaatgtttctaaaaggaatgaaactgcattattgctgattctgttgtggattgaggcatttagagtagcaaaaattatattaatgctctgtgccaaaacacataaaatggctttatcactgattggtgtctcaattataaaaaggtaataatttgcataatatgataagaatgccacttgaaagaaaggaggctgggttgttttttttttttttaacatccagtaaaacatgattgacatcatctagtcaaattatatattatactgagctttattttctgtataaaccatattttacagatattattttaaaagaaattgaaatcttctgggcttaggtttc

SEQ ID NO: 1978 - DNA, 1028 bp, Homo sapiens
gtgttatgtctacaggttttcaaagatttatttacataattaaacactcatataacagtagcacacttaaaatgttaggctgatgctttcatatataatgaggttgagaggaattttagagtgccaaatatcactttgtcttaagtttctgccttgtaaatatgtatataattatcaggtaggggctagttatatttacatagcatacaattgaggctcatagaagtgtaacgtttctaccagtgagtaataacatcatctgagaattgagctacctaaacatcaggtaactttcagggtcttaaattattactaagaagaactattaggaaaataacagtacaattttagtttggctttaatatttgtaaaaaaaatttgccattctctcaggatcttagtgtgtgtgcatgtcctggcataatcaaaaacggaagttcttgcaagtgtttattgtttcttctcttagatgtcatcattataatggctattgagtttaagatatcaacgatctatacctctgaaaccaacttttttttgagatggagtttcgctcctattgcccaggttggagtgcaatggcatgttcttggctcaccgcagccgttgcctcctgggttcaagcaactctcctgtctcagcctccctagtagctgggattacaggcatgcgccaccatgcctggctaattttgtatttttagtagagatggggtttctccatgttggtcaggctggtctcaaactcctgacctcaggtgatccgcctgcctcacctcccaaagtgctgggattacaggcataagccaccacgcccggcccccaaaatcaactttttaactacaattgtagtaacttcttattatatttaatatgactcatcacaaacaacagaatgaaagagtatatcataacatttaaacctaactaatatgaagacctacttctctattttaaggcacaggaaccttaaaaacatggctatttcttgaaacaacaaattacaaaaaataaaaataaaaaaataaa

SEQ ID NO: 1979 - DNA, 1082 bp, Homo sapiens
ccattcctgttttcccagcagttttagtagttttttttagaagtatccttctataaatatttttatacatgcaaacaaatttatatgtgttctcttttttcagagctcttggtggcccttttatgttctgtactttgcttttctcacttaacagtatgtgttgatttttctatgtcagttcatgaagggtgtccttgttcatttgaaagctacatagtatttcactgtatagatttctataatatgtgtaaccaactccctcccactctgtgagtgtgtaggttgttttcaatattttgctcctacaatactgcagtgagtaatcttatataacatttcacaaaagtgtgtgagtatatctgtagattaaattcctaggagtggaactgctgggttgaaggatacattcatttgtaattttgatagataaggccaaattgttttccttaaaggttatattagttaatataactaccagcagtgtatatctgtgcctatttaaaggtggaaacttttgaacaggaatctaagaaaaaataggaatttatcagattgtcaggggacgggaaagatgttccaggcagaaggaatagcactttgagaggcacgggatagaaagatggcacaagaggatttttaacttattccatctggctaaaatgtagggggtaggccaggaaatagagagtgggagttgatcatgataggttgtgtatgtaatgctgagtaactgatattttaaattctataaatgaaggttttgagtagggaaatgatataataaggttgattaatgtattttattaaaagaatagctatttgtgtgtatttatttaaattgaagtttgccaaaaaggtgtagtccctaaagatttttcttgctttttttgtttgtttatttggagacagggtcttactctgttgcccaggctcgtgtgcagtggtgatcagatcatagctcactgcagccttgaaattccaggtttgatcctcccacctcaccctcccaagtagctggtactacaggcacatgccaccatgcctggctaatttttaaaacattttttgtagagatagggtct

SEQ ID NO: 1980 - DNA, 1074 bp, Homo sapiens
ctcagagttttggatatgctccatatccaaatgaaacagatgactgtgttctgttctgtagattttactacttttctctgccagtagcctctcacatttgtcacgcaataggaaccaagcaagagaatctggacagatcagctcacatctattgccctgttaaagtaactcaaagatatgcccaaagaattggatacttgtttcatcattggataagctggaactgtctataagtggctaggatgtatcatgccttatcacaagaaatagcagaaaaaaaatatatagtctttgatttcattaaattcctttgtttgtttgtttgtttgtttatttttggacacagggtctctctctgtcacccaggctggagtgcagtggtggtgctaacatatctcactgcagccttgaactcttggctgaagcaatcctcctgcctcagccttctgagtagctgggactaccagtgcatgccaccatgcccagctaactttttcatttttttgtagaaatggggcctcactttgttgctcaggctgttcttgaactcctggcctcatgtgatcctctcaccttggcctcctaaagtgctgggattgcaggccagatgagccactgcacccagccaatttcacaaagtttcagtattctcagaaaagaacatactcatatctagaaatgtcttatgacttaaaaagcaaagtataaccatgtgcatattaatagggcacaaagtgaatctggtagagtgccagctgtgtctaatctgataagtttatttcatatggaaaatgtgtgtcaatcttagatgaggctaatttgttgaaaataactgaattctggtctcttttagattgtcagaaagggattcatttaacagtaaaatttaatccagatatatgtagtcatatgtttttaaactttttaaaccctgaaaattattgaaatatgtgccattttaatagtatcagcttctgattgcttttattccatcatcatgtgatatactcctcattaagcagcaccagtaaccagagtttaattattgtgtagcactgtgtgaaagcttttgtc

SEQ ID NO: 1981 - DNA, 1048 bp, Homo sapiens
tgtttctttttaattttcgagggtacatagtaggtgtatatatttatggggtacatgagatgtttgatataggcatgcaatgtgaaaaacgtcatggaggatggggcatgtttctattctataggactaagtgagcaatagtcagggatatgtatgtatatattcttgataaacagaagatgcttttttgtgaagttttttattttctacaaatgtgatggtattttgtgaagtatttatatatatgtcttttatgttgacagagttcttctaggtcagagacgtgctggtagtttgataatacatactgaaatggcatttaacagataccagtaggtttgtcagatttggatgaagaattggagtcttttacattctactttgccctggaaaggaattaagagagctaggattccatttgtttgactacttacagaagtagaaatggttatggaattagtattgatacttagccatccagcttagtggagaactaccaatatttagatgtcggacaaaattgtttccataaaagctgtaaatgaactaatcttaaagaatgtatttagtgatcatatttttattctgagggataaaaagagcataggttttgtattcagaaacctggatttgaatctgaattctaccacttgttagatgcctagctttgggtagagtacttaactgctttgaggctccatttctcaacctagaaaatttcttatatttcaaattttttcatgtttatatgactggattttcataattttactttcctgacttatgagccatgtgcatttgctgttctaaagatagtttcagaggcttacttacgtcccatcttttgttgtcgttgccaggatgggatcagtcagataagtttgtgaaaatctacattaccttaactggagttcatcaagttcccactgagaatgtgcaggtgcatttcacagagaggtgagttctcattataatgggaaagacagtgaattaacagtcaacattgccttatcttgagactctcttctttgcagtttttaaaattctt

SEQ ID NO: 1982 - DNA, 1026 bp, Homo sapiens
aaaacctagaagaaataaataaaactattgatcaattttaactacataaaaatgtttataggacaagaaaaaccccaccataacccaaggcaaacaatgtattgacaggattccaataattaagaatacttcatacaaaaagaaatgtaaatgacctttaacatgtaaagatgctcaccttgttcagaagagaataaaccagtgtttttacctttcacttgaaaaagaagtataaaaacaactgtattgagttgaggctgtggagaaataaggacacatatatgggaatggaatgcaaaagttaaactttggttaacaagaatatttgggcaggtgcagtggctcacacctgtaatcccaacaccttgggaggccaaggtgggcggatcacttgaggtcaggagttcaagaccatctggccaacatggtgaaaccctgtctctactgaaaataaaaaaaactagctgggcatggtggcagatgcctgtaactccagctactcgggagactgaaggacaagaatcacttgaacctgggaagccgagggacgagaatcactggaacccgggaggcagaggttgcagtgagctgagattgtgccactgcactccagcctgggtgacagagtaagactcttgtctcagaaagagtatttggtaataaccatcagaatgacatattcatttatcctttgacccagaattttaacttctttctgggctctgaaaggtacatttagaaaaatttggaatgctatatgcaaaagattaaaaatactcgtgtctatttaacaggaatgtattatggtgcatccacatgagggagtacttaagtcacaaaacaatgaagagttctatataacgtaaaatggtctccaggatagagtaagtggaaaagcaaagtgcagaacatttatggtatacccactacatttgtgtaagaaagggtgagaaatgtgaatgtatgcacataggtgtatttgcttatgtttcaaaaagaaacgagtaaacccaaagctaataaaaa

SEQ ID NO: 1983 - DNA, 1068 bp, Homo sapiens
catgcagtccggaagttggaagctgagcattggccttctaaaatttcccagaaataaagccagtcagctgaatctaccttataccacaatcaaagccccaaaatcatcaaataggttaaaaggaaaaaatatcccaaagtcagcaacctcaaagattgaaggtagataggcccacaaagatgagaaagaatgagtgcaagaaccctgaaaactcaaaaagccagagtgccttttttcttccaaacaactgtatcacttctccagcaagggttctgaactgggctgagatggctgaaatgacaaaaacagtattcagaatacggataggaacaaagatcactgagttacaggagtacattgaaacccaatccaagtgatatggtttggatatgtgtccccacccaaatctcatgtcaaattgtaatccccaatgttgtaggatgggcctgctgggaggtgattggatcatgggggtggatttgccccatgctgttctcatgatagtgagttctcatgagatctggttgtttaacagtgtgtagcacctcccccttctctctttttcctgctccagccgtgtaagatatgcctgcttccccttcaccttctgctatgattgggagtttcctgaggcctccccagccatgcttcctgtacagtctgtggaaccatgagccaattaaacctcttttccttataaattacccagtctcagatatgtcttttttttttttttcctcccgcagcattactgctgacttattacaaatccctaagagggctttatttttttcttttcaacatcctgttctacagcttccttggctctttttgcttttatgccaaagagctgggcaatggcacaggccatgaggagatgcgcgaaggctttgaaattcttctcctcctcagtgatgactagggctttctcctttttatagaccttctggatgggcatgactggtcctgtcagctggatggccaatatcagttcttcaacagaactgtctcccttcttaggggccaagggcttcctggggaagaggatgagcttggaattgtactcct

SEQ ID NO: 1984 - DNA, 1047 bp, Homo sapiens
tttacccagtagtcactcaggagcaggttgttcagtttccatgtagttgtgtggttttgagtgtgtttcttttttctttctttctttctttctttttttttttttgacggagtctccctctgtctcccaggctggagttcagaggcgcgatcttggctcactgcaagctccaagctgcgcctcccgggttcacgctattctcctgcctcggcctcccgagtagctgggactacaggtgccctccaccatgcctggctaatttcttgtatttttagcagagatggggtttcaccgtgtttgccaggagggtctggatctcctgacctcatgatccatccgcctcagcctcccaaagtgcgagtgtgtttcttaatcctgagttctaatttgattgcactgtggtctgagagactgttacgattttcgttcttttgcatttgctgaggagtgttttacttccagttatgtggtcaattttagaataagtgtgatgagttgctgagaataatgtatattcttttgatttggggtggagagttctgtagatatcccttaggtccacttggtccagagctgagttcaagttctgaatattcttgttaattttctgtcttgttgatctgtctactattgacagtgggttgctaaagtgtcccactattgttgtgtgggagtataagtctctttgtaggtctctaagaacttgctttatgaatctgggtgctcctgtattggatgcatatgtatttaggatagttagctcttcttgttgcattgatccctttactattatgtaatgcccttttttgtctcttttgatctttgttggtttaaagtctgttttatcagagactaggattgcaacccctgcttttttttttgttttccatttgcttggtaactatttctccattcctttatttcgagcctatgtgtgtctttgcacatgagatgggtctcctgaatatagcacaccgatggggcttgactctattccagttttccagtctgtgtcttttaattggggcatttagcccatttacattt

SEQ ID NO: 1985 - DNA, 1038 bp, Homo sapiens
ccaagaaaccacatggtgagacccattagcaggaaaccaagtctcctagcagcaccccacattaactgtcagccacagtgaatgaggccattttgatcttccagttatcccactgccctacctacaccacatgaagcagaagaaatgctcagtcaacccaagaatcatgagaaataagaagttgtgttttaaaccactcagttttgaggtagcttgttatataataacagataatcaaaacctctggaattcccatattttggagggaatagtttaactgacgtgcagctttggcaagggaatggcaggacagccaccagcttattacacctgtggtaagaggcaggcaccctcacaaggcaacaagggaaggggggaaagtgatgaccaccaagtggtggcagatagtccttatactagaatgcatgaggaatgccttcgagaaacttctagaaagatttggggggactttgatgagactgaaggtgagatttagagtgcacaataatgagaaggcatgaacgagagaaccccagcctgtgctggttttcatgttagtattgtaatcctgatattatctagggcctccctctccttgatatctgataagtcttgcacatcctgtggaagactccccaacattactatgaatttctaggggaactatttccctcttgttagacctagatccaaactctggcttcctccatctgtggaaagtctcactgtttcttttatgctgtttctgtttcacttaaaatcaacctgaacacagcatttaaacattccttttatttttacaatttctactcataaaagcaatctttgtgactaacagactaataagaaatttgagggtataagaagaacattcaaacttgtagcaatatggacttcaaattgaaattgagactatcctcattcttcaaatgcctttggttgccatgctgggggagatttttccaagtgacaactctgtaagtactgcctgagcctcattctatgtcatggttcctctctctcccttccatctttcag

SEQ ID NO: 1986 - DNA, 1770 bp, Homo sapiens
caaggcctttctgttgcatgttcctattttgaaatggctgctttttgtccaagtggttgctgattactctgtatcaacgtatggaccttgaataagatggtcagtacagtagctaccaagtaacgaaagatatgttgtaatgtctaaaacaatgactttgcttttaatgttgtctagttttataaagacttcatggttttcctttttatagaaaataaaatttatattcctgtttttgaatctagcttgataacatgattaagaaaaaatggtatcatatggtgatttctattgaaatagaaagataccccagatacagtcgatttcttcctgttttgttcaggtcagaaagtcttcagtcattcttttgcaagttcaaccaaaataagcttaagagaacattttcagttatttgcattttaggttgtagttttggtctatactgagattgtcatgccagagtgtcaccttgagagaggcttgactttgtaatatctattagctgatcatctttcttttcctgtagcttaactagcataataaatttcctcatatatatccagtaatattattctgtttacctgtgagcatattgtatgaaattatatgtttttacagagttgctttttccctacaatcttgaaaaaccttgcatttttttctgtcaacaaacttattaaacatgataagtcatttctccattttatcagggaaataattgtgaaaaagttagtgactcctaacgattcttggtgatgtgagatgattactatttgactcccaatccagtagtttcttttgaaatattaccctctattattgaagttcacatttactgttttaacatatttgtgttaaaatgtattacaagcatttttgtgcttttctaagttgtcttagaatttaacagtatgtcttatcctatcttctctgcctctttgagacccatgtggatagtaacagatattgagttctttggtgaactgcaggaataaaagtgaggatgctagatagagtaaccaataaattattttgtgttttttttattatggtaaatatagcaaattttcattttaagtttgctatatttaataagtatacaatttaatgatattaaatacattcataatgttgtgtaaccatcaccactacctataccccaaatgttttcatcatcttcaaacttcccattaaacaatgactctccctttcccctcctcttagcagctggtaacctctattctttctgtctccctgaatttgcctattctaggtacctcatataggtgaaatcatacatttgtcctcctgtgtctgacttattcactaagcataatggcttcaaggtccattcttgtaacatgtataaaaatttcattttttatggctaaataaatattccattgtatgtataaactatattttttatccattcatttgttgatggacatttgggttgtttccacattttgtctgttttgaataatgctgctatgagctttggtatacaaatatctgtttgagtctctgctttccattcttatatacctaggggtggaaatgctgggtgtatggttgttctatgtttagccttttgagaaactgccagactgttttggtacagcagctgtatgtacccttttacatccttaccagcaatgcacgagggttccagttactccacttccttaccaacatttattattcatttttggtttaaccatcctagtaggtgtgaagtgatatcccattgtggtttttatttgtatt

SEQ ID NO: 1987 - DNA, 1107 bp, Homo sapiens
tttgtctaaaaagtttctttgcatccctttgtaattcccccctttccccagcctaacactagacagctactaatctgctttctatctgtatagattagtttggattttcaagaattttatggacattaatccctcattatttaccaggggattggttccagggtcccaacagataccaaaatcctcagatgctgaagttccatatataaaatggcattctatttgcatatagtttaggcttatccttccatatactttaaaccattcctagattacataaaatagctaatacaatgtaaattctatgtgaatagtttttatactatatttatacagtgtatatatagtatatatagcatatatagtgtatatatatgctatatatactatatatacagtgtatatatagtatatatagcatatgtagtatatatatgctatatatactgtatatatacactatatacactatatatagtgtatacatatatatatatatatgtatgtatactgcaaactccaccttccaggttcaaggtattctcatgcctcagcctcctgagtagctgggattaaggcacacactactatgcctggctaattttttgtatttttagtagagatggggtttcaccatgtttcccaggctgatctcgaactcctgagctcaggcaatccgtctgcctcagcctcccaaatttgggatttgctgggattacaggattgagccactgcacccggccatactgtattgttttttaaaatttgtattctacattttttatagttgtgtttttttctttttacggaatatttttgatttgcagttggttcaatccatggatgtggaatttatggaaggtcaactgtaagtggaattgtatgatatatactaattttttgtttggcttctttcagcatattttgagattcatccatgttgttgcatgtatcaatagttaattcctttgtattgctgatagtatcccatcgatattctacaattgtttgccagctcgccttttgatgaacatttgagttgtttttagtttttgactatgacagataaagttgttgtgaacatttgtgtactagtctttgcgcaca

SEQ ID NO: 1988 - DNA, 1018 bp, Homo sapiens
ccttgatctcctgacctcgtgatccgcctgcctccgcctcccaaagtgctgggattacccaccacacctggcctagattgctaatttttgtaatttttgatttatcagtctgaaagtgaagagccaaacatagacttaaataatgcctaacacttttatagggctcaataactacttaaaacattcatacataatatatctcattctgttttcataacagacctgttagatgggtaagaaaggtattgttcttaatttacagatttatgccatatattgaagaacacttattaagacattggaatgaggctattttgtgtttacaaaaatcaaaatattcccttatactttctctactagagttaactggaagcatttgagtaataaagtaattgatactgttgtaaatagtaatttttatgatttaacctgagtagcttttggggctagcatctcaatcaggtgcagtttctgagatgaactcaactctaaccattctgtttaagcattttatgatgttttaatattttagtttaaaacagactttaaatttgtctttgaagtaactagtaaagatgcattttgaaatagatttatttatgtttaaaatgtactttgaaggaaatagtgtgatcttataaataaagcacaattaggatgtggaatatgctatggtctgaatgctgatgtcctccccaattcatatgttgaaagttaatcaccaatgtgatagtgttaagaggtggggcctttaggaggtgattcagtcacaagggtgacttaatccttgtgaatgggattagtgcccttataaaaggggtgcaagggagctagctgtatggacttttctgccatgtgagaatgcagcaagaggcactgtccatgaagcagaaagtgaaccttcaccagacactgaatctaatggggccttgatcttagacttccaggcctccagaaatgtgagaaataaatttctattatttgtaaattatgcagtctaagatattttgttatagca

SEQ ID NO: 1989 - DNA, 1050 bp, Homo sapiens
tagagttaaagattttgtgaaatgatttgtttgtggccaaagaaatcatgattgtgactcagatgatttagttaaatgtataccaaataactttttttaaactgtggaagaatatataaagaatctaatgttggtactgtttttagtcgccatttctgcgtcatattttatagagattgttcttactctagtgagggtgatttaaagggcaggtgttctggattgccaaaggcattgtggaaacagagatgctctcacttctttcctgctcagtgctttccagaagctgtcaggagaagtgccacgtgtattttctaccttctgttagctatgcagaaggaagaggaagaaaaatattatatttttggaaacttgagttaagaattcagattattatgggaatagaaaaatggtgatgagatgtctttatttgactgcacagggagaattgtttggagtctgaagatcttttggctacctttataaaaaagaataaaaattgataaccatgcttaaagtcatgagctgattctcctgaagttccctgaaatagtcatatgaatgatatcatatacttttgtacattgttgtcataatggatattcttttataccacatattaatatatctcaaatgtaaaagttttacataaagtactttttcagaatagtttcatgaattagaactgattttatcatacacactaaggcatcatagacagcactgtgttggtctctcttcataacagagagattatatgtataagccatataaccttgaacgagctgtataacctctttctcatttctctcatctctaaaatggtatgaaaatgccctatttaatttgattctgagctgcatacatttttttcacattctaagggctctgaaatcaggatacatgtttgtgattgctgtattttactatcagtcatgtgacagtagacatgaagttatatgaaaattcttaatttataccttttggtatggtcactgcatctgatcatccgaatggagttgatgatagtacatacctcgaaggactttt

SEQ ID NO: 1990 - DNA, 1048 bp, Homo sapiens
tgtacccagaggacgtctgtatagtcctgtggaaaggcccacctggagaggaacttaacatcctggctgaggtgtagtaaattttatgtttggtctttgtctctgttcctggcacagagttccttgaactcatggagtttcctgagtgttaggagagtgttttgttagtcataagaagttccttttgattacacctaaatttatgctggtgaggtgacttagagtggagccactgaattgcctcaggatatggctggtaaccagacagaccatgtgattagagggtggaaattttcagtttcactcaccaacctctgggggaagtagaggctggagattgagtcctgtaggagctcttccttaaaacagcagtgtttggtgaacttctggattgaacacgtggaggtactgggagggtggttcacatggagagggcatgggaactatgtgtccctcttccccatcttaacttgccctacgcatctctttcatttgactgttcttgggttgtatctcttataataaatcgtaaatataagtacagtgttttgtgagtcattctagcaaattattgaatatgaagaggttgttgtggagacccctgatttatagctggtcagtcagaagtatgggtggcccctccaggacttgagactggtgcctggaattagccaagcgtggtggcgggcacctgtagtcccagctactcgggaggctgaggcaggagaatcacttgagcctgggaggcggaggttgcagtgagccgagattgggccactgcactctagcctggcaacagagctagactctgtctcaaaaaaacaaaacaaaacaaaacaaaaaagccacctttttcggtagaaaattttatacatacacaaaagtggagaaaataatttaatgagtcccatgtaaccattactcagcttcaacagtggtcaactcatggccagtcttgtttcgtttgaacctgtttactttccagtcacaccctttcagattatgttgaagcaaatctcagacattatttcagtaaataattcagtat

SEQ ID NO: 1991 - DNA, 1030 bp, Homo sapiens
tctaatatccaatagatatttatttcccctattgtcttacagtttaatgtatttgaatgtgatccagataaatttcatacattttggtagttgttatatttctagatctctcttaatttatagattctttctctctcccaaccccctttttgtaatgttttgtcaaagaaacagggttgattatcttgtatagtttcccatagtgtagattttgctggttttatccttgtggtatcattaatatgttcctcttgctcccctgcatgttctctatgtttatagttagatccacaagcttaatctgatttagacattttttggtaagatgactttaaaaaaattagctttattgaggtgaaatgtgcataatatttaacataaaatacactggttttaagtgaactaggtatagttacagttttacaactattacagcaatctaattcaacagaacattttgattactctaaaaataaactttgtgcctatttatagtaagtccttattttcacccccagatgtagacaaccactaatctacttctgtctttataaattggctttttggggatacttaatataaacggaatcatacaatatgtgttctattgtatctggcttctttcactgagcatatttttgaggttcatccatgttgtagcaatgactggttgtttcttaatcctgaatagtattccattgtatgaatacaccatattttgcttggcctttcaccagttaatattttggctaagaataatgctactgtaaactttggtgtacaaatttttgtgcagacacaagttttttttttcttgtgtatatagacatcaaggaatggaattgatagataatgtaattctatgattaacatttttttgttttttgagatgcagtttcgttcttgttgcccaggctggaatgcagtggtgcgatcttggcttactgcaacctctacctcctgggtgcaagcgagtctcctgcctcagcctcctgagtagctgggattataggcgcccgccaccacgcct

SEQ ID NO: 1992 - DNA, 1031 bp, Homo sapiens
aaaataatttagaataaaataatttgtatttcagtatgtaaacacttaagcatatacactaggagacataatgagatagtgaagtccttgcacctatgtgtagaatcatcataattgcagtatttccaaatgcagattaataaaggtatgtttcattggcagctcaaataccacaaatagtgttgtcattggtgacatgatttttcaaaaaggtcaacaaccttggtaaagttccaaacaaaacaaaatacagacttcatctatttacctggtaattgcattcctagaaattcagtgtgtcttaaaattgtgtaaaaatatcttatatttatgtgtaaaacagatttcagtttcaggcttagataattataaatggattttcacctatgtgcatgtgtggttggacgtttgtcactttgtgggaatatccatgcattccattctaacatacgtgtccatttctccatcccttcctccccagtgttgtggggaggagagaactctgcatttccatagcaacctctagttactgtagtaaccaaatacacacaaattccaatgtgccacctacgggggtgcatagcccctattttgaaccactgccctggaggaatgatcaatgggaaaatagttttaacagtccagtgtgtctccagtaaggcagtgtggtctgttcttggtattcatgtttcctgagataatggcctttgtcatagaatgcacagaataaatgaaacataaaaggccaccatcacattgtaatgtacatctaaatatagcatttgccttggtggaaagtgtgtatacctgttgttcctttttagggcaaaggtcctaatttggtgtttgggtattccctgaaattacacatttcgtatgtatgttcttgggtacatttttctggggagatgattttcagtagatctgtaaagaagtgcctaaggtcatgatggagtctaacaggtatggaaggaacctgttctgtttctgtgaaccttagtggcacaccctgagattgactaagattcgag

SEQ ID NO: 1993 - DNA, 2194 bp, Homo sapiens
ggccctaacaggccatggactggtaccagttagggacccctgaactagagtatagtgcttacatataatgtctttcatgtttagttttacagacttcactagtttccagggttacttaggacagcaccctttcccacccaccatcttcagtaagattgtttcacaccatgtgtattacaaatagattgttttgtcacattctgcattcaatcctgggattcccagacctcctaaagaatttattttaaatttgtatcctttaagattcacactttgtgctgcaaagttctatgggttgtaacaaatatatagtgtcatatatccatcattactgtatcatagggaatagttccactgccaagaatatcccgaagaatatcctgtacttcacctgttcagtacccccgacccactcccttcttttggcagccaacttatatgtttaccatctctccagttttgccttttctggaatatcatattgttaaaatcatagagtatgtagacttctcaaactgactcctttcatgtagtaatatgcctttaggattcatccatgtctttgtgtggcttaatatctcattcctttgcatcactgaatagtatttatgtacctattgagggacatttttgttgcttctagtttttggtgattatgaataaagttggtataaaatacatccatgtgtgggtttctgtgtggacataagttttcagacagttgtgtaaatacctaggagcatgattgctggattatgtagtaagactgtgtttaactttttctgaaattgccaaactgtactccaaaatataccattttgcattcttaccagcaatgaatgagagttcctgttgctctgtatcctcaccagcagttggttagtattttggattttagccagtctaataggtatgtagtgttaaaacaacaaatctcactgttgcattcccctaatgaaagatgatgttgatcattttttgtatgcatatttgctatctgtgtattttctttggtaagctgcccattcagaccttatgcccatttttaaaattgagttatctgtttttatattggtgaactttatagagtctttgtatattttggatacaagtcctttgtcagatatgtgttttgcagatattttcttccagtttatatcttgtcttttgactctcttaccagtgtgttttgcaaagaatttaattttaattaaatcctgcaaattaattttttcatggagtatgcttttggtgttacatccaaaaactcatcaaaatccaggtcacgtataatttttcctgtttttttttttaaagaagttttatacttttacattttacatttagatctatgttccatttttagtttatttacatttagatctgtgttccatttttagtttattttgtgaaagatgttaggtttgtgtttaggttcatagttttacatacaggcatccaatgtttcagcattatttgttgaaatactattctttctccattgaattacttgtttccttttgtcaaaaaccagttaactatataaatgtgtgtctttttccagtctctctattctgtttcattgctttttctgttctttgtagatactatgctctcttgattactgtagctttgtagtaggtcttaagatctgctacagtgtgatccttcaactttgttctttttcagtattgtgttggttattctaggtcttttcctatttcatataaactttagggataatttgttatccacaaaacaacttgctggaaatttaattgagattgtgttgaatatatagaacaaatagggaagaattgaatcttttcaaaattgagtcttccaatccatgaatttagaatttctcttatttagatcttctttggtttctttcatcgatgttccatagcttttgcatgcaggttctgtacatattttgttaggtttatactgaagtatttcttttctattctctttttgttgtatgtgtggggatgccatcataaatggttttagtttttgtttttttttttttaattttcaaattgtagttgtttgttgctggcataaaggaaatcaatagtcttttgcttattaaccttgtatcctgtgaccttgctataactgctttttggttccgagaggtttttagtagagtctttacattttttttttctacagacagtcatgtcat

SEQ ID NO: 1994 - DNA, 1033 bp, Homo sapiens
ttttagagtgctatttggttgacagaaaaaatgagcagaaaatacaaagaagtcccatgtaaaccctgcttcctccccaaagccctcctactagaacttctcacaccagagtggtacatttgttaaaatagatgaacccacatcaacacatcatcaccacccaaagttcataattccattaaggttcactcttggtgttgtacatttatgagttttgacaagctacaggcatactgcagatattgtgtgttcagttccagaccactgcaataaagcaaatgtctcaataaagtgagtcacatgaatttttttgtttctcagtccatataaaagttgtgcattatgtctaaaaaatcacatacctgaatttaaaatttttttattgctaaaaactgctaatgatcatctgagccttcagagagttgtaatctttttgttgaagagtcttgcctcaatactgatgactgctagctgctcagggtgctggttgctgaacatggggatggctgtggcaatttcttaaaagaagacgacaatgaagttgccccattgatcaacttttcctttcatgaaagatttctctttagtatgcagtactgtttgatagcattgtacccacagaatttctttccaaactggagtcaatcccttcaaattcttccactgctatatcaactaagtttatgtaataaacttctatctcaagatggaataaacttccatctcaagaagccgctttctttgcttatccataagaagcaactcctcacccattcaagttttgagatcacagaaattcagtcacatcttcaggctccactcctaattcctattctcttgctatttctaacacatctgcattacatccttcactgaagtcttaaacctttcaaagtcatcaatgaaagttggaatcagcttcttccagatacctgttaatgttgatattatggatgtcatgttaggagggatgaaaacaacattaatctacttgtgtatctctatcagagctcttggggtaactaagtgcatt

SEQ ID NO: 1995 - DNA, 1066 bp, Homo sapiens
tctagtatatataaatgcttcctcgtagaaaatgagcaagaggcttgaacagatattttaacgaagagttcactgaggaacagacacaaattagtacatcctgtctgattccgtttatatcaagttccaaaaccgttaaaactaatctatggtgttagttattaggatggtggttacttttggggaggaggcatgaatagtgattgggagaaatataaaggtggattctggagtgccagtggtgttctgtttgttgacttgggtaggaattacacaggtgtgttcactttgtgataattcattgagcatatgtgtgttatacttaaagaaaattttaaaaagacaaagaaaaacaagctaaattgtactgtcacataagtggtctatactattacaaagtacacagtagggaggattaagaactatatagccaactctgttttatgctaccaaaagggccactaggatgaggactaacgaaaatcattaggccaggtgtgatggctcacacctataatcccagcactttgggaggctgaagctggagggtcacttatgtctaggagtatgagaccagcctagacaacatagtgagacccttatctctacaaaataaaaaaattagccaggcatggtggcacacatctgtagtctcagctactctgaaggctaaagtgggaggatctcttgagcctgggaggttgaggctaccgtgagctgagatcacaccactgcactctagcttaggcgacagagtgagaccttgtctcaaaaacaaaacaaaacaaaaaccacacattagattaagtgacattagggttcttggtaagtttaggaactgtagttttaatggtatgtggcagcagaagccctactgaaatgagttgagaagatagtgtgataaggaaatcaaaacagcaaatggagacaattcttcttaaacgtttgcctgtggaaaaactgaaagcgtttcctcttagatctggaacacaacaaggttgtgcacttttaccactcttatttgttatagtactggaagtcctagctagagcagtcagacaagaga

SEQ ID NO: 1996 - DNA, 1055 bp, Homo sapiens
ttagttctagagtgttgtatggtggttttcttcctcactgtattttatttaagtttaactgatgactgtatcctctaggcacagaaggaagtattccagaagcatattgagtattagcaagagtctttgtgggattaaaatctatatttagaataaaaatccaagggatatgatacaattggtagctgtttcatgatacacttatttcaccttggatagaagtaaaaactcaggaatattttttatttaaaggagaaatatgctggttgtgggaagaacaaaaactagttgagagagtctttgacctatgaaggatattaactaggaagagttaccgttatactgtatgcaaactggtcatgataaaattacatctcagatccaaagaaactcacagctagaataatgtatttagaaccaaacaaagtactattactatttcttgatatgtcggaatatatcaatatattcaatatttagtctcttatctggcttctatggattataacttttgtgtttaaatttacttatgataatcttgggcattctgtcattaaaaagcttatgagtttggagcgaggtgtcactgaaattttgaattgtatggatatatttctacttttcagttgctcaaggttcagaatatacattaagacttttttaaatgacttaatactgatttacgtacattttaggtagaataaacacccatttaaagtggaaaagttcagtaagctttgaccgattttgcacccatcgaaaccaccactatgatcaagatacagaatgttaccgttacccccaagagtttcctcctgtctcttagcattaagtttaatagtgattcctaagtctacaactctgttatactgttaagctgccccagagtaagtcccattgatgtttaaaatgcttaattttaaagtaaaagtaaatcagcatattcctcctattttggcatttgcagcccttgaaatatccaataattatatagcattcaaaatatatgatgttatcacattcaaactgaacaaccaacattgagctttactaga

SEQ ID NO: 1997 - DNA, 1086 bp, Homo sapiens
aggagaagggggagtcaggagacccagggagaggccctttgggtctgagttaaagcaatgagtcacttcttactacttaacaatgcaaaaagcactttgcggccgggcactgtggttcaagcctgtaatctcagcaccttgggaggccgagatgggtagattacccgaggtcaggagtctgagaccagcttggccaacatggtgaaatcctatctctataaaaatacaaaaaattagctgggtgtggtggcagacacctgtagtcccagcttctcaggaggctgaggcgcgagaattgcttgaacctaggaggcggaggctatagagagcaaagatcatgccactgcattccagcctgggtgacagatcaagactctgtctcaaaaaaaaaaaaaaaaaaaaaagcactttgcctgtgttacttcctctaatcctcacagtatcgtagtgtgggggagagctggcttttattttacccagattactgaagaggaaaatgtggttcagtccggttatgcaacttgcctaagatcacataactaactggcagaagcatgacttgaatgtagattctgaagtctaattctgaagtctattctcattccagggcactgggctacccagcaatggaaagctcaagctaaaactgccttgggttataatatagagaaagactgaataatgctggaaaaaatatttttattattgactaatgacatagaaaaatgctcatgatatgatactgagtgatggagaaaagattgactaccagactgcataagcattgtggtgctaatcttaaaaagtgtattctgtgctcgtctgtcctgtggacagtggtcaggcttcagccccatccctgagaatggccccctctgaaaatcttccttcttttcaactatactttgcaaccatggtgcattcttttgggttattcaatcacagggatgaaaattttagtgactgtctcgtaccatgaatcatagcaattttagtcataagataactctcacgttctactataaatagggctgggctttcattactagatacacagtaacaattaacaataaacagtagtttttc

SEQ ID NO: 1998 - DNA, 1115 bp, Homo sapiens
taaaattgtcactttaatatgaatacttttttttaagttaattttcaatgaaagataattcaaatagcttgaaactaccccagcctgagtgaagttccttggagaggaaaatgaatgtattgcattaccctgtaaattgtttctttaaatgtgtcttaaatttcctattgaatcctttttagtgagagaataaagattgtgataaattttagtaacgtggaattaatctggaatcttttttggtttaatgtcttgagcttttgatttaggaaaacttttaactacataatagaaataaaacactggaatttaaaatgtgttacatttacctattctatggaaagaaaaaagtttgaatataaatttacatagtcactttactaagtagctagttagggatatgggaaggatctatatatacatacagttatatggatatagcagtgttcatatgacttagcttgaggaagcttggccgtttatttcattacagagaaacttttggtactggcttttgaataatacattgctttggagtgtgaaagacttgaatctctcatcttgaatttaattgatagttttctgttatttcacttacatgaccttttttttcagaacagattttctttagtttgatttccttttgttgttcttgcagaagtgttttctgaaaaccttattaaatagcatcccccatcatactctgtgcctttgccttgctttatttatttatttttacatcattggtttatctgacattaaaacgtacattagtttattatctgcctccctctctgattgtaagcttcatgaggacaagggcttattttgtacactgttctcttcctagcacctagaaaagtatctgacacgtagtgatgctcagatatttgtggggtattgttattaagtgatcaaaggacccctggttttgttccttttttaaaaaaagattaatatttgatttatacagctgtgcagttaaaaagaaaattgtactacaagggttatacaggttgagcatcccaaatctgaaaatctgaaatccaaaatgctccaaaatattaaactttttgagtgccagcatgactctcaaagaaaatgttcattggagc

SEQ ID NO: 1999 - DNA, 1265 bp, Homo sapiens
gttaaaaaatctgaaatacaaagtgttggcaagaatgtagagcatttggaacccttatacatttcaagtgggtttgaaaattggtacagccactttggaaaattctttggcagcatttgcctaaaactgtatctgtatatgctctgtgatccaccagtttcatgtctggggatagacctgatagaaatcagtatatgtgtgcatcagaggacatgtacattagaagaaaacataggggtaaatctttatgaccttggaataggtaaaggattcttacgtatgacacaaagtgacaccaaaagcaggagcaacaaaacaagcaagaggtaaattgaacttaaaaattaaattttttgtgcttcaaaggatgccatcaagaatgtgaaaagacaatacacagaattggagaaaatatttgcaagtcatatctaacaagaaacttgtagtcagaatgtataaacactcctataactcaataataaaaagacaactcaatttaaaaacaggcaaaggagctgaatagaaatttctcaaagataaacaagtggccaataagcacatgaaaacatgctcgacattattagctatcaggaaaatgaaatcaaaaccgcagtgagataccgcttcacaccactaggatgacttgaatgaaaaagttagataataagtgtaggcaaggatgttaagaaattgggatcctcatacacttgtgggaatgtaaatggatgtggcttctttggaagaccatgtggcacttcttcaaataatttaacgtagcattaccatacgacccagcagttcctctcctagaacagcagatagaggtagaaaacagataagtggcttaggccagtagcaggggtaagggggtggtagctaaagggtatggatttctttctgagatgatgaaaatgttctaaaattgaccgtgttgatggttgtacctctgtgaatatgctataaaccattgacttgtacattttaaatgggtgaattgtatggtatgtgaattatatctcagtaaagctgttaaagataggaaaaataatcagtgatgtgacagtgttgccataatatttgagaagagcaagatgcagagggatataccaagtatttgtatgaagcaaacaactccgaaacctttatgtctgtatgtgtttcgatgattctgtaaggtggaaaatgttgcacactaaatgtaaatgtttgttttcttgttggtctaaaatagggagagggagagaaaaaagggaaaaaataactaa

SEQ ID NO: 2000 - DNA, 1032 bp, Homo sapiens
tctcttaaagcatttactaccatccagtacaggacctttagttgccatatctcttgagtttcctttaaattgtaatagttcttcagcctttctcataacattggcattttttgaagaatatatttatcgaatgtttctcagattagacttgtccatgtccttgagattagatttcagttatgggttcccagctcaacttcttgtcagtaatgttgtgtccttcccggagtatcatcacatccagaggcacatgatgtctctcttttccccattggtgataataattttgatgtactcagttaagggattgtccagttcttcacacaatatagttacttatttttttttcttgtaactagtaagcagtctgtgaggaaaaactgtttttgtttttttacttttttctaattaatgtctttgtaggaaatttaaaaatatacaggtaagctaaagttagggaaaaattgtcataaacctagcgataaccacattttagtgtatgttggttcatctctcttctttatgttataataatgattaccaaaaaggactataccttaaatactgtttggtaaattgcttcattcatttagcagtatattataaatatttttttcatgtgtcattaagtattacagtattttaatggctgcatagttttccattgtgtagcagtcacttgcctatagattgttctgtgatgttcagtttagcctcacattccaggtacaagagatccttagtggctgtcccctaggggttagggaatctcttaaacccaggagcctccaagcatggaatcttgatgtctgtcttatcccatcagcactgccatgttgtttttctgttctgctgttccacactaatatgctatgttcctttctctgaccattcctaggtccacagtagcacacttttgtcaaatatttaaacctatttctgattcacttgggttgttttcatgctttaactgctaatattgtatccagatgttggttttcttgtttgtcttattgcaaatataggctataa

SEQ ID NO: 2001 - DNA, 1041 bp, Homo sapiens
tagtgttcctatcattttaacatcctgagtatgatagtatctctgttttactgatgaggaaacagtgacaattgtctttggtacacaactaagtggtggaactgggtttcagactctaaaatctgattttttttaacctctcatctagtatatcaatgtgattttgtattccaaaacaaagtcattgataatcctgaaattcaatactacaaaatagatacaattttagttctttcgggaacaaaatatagtgtattcattgtgctatatacaagtctgtagtggccctgaacactgtaatgactatgagtttccatttatgtcctacatgatgtaggtagtattagtcctgtgattttcaagtaagttacttcctgtcttagtatctcaaattcgatacctataaatgaaggggtgggccgaaatgatcgtcagttcccatcatttccacaattctgtgttttcctaacttttcccccatacctcagagggctctctaagtagaaccattggattagcaatagaagaagaacaatgtattctataaataaagcacaagaagaaaatggcttttgtatttaaatggcaaaaagaaaaaaccagaaatacttatttcttctcctccctgaaaaaaaaaatcaaaaaaatgaaattctttatgcaaattacgtttttgacctaaaattcacctgtcttcttcttaggtgtattttttccttttgaatgaactgcaacagttgtattgctgctttatatgagatcagtgctgtctagcagaaatatagtataagccatttatataactttgttttctggtagccacattataaggtaaaaagaaagatgaaattgattttaatgattttatgtaacctgctacatacaaaatattatcgtttcaacttgtaatcagtgtaaaaaattattgagatatcttacattcttttttctccgctaagccttcaaatccaacatatacaacaattgcagtacatctttatttggagtagctatatttcaagtgcttagtagccattggtg

SEQ ID NO: 2002 - DNA, 1007 bp, Homo sapiens
ttacgctcaggcaatgagtccttcagtgtctctgctttatgcaatgagagtctcttattggaacccccaccatagattaggccctgggcaatgtgtcccatgaagcttggaaagctaaccagattttcaaatgtcctccaagggattgccagctttggtgttcagcttacatctctggattctccttagttttagggccctaagtattccttactttattgctagctttacagtgaattttcataagatgtgtttcatatcttacccaatatttttaattattttcactggaagagtaggtcaaggtgtctaatttaccagacttctggtatgtagtccttactaaattttgaatccattccccctcttcaactccactgacactaatgtatcagatccttctcatcatctctcactgtagtctctgaactgattcccttcctgtatgccaccttctgctccctgatctttccaaaatgtagtacacatccataatatcttacccaaagcatttggggccagatatatttaggaatacacttttttccccagattttagaaaggtggtatagttcatataccatctgtggtatgctcatcacaatcacctccacctcctgcttatgtaataccttgaaatcaaacacacttaatatttttggagcaaaacatgtaattattcaccttaagtgagatcaatgaagtctgtcattagcctcacatcaggttagattttcccacctagtgaacctgagaccacactaccaaataaacaaaactttgacttttcaggtttgagatctcagaattgcagataaagggttgtgaaccgatgcctggcattcagttatatcattctcaaatttaaaaattctccaaatcctccactggagttcttactgcttatgagagcaaatctagcctttaaagaggcttcacatgtaaaaatggccctttctggtttcatcttctggtactctgatacttctcatattcagcttccagac

SEQ ID NO: 2003 - DNA, 1022 bp, Homo sapiens
cgtaatgtttaatattcaactgatggaaggtatgaatacaaaaaaattgcatttaatcgtaaagattatgcttttggaaagtttgaggcatatctgaatcataggtttcaaaaaaattttactgatttcaatttccattattttttagtgagtaaatcttaagttttttccttaggaataatggaaaactagatgattaacatggaattatttgctgttgctgcacatgctgatattatgttaatcatatttggttctattacttatatgagatcagagtatgaattttgacctctgcaaatttgtgtattttcatatttgagtaacatgatattgtactcaatcttttcaggtagttttcatttatagtttatataagtaaaattttatattcaattaaatttatttatattcaatactattctttaatgttaaagagcaactattttgtttagaatcgattacattttgtacaaaggatcaatgtgtttttaaggttctgggctaaaatcatgactgactttttaaaactttattactaaaatataactttttaattaacaaagtgctgcttttgctttttatagtatctgaagagacagatgtttcccatgaaaaccagtgtagatttctatattggaaaaacattagtatggaaaagcttgtgatcctttttatgtttctcttttctattttatagaaaaaccttggtgtgaagggttttctttaaaaattctttttaataattatggccttattgtcttttcttaaaatttgaatttcatggaggaatggaaatgattataaatatacagttatgaattatatctttaaagttttagggaaaagaattatacgctgtgaaaaaaaaattctatttttattttttgcatccaggctggagtgtagcacgatcatagcttactgcagcccccaactcctgggctcagaggatcctccagcctcagcctcccaagtaactggactacaggcacatgccaccatgcccaactaatttttta

SEQ ID NO: 2004 - DNA, 1042 bp, Homo sapiens
gtaccaaagtttttgaatgattgacttaggggaaaataaagagcaggtttatcattatccctatgtcacataactatattttgcatatccagatacttccttaagtggtaaagagttagatatacaggcagcaagcaaacatttgcacctaatcttgagattactaatcaagtatcttgaaagtggagtaagagaaaattgtaaaaccgctgttttagaccatggaatatccatctaaaacattaaagcaaaggaccccttgacgttgtattttaaagagggagcgatactgttgagacatttttctaatagagattttctgaagatagtctgcatctttgagcctctgaacaatagatcccaactgtactacttataatactagaaagagtagtggattaggtgtcagaatattcttatctccagaaccagactataagatcctgaaaaacaaggacatacatctttgtgagtgagtgggtaacagagagtattatattctgctgcttgctaaccttgtgatctcagtctcttcatctctaaattaatactcatacttttttgttaatctcataggaaaattaggtgagacttacataggtggaaatgttttgcatgctgtaaaacaacaccaatattttaatatgaaataaagtgaaatctaatgtagtaatgaaatagaaacttcatgtctaaataaaaaaaaaaattttccagtctttggaatgatttgaaaaactatttcctgaaccttttagtgaacaccattgtgggtgactgactttgcttttttttttttcaactccccttgattatttacattgatctcaaaggcacttactgcaaatctgcctctcaagtgtcttacaacagtatcttttagttatgttgtatgtgatatagcactgatcaaagagaagaaaatatcagaaatccaaaaatgtaaggaattaaaggattttacagttattaggactagccatgactagatttatcaagaaaaagtgttaatcgcaaaatttggtgtttatttcttaacatt

SEQ ID NO: 2005 - DNA, 1060 bp, Homo sapiens
tcttaaggggcttgttgaagaatttggcatggtaagttttattttgctgacgagagcaaactagaatattgtgaaaaaaataatttagttatatgaaacatcataaatattctttaatgtgctttttctaagcctcatttctactttatgtactacaaagatgcagtagctcgaccaagaaagcatattttggctaggtgcggtggttcatgcctgtcatcctagcactttgggaggctgaggcaggtggatcacctgaggtcaggagttcgagaccagcctggccaacatggcaaaaccacgtctctactaaaaaatacaaaaaattagctgggtgtggtggcacacgcctgtattcccactccagcttgggtgacagagcaagactccatctcaaaaaaaaaaaaaaaaccatattttttgaactgtggaaatcagtaaattgttgcagtactctgtactgcttcctattaagtagaagcagaatgtaacagaaaagtttttgtaaaatctctagccctctgtagaatgtgagtatactcttttggtggatctagatatgactcctttttcctgttggagagagacttcttccccttccccatttaatttttaatttaatatgtcaggttttcatgatagtacttttttgttagaagagaaatacttttcttataaccctctgtaatatagtgttccttgcctactgctctctgaaaagcaccctgtttatgatattttcattaatctgtctcctcctcaacagaatgtaagcccctatttgtcttggtttaagggtttatccttacagcatctagaacaaaagtagtcatataataaatgtttcttggttcaactaattatccctttctagctcttcccattgtttcagtgattttgatttaatttctgtttaaacaataaatgtatttgtgtggcatatttgcatgggtcaactccttacccacccctgattttttttgttgttgttattttgttttgtttttggtgcctcagctggcacctagtatttacttagcactgtgcttggtgctaaata

SEQ ID NO: 2006 - DNA, 1068 bp, Homo sapiens
atactcattgcaaatggggtcagtcaaataagttttagaaatgcaaaatattatgtttcccttttggaaattctcaatgtacattcacatattaaagactgaaaagccctgaaataaaccagatgcccaaactcatagaatcttaaatttcccccaacaacacttactaacagcccatgagaatacatttcaggaatgttagcataaatgagtatctaaagagttgtatcaatctgtatgactaatagtaattttctcatttaacctacagttacctggtgatagttgatagatgttctagagatagaacgattaactaaggtcatgtatcacagaagatggtaaaccctagatagacataaatccttgtctaatcccagagtccctgctctgaactgctgtgttgcatgcatttgccctcatgttatttcataattttaggtattctccatttttaatccactaataatttcttcaaattttacaagtgacaacacattttgtgaaattacttttagggtgtctgactcttgaacttgagatttccacatttttggatcaggtgaatatcatccttctccagtgtttcgagccttttttataaacatgcaaaatatattaatggatttagaaaaaagaattaccctaaagatctcttagaacaaaaaatgtataaaaattctgattgtcaaattttatattttactagaaatatgtgagagtttagtcaagtaaagttcttaacaagaatttctgtactataaggataataggattgttgaaattttgagaaatgtgttatctatactttgccagatatgtacagtattccttttgggtcttactgggatagaattaatctcattaggtagttacacaactataacaatagaagggattcttagagactatgatctcttccttgtagattgttccgtgaggacagagactttttttttttttttttacttcatatcatcagtgtttaaacccttaggaaactgtctataattttttgttgattaaatttctcattttaaatacaaggaaattgaaaagtacacgcaa

SEQ ID NO: 2007 - DNA, 1053 bp, Homo sapiens
tatttaggggaaaatgagtgaatttgttttattggaacagatggtttttgtgaaggaaactagtggaaggtccgctaggaaagtaggcttcattctttaggaggacattattcttagccagactaagcaaattggactttttctgtttgcagaagcagatatgtgagtagtttaagaagatgaatctgctggcaatgtaaatatattttgatggagagagaaaacagagttacaccagttggcaagctattacacagttcatagtaagaactaacatttgagtgccaggcactgttctaagcactcttcaattgttaaatcttatgcagtaaatactgttattcccatttcacaggtaaggaaactgaggcacagataattttctttcccctaagatcacacagctggtagcctatggagtctctgtcttctagctgctgctgtggatcatttgaatctaaacaagagttctggctctgaatagaaatgagggacatgcacacaagagaccaaaaaggggacatgagtagaattcagtggactgtgtatggggcagctggggaagtatcaaagatgagccaagcttatttggaaatggatgacaacattaatcaaaacagagatgttgagatcaaatggtgaaaagacagttaactgtcttccagaagcattcagaccagcaaggagacagacataaataaataacttcagtgtaatatcatatagaaaacatgtttaagaaatagtcagtgatttggggaaaaagccacctaggtgtgtttgtttgaatctaggaagtcataacatcagaggtattatttgagttaagccttgagatctgctaaattgacgacagataagctgaaagaaggtgtttcagtaaagaaagcagtagcatgtgaggtaatggtgaaatatccaaatgcaaacgtctagctttggttaaatcaggagggagagctacattcaggaatcatctgagcagtggtgatacttgaagccaaaatactctaaagtagaatatcttgaagaaagactttaaggcatagaagg

SEQ ID NO: 2008 - DNA, 1822 bp, Homo sapiens
tgactgatagccaaagcacacatgggtattttttttagctttttatgttttcataccttgctttctgacatatatagaaaatttagaaacagtcatctattttatttttaaaaatagacttttactatgtaggagttacctataccaaaaaccaataaaacatttattatatctccagattcgtggaatttagatatgggttattttaaaaactagggacaagaaataaaagccatcatcctcctgggcacatgcatatcatttttcctatatatttaatttaacttaccactgctaaagtccattcattttaatactagaatggaaactctgagatcataaaattattttacttaaataatatttactatgaaataaactaccaaaacaaggaaaatgcaggaagtaatataaaactctaaaacaaatagaattttatgagcaatattctgattgaacagcttgtattaataccagacacagatttttataaaacagctaaaagcgcatcatccaagactgctgttaggactttgcatcagtgttgtcattgaagaacaaaaaacaccaaaatgctaatctaaattaaaacaaaaacagcttccttgtgtgtattctgccttggctcattgtggttcctataagattaaatcataagataaatcactgtttaccataagagaaagtggtctaaattagcatttaaaggaggcaactaaaagtttagtttttaaataaatataatttttttttaataaatacaaaagtattggcttcactgtcacttaaagcagggcaaggagccacatttcttaagtagtagactagctacgtcaggagtaaagaactggttttaaaaatacatttactgttatgttttctgaaaacattctcttatttaatattttctcacatatgttcagttttgaagcaaaagatccataaatctatgttacctcataaaactttctgtatatgttaaaattttcctaggccccaagagaatgttataaattagttatagaatacttacgtttaaatttaagtctttacttagttgtttttagaagagaaaaaaaagtcttctatgcgttgggttaattttattagtagcttttctcttcatagttgctatattgccagctagtagagagaagaaacgaaagtcaggatttgcctcctttcagatggtaaactcacagaggcatttaactggctgtgtcatgcactgaaaacagcatgaggcaatgaagttaaatttatgaagcattcaggatatgttagataaagaatttctagattgtgaaatatgttctgggaagagacttgagaacaatctaatcccctggatatatttaagaaaaggataaatagttatctgtgtaatttggggttcagattaaatgcctgccttaagacagcgtcagtaagaactgaggcttaatgaagtcctgcacttcccatagcatgcaacaacaaaaaagagagatgacagtatttcagatccactgttgcttggaaattttgttagaatttcttgtaaaatatgtgtttaacagaaatcctgccagcatttacagttttaaatctttaaggaaaggacacaaaagcaaagttggaaaaaattttagctttaccattatttgcttgttcaagattcttaaccattaatatctttaatttttacaaggctaaaggagccccaaatctaacaaacttaagtgtctttggtttaaggcatactattggtaacgagtaattttatctttaatagtttttataatgcatgtaaaaaaagctcccagatagaatattgaaggaa

SEQ ID NO: 2009 - DNA, 1050 bp, Homo sapiens
aagagcttatttctcttgaagcttcactcttttcttttagcttcatttgttactttttttaaaaagtttatttagctttattatcccatttgttcgcaagctttcaaattgaattttgcactttcacaaatattttttccaataaaaggtcgtgtttcaaaaatttatcgaagtgaaagactagattatttttcagtgttaatgcattacatagaaatattttttatcttcctttggtaatgattattaacttcctttttccagattttgacagtttttaaaaaattttgtagaacagaattagtcccagtaaatggctatagaaattctggaaaacatctaggaataatttttctaaatgcatctaaaattttactgatgtttgaaaatgcctttattgccatcttctctctcacaccataatagcaacactgtatttctgtaccaattttcagtctacaaaaagtttctacatggttacttacttgaaaatgtatgaagtcaatgaagaagctttttaagactggagttgtttcacaaatctgttgccctaggttgtttttcaagtttgatggtctgtgtcttatacttaccactatttttcccttctctctaattactgacatagaactcctacctaataaatacttaagttttgtccagtgagatgtagaacagatatcttaaaattcaaaatgtgagtaagtagctattagtcatttatctggctcaagaaacttactgaatttaaaagaatttaaagtttattagattgaaatgtaatctaagaaaattttgcacagtttatagaggatggcaaattttttgtgactactgtaaaattataatacaatatttattaaagctagtttttactttgctaaaagggtagacttagccagtgaagccatgaggtagttctgacattctgtaaattgacatatcatataatgccttcatttttgtaggaaagctaatgctattatactggtttttgttttcatgaggagctagaaccagagcagcccttccattacattgacatatatt

SEQ ID NO: 2010 - DNA, 1081 bp, Homo sapiens
gaattatctggttgcagggagctgagatcacaccactgcaccacagcctgggcaacagagtgagactgtctcaaaaaaaaaaaaaagaactctctgatagcactgctgatttattacatcatcagatttaagacagcatagctactaaaatgcaaatgtccttcctataaggagtagtacagtaattcagaaaaaaaacaacagattaatatatcatattcacaaacatgctctctgggaatagggaatagatcagttaggttttgatgcagagttgaagctgggaaggtctggaaagtaggagattatctgaagaaggcatgcctaggatgaaattcagcagtaaaaggccccaggctggctgagaccagcatgaagtcacaaatctcatctttcattaggagaaactgaaaatacactccctaacactgaagttttgctagaataaaccataaattttctgtttccgctaattatctttttttctctcagttcaaatcaacatccaataagaacgtatctgtgataggatggatggtgatgatggctgatgaccctgaacatcctgatctcttcctgctgactgactctgagaaaggtgaattgttagaataactggggcttacgatactgcgtatgtgtttgtgtatatgtatgtatgtatgtgtgtgtgtatacttgtcatatatataatgttttatgcatacatgaagaacttgatgagccaaaacctagtttcactggaatactcaagagagaaagtatttgtgtagttttatctattgggaaatacttctgtcccattatgtattttaataatatttgtggagcttattttctttgctccatgggcatatatgcttgaaaattaaaagcccagctaatccctagagacctaactaggaaaggagggagggaatttgagaatatataccccattgttacttcaaatttttagagacttgccatataggccatactgcttccttcatcaataccttgaaatggattgttattcttaagttctgaaagtggcagagttttcctttaaatatttattctatcacttttaattaaatta

SEQ ID NO: 2011 - DNA, 1048 bp, Homo sapiens
ctgctctgtctatggagtagccattctttattcctctactttcttagtaaacttgctttcactttactctgtggactggccctgcattctttattgcacaagatccaagggccctctcttggggtctggatcaggacccctttcctgtaacagttccatctggggcagatcacctaacctcccctgaagttccatgctgacttctgcaaaattggaacattaacagtgttttgactgcttgcaacagtgtagttactcgcaaaaggattatttgaaaacatccataattccctttccccctccctaacaataacaaaatattttgaaactacaaaaagaaaaaatggttttgtatttgaatgtgttaaatagggccatttcctctccagttcactacagtccccaccactcactatagccttctttttttttttttttttcactcttgttgaccaggctggagtgcaatggcacgatcgcagctcactgcaacctccacctcccgggttcaagtgattcttctgcctcagcatcctgagtagctgagattacaggcatgcagcaccacacctggctaatttttgtatttttagtagagacgaggtttcaccatgttggtcaggctggtctcgaactcctgagctcagatgatccacccgcctcagcctcccgaagtgctgggatgacaggcatgggccaccgcacccggcccctatagtcttttgactgatgtttctttaccaactcaggtgttgtcatgtgatgcctagaactgggcatcccatcttatgaccaagataaaggctggcccttgagcaaagctggtcctcagagaacagaagggaaagatggaaagaacctagccccataatgattttcttgtgctactgaactaaccctacaagagccttacttctggacttttaagaaagaaaaaagaaaaatgggagaaagatagggaagaagaaaaaaggagagaaaggagaaaaaagagaggagagggagggaggaaagaaggagggaaaaagaggaagaagaaagggggaaa

SEQ ID NO: 2012 - DNA, 1041 bp, Homo sapiens
attggcttagttatgttctacctgctcttctccaagttttagggtatgaactttgtaaccacttatttttgttgcccagggacgtttttgtttgtttgtttcttatcgttggtgtagatagtgaacgtgtgctctgtataggtgcatttatgttcctgtagttttctgtaaaaaaaaaaacaaaataatatggaagtacttactcgtgtgggttcttgtttcagaaagcactgccaataatacttgaagatctgatttcagccctgtcttgtatcatccttgggcagtgtgttagacaacctcctttcttccttttagcatttccaaattgtctttactcttaatcccagccgatactaggaaccaggttggcaatagcagtggccttgaaaggtggaagcaggatatacagaaggtggcaactttaaattgagtgtatataattggtatacatattcgctatttctgcatcttttatatactgtatacttgaattcattgtaggacttatttccccctgtctctgaaagaggcagtctttaaaccagagagttgccagtttagaagaaattcttataaccctaaaggtctttctcctttgcccttctctccttttattccacaaacacttatcagatgcctcttacaggccctgcacagtgctaagttacttggaagtacaaagcgtgagtaaaatctatcccatcctcaaaaaacacaatatattagaagagacagatgtgccaaaaaaaaaaaaaaatgtgtgtgtgtgtgtttgtgtgtgtgtgagttcatagtataacagagggatcatgcctggagccacctagccataatttcagcacagatctgtttgaggttctcctgcttctgagagtgatctcctgtgtgggctgtcagcttgacgtaccatagaacataaggctaaaaatgcgaggtctattgttgtataaagtttatgtggttttccaagaactgtagtgaattgaacactaaagatggaaagcatatgaaaagctgaaggaaaatgttataatattt

SEQ ID NO: 2013 - DNA, 1025 bp, Homo sapiens
gcggaggttgtagtgagccgagatcacgccattgcactccagcctgggcaacaggagcgaaactccgtctcaaaaaaaaagagatcctcatcacacctaccacttgtacactggagaattgaaggggagttgggacagcaggaagtgtgttagaagacagatattcccaagagcgtgcagtgttagaccaggtgctttgcaggataggcctgaaatgttcagacaagatataagtggtgggaggagaggccagactgatgagtaggggaggtagtaacagataatgcataaccttagtcacttcttgcttcatcttatatctcttactaccactgcagccttctcattacctccctcctccagaccatcctggaaaccacttccgttcttccccgttcttccccagaagacttattatcactatgttccccagctttaaaacatccagggacttcccattgcccaccagacaaaacccagcctccacagcctaaggtcaagcccctgactgtctggtcctcctctctatactcagccttatcttccttttgctctttgtttctgtcaaactctggccccctgctcccgcatcatctcctaaacagcctgtgtccactcccagcaacagggcactctcttctccaactcagcaaggttttttttggcccctgccataggtgctaactctcttagtcactgcacatactgacctgtgctgctttatatcaggaaatatcacaggctggggaaagtggttgtaagtttaagtgcttgcagaaattgactccagtccctaaacacccagcaaaatgctgttctgacccccagggcttcagaggctatttatttagtcctggtgtaagtgcaaattaatgtccttggtcatactctgatgtccttcagcagaaggataggaatgatttattggcagttactgtatgaattttgctgctctgtcagtgacttaagatggatcactctctggtaagagaagaatctaagtcctttctctgaaagccacttgt

SEQ ID NO: 2014 - DNA, 1034 bp, Homo sapiens
caaaagttttaattacacatttttcttcatttcttcaggtcagtctaataaacattttagtagacatttattaagcaccaactatgtgcttaacactgtgctggcaatacaaagacagtccttgccttccagaaaactaccttttatctgtactaaaactacatcaaaagccctttagtggggcaaaaatgacagcttccatgttttattcttagaatgattggtgacgtagatagagaattctagtttccttctctacctcatcttcattccatctaccggcaattcatgctaatccacagttgtttgcagggttgacagagaaggtgactatagcagaatcaggcttgctaatgggtgtattctaccacttgtgctgtcacctgttactggtgtaatccacgtatacatctgtgcttcccattcactttgcaggtatagccgagaccatgtggtggaaggggaaccgtatgctggttatgatagacacaatgcagaggtagcagcctttcacttggacaggtgcgtatgatcacagcagcttatgttcattttgtttgctttcaaaaatctttcttggagaggactcgtggactccttcagaaggatgcaacactaataaataacttgttatcgattttagatagctaattgactagttccattaaacttgtatgagtctcataatttggttggcaccaggaatactgaagtattttacttccatgcttctttaggtcatttcatttctggcctgctctgttattatcatcagtgaagatattcttggtaaataaactttgaacttaaatctctgaattgaactggtcgttaattgggtctagccatcctgttgttttgttatgtatttgttttaagtaagtaatgctgacttatttccatgtgctggaaacatatagcatgaaatatgagttttattattctttatacaaactatgcacagcttcaaaaaccagaataattacaaaaggaaagggccaggcgtagtggctcatgcctgtaatcccaacact

SEQ ID NO: 2015 - DNA, 1054 bp, Homo sapiens
gatgtctttggtattttctgtagtagaaactaaagcaaagaccacaagtttcagagcatggagacattcctgctgaatcgccttctcacctcctcggcaattgctcattctagggttgggcatcatagttggtcagtcttaattcccatgccaaaggacaaacaggtgtgacatttggatagatgaatactgggattggctctggagcatgtgttttgagttgaaccttgcagtcctttctctacgcccgtggattttgtggaaacactttgcaatctctttgtcttttttttttttaccagaactagttacattggaatgcttactgtcctacagagtggcagcaaataaaaccttgcattccatcaagccaaaatagcacactctgttagaggagatacatgtttaagatagaattggagggaaggacaaaaacagaaaaatgtttgggcttttaagccattgggtagtattgttttgatgatcttagaggagggaagaagagagagagacccaatggtagaaccagaatcagggagatgactgaactactgaaaaacaggttcccttgtatttaggatcttaaggtgtataaaaagcaaacatgactttgcacctaagtaaattctgcattctcatagttgtgtcccaattaaccaaaaagttgtctctagagaaaatactattacaatctaagcatgattctctgtggagactaattttttccccttttgccaaaagcagtccttcccaaattaacaaagcaaactgaaataataccttgaataacaggttgcctgtggtctctgtcatcctcgtttctcttctgaaatgaatttccacctctgcctttaaggcatttttgtcactgaagctgctgttcccaagagatcggcaacctttttgtccctttctcataagaaagggacactcctacaggtgagagtgtataccttactctctcagataagtggctggacttatcttgtgatttggggccatggaagattggaaacaaagattttaagccttcttctttttttcttttttcttt

SEQ ID NO: 2016 - DNA, 1054 bp, Homo sapiens
aaagcgtgtattgaatttaagaagacagactagcacaaaacacagaattcgtgttaaccaaaggaggcattgatttcagttttaaggctactcagtgttgtgtgtccagggaaattcacagctcagtatgagaataccttggttagtgctcacccacaagcttccaggagccagctgggaggagacaataggaagagatgtcatctctgctctccctgtaaatgttagttgaactaagttatggatttgtggtctttcaaatacatgacgcctttagtatgccacactgaaatgaataagaagtcttctgaaactgggaacttcataacattgaaggcagaagattctgctaaggaaaaaagcaggcaggaaagaaaatgtctcatcctttcttgaaagcatttgcagaaaatatatcatttcattttattcccatctgttttcaaactcgtgatcttaaaaggcattctgatgataaatttagaattttcatctataaaatttagaactctaatccataaagttagaattgagctaatagagtggtatgacatggcactaaaaatataaatttttgttgtaagtcaggattggagtaagctggaaaagtatgtttaggcaaatcttggagaaaaccaaccataaacttacagctctaaaattcagaaagccctaaaatttcaaacactgtttgaaagaagaggtgggggccgggtgccgtggctcatgcctgtcatcccagcatttgggaggctgaggcaggcagatcacctgaggccaggagttcgagaccagcctggctggctagcatggtgagaccgtctctactaaaaatgcaaaaattaacagggcacggtggcatgcgcctgtagtcccagctactcgggaggctgaggcaggagaatcacttgaatccaggaggcgaaggttgcagtgagctgagattgtgctgctgcactccagcctgggagacagagcgagactctgtcttaaaaaaaaaaaaaggaggtgaatttttttttaagttttgtaacactgtcctactttatttatt

SEQ ID NO: 2017 - DNA, 1050 bp, Homo sapiens
cagccgccggtaccggctgtgggcgggggcagcctccgcggagcagggagccccatcaccgcccttgccccacccgcgtcccctgcgcacccccctggcgcccggcttcccgtcccccgcctcccctgatccctgcgctttccagattctctcgcaccgcctgtgccatctcccagcccaccctggcgttattcgaaggtgttgctcttgacagctctagggaacgtccgctgtggacatgcctggtgactgccgtctcccttgctgcttttggacgcagggcttgaggaccgacagtgggccgagtcggggctgggagttagaatctgagttctgggtgtccctctgtccctgacaagttgtgtggcaaggttgccgcatcactgtagagcaccggatggtctcctctcggtctcacagctcctccttttccaggctggcgccttcctctgttgggccagcggtacctggacctcctgaccacgtggtactgcagcttcaaagactgctgccctagaggggattgcagaatctccaacaactttacaggttggaccccgcatggcttcaaggggctagggatctgtggggaggggaggcagtccaggggaaatggttagatgcaagggacctttcgtcatcctgcccagcctcccgacaagcaggaactgccacagtctgactgaagttttgagggagtaccaaatgcttgagtcagggaagcccctttttagcctctagcttaatagcccaggcaaactgagctgtttgtcaggcccagagcaccttgtttcactctaaacagaaacagctacctctcagagggggctggaactatccagagagaactgatcagaaattctgggttgtgattaaaagtgtccctttcttttcttttttttttttgagacggaggcttgctctgtcacccacactggagtgcagtggtgcgatctcagctcactgcaccctccgcctcctgggttcaagcaattttcctgcctcagcctcccgagtagctgggattacaggtgcctgccaccacgtccg

SEQ ID NO: 2018 - DNA, 1065 bp, Homo sapiens
aaaattagctgggtatggtggtgggcacctgtaatcccagccactcgggaggctgaggcaggagaatcgcttgaaccagggaggcggaggttgcagtgagctgagattgcgccactgcactccagcctggtgacagagcaagactccatctcaaaaaaaaaaaaaaaaagaaagtagtccttgaatcccttctgctacaaagtctgccctctggcttcttattctaaggccaaacaggaggagtaactgattccacccgagagagattcagagttgcttggtttcttggctgttggctgttgtggtggatgggcctgtgtgtgccttttgctgtgactacctctttcctgtccttaggcttagagtgggacctgaatgtgcggctgcatggccagcatttggtccagcagctggtcctaagaacagtgaggggctacttagagacgccccagccagaaaaggcccttgctctgtcgttccacggctggtctggcacaggcaagaacttcgtggcacggatgctggtggagaacctgtatcgggacgggctgatgagtgactgtgtcaggatgttcatcgccacgttccactttcctcaccccaaatatgtggacctgtacaaggtgaggccgaccagggctggggtgaggcctctgtgctgggagggagacccttctgccagcccttccttgcaaggaaatgggctctggagaagcctggggaggtggggacaggtggcagaacctgtgacagagccactccgtccactcctcacagaggcccttagcatgtggaagagactggcgttccaaacaccaccccctgctctgtccccaaacagccacactcgagaggctggacactgcgcttaagcagggacgctgcatgttgatttttgttgtagaagtagtgaaatgtcacagactgcagtgtagaacagagaaaagcaaaaactgtcagactctccacacggacacacccttgtcagctaaggagaggtagcattttatgtgctgcctttggtgcggaacctttccccaggctctttgtcattgtaactacgtt

SEQ ID NO: 2019 - DNA, 1049 bp, Homo sapiens
gctggagtgcaatggtgctatctctgctcaccgcaacctccgcctcccaggtccaagcgattctcttgcctcaccctcccaggtagctgggattataggcatgcgccaccacgcctggctaattttgtatttttagtagagacggggtttccccatgttggtcaggctggtctcgaactcctgacctccggtgatctgcctgcctcggcctcccaaagtactgggattacaggtgtgagccaccgtgcctggccacacattgtatgtttataggacgacactgatcaggaatgtaactggtggcctagaaagtaagtagataagcttcccttaggccaaagcctattaaatacaatattgtcaagaaaagagagcatggcattaagaggcatctgactgagcttcaggcctcagaaaaatccaacaagtcttcatgcttcattcctttgcctggaataatgtttctagcatttgttcaccataatttttctttattatttgagactcagttcaaatattgactcctgcaaaagcctcctacacccctcattctcccacagcgctcctctgtattgtccttttccctatttgtagttttctcctgagatcctgaagggagggtttgccctgcatgtattgggtcctcagtgggcttttacttaatgcatgagtatataaattgagtaaattagttaccaatttaacaagcctggttatttgtctcttttcttctgtgtagctttggcggtagattgactatagtaatagaagtgtacgattgttagggagaaccctgtggaagcagcctaggtagaaaggcacagctccccaggactgctgagtggggcctgattgcactccacatttccgtttttgctaaagatatcactataatagtatggtacaacaatggatctctcttacttgttccgaagattatgtagggtaaagtacatttttgttttatttttttgtagagaatgggggggtctcactttgttgctcaggctggtctcaaactcctggcttcaagtgaccctcctgtctca

SEQ ID NO: 2020 - DNA, 1056 bp, Homo sapiens
ttttatttgccaaattgggcaaccaacaaagaactctgtgaaaagttagatgtgtagatagaggagctcttattaagtaaggaaaagtgtgaagaagttcgtcaagcattgagcaaaccttttagtctgaagggaagaggagtgagggaagtgataacatgagtgtgttgaaattagtggtttgaactgactgaatctcttaaggtcgcctcgaggtctaacatgcttgttaaaaaaggttttcagtatgtattttttatctaatgccagtggggtcatacaaacttgtgtaactctgagttatgaccttttgaaatccttagaattgtgttgtaacaagacttaaaagatcttagaacagtccaagggagattcatatgattaagtcccaaccaacttacattaacaattaaattacctttgcttttgttgttgttgtttttaacagaaacaaggtctcactatgttgcccaggctggtctcaaactcctcagctcaagtaataatcctcctgccttggcctcccaaagtgctgggattacaggagggatccaccatccctggcctagctttgctttaacattatgttaagctatttcttttggttgcaaataacagaagcctactttggtttatttaggcataaaagaaaatatattcaaatgatattaatatatctcacagaatcttaggagaagatgaacattcaagctctgtaaagagtaaggattttagtaggaagagtttagatactttagatatttcaatataataaagttcccactcactttctttcaaagctcagaacctcagatttattataagacagagaattgaattttggccggaaggacaaggtcatatagtacagccctggcctggacattacatgcctgtccttggctctgagaatagttttcagagaaaaatgaatatgttaagaagggcaaagggaatgtctttactaattggtatttgtcaaacttttattaatgtacacaactttatagagggaatgttaggtctcatgtgaatattaaaaggatgaaaaaaatt

SEQ ID NO: 2021 - DNA, 1050 bp, Homo sapiens
tctgccgcttctcccttccttccttctctccatccatctgtcatggtgctagggctgtcagagtccactggctgcatgaaattaatatcagtagatacgagattgaaaagataagcaaattagaaagactataacctcaacattattttcaggttactgataccagacattattcagatttattagtgatcacatactgagttctaattaacaagtttcatgtgatagaagtcagaaggcagaagtggactgtttcttgtactatatttcttaatattccctcttacaaagggagtaacaataataagcagttactcgttattgtcatcactgctaggatctgtgaaaggaggagattcaggaaatgtaagcgtccacagagcagagttctttcttccttgtgccccagtggcagcaccttctatcaactttaattcctcagagaaagaggagaagggcattaggaaatgaacattaggcatgtaattataatgccatgtaaaggaatgtggtaggtttagttaccttttaacaataaaaggactaaatgataggatttgcttaaattacaatttttattgtacattgttttattgttcctcataggttagctcagactgagggggagaggttggaacaatgaatacctggagagtgacaactgtgtcaggtgctatcctgtgtgttttcagttccagaccgttatccatgtgtaatagtttctatcctgccgagcttcatttatagaatcaaattgaaagggaaaacacctgtacaacctggccaatcagacagcctcacatatctttttcttcatagtatcttttaactaggatattcctcttctaaaaaaaaaaaaacaaagtcttggctgggcacagtggctcacacctgtaatcccagcactttgggaggctgaggtgggcggatcacttgaggccaggagttcaagaccagtctggccaacatagtgagaccacatctctatttaaaaaggtaaaagtttcaggcggggcacggtggctcacgtctgtaatcccagcactttgg

SEQ ID NO: 2022 - DNA, 1035 bp, Homo sapiens
attagccagatgtggtggtacatgcctgtagttccagctacttgggaggctgaggcaggagaattgcttgaaccctggaggcagaggttgcagtgagccgagatcgcgccactgcactccagcctgggtgacagagcaggactctgtctcaaaaaagaaaaaaaaaaaccagactgggtaatgtcatttgttgaacccactttgaaggaagttactgttttaaaattaagataattaactccaaaagtatatcatctctggaatgggtaaactggaataataacttatattttacaaaataatcccagctaaataaaatgatgtgatataattagttgcttggtatgtgagctatttggaaagactgttaatattgttaatcttatttttaggtgtgctgattctcttccttactttttttgcctttttgcactgctggctcaatgcctttgctgagatgttacgctttggtgacaggatgttctataaggtagtatatacttagacttagctttctttttacattttattaacttcttcattattagtattttgacattgttggctaatgtcaccagcctttcacacaaacattgtgaaataattttcttttctacaagttttgccagtattttctgaaattcggttacagatataactagcataaccttgtgttttcttctgtctctaatatctgctcccttaacataagcacatggtttctgctggatcctgcaaggatatattggtgattccagtaggaaactgtttgttcagagcacaccatgagacttccctgagtgttcattcatttgaaatggaccgtctagttctgtaggaatgacctcagcaaattattccatttaagacaattgagcagttcatgagggaaataacttttccctctttagttttgaaaggtgttaattttgcttcagatagtatccttatgcttctaaagttggaattaagctatagaattagagtcagaatggctcatagcattctttaaccctacctaaagctctctttgag

SEQ ID NO: 2023 - DNA, 1802 bp, Homo sapiens
acatttttggattatgtccggccacgttcctggacttgtcgttacgtgttttagaagcttggactttgtttcctccttgtcactgaagattgggtagctccctgatttggagccagctgtttccagttgttactgaagttatctgtgttatttggaccactccaggctttacagatgactcactccattcctaggtcacttgaagccaaactgttggaagttcactggagtcttgtacacttaagcagagcagaactttttttgtggggctgggtggggggagaagaccgactaacagctgaagtaatgacagattgttgctgggtcatatcagctttatcccttggtaattatatctgttttgtttcttgactctgtccaatcagagaataaacatcatagtttcttggccactgaattagccaaaacacttaggaagaaatcacttaaatacctctggcttagaaattttttcatgcacactgttggaatgtatgctaattgaacatgcaattggggaagaaaaaatgtagaatgatttttgctatttctagtagaaagaaaatgtctgttttccaaagataatgttatacatcctattttgtaatttttttgaaaaaagttcaatgttcagttttccttagtttttaccttgttttctctataggtcatgatttctgtgaagcaaaaagatgccttttaccatgaattcttgagtttacatcaataatattgtatattaaggggatcagaagtaggaaggaaaaaataagagatagcagaggaaaaagaaaaacatttcctcttataacttctgaagtaatttgtaaaaaagatttgtagagtcaatcatgtgtttaaattattttatcacaaacttaacatggaagatattcctttttaactttgtggtaacttctttgaagttatttagaaatatcctttggaacaattattttattgtctaataaatattgacttctcttgaattattttgcagactagtgagtctgtaccataagtattaatcacctccactcatattaaagtgatcattaagaatccagaagctggcttctgcatttgctcagttatacttttaatggtagtatgtttttaggtggaataaattaatatgtgattggtttcaaggaaatgtactctattatgtaatacttccattttataagatgcccatttctaatacaatgtgtgtaggaattatttgtatgtatgaggtatgattgtaaagattgagcattggaaggggtatcagagaccatgtagttcaactttccactcaaagtaagatttatgaattatttaaatgatagttgttacttggaacagccacttgagaggctctcttggtattgtttggaattgttttaaagtcagtttgagtctcacaagaaggtaagtagagtttcttaatagtcacaacttaatttgaaccacaagtatccagcttaatcacgtatcttactcacgataccactggtccagatgagtttaggtaattttcaaacattaaatccaacttcaacggaaacaaatacactcaagggaagttatttttaaaaaggtactctgcatgttcccgcagtaatgttctgcacaacagtattgtaattgtaatggaatcataacctgctaactagtttgctttaatatggcttgtaattcttgacatttttcttaaaattaaaacgaatttttattttgaatttataactgcattttaaatatattggggacagattgcgctgagacctggttatgagcaagccaatcttttgaat

SEQ ID NO: 2024 - DNA, 1024 bp, Homo sapiens
gttaagaaatactataaatatgactcttatgagaagactttgttgctctgtagtgtttctgaatactgtatttgttggattgatcaaggctatttttcaaaaagctctctgcttcctgtttgtttgtttgtttgtttttgagacagagtcttgctctgtcgccggggctggagtgcaatggcgtgaactcagctcactgcaacctctgcctccctggttcaagctattctcctgcctcagcctcctgagtagctgggattacagggccacgcctggctaatttttgtatttttagtagagatggggtttcaccctgttggtcaggctggtctcaaactcctgaccttgtgatctgcccacctcagcctcccaaagtgctgggaagacaggcgttagccaccgtgcccggcctctgtttcctgttattagtgattttcctgcccaagattgcaacaacaaatatgtagaactacagactgtttagaatgctgagactgttctaagaaactttcaaaaacagtagcacttcaaggaatggtcactttctatgaaagaaactggtttgatagccataatcttattgctagctgcttttagcaaaagtcttttcttgaaaccaccacctatactctttaaacaaataaaaactaaaatctcttgctaatgtttcaggaagatttattttttctattttgctattgtggcgaaaattattttcagttataggatacttttttccttctgaaaagtaataagcttaaagtttttgtttctgtaagatgtaatgatagtaactattattttgggcatattaaccaacagaacaattatgtagtatgtatatcactttctcattagatctctaacttgaccttctagtacctttatgtgtgaggataaatttgttagatccttttattctcaatcttggataatgatgcaaaatggaattttgttttgtttgttggtagattcacatactaaaactttgcaggtaaagttgcttgcctcatgttagaattta

SEQ ID NO: 2025 - DNA, 1036 bp, Homo sapiens
ctggctccttgctccagaatcagttttttaatggaagatagctcatactttgtttttgtttttaaagagacagggtctcactctgttgcccaggctggtagtagcgtgatcatagctcactgcagtctcaaactcctggactcaaatagtgctctggagtacctagaactacaagtgcctaccaccacacccagctaatttatttgtttttttttttttagagatggggggggtctccctatgttgcccaggctggtctcaaactcttcacctcaagcaaaactcccactgcagaaagctttgggattacaggcatgagccaccatgccaagcccatacttattgttaataaagtttcagtgacttgcttactaatcttatgcaaaatttcatgtaatttatgtaatactacataacaatgctacatatggtatgtatacatacactgtatacacacaaaggtctgttctgggtattttatgtatcttatctctaggctttatggctctgaaatggagggaactggacataaatgtttcaaggaataaagtgaatgttttgtttgtttgtttgttttgagacggagtctcagtcaccaggctggagtgcagtgctgtgatctcagctcactgcaacctctgcctcctgggttcaagcgattctcctgcctcagcctcccgagtagctggcattacaggtgcctgccaccatgtccagctaatttttgtgtttttagtagagatggggtttcaccatgatggtcaggctggtctcgaactcctgacctcatgatccgccagcctcagcctcccatagtgctgggattataggcatgagccatgctcccggccaaagtgaatgttttgggtgaagtttatataaggatttgacttttgtatcattattaaagtttctgtcaggtaatacagtgttggccctctgttgaaataaaatgttacatatcgctgggtgtagtggctcatgcctttaatcccagtactttgggaggccaaggcaggaggattgcttgagctca

SEQ ID NO: 2026 - DNA, 1031 bp, Homo sapiens
tggcacatggcaggcatgtctccagtgtaaccttcaatagtcccttcctgcttggtccagcattgccctatatacatacacaacagacccagagaaaacagtatagcatcttcccttgaggggcttatcttgagaaagcacaaaacctgcgcacatgaagcacagaaggaaaaatagactaacatttgctgaattcctattatatgccccgaaaagaaaaagcatactcatttctttcaggtagaagatagcctagaattgtgacatgtcgcagtgtataaaatctagatgctgggggtgtggagtattccttccagttcctttccttgtgatgactttatttcactgacttaacaagtaactttaatcctcctcatctctgtcccttcaattatcttgggtaaactggactcttctgttgcctggctacccggcaggtagtcccaaatgtcaaagaaaagctggccaaccttagaatttggccatggacgtcactgtgggaggacaaataaatatagaacatgaagagattattcatttagagcccagcttctccaacatctcactgtgattcaccagatcaattaaaggcgcagtaattcagtgcgtcaggaaggctgttgtgaagagaacacatccagcctcccctggtccacaactcccaccccccattcctcaccctggcaactgattagatttgctcctcccttgcctggtatataagttaccactgcttgtttccagaaaaccaattaagaaaccataaattgtggtcgactagaaaggtcactgcacaagctataaatacaggcatttctaaactgtgagtggaagtctctgaagcacattatctcctgtacacccacatcttccaactgaggttttctttgataaaatgagagaacatgaagacggagatcaaaaaggcattccctgggttttcgttctgtagcctgctctcttgggtgtagctgggaattctgagcctccagcagcccagcccacactccagctttggttttggtttgttg

SEQ ID NO: 2027 - DNA, 1054 bp, Homo sapiens
ttggacacaccctgaagcttttgttttgaattaagaaatgagtttcaggaattgacaaaccatttgttaaccagctgtcctgggctattgaagaagatttcattttccgcgcatccacttgttgcagtccaagtcctctagtgcaacgccatagcaaatataaagatttactatgcacgtgatacattttatggagtgcctcaagccaagatagtgaatttatatgaagggtgtgaaatgtatttctttactactatagtagtttagttataactttgcatctataattgagctttctcatctgtcaaatgctatggttttcttaaaatgttacaattctagatctatccaccttgtttttttattgtctacaaaccattaaatgtaaatattgtttttagagtcagtcattggctttgtcatttaccctttgagagttccacaagtggtagtagagtggtttaacgtctttcctctagtactaccagtattcataaatgtataccccttactgtaatttgttcctcttagaagtcagatcatctgatttatagaggattatgaaaaccagagtttttgaaaaggcttattttatacatacgtattatatagagaaacaaatgtttttattaaatgtttcattgacccaagtaatttaaaagtaatatgttacctatgtctttcaggaaaaataattatagcagctgatctgtaaatgactttaaaagctattttagtaatttaaataaatttactttcttggtttatactctctatgtgttataaacttaatgatttatcatctttaaaaaaagaaatccaagtattttccttgaacaattgtagcaactctggctaggagaaacaaaaatcaaagaactggagccatttgcaagtacattggttagaagtggaatagccgtaactttccattttatctcggcacttagggtttttaaaaatacagttaagttagatattcctgacttagcaaaagaatctccacagcagcttttcttttttttttttttaagtagacatgggatctcgctat

SEQ ID NO: 2028 - DNA, 1040 bp, Homo sapiens
tcctattaagtagttgtggtaatttagtaataaaaatatttatttcaatttatacatatttatttttcgatctgctactaagttggtaggctataaatactttttaggttgtggactgaactacttagtaaatggaactgttaggtatttttttggcctaggggttccatgaaaaaaataactggcatactgaggggtctgtgaactgagaaagtttaggaacctcttgaacttttgaccaggacacctatatatattttccatgttctgtgctcccaaaggttgattttttacatttatctttattttttatttttttaaataaaaagaatagatgtgtgttatacgtgtatgtgtatacatataatgaatcaaaagtttcacttttcaaagttttactttaaacagcctcatggccaggcgcggtggctcatgcctataatgccagcactttggaaggccgaggtaggcagatcatttgaggtcaggagttcaagaccaacctggccaacgtggtgaaacaccatctctactaaaaatacaaaaaaattagctcggcgtggtggcgcgcacctgtaatcccagttactcagtaggctaaggcaggagaatcacttgaacctgggaggtgtaggttgcagtgagccgagatcgcgtcactgcactccagccagggcgacagagagactgtgtctcaaaaataaaataaaataaaataaagcgctcactaccttcaatacacttgatatttgcaaatcaatcctatttagttccattaaaaaaatgctagctccaatccacgatattgttttgttttgttttaatctactaacgggtcatgactacacacttgataatatgatgctggttgactcctaacgtccagctttaatacggtttgtttctctggttagttataaatgaagttagactacgctttagcttttattttagatttgggttgtgggggatacacgtgcaggttcgttacatgggtatattgcatcatgctgaggtttgggcttctgttgaacctatca

SEQ ID NO: 2029 - DNA, 1030 bp, Homo sapiens
ttgtttgtttgttttgttttgttttgagatggagtctcgctctgttgcccagactggagtgcagtggcgtgatctcggctcactgcaagctctgcctctcgggttcatgccattctcctgcctcagcctcccacgtagctgggaccacaggtgcctgccaccacgtctggctaattttttggtatttttagtagagacagagtttcaccatgttagccaggatggtctcgatctcctgaccttgtgatccgcctgccttggcctcccaaagtgctgggattacaggcgtgagccactgtgcctggcctatttttttctgtttaaatggagctcataacagcttctaatgctgccgtttgttcatctgttcattgaaggttctgttgatctctagatgggtaagaagatacagtccttaaggaccacacaaccttgtggggagactgatacatatatgctatttgtaactctattacagcactcattatattgtatactatttgtttatgtgtgtctctcctctacttgattgtgagccataagtgctcagtgaatgttcattgaatgaatgaattatgtatgatatatgtatgtgtgtatgtatatataatgacaagaactatgaaaaatgaacagaggccaaccatggtagctcatgcctgtattcccagtgcattgggaggccaaggcaggaggattgcttgaggccaggatttgaagaacagcctgagcaacaggagagatctgtctcttaaaaaaataagataaattcgttggacatggtggcgcatgcctgtagtcctagcaacacaggaggctgaggcaggtggatcgcttgagcccacgagtttcaggctacagtgagccatgattgcaccactgtactccagcctgggtgacagagcaagaccgtgtctctaaaaaagaaaaaaaaagaaaaggaaaaaatgaagagaatactataggaaacagagaagtactaattgaagtactaattttattaagagccagtttgggaaagatttatagg

SEQ ID NO: 2030 - DNA, 1024 bp, Homo sapiens
tgatgtagaactattaatatatcataaattattccaatttttaaaatacattgggatgcaaaaatctgaaggaaggctgggcgcagtgtctcacgcctgtaatcgcagcactttgggaggctgaggcacgtcaatcacttgagctcaggagttcgagatcaacctggacatttgggagcttattaaaattcagattctgaattttaaactccatctctacaaaaaaaaatacaaaaattagctgggcatggtggtgtacatctgtagtcccagctatttgggaggctgaggtgggaggatcgcttgagcccaggaggcagaggttgcagttagctgagatcatgtcactgcactccagcctgggtgacagagtgagaccctgtctcaaaaaaaaaaaaaaaaatctgaaggaagatatatcaaaattttatataaaatgtctatatgtgatggaattttgattttaatttcattttttatattgtttctgttttcctagttttttgttgtaagcatgtaatactttaccatttaggagaaaatgcttttcagtcattgagaactttggtggttataatcaaaagttgacttatattgcagagtgtgtatgtgaaacctgaattctatcttgcgaattttgtctttattgtgaaacttattttatagacataaaactgtaaaacactgtggctgtttgagtacctatagtcctaaattttggttcaggtaaataattctttcctcatttttgcgtgtaaaatgcacaggatatattgcataatggtatgtcacatataaagtcagataattggctgggcatagtggctcacgcctgtaatcccagcactttgggaggctgaggtgtgtggatcacctggggtcaggagatcgagaccagcctggccaacatgtggaaactccatctctactaaaactacaaaaattagcccggcgtggtggcgcacgcctgtaatcccagcctctagggaggctgagggagaatctcttgaacccgtgaggtgga

SEQ ID NO: 2031 - DNA, 1023 bp, Homo sapiens
tttcctaaagaggagaggagaaaaagagggttaaatgttgagcggtgggattaggtgatggtgaaaagttgagaaagacagaaatacgtttgcatagaactgccacacttccttttttttttttttgaaagtttttacagtttattaatcctcatgaaaaatctgcagttatcacagataaagtcattgcagaatctttactcctgtttttagcctttgcagtccctctgactttcttcattctgttcttgtgttccttttgctgtttccttggggtctttttttctctcatacaggccatgtcttgaaagtctgtgtttggtctcatttttcattgcataatccaaggaatcagaaatcatgctgaagccatttatcttgtcaccagcaaaatgggttctgaatccaaatacaaagatgacattggtgtggctttgtacatttgggctagttttccccaagtttctgtctttggtactgttccctttccagggtgaaggacatctacgactgtttgtgctccctgaggtagttgattggtcatgaacttcctagtacaaatagttattgtgtcattcatgatggcagtcagtcctcaggcagccaggcagaatcaccacacttttttaatggcaaactatattttgcaaaactgaacactatgtttataaattttttcccttatatagatatagatgtaatggtgtgttccttgccacaaatgtcgggtgaaattaaactgaggctattgtgcctaataactgaatagattatttactattagacatgtaattaatttaccagtatattttctcttatacttacaaagtactactaccagttttttactccagcctattctttacattgatttaattgtgcagttatgtatgggttgctaattctttgataagttgagcccatcttaagatacaaatctttatactactttggttatcatctttattcattattttgttgtttttgacaaaacaaagttcagtgtatttcttaaagaatagt

SEQ ID NO: 2032 - DNA, 1027 bp, Homo sapiens
ccgcctcctggattcaagtgattctcatgcctcagcctcctgagtagctgggattacaggcatgtgccaccacgcccagctaatttttgtatttttagtagaaatggggttttgccatgttggccaggatggtcttgaactcctggcctcaagcgatccgcctgccttagcctcccaaagttttgggattataggcgtgagccactcacccaggcaataattacatttttaaaaagtattgtgtttcatgtggcgttatgtaatactgttgtcagaagcatagtttgaaatgaagcacagggacccctaaaacttatgaacactgatcttggattgtatttatccagttttgtggtaggctaattctcatgtatgtactgtggcagtgagctagatagagagtcattaaatatgctaaagctgtattaatagtttatgtagtgaaattcctttttttttaaccaatgaccgtgtgtaactgttccagaaagttagaatttagaaataaccactcagcatattcagatgccaacatgtataaattactatccagtgtattcatggttgcttttgattcagaaaatcaggctgaaattgaagagaaacctgttctctcattttacataagaacatcaagtttcttataaatagattgagcagtatacgtaaaaccctttaaatattttaggtcaactgtataaggttaataacaaggtgcagaaacatttctaaagtaaacagcacacattaaaactcacctttttataattgatgtttttattaaaatgatacttccgtttaaacttataaattatagccctttttaaagaaactctaaatggaaagtcttttattataaatacaataaaatagcatcacagaaagctgggaaaatagaaaacagataaaaccactatccagacttaaataaagaactagtattactttgtatgtttccttacattcattttaaaattgtaatagtaggttatggtaatcactgtttatttaaatttttttgtatatg

SEQ ID NO: 2033 - DNA, 1035 bp, Homo sapiens
atccaacttctttgactcctgatgtctaacttattgcgtccactttcttgctacccagcttctgagctcccccattcccgttaatagttttagcataactttatgtttaaaagcatgttactttttgcttaaaatttggcatttcttttccttactctttatagcatattgtgttaactacctggaaaactccaggtttcatatctcaccttgaaaactgaagatccagcttaacaaacactttccttggctagcagagttaattgctgcttcatctataccctactgaactttttaaatctttgttttagtatttgtgatgtcttattttagctgtttgtttgtcatccctgctagatcttgagatcttaaagtgtaaggattaagcctttttatttgtttttaatttggagacagggtcttgctttttcacacaggctagagtgcagtggcacgatcatagcttactgcagcctcaacctcttggactcaagtgatcctcccacctcagcctcctaagtagctgtgactataggcatgcaccaccacgcctggctaattttattttgttttttatttttttggagatgaggagcttgctatgttgcccaggctggtcttgaacttctggcctcaagtgattgattcttctgcctcagcctcccaagtagctaggattacaggtgtgagctaccatgcccagctcaggattaactggattaagtatattcatttttgtctcctgtttctctaccatcaacatatcacctgctataaaattggcattctaaatacttgaatttaaagctcttggatttttattcatcaatatcttttatattataacttcccttgtattcctattactaccagcttagtttaggccccaatagcctcacactttgcatttgtaatagcctatattctaaggcatagaatctgtgctctagtctttcttccttcattctaatgacatgcttttcaacttattattaccctggttaccccccttcagatgacttattttaacccaat

SEQ ID NO: 2034 - DNA, 1033 bp, Homo sapiens
cataaaatattttattcgctttcagagatgtattttaagactcatatatggctccaattttattgctgtagagtgtctattttagaagactttgcttcatgctataatgagtgaatcatagtatatgtacactgtagagggaagagttcagtgctagtttaatcaagctactccctttccattgtatttagggcagggtttgtgccttgcttgttcaccactgtaattctagcaattagaggaatattcatagtcattcattcagcatagtgattatattaatgaataaatgcctaaatcacaactttttaaagctaatgttgatagtttttttatatgttgttcttttgaattatttagctggtttacaaagtacttttccttcctctaatgtttttgtggatcaaaacttctagtgtctcatcagataagggaagatctcagaaaactccaacttctcccctgtcaccaagttcccagaaatcattgcagtttgacgttgcaggaacttcttcagaaagatctaagtcgtcagtaatgcctccaactataacaggatttaagcctaatgcacctctcactgatctgaacccggcagccagcagaacaacgacagagaacatggctccaataccaggtaagtagattcatgcaattgtaatttttagaatacgatatgaaatttttttctctcaacattccttttctttgtttgagttgagtcatagagaaatattatttcaagtgaatatgattacttttcaagtattaaaaactgcaagaaattaaatattgaaaagcacgagaggttcagtaatgttgacttttttcccatcttgtcagccagcattagtcaaaacatatctgaaaaatatgtcccatatgtgcactcctgtttatatgtatatgcatgtatacacacatgtacgcatgcacacacatagaagtaaagtacattgtataggcataccttgttttattgtgcttggctttattgcatttcacagatactgcggggtttttttgtcttttt

SEQ ID NO: 2035 - DNA, 1038 bp, Homo sapiens
attctaagcccactgttgagacctactgcccagaaaaataaaagatttttttcaaagtgtttttttcagaatttgaaaaaatatttattcctgcttattgacaatgcacctggtcatccaagagctctgatggtcataaaaaaggagattaatgtttttatgtcccctaacacaaagtctattctgtacccatggatcaagtagtaatttcaacttttaagtcttattatttaagaaatgcattgtgtaaggctatagctgccatagatagtgattcctctgctgatttgggcaaagtaaattgatcaccttctggaaaggattcactgttctagatgccattaagaacagttgtgattcgtggaaggagatcaaactatgagcattaacaggagcttggaagaagttgattccagccctcgtggatgactttgaggggttcagaacttcagtggaggaaataactgcagatacggtggaaatagcaagagaactagaattataattggatcctgaagatgttactgaattgctgcagtctcatgacaaaagttgaatgaatgagtagttgcttcttatgcatgagcaaagaaagtggtttcttgagatggaatctactcctagtgaaatgacagtaattatgtaaatattacataaactttaattgataaagcagtggcagggtttgagaggattatctccagttttgaaagaggttctacagaaagtgggtcaaatgctaccaaacagcattacatgctccagagaaatcttttgtgaaagcaagagtcaatcgatgcagtaaacttcattattgtcttattttaagaagttgccacagtcactccaacctttagcaaccaccatgatcagtcagtagctatcaacattgaggtacgaccttccaccagcaaaaagattaggacttgctgaaggctaagatgatcattagcatttttttagcaatacagtatttttaaattaaagtatgtactttttttagacataatgctattgcacacttactagactacagta

SEQ ID NO: 2036 - DNA, 1026 bp, Homo sapiens
ggtaagcctcagtctacttctggtctgcattatccctaggttggggctctccagggattcactggaaacccagataatactttttactcagcacaagagactggggatttctgccctgcttttgagacttttctgggttaactccttagccctctatgtgctacttcagaacttgacaactgctttgaggagaatgtgagtttgagatctcctgagtctcctagttttgtcactgtggctctgtgtggatggttagagtgttgactggtgtaaccactttgagttgagagcaattgccactacctggttcagttgaggacatatataatatatgactcagcagttctgtcttggtatatatcctaaaaaagctttcacatatgttcaagggaaaatgaaaacaacttaatttcttcaataaaagaatagatgaaataaaacatattcttgcaagaaagtataatactgcaggaaactgaatgtgttagatatcaacactgtctgtagagatttctgaaatgatagtaattttctttatctgtgttgtccaatactgtagctactagccacatgtagctagaagctgtcatattggacagtgtagcatgagatcttcatttatcaaaaaccataatgttctttttaatagaaaagcaagatgcaaagaatatatacagtattataccagtcatataaatttttttaaagtaaccaattagtagtatatgttctgtggaaccactcatgcatcaaaagcaaaaaaccacatatagaaatgatacacttctggggaagagaggaaggaggaagagattggcatggagtttggtttcatctgtatttatctatttatagataataacatatttgaaacaaatgtgcaaactgttaaatatgtttaatgccagtcgtagggatatgagtgactactttttctttttgtaatacttaagaattttttaagtaaatatgcaaaatatactctttgatccaattggttacccctgaaaagttgccttatatgtt

SEQ ID NO: 2037 - DNA, 1047 bp, Homo sapiens
ggaataaaatgatttaaggtactaagtttttgtaagttttgttttgggaagagtaaaaagtagtgttttagtttagctaggtagtctcactagtttggggatacatagcattgcataaggattcactaataaagcagcaataattttcttcaaggtcagtacaaatagagcagtgattcttaactttttggggatcttgagttcgcttgtaaattagatgaatgttttggaaccttgcctcagaaaaatgtatgtacacacatatatacaactttacatgcaattccagggtatccatggactccttggtattccaatggagaaacaaatgataatggaagcacagtaacatcctaaacaaatatagaactgtaaatgtttcttctgtgaaggtattaagattttgttttcgatatcttttataatgaaaggatttttagacctaggagttccacttaaaatttagtttataattttattcaaattatagaatgattttataatctgttagaatgcaggcgacaattatatcagctcggtgggcaacaaaaggtctcatttaacgtcacatggtctagcagtcacacggtctggcagtcttttgaggtacaaaataagtggaaatattccaacggagaaagagtcataaaatgttaaaattggaagggctcttagggaagccataaaataaagtccctttgttttacatgaagaaattgaggcccacagagtttatgtaactttcctcaggtcacacacacacagcagaatggcagagctgaaactagaactctgttctccagagttcagctagctaaagtcaaagttaagttagcgtatctgctttcaacctcatagatttttttaaaacctaaattgatgacttaaagttatcttcattagaaactgatccttctaaatagtattttgttgaaattagcaaagtgctagatggctaattactggagttgaatagctgtacagagcaagttcagagtgtgaaagtgtgactttaaaagtgaattaaggccaggtgccgtggctcac

SEQ ID NO: 2038 - DNA, 1064 bp, Homo sapiens
cagagcacgactccatctcaaaaaaaaaaaaaaaaaaaaagtgaataaagccgggcacggtggctcatacctgtaatcccactactttgggaggccgaggagggtggatcacctgaggtcaggagttgaagaccagcctggcccacatggtaaaaccccatctctactaaaaatccaaaaaattagccgggcgtggtgatgcgcgcctgtaatcccagctactcaagaggctgaggcaggagaatctcttgaacccgggagacggagattgtagtgagctgaggtcgcaccattgcactctagtctgggcaacacgagtgaaactccatctcaaaaaaaaaaaaaaaaaaatttaaaaagtgaattaagctgtgcgcggtggctcaggcctgtaatcccagcactttgggaggccaaggcagatggatcacctgaggtcaggagttcaagaccagcctggccaacatggtgaaaccctgtctctactaaaaaaataaatacaaaaattagccgggcatggtggcaggtgcctttaaccccagctacttcagagactgaggcaagagagtcgctgaacctgggaggtggaggttgaagtgaactgagatggtgccactgcactccagcctgggcaacagagcaagactccgtctcaaaaaaaaaagagcgaattaagtactcattaattccttaagttcaaacattttagaaacataatgatttccatactagactaaatctgttgtatatcttattcttgtccagtgttccgttaccatcagaggacttgttggggaaatgccttgacatcaatcaaaagcattttgtattagtcggcatttatgtctccatcattcacaatttttatttctttcctgtgtagcatcttgaaggattattaattctattgtgaagtaatgctctttcatctcaactttattcaacgtttaaagagcactcctataaggaatgtatttatatttacactccttatataaggatgtatttatatttaataaggaacatgtttatggaaagaagttctaactttaagttaaactttt

SEQ ID NO: 2039 - DNA, 1028 bp, Homo sapiens
cagccctgctgttgaatatgtaccatccgagtctataggacaggagcagccagggagtccagatcacagtatacttactgaagaaatgatttgttcacaggaactagaatcttctacctctcctagtaaacatgtaagttaatgtatatttatatcttaaagattctctagaaaaaaaactgaaaggtatgttagcagttatattattgtaattaatgacagtgttaactgtcaccatacttgtaacatataggatataacatttgaatagaaataaagcttttcatttacaaatatatgaattttggcattagtgaaggttataaaatcatttgctatcaagtctgtgaatattgagggaataggaacttctaaagtctttatgaaaaacagtttgtaggaacaacacaagttctttctgaaatttgttttttcacataacaaaaacagtaagatcttaaaccacaccagagtacctttactgtaactgaattaataacttatgtataactcatagaataaaagtaatggtttagcctcttaaaggcagctctgaaacagttattgattttaaattaagatgatggccattattaaactaagattttctacattgtccttaatcgtgtactttatagaaaaaaaaactagctggtaaaaactcaagatagaaacttaactctttttttttttaatatagcaaataattagcataacaatattaaatatttagtatactgtggtatactaaagtatacacagatgttgttaaagcctctttatgtttaaaaaaagatctgcccaaattcagaatggaatattctttgttggagtcttccatttttattgtgatagaaagaattaattttgtttccccattgaaaagtcaatcaggttcatttgtgttacagcacctagaagatctagaagaaaaacatattttattcattgaagagcctattaaatattatgttaaaaaatatttcaatgtccttgtgcacatacttgaaatcagcatttttaggtta

SEQ ID NO: 2040 - DNA, 1372 bp, Homo sapiens
gtctcggcctcccaaagtgctgggattacaggcgtgagccactgcacccggcccactgtactgctttttgaattcagttttagttttgagagtaaacatttagtaaacgaaacatgaaaattgttattctttgggttttttttggtaattaattatgtgttgtacctttttgttttccatgtgtcagacaattataaatcatggaattttcctacacccatgtttacagctcttctttcttctttgagtaactatataatatttcaaagagtagatgtaccataatttatttaactgtttccctagtgatggctatttagattttcttaaatatttcacaattgcaaataatgctataataaacatctttatttaaagatttacacacacatatgtatgcagtcatgcatcacttaacgtccaggatatgctctgagaaatgtgtcattaagcaatttcatcattatatgaactgcgtagaatgaacttaggcaaacctagattgtgtagccttactgcactctcaggacatatggtatagcctcttgctcctaggctgtaatacctgtacagtatattactatactgaatgctatatgcagttgtaacacaatgttaagtatttgtatatctaaacatagaaaaggtgtagtaaaaatattatgactcacatgtgtatgtgatatcatatatcatttatgtgtgtgtttatcatgtataataaaaattctttttgtatatttcagtgtggaatagattcttaggaatagaatcattgagtcaggccagttgaagaaagttgtctcatatttctctgtggaaatttactaatgtttttatatatttgcttttatgtacgttggtgaaaaattacttccaagagaataacatgtcagtagacataaacttgaatacttggaaacatgggttcttatcctggatctcttacttaccggtgactttcttcaagtttctttgccaatactggattatctttttcatttgttagcaatggaataatgtttcaaccatccttgcatgagttatgcaccaaggattaataataacatttgtaagatactgttttattggtgacacttatttaagtaagaataaatggttttagaaaagtagctctgaggtttctaaactacagattcactacctattcaagatgacattatttatattcagtatttgtagaagtggtagatattaatgtagtagagttataatacctttacttaaatgatgggagagtttatcaaccaagctaatataatcagtgtgtgtcaaataatcagaaactcccgcctcagcctcctgagtagctgggactacaggcgcatgctgccacacctggctaattttt

SEQ ID NO: 2041 - DNA, 1037 bp, Homo sapiens
gacttaaaaactattaaattatgtattaataactaaggcaaaagacagttaaatatgattatcttgttaccagaagtaatttcttgcagaatatccaaatttcatcaatctaaaaatttctcaacttccagctgcatgtcttaccaagacagcgtatctcaagatttatttataatttcaagtagtacaattagaaagtgaaaataaataggaggaaccaagccaaaaataaagtgtatgtggcgggcggcggggagggtgggaattatagggatacattttagtaataaatcttcttccgaagctcatattttaattattagattggctttatttaaatggaatattacattacagctttttattagtagttactgagttaacattattcttaagtcaaaattataaataaaagattttgtatctctttcagaaactacatctgaccagagtgatattgaaggtaggatcagagctctgaaggatgagttgcggaaaagaaaatcagttgtgaaccagctgaagaaggaacagaaaaaaaggcaaaaggaaagactgaaagcccaagaagccagtctgatcaagcagttagaggttagacataggaagaagggggtttagtatcaaggctaatgtgtatgtgacgtctaaaatgtttttaatgttgttaataaagtaatggattaggattcttcattattagtgtggtgccacattttattctcttaaaaaaaatctgagggtatccaaggacattcttgcttaaaacattaaattttattttatttatttatttttgagatggaatctcgctctgtcgcctaggctggagtgcagtggcgcgatctctgctcactgcaagatccgccccctgggttcacgccattctcctgcctcagccccctgagtagctgggactacaggcgtccgccactacgcccggctaattttttgtatatttagtagagacagtgtttcactgtgttagcgaggatggtctcgatctcctgacctcgtgatccccctgcctcggcctc

SEQ ID NO: 2042 - DNA, 1054 bp, Homo sapiens
ttctaaagaaggtaaatctgatgtcttactgaaattagtcctagaacagggagattcatctgaaattctttcaaagaaagatcttcctttagattctgaaaatgttcagaaagacctagttggattagctattgaaaatctccataaaagtgaggaaatgttgaaagagagacagtcagatcaagatatgaatcatagtccaaacatccaatcaggaaaagacattcacgaacaaaagaacacaaaggaaaaagatttgtcttggtcagaacatctttttgctcctaaagagataccatactctgaagattttgaagtgtcttctttcaagaaagaaatttcagctgaattgtacaaagatgattttgaggtgtcatctttgctgtcactcaggaaagactctcagtcttgcagagataagccacagccaatgaggagctctacaagtggagccactagctttggtagtaatgaggaaatcagtgagtgcctaagtgagaaaagcctttctatccatagcaatgttcattctgacaggctgttggaactcaagtcccctactgagctgatgaaaagtaaggagcgcagtgatgtggagcatgaacagcaagttactgaatccccttccttggcttcagttcctactgcagacgagttatttgatttccacattggtgatagggtgttgattggaaatgttcagccaggaattcttcgattcaaaggtgagactagttttgctaaaggattttgggccggagtggagttagataaacctgaaggaaataacaatggaacatatgatggtattgcatattttgagtgcaaagaaaagcatggtatttttgctcctcctcaaaaaatatctcacattccagaaaactttgatgactatgtagacattaatgaagatgaagactgttactcagatgaacgatatcagtgctataatcaagagcaaaatgatacagagggtccaaaagacagagaaaaggatgtcagtgaatatttttatgagaaatccctacctagtgtgaatgatatagaagcctca

SEQ ID NO: 2043 - DNA, 1032 bp, Homo sapiens
cgggttcaagcaattctcctgtctcagtctccggagtagctgggattagaggcgcatgccaccatgcctggctaatttttgtatttttagtagagatggggtttcaccatgttggccaggctggtctcaagctcctgacctcaggtgatccacctgtctcggcctcccaaagtgctgggattacaggcgggagccaccgcacctggccaaccccccacattttaacaagactataacaagggctatgggaattattagccatgttttaagtttttactaaaagaatgagcttattttgctctatgattttgttacacttttcacccattattggttatttttctaagtcttttacatgtttaattatgaaatatttttaaagtataaaaaagaatagaaaataatataggtgcattgtttctgcatccttttccttcattctgagctcggttgcatctacctaaagtacacacttagtatttcattaacttcaggcctttaatgtaaactctcagtctttaaaatgtctttatttcagctcttacttttgagttatattttagctgtatatagaattttaagttgatagctctttttacttaagcagtttgaagatatctcattataattttgaagcagcatcattgtctgcggtgaatacccagggttcgtcgtctcgagctgagaaaattaacgacacagacacacatacatgaagtgggttaaggagtggaaagtttaataggcagaagaaatgagagaggagagcagctctctcttttatgaaagagaggtgttccgaaaaaggaaaagcggtggaccgcagcagattttataggcaggctttaagaggtggtatctgatttacatagggcccacagattggttccaccaggtgtgatgtttactggtgtgtggggaaggctggtcaccccaccctaatcttattatgcaaatagattttctacttggccagtgccatcttgcctgctccttactgtgcatgtggcaaagagaagagaagatggagct

SEQ ID NO: 2044 - DNA, 1023 bp, Homo sapiens
gaaatacaaacttacatcttccttttactaccttaagaatactagtgaataaaacattaattcaaagagcaaattatagaaactacaatgacatttaatgcaaattgtaggaatttacatgtttacaaatcatcttcaactggttgtgcagcaattcaataaaatatctttgtattataaaaatgtgaagaaaaaatgtaaactgatgtaaaggaggtactgtcattttaattaacctatgtttaatagcttttccttctggactttgcaaagccttcttggcaaacacattgcaaagcattctctgggaggttcagcctccttgtgtgtactgtactgtgcagacatgaaaaaataaacccgtttactgtgtgcgtgtaaatagcctggtcatcaggccattttcagccaatagtcacatccagtgcaattttgcaccgaacacttaagggtgtggtttgtaagtacgatctgtaaaataactgggatgaattcccatgtatacctgtgtaaatagatttgttaactgaaatatactttaagaaagataaaatctgtaaataaactgatttataaattaatttcatgtcaggtctccattttttccctcctgagccaacttcagaaaattagtccccataaaatacatctgattgcttatttagtcatagggtgctgatgcttggacagtacaatcaggtaagctgtggataagagctatttacctgcacataaatgccatcagcacatacatttgagcagcctgggctttgctcccacactcattgattcagcagatagccactgagcaactttgtgttctgagtactgtgctgagtgctggaaacatagcaaaaaagacagacatggtccctgatctcaagaaacttaatgtctaatgaaagccaccaaaagatattttgaaaacctgtgtgacaagttctaacaagtgctgcacaggaagcatacataagatttgagaatatcttaataaaaggacccaacaagggtagagtgagtcag

SEQ ID NO: 2045 - DNA, 1032 bp, Homo sapiens
tgagttgaagagcacattaaagatcttggtaaccagtgcgtggggctgcctccccgcctgtgtgcagagggtgcactcactgtcaccacggtactttgctcagatatgtgctgctccctacgtgtgtgtgcgtgtgtgagtgtgtgtatgagtgtgtgtgtgacagtgtgtgtgagagtgtgtgtgggtgagtgttgtgtgagtgtgagagtgtgagtgttgtgtgtgagtgtgagtgagcgtgtgaatgtgtgttgactacaggaaggcaggggcagcaggtgacatgggtgcccggcaagtccttgatgtttgggtggaaggacagacctctggtccttcctctgagctttttgtgtactgctcttctttctcacaatcttcctgttgctttcccacctctgaccctcctctagtttccttttctctggcattcatgcaattccattccctctagccacatcctttcccagtgggcaacaggagtttgcctctattttccttcctctatgatgtcctggccaagcaccacagcagctgttacaggaccctgggtggagtgaatttccctgtgtttgtgtgtgtgtgtgtgtgtgtgtgtgcgcgcgtgggttgacatatgtacccgggtgcaaatgtgaacataatgtgtgtgtgaagagggcaggaagcggcaggtggcagggcctagccttggggtcgggtgagctgccctgcttctgtgatgaggtgtgtgcagatgtgtatgcctgcacctttggaaagccaagaggccacgcctccgcttgcccgtctcggggcagggtaggtgctggatgtccgagtcagacctcagaccccactggtttctggctggtccagtgtggcggctcagggaagcctgtggggtatgagcaaagcctggcagggccactgacccaggacttcatcgccagagggctgccttggaccccccagtgcttcctcagggccctgtctgatttttggaccctgagtggctggctatggtttggaaagagagggtggagagga

SEQ ID NO: 2046 - DNA, 1044 bp, Homo sapiens
gtccttcatatttggtccagttggttagacttctggttctctgtgtagcagccgggttcacagttttacctcgtgtggggccagggaattctaggcatgaccgtgtgtctcattattgcctgtcgcagggcaagtcatgtgacctgccaggctttggccttctcacctgtgactctggctattctaagatctgggaatggggacagtgtctccatcacagacacacccctgtaggatgccctgtattctagatacactggctctgactggagatggggtggagggtgatctgcagggctgggctgggccgggggagccttgtgggccaaggaggtgctgcatgcggctccctcggcaagggtcccgctggctgtgctccaggggaaaaggtaatgaggagccacttccacttcccttcagtataaatcccacaatcaggaaaattgcttcaattgctaaaaaacgctggtggggaagtccacttatttttcatttttcttgtgcacttgccaccctcatgcatgaatcactgtcggtatgtagattaaatttatacccccgttatctttcatgtctctggtgtgctggtgtcagctgggcctccggtgactgaaagccccctgcctgctttttagtgggagagagtgtggcccctgtggaggaggctgctgaagggtcttccctctgttccggggtctcctctcagccctcctctccttggatctctggttaggacacattctccagatttgcgtggtttgttgggagggttcgcaacaagcatgatgaaagccttgtttcattttaattaattaatttagagacagggtctcgctctgttgcccaggctggagtgcagtggcgtgatcttggctcactgtagcctcaacctccctgggctcaggtgatcctcccatctcagcctcccaggtagctgggactacaggtgcacaccactacacccggctaattttttgcattttttgtagaggcagggattcaccatattgcccaggctgggctcaagtgatcctcctgcctcag

SEQ ID NO: 2047 - DNA, 1052 bp, Homo sapiens
cttctagaggcaaccattatctgcagtgcctggctggtcgactttagagtaggaagctcttgaatccaggagcaaattagttaaaaccccaagttccagtggtaactggtataagcaaaatggaaactgaggggctatggaggaatctctgtttgttggaacgtaatgaaaccatggaggaaataccagatttaagggctaagaagctggcccgatgggtaaatcagtgttgggagtcaggttcttggcccttcaaggacttgctatgcaacctcaggcaaattcctctcagtctttgtgctttctctttcttgtctcatctgacagttatgaatataacgtaaaataaagatcaactatcattgataacactgttcctgcaaatgaatactgtgaaacatcagggaaagaggaaaaaattaagccacaagaaaaccatttggcagtgtccttaaactttttttgggggggggcagtgtaaaacatgaaacctagtaagataattgggccattagatcttcatcattaaactcactttgcaaggaagtgtaagaaatctgtaaaacaaaagacattcctatctcagaagctcaaactggtgatttccaactgcctctttacaggagggggctcaaggcttctgatgagcaaaggctgtgtgttgtatgacagtccactctctgcacctacacttccacgtgccacgactgacaacttggttataaccatgaaaataatgaccatacctccccagccagcagggtctggaaggcctgaggaggctcatttttaaacactgcactttaaaaattggaaaccgtgagatgaagaaaaattcaattaagcggaaatgagttttgttttattgcctgctgctgaagggctctgggcatgctgaaagctaaatgaaaagcacatcactggctctcttctttcttggattggtcaattggccctttttgcagtagttgctccaactgttctaaacagtgagtgactggagccaaaaagagagagctcagcaaagccatcccatccacactctgcttggt

SEQ ID NO: 2048 - DNA, 1034 bp, Homo sapiens
ttagcttcttagtttggattagtgctgatccatttcttaaaggttttatgaagcataaatatcaaaatggaaaaatatttgcacagttctttgtaaatataaacgtcttgtgtggattattgttgctacagtattaatattaactgcagtaacaacactgctgcttcccagacaggcggtagaaagcagctgtaggccaacaggagccagactgaagagatccagggaggtgcctccagcacgtacggcccacaaggggcggagtcttaagaagcgtacccaagccccaccccttacagcacccccttcgtcagggcggtgtaggcggttaccatggcgatgacgtccagagggcggggaggggcggggctatggagaggaggaggaagatggcgggcgggctgctctgaagagacctcggcggcggcggaggaggagagaagcgcagcgccgcgccgcgccggggcccatgtggggaggagtcggagtcgctgttgccgccgccgcctgtagctgctggacccgagtgggagtgagggggaaacggcaggatgaagttcgccgagcacctctccgcgcacatcactcccgagtggaggaagcaatacatccagtatgaggtaccggcacggctggggtgtgggaggactcggaggggccaccatctcgccagtcctgacgtccaccgccgccttccgcttcagctggctccctgtgcccgggcagactttgacccgctgccgcggggagccactgcggcatccccgccgcggccggccgcctcccggctccgctgtccttcccctcccccgcagccccgctgccgccggggtaacggatatgcaggcggagggccgggaggaaaggcgctgcccgggccggggccggggccggggaacggtgggagggtgagctgcaggtgggggagtcacggtgcgagggcagccccgggtcgcggctgttccgcgctaatccccttctccccactcgccctgacctctcgtccccaccctgggcgagcgccccctcgccaa

SEQ ID NO: 2049 - DNA, 1057 bp, Homo sapiens
gcatttcttcttttgagaaatgtctgttcagatctttggtccatttcttaattggattattagattttttttcctatagagttattataggaaatattttttcccattctgtgggatgtctcttcattttgttgattgtttcctttgctgtgcagaagatttttaacttgatgtgatcccatttgtccattttgctttggttgcctgtgcttgtggggtattcaagaaatcttagcctagttcagtgtcctggagactttcctcagtgttttcttttagtagtttcataggttgaggttttagatttaagcctttaatccacttttatttgatttttgtatatggtgagagatggggtctagttttgttcttctgcatgggtatatccagttttcccagtaccacttactgaagagattgtcctttctccaatgtatgttcttggcacctttgttgaaaatgagttcagtttagatgtatggatttgtttctggattccttattcttttccattgttctgtgtgtctgtttttatgctagtaccatgctattttggtcactatagctctgtagtataatttgaagtcaggtgatgtgattcctccagttttctttttgctcaggattgctttggctattctgagtcttttatggtttcatataaattttaggattttttttctatttctgtgaagaatgtcattgatattttgatagagattgcattgaatctgtagattgctttgggtaatatggacattttaacaatattgattcttccaatccatgaacatggaatatctttccattttttgcatgtgtgtcctctttagtttctttcatcaatgttttatagttttcattgtagagatctatcacttctttggttaattcctaggtatttaattttatttgtagctattgtaaatgggattgctttcttgatttctttttcagatcgtttgctgttgacatacagaaatgctactgatttttgcatgtcgattttgtatcctgcaactttactgcatttgtttagcaattctaatagtctttt

SEQ ID NO: 2050 - DNA, 1206 bp, Homo sapiens
gggaatgctgctaaaaattctataatgcgcagagcagcccccacagcaaaaaaattatctagcccaaaatgctaatgttactgagtttgaggaatcctgctgtaggccaatatgggcatcaccagtctttagatggtatttcaagctttgaagctatggatatcctcatccactgaactgattttaccattttgatagatacagagaactatttctcattcttgttccccaatgacttattgagagattaaactgcagccatccagattacctaaatatggttgttagctaatctagagtgtggttttgggggaaaaaacaaaaacaaaaacaaactattactataaagtaaaccgatactgtctttatagtcctaaacccttagggaagactttccagatcatcactgaaaaatgctttaggacattggtctgggaaaagatttcatgagtaagaactcaaaatcacaggcaacaaaagaaaaaaaataaatgggtttatgtcaaactacaaagcttctggacagcaaaggaaacagagtgaaaaaagaacctataaaatgagagaaaatatctggacactactcacactacaggggattaatatctagaatatacaaggaactcaaacatcttaacagcaaaaaaaaattgatttaaaaatgggcaagtgatctgaacagacatttctcaaaagacgtacaagtggctaacaaataaagaaaatgcttaacatcactcatcatcaaagaaatacaaatcaaaaccacagtgaggtatcatctcaccccagttaggctgttatcaaaacgacaaaaaacaaaacaaaacaaaacaaaaacaataaaaatgctagtaaggatgcagagaaaaaagaagtcttatactcggtgggaatgtaaactagtacagctactatggagaacagtatggagattcctcaaataactacaaatagaacctttttttttttttttttttttttttgtgaggtggagtctcgctctgtcgccagactgggatgcagtggtgcgatcttgggtcattgcaacctctgcctcccgggttcaagcgattctcctgtctcagcctcccgagtagctgggactacaggcacatgccccacacccagctaatttttgtatttttagtagagacggggtttcaccatgttggccaggatggtctcgatcttttgacctcgtga

SEQ ID NO: 2051 - DNA, 1026 bp, Homo sapiens
aacaatatgtcgtctttctataagactataatttccacttaaggaaaactatgatatgattcactcttgacatggcaaaaaaaagttaggttaataaatttacagcaaagaagaatttttaacaatacaaaagtaacacaatatattaggtagatatcctcagaagcagtttattcgcaatggccatgaaagaatcttcctaaaagtagtagtaagagaatgactaatggagaaaaagggatttgaactggatcttgaagcatggttaacatttagatagccttaggagagggccttctaagcacagagaagcaacaagacgaaaccaaaagaatgcacatttctaagacattcagggaagatttagtagaacacttaaaatgaagcatggagggttatcactggagaatagttagctgtatggataaagccagcttcccaaggagcttaaataatttaaaaagttggactttatttggtagactagtgtattctaagatttggagttactagtttaatgcagactggatttatagaccttcgtgggttccttgttctgattcagaagtatccataaaaatataggctttgtgctgtcttgaactgattaagtctaaggaatgcaggcttcaggtatggtcccattgagtttccggctctactttttaaaatgattcttacagctgtgtcattatccatgttggagttctccaggtatctgtcagcaacaattagagccatatgctcccttcttcaggaatactggaaaaaatagatgcatgattttcaattagctgtatgacccagaatatgcatagaaatactgtctttttcatgtgaaaattcacataacacaaaataaccattttgattgcatttagtacattcactgttgtacaacatctacatctatcaagacacagaagctttttttttttttccccgaggcagagtctcgcactgtcacccaggctggagtgcagtggcatgatctctgctcactgcaacctccgccttccgagttca

SEQ ID NO: 2052 - DNA, 1040 bp, Homo sapiens
tcagatgatcagcccacctcagcctcccaaagtgctgggattacaggtgtaagtcaccgtacccggctgagaagttgttttaatgaaagcttcttgagctatgtatgtggctctcaattcttggaggtagccatcaagggagtggacaatccctagagtggaatgtcatataatagatagatccatgtatcagataaactttgggctatatcagctacagagttttggggggttttttgtttgtttgttggagccagggtctcactctgtcacccaggctggagttcagtggcgctgcctcgaactactgggcacaagtgatacaagtgggtgccaccatgcctggctagttttttttttctttttgtagtgatgggtctcactatgttgcccagactggtcttgaactcctcgcctcaggtgatcctcctgcctcagccttgcagagttctaggattataaacatgagccactgcatggcctcagaatatttaccgtctaattttcaagcctgtctgatcttgtcaaactaacctgttttggtatcatcacttttctttattgtttacctattttgtattttattgatatccactctttattatttccttgctctgtgctctttgggtttaatttatcctgccttttctggtttttaaaagtataagcttttgtctctgctaaaatctctgttgctttatttttggctcttaccatcagccctctgcaggtataaatttcaggttctaaacttcacacctgattgtcaaattggtaatgttctaggctaagtgtcttcagaaagtaagttcacctctcttaagattcttcccctctggaattaggtcttttacctctagtttttgctctttcagcagctatttgctaccttgaaacaaatgacttaggtatattattcagttttctgtttgtttaacttgtaggtggtagttggcctccaggtcctccttcttgcctggaagtgaaccctccttaaatggattatttttcaatattcagtaatctgctcgtcttctaga

SEQ ID NO: 2053 - DNA, 1030 bp, Homo sapiens
gggattataatatacatacttcactttaaacagtctatttaggattaatattttacaattttgtatagaacatagaaccctttacaccaaataggtctctttccctttcctcttaagctgtgattgtcttatgttgacatccacatacattgaaaactccattagacaagattatactttttgctttcagttgacaaagattttatagaactcaagaagaatagttcattatatatatatacccagatatttgctgcttctgttgattttccttcattcctgatgaggttttgagtttcctgattattatttctcagctatccaaagaaattcctttaacaatttttttagagtagtctactggctacaaattctcttagattttctttctctgagattatctttatttcaccttcattcctgaaggatgttttcaatggatatgtattctgggctgacagttcttttcttgttgcactttaaaaattttgatctacctccatgtctggacattttgatgaaaatttcacagttgttaaaataagcaatgagttgtttttctctggctactttcaagagttaattttgtctttagtattttacagtttgattatgatccatctggccttggacttctttggatttatctcatttggagtttactcagcttcttgaatatgtaggtttatgtctttcaccaaatttgggatgtttttaactattatgtcttaagattttttatgtactgcattctatttcttttcctttgggaacttggttgacatgaatgttagactttttgcagtccctcaagtcactgagatcctccctcttcctctccccatcatttattcctctgtggcttagattgaataatttctgttgatctgtcttcaggtgtactcactctttgctctgtcatctctattctgtttgctggacccatttggtgagtttttattttatttgttaaatttttcagttctaacttttttatttagaactttttttaatttagaatttattttta

SEQ ID NO: 2054 - DNA, 1036 bp, Homo sapiens
ggcttctgtgttttgtgtaatattaagaaggccttccccatgtggaattattgaaatgttctattttttatagtattttatatcatctctttaactccattttgagtttcttctaaattgatggctggttcacccagccctattgatgtataattcattcttttctcactgagatttgaagcctcctttattgtaatctaaatttgtatacattatgcagatttacttctagactctgtattctgttctttttgctgtgtttttctcatttatttactaaaagtatacttttaattacagtagtttaccaagtcttttgaaatctgagaaaacaaaaacattgtccttcatttagcttattttgcacacaattcttgctgttttatttatattttttcgcctgttagtttttttcgtgtgtgtgtgtttgtgtgtgtgtgtgtgtgtgtgtgtgtgtgtgtgttactataaccttactctaccttcttctgattaatggctattttatgtctgaactagaaaactaaacaaactgccagtattttagataaaacaatctctctctctcttttttgtttccttttgagatggagtcttgctctgtcacccaggctggagtccagtggtgggatctcagctcactgcaacctccacctcctcccaggttcaagcaattctcctgcctcagcctcccgagtagctaggattacaggcacgagccaccatgcccaactaatttttgtatttttagcagagacaggacagggtttcaccatgttggtcaggctggtctcgaactcctgacctcaggtgatccctctgccttggtctcccaaaatgctgggattacaggcatgagccaccacacccagccagataaaacaatctttaaagcaaagaaataaattcttaggagactgattcatgggtagaatattcatgctttaacacatgaagtttatgtatattttagtttctcagaggcctggattttttgtttctgaattcttggtgatactataaatagttgatgttg

SEQ ID NO: 2055 - DNA, 1076 bp, Homo sapiens
atatacagataaatgtttgttttatatatgtttgtatgcatctatatgtgtgtgactacacaatatatttaaataatttaagatattttttcatgaaacagtacatctttagtacttgtagtatattgttttctatatttttctattctatttgattttttaaatgctaattatgatccactaaattggttttatgacctcatattgggttgcaaccttcagtttgaaacatgatttctttaagttaggtcgcttctcaaaaataattttaggctagctactattaaaaattttggtgctgtaatttgatgacttcctgttttgtgtgtgtattggcagggccagtgaggcacgtctcttgatgtcctcactggtacaaattggtagtctctagagtgactcctgccagatcaggaagtggtaggtaatacgaagaaatgattcacagaaatagaatttgtttctggtcctcaacagtatcttttttccctcatttagccaccttctccccagaagattgtagactgcagttgtcagacactagggcacaagaaaaactataaacaatatggggtgagttgagcttaataactcacctccacccacttatatctcacacattaaatagctaaaaatgctccatttttaagtgagatatttttgactaaaacctttcaatgtccctaaacaaattgctatattttattttgtctgtttctagtcatatcaaaaaggccaaacaatcaaaatatagcatgaatgctgctaaaatttggaatttttttcttgccgatgctatttactgtttaaccttcctaggcttccacacacttgcttataaaacaaacagattgattcccaaccctctagggttccacatgttaggatcagaagctattttcaatattcagaaaacctgatgtaagttactttgttagtctttattgtttattatgtatctttggttaaaaaattgacatttatttagatttatagataaaatcagtatttgaagatcataggaagagaagggaattgtgaaagggaggggtcctttgtggtaaaaacattgctaa

SEQ ID NO: 2056 - DNA, 1122 bp, Homo sapiens
aataaaaatatatatctaatatgattaaaaatgtaaaggagagcatgaaaaccataaacaaagaagaaatcattaaaattgactaggcattttttttaaaggaccaattagatcttttacaaatgaaaatataatcacggaagttagtatcttaatagatcaatcaaactgtagatttaggtagacttaaagggacaatttataaactggaagatagagctgaaaatttactcagaatgcaacacaaatcgataaagagaagaaaatatgagagttgtaagagacaaagtaaaaaggtcaaggggttataattggtatctttattttcccaagacccgttccatatttcctttgccctcagccagaaccccaactggttattaggtgagatgacctagactttaattcctagaggatctgaatctcagtagttcttttattaattgctgtagggtttttttgtttttgtttttgagacacagtctcactctgtcacccaggctggagtgtgtggtggcacaatctcggctcactgcaacctccacctcctgagttcaagtgaatctcatgcctcagccttctgagcacctggaatcacaggcgtgcagcaccacaccctgctaatttttgtaatcttggtagagatctgattttaccatgttggtcaggctgttctccaactactggcctcaagtgatccacctgcctcagcctcccagagtgttgggattacaggtgtgagccaccatgcccggcctgttgtagttttccattaacatatattattggtcatggaagtaatgggaggtgttccagaatctcctgggttccagagcttgttgctcctattatgtttcagcagttcacttttcccttggtaatcaggatcagtcaaggggtttacttttagccagtaaaccccttctttgccattgtttcattagtacaaagaacccaaaatggccaggtgacagtttcatcttccaattcagtagaaccattgttgtattcctctgatggaagcattttccccttgagaactaaccaacagtcagagtttaagttgtagattgggaagcaaaaattatgtgagtggattattacttacagtattgagaggaa

SEQ ID NO: 2057 - DNA, 1020 bp, Homo sapiens
gttaattttgtagaataaacataactaataaacatgaaaaattttccactttggtaataaaaacagaaatataaattaaaataatatttaatcaaagaagtgatgatgcctatcactggcaagggtacggagagatgaaaactcattctgttggtagagtataaatttgtaagcaatttgggaattctctcgaatcttaaaatcattcataccttttgacctagtaagtacctttccacaactttttcctaaatagagaattgggcaaaaatgaatgtatctttgtaacattatatagtaaaaaactgaaataatctaacaaatgttcagcaataggagaatagcttacttacagtaactgcatagtatatgaaatattatacagtggcttgttaaaagtcacacagtggacctgcaaatagtagatgaagaataatgactgtgtgtgtgtgtgtctgttttcacagatggtcttgctctgtcacccaggctggagtgcagtgagtagcttggtcatatctcactgtagcctcaaactcctaggctcatgggatcctcccacctcagcctcctgagtagctgggactacagggtcgtgctaccatgcccagctaatttttattattgtttttagatacagggtctcactactgttgcccaggctagtctcaaactcagtcttccaaagctgacctgagcctgctgacacacttaaattaagagcaatgtggactcggccaaaatacgaaaataatttctctctgccagaaaatcgaaagtcattcttgaattggagggaaacaaaactaacatattaatgttgtttcaagtgatggcagaatcatttgacatgattaatttgcttagtgttgtatccttttttaggtcttaagaaatatcaagggggctgggcacggtggctcacgcctgtaatcctagcactttgggaggccaaggcaggcagattacctgaggttgggagttcaagaccagcctagccaacatggcaaaaccctgtct

SEQ ID NO: 2058 - DNA, 1050 bp, Homo sapiens
actaagaactattgcaggaatagggaaagttgtctttgaagtgtcagaccacagttttttcacaagtgaaactttgtaaaacctttcaaaccttcaaggaatggtttgtgccatttaaaccgtttggaaacgtagaaggaaagcatcttatttctctttacaaaactagcataattctgaaaaatatcacactcaataaagctgtagtctaatgttacttattaatatacatacaaaaattctttaaaaaaattgatacaagataattatacatatttatagggtacatagtgatgttctgtatatgtgatcagatcaaagtaattaggatatccatctcaaacatttatcatttgtgttggtaacactcactatccttctagctatttgaaactgtatattattgttaactgtagtcatcctactgtggtatagaacactagaacttattgctcctatctagatgtaattttgaatcctttaacaaatctctccctatccttctctcccctatgcttcccagcttcttgtaacctctgttggactttgtacttctatgagattaacatttttagcttctacatatgagtgagaccatgtggtgtttaactttctgtgcctggcttatttcacataatgtaatgtactccagttccatctgttttgctgggaattacaggatttcattcttttttatggctgaatagtatgccattgtgtatatacaccacattttctttatccatttatctgtggttggacacttatgttgatttttttatcttggctattgtgaatagtgctgcagtaaacatgggactgcagatgtctctttgttatactgatttctttttctttggactgaaatgccaagtagtggaattgctagatcacgtggtagttcctatatgcagctttctgaggaacctccatactgctctccatagtgactatactagtttacattcccaccaacattataaaaagtcttaataaaatgtttgcagctagaactgagcagtatattaaaagaataatataccatgacta

SEQ ID NO: 2059 - DNA, 1085 bp, Homo sapiens
aagggataaatgttagtaatgtatttttttttttgagacagagtcttgctctgtcacccaggctagagtgcagtggtgtgatctcagctcactgtaacctctgcctccctagttcaagcgattgtcctgcttcagcctcccaaagtgctgggattacaggcatgcaccaccacgtctggctaacttttgtatttttagtagagacggggtttcaccatgttgaccaggctggtctcaaactcctgacctccggtgatccacctgccttggcctcccaaagtgctgggattacaggcgtgagccactgcccccggcctagtatgtacttctcaaccatgttgttttaaccctgtcttcccttttagaaaccatcatttgttcttggcgatgggaactaatgatggaaagcctgaattgctcctccaaggtgactgggttttctttatggcaccaaataacctttccattccttctactcatcactgattggatttgggagtgtgaagtgagaggaaatgggtcatttgacaactttggtggaaagcttctcagaataaagatgtcagaaatattgggaatgaaattaataattataaaactgttccatcttatcactgggttagtctgagtctctcttactgcaacttactaggcatgataacctagcctcagatcctgtgtgatggggtcgacaggctaatcccactgtgatatggcatttgatggacatttatttccttgtacttttttaaaaaaaagtagagttagttcagttcactgaataaccaaaggatttctgatctcttgccctaaatattttattcttctcctgtttgtgaattttttattcttctagacttccttttatcccagcagtccctgaaaaaagacaggaatgaaaagaaacgctgatccaacctttccgtgactatgaaagaggccattactatgaggtgcagtgctccggtggggagggaggcctgcttcccaggattcctggcactctttccagtaatgagcagtttgtctctcagcctttgaaccattgttcaaatttaaaattcaacccagtggaaagccttggg

SEQ ID NO: 2060 - DNA, 1041 bp, Homo sapiens
tgtagcacaataccaaaaccagaaaattgacactggtgcaatccatagagcttcagatttcaccagtttcacatacactcatttgtgtgtgtagttccatgtaattttatcacgtgtaaatttgcataaccactgccacaatcaagatacagaactgtcctatcaccataagaccccttgtgctaccctttatagccacatctactatcctctacccttgccaacacattcttctaattttgtcatttcaagaatgttaaataaatggaatcataggatagaaaactttttgaaattgacctttcttcacttagcataattgccttgaagtctatccaggttttccatgtatcagttgttcattcctttttatttctgaatagtattccatggtatggatataccacggtttgtttccatgcactccttggaggacatgtgaatttttttcagtttgggttactacaagtaaggctgctatgaagaacatttgtgtacaggtttttgtgtgaacataaattttcctttctctgggaaaaaatgctcaagagtgcagtcgctgggccatatggtaagtgcatgtttagttttataagaaactgcctacctgtcttccagagtggctgttccattttacattcttgctagcaatgcatgagacttctggtttttccatattcttacctgtgggcttagaaaattaaataatatacaatgaacattaataagtatcttattaattaacaaatttatctcgaagttataagacaataatgtagacccaggctgggcatggtgactcatgcctgtaatcccagcactttgagaggttgaggcaggaggattgcttgagcccaggagtttgagactagcctgggcaacaacgcgagactcagtctcttttaaaaaaaaaaattagctgggtgtggtggcatgtgcctgtagtcccagctattcaggaggctgaagcaggaggatcacttgaacccaggaggtcgaggctgcagtgagctgtgtttgtgccactacattccagcctgg

SEQ ID NO: 2061 - DNA, 1099 bp, Homo sapiens
aacttccaatctgcttttagtctcatgtttgaactaggaaatacagagcaaagctacatgcaggacttggtcttgattttaggagcaactcttgctgagaacatgtctgtttgcaaggaaagtatcgtgttgtctttctactgaaaacagtcagtgtttctcaagggcttacctgagccaagactcttggggaagaaaaatagaagatatggtctctgtacttcagaagtttattctcctatttgggaagataagatgaacaattagaagagcaaacaaaacaagatagcttataactaagtactacattatgtgggttagatttaagtatagtgggcattgcatttttgaatgtgccagtaatgtcagaactatagcataacccttcttgttggtcacctacagacatcactttatttgctacaagaccactatcttttgtagaattgtcatcaaatactatctgattatattttattttcattttcaattgttagacattaaatttgtggtctgaaattgcatttgtggctttttatgtcttatagctcaaaaaacaataatgcttctagaactagcaaatgtcagagctgtgagttgaaccaggtggtctgcctatggaactgaggctgttaaccagtctgctctgttgcttcttgtggcccatccagagtcttttacactgattatgggcaggtacactctctgccagatggtgagagatcctttggccccaaatgagtggtgtgagttggactcttccagcagtgcgctacccatctgtggaagccatcatccagtcacagtctgaacacctcgttcagtcacccacatattcttcgctcttgaattgaacacctggtgtcaagcagagggctcactgcagagagcaaaggcaaatgaaacatccctgtcctgggagcctgctgtagtggggaagagggaggtgaatatgcagtctacatggttaactagaactaggaaaactggacaaaactgggcaaaattaggatataaaaagataggtaaatctgaaggtagttatgtaaatcatgatgaaaccttaagacaggcttgttttaggtgagattctaagaat

SEQ ID NO: 2062 - DNA, 1045 bp, Homo sapiens
tatatgtggttttttggagagactcacctccacatctttctgcacatctctttatttctcttctctctctctgtatccagatgggctttctctgctttagcatgcacatggccagtcatggctgcccaagcgtggcatctcgggacatcattagatagcactacctaggcaagtgtccatgtcaggtccaaccagaagcatgtggcccaatgcctacttagcaaaagacaggcaattcaattagcatgtccactgcacatgttaacctgattcataagaatatgcttccaagcagattgaatgaaatttttgcattaactgaaaggtaccaggggagcaaaataacatttataacatgtcttggtgagcctggctgtgaggaagagtgactgagttgaataatataaatggcttgttcaccaagccaagatggcctatgacagccattgtaacttcaggggtatttctactgaggaaatttgaatgtgtatttgttgaccatatgtattaattcattctcacatcgctataaagaaatatctgagaaatttataagaaaagaagtttaattggctcacagttctgcaggctgtacaggaagcatggcagcgtgtgcttggcttctgaaggaaactttcaatcatggcggaaggctaagcaggcacatcttacatggccagagcaggagggagaggaagtgaggtgccacacgcttttaaataactggatctcacgagaactcactatcgcgacaacagcacaaaggaggatgtgttaaaccatgagaaactgcccctgtaatccaatcacctcccaccagccccacctccagcactggggattacatttcaacctgagatttaggcagggacatagatccaaaccatatcaccattaaacctttttccgcctggaaattctttcttttttggctcctgctttttgtcctccatactaggcattttaattctgtcaacataatctataagcaaagtacatttggttagacttcgtttctccctagttataatcacctttctgtcta

SEQ ID NO: 2063 - DNA, 1647 bp, Homo sapiens
gaatttaggcctccacggtgggtgacttggaagttacttttttaaatcttagtttcttacttcctgaaaagacaatgatagtacccaccatatctgtgtgccattgttgtgaggatgaactgagttaaatatataaggtgcccgttgtagaatatagggccttatataaaatactttgtaagaaaagataaaaatcactcttagtccccaaagataaccattttagggggtatttctttccagtcttgatcatgtatatgtacttttcatgaagttcaaatcataccgttttgtatcctttttcttacaacatataaacgttccaattatgtcgttaaaatttatggggagtcttaatagcaacatgatagaatatcctatgtttaacccagattcagtaatctagataattggttcctcccagtttttgctattataaatgctgtttttaactgacttttgttttcttagatctgaagaagacacttgaatcatgggtgacgttaaaaattttctgtatgcctggtgtggcaaaaggaagatgaccccatcctatgaaattagagcagtggggaacaaaaacaggcagaaattcatgtgtgaggtactgaagaatacagtttgcatttatgtgatttatgaggttcattttggggttaaaagaaaaatgttttctgtttggagatgttaatgtgttgcacattaggaaacgacagttctttattgtgacttgactgctattgtaaatcattttcaagtcagcattacttttaaaacaatctgacaggtaaattattctaattagagcctatatcttcctcagcttcctcagtaccagtagtggggatgggaaaagttggatcaactgtttgcagttttataagcacgtttagaaagcagagcaattcttgattgcttcaaatcaaagtgcttaaatacaaatggagagcttgttcatggatattacagaatcagattttaatgtgaaccttctgttatatgagaaaaaaaaatctgagccacttaaattatttttggatacaacacaatttaagctttttcagtagctcatgcattctcttatttttatatttatatttatagagtatatttcctaaagttagctgtttgttgtctcttaatggactactgaattacgactttttaaaatctcagaattacccaggtcagtctcttagtacttttttttttttttaaaggttcaggtggaaggttataattacactggcatgggaaattccaccaataaaaaagatgcacaaagcaatgctgccagagactttgttaactatttggttcgaataaatgaaataaagagtgaagaagttccagcttttggggtaagtacctatggcgaagcacttgagatgtatgttgtaaagttgtacaaactcaatatgcgtaagagactcaagatagtaatttttcactgttttcagatatatcgtgtttcgtaatgaaatttggcatcttgttttgtctcagcactggacaaaatttctgaagatgtggattgcatccttattatatacctgtcttaggggcttgagaaattccattaatctttgtgtcttatggctttatttcatgtatttatacaccagaaatttcagagtctgttatgtt

SEQ ID NO: 2064 - DNA, 1027 bp, Homo sapiens
agtcttgctctgttacctagggtggagtgcagtgctcactgcaacctccacctcctgggttcaagcagttctcctgcctcagtctcctaagtagctgggattacaggcacctgccaacatgcccagctaaattttgtatttttagtagagacggggttttaccattttttgccaggctggtctcgaactcctgacctcggcctcccaaagtgctgggattacaggtgggagctacggcgcctggcccacgcccagctaatttttgtgtttttagtagagacagattttcaccatgttggccaggcttgtcttgaactcctgacctcaagtgatccgcccccttcagcctcccaaagtgctgggattacaggtgtgagccactgtgcccagcctgtctatgccagttttaacagggtcctgttactgaatttttgtattctgccttgtttatgacagtattctgactcgttatgaaagaaatcttatttccttccattcctttgactaagaactcgatagacttactttccggtagattaactgctgggtaattatagtatcttacagtctttaattttattggtttgcctatctgtaaaatgaagggattgggcaagatcatcttaaaaatgccttctggtagagaaaacagttttgcaaatgtcttttacatgtttgaagtctccctctattctttatcttttaggctcttctctatggtcttgtagatctgctagtgacaaattctcttattctctttctgaaaatatttttattttaccttctttaagaatattttcactggatgtagaattctggggtaccagatatttttttccctcttttggtatgtaagtggaaaaaaaaaaaaacaattttcctcttctctcataccacaacaatcaacaaagaagatttctgtgactaaatgtggggtggaggtgggggactttttccacacaccccaagcaagcaatcagttctgcagcagtcactagcagggtatcctccagttcaactctgacac

SEQ ID NO: 2065 - DNA, 1027 bp, Homo sapiens
tatgacactgtctacttgctgttttctgtaagaagtcagctataatcaaatcactctctcccatatgtaatgtggtagtctgtgtttttaagatcttttcctgttatttttggtttttagtattttgtgttgtgaccgggcatgggtttttttgtatgtgtgtgttctaacttgttcaaggtttgctgagattattgaatccatagatttatgtatttcaccaactttgagagacttagctattatttaagatattttttgttttattttttcttctttcctcttggtgtttatatttataaagacttgatatcccacaggtccctgaggctctcttttttttttcctatcattttttccactgtttctcaaattgaataatttttattgattatcttcagattctttgatagttttttctgtcccttccattttgctaagcccacccagtgtatttcagacactacctttttcacttttaaaatctccagcttattcttttctgtatgttttctctggtggcatttcttttcattcgttataagtgtatgtttgtaatataaatatggatttcttttatgtcatgaagcttaattctaatagctgctttaaaatccttgcctactactactaacatctgagtcatctcagggttggattctcttgataggtatattttcttgaggttggatcacattttcctctttgtgtatcaaataattttttattgcattctgggcattggaatattatgctgtggagactctgaataatgttatactcctccaaagagcattgatttggtttttttgttttgttttgttttgtttttaatcaggcatttaatttaactggactcaaactgcaaatgctgtcttttggatgttaactcagatctcacctcagttttctgatcatttaggacagccatggaagagtccttcaggtctcctttgctgggcagcttggaatctgccctgtacatgagtggttttcaagggttagccagagatttcaatatacagaa

SEQ ID NO: 2066 - DNA, 1055 bp, Homo sapiens
gatccagttacttctcaccaggccctacctccaacattgaggattaaaatttgacatgacatttgggcagcgatacgtaaccaaactgttaccagctaccatctttatcttacctcctcattctagggaaatcctttttcataatcacttatttcatctggaacttaccctttcatgccataaattgcatttgccaaaagtgagcatgtagaggatattttaaaattttttttgctgtggacaattgtagatgtgtataaaagaataatatagtgaaactccatgtttccgtcatctggctgcaacactttcaattttactcatttctaactactcccctttcttagattattttggagcatcccagacatcttattcatctgttaatatttcagtttttaactaaaacataattctttttttaaaaaaagtattataatcaaacctaaaagaaaaatttaagaatagtgtcaatataatgagatatccaattaatgtttacattttcctgatttggtaatgtctggagatgtttgaacttgaaggaggtgtgttgatggcgtctagtgggtggaagccaaggatgttaaaaactatggtattcagaacagctttctgcaacaaataattacctggttgaaatgtcagtggtgctaatgttgagaaacattggtctgtaacctcaccactggttttagataccttagtattcttttaatttgctttttaaaattatgagtgaagtcaaacatcttttgggctttaaggatcatttacatatatatttctctgtactgcctctacatatatcttccctttttttttaattggattcttggtcttttcctctgtgtttgttaatatattagcaatattaactccttacctgtgatgtgtcacaaatattttttctcagtttgcccattataactttatttttacttgtgttttttgccatatcaaaaaaactggttcattgtaaagtgtacacacgtaccccccccccttttttttttaatttcatcagcgttcagctttattgataacatcctcca

SEQ ID NO: 2067 - DNA, 1487 bp, Homo sapiens
gtaataccaacacttcgggagatagaggcaggaggatctcttgagtccagaagttcaagaccagcctcagcaacatagaccccatctctacaaaaataaaatagaaatattaggtgggaatggtggtggctgcccgtagtcccatctactcgagaggctgaagtgggaggatcacttgagcccaacaggttggggctgcagtgatctgtcattgcaccattgcactccagcctgggtgatgcagtgagaccctgtctcaaaaaaaaaaaaaaaggttttaaatgggaacagattgtgagaatagaaaaagaaataaatggactatagcattgccaatgttgctaaaatctgtgtatttttgtttagatagttacatgtgtattttaatgtgataaaatatatattgtgtatactattttataacctacttgaaaaagtattttctcacattgctgactcttccttaggcagagccaagattatgcactgtgacactttcaatactcttatacctcacctattttaattgattttgaaatgttaaaaaaggaaatcctccccatcactggaaaatagaagttacatcagacacctcaattctcatacgttaggaattttcttttaggttggtgtagatagagagtgaggtggaggggaatttgaggtcctggagtggcaaggtggtagaaagaggaggacaagttagcattgtggtgccaggactgcccagtgaatttttcctgtgccttggttattagggctgacccttgaataggttctactttgtctccataaccccaaccttggaggaacactatccttcaaggtataagctctctagaagaaagcagaaaagaaaaaaattcacaatgtactaataacacaacattagacatgttgctatatatattggcagaagcaaagtggtaatgtgaaaaagtaacaaagcgcccaaaaaaccctaagagacaattggaaatttgaatttagatctaagtgaaaattttaaattatgatcatagactatttagataagtgtctggcaaaactctggagtggtcagaggaacaatcatttattcaaaataataatagttatactattgcacaaaaaacagctttttgaatgaattagctttcatctcagaatgaaacaggagaaattaatagcgataaaatcagaaattgctgaattagaaagtaaaaataagtcaaatttttaaatgttctttgcaaacagaaatagttcatcccatctagttaaggaaaaggttgtatagatctcagttcttcatcctaaaacccatgtggttagatgggtttaagaattcagaattttccttagtttagaaaaccaatatattttatgtaacagcacatctgaggcaaaaccctgtaattaaactttcttaatacgtagtactaatgatcttataagagaaaaatatctattccgtgatcatcttaataaaggcttttgaaaaagta

SEQ ID NO: 2068 - DNA, 2546 bp, Homo sapiens
tgttgcatcctaaggctgatgataccttaggcttgaaaaaatatgataaattgacatttttctgggaaaggattcctagcttgttcacaaaattttctttgattttccgactcacccctaaaactggctatggattttttgacttacagtgaaggctgcagccccagatgtcatcatactccaataaaatattcttactcttaattcttacctcatctttcaggaagaacattgttcaagagtgcaattttacagaagagaagccttgagctcagctctgctctgctcttctcttcccttcctctcccttctaccactatccatttctaatctcaaaagcagttgtggcatatagcagaaagaagcagaatttaacaagcgagctgtgaagacaggagtctcaagttgtctgcatgtcataaatagagtaaaaattcctgcccaagtgagaagtgctttgtctcactgtcttttaaaatgttcagtggcatggaaatgtattagcaaacctgtgtcttctgatttggggtgaattacttataactcatattgcatctacattctgtggcttgcatgtttttgtcctagcgtttgtcccaaaatcagtctcatacctcttacctgtaacaagtcttcaaaattttaaaaacctatattgtgtcctagtatgtacttagtttgaaagtctcaactaaacatttatagttcagccatgaaggtacagtaagtctaagatttaaacacactcaaattcatcagcacctacctgtaatatgaaaagtaggcctgagcatgctgattggttattacagaatacagttttttattatttttgtttttaatatactgtacttcttttggcacagtctgagatagcattagttatttttgtagtactaccactgttgaatcatttttccattatcttgcacttgtagccatctataggaaaccacatgaagtcatcagttaagtattagaaagtttttttatgttcctgattttaagtgtattatctcagttcacagagcacaagtttagagttatggactggcgtataacagaatgagtagctcaaaccatgacatcagccttagtgtaaattctcaaccaaactcactgaattttatccttcggtctatccatactcaagccacttaaaacctgtgggctgtatgcagaaaattttaagtaggaaatagttgtcttctacctttaaagttatttgaaagagatgaattgtaattgtaggatgtaaatcaagcatattaatgtaattttatcaatcctgtacttaccccatagtaccatcatttcaggataagaacggttctttgtataaaataaattcagaaccttagaagatagagatagtggagcctgatacattttgtagtatctagtgcattaggaatcttgacattttgtggcagcttagtcatgttactgtgtatataacgcttagatgtgaaaaagcaaagttgggaccttttagaacttcagttttgaaagatggaagaaattgctgtagttctgagtaaatggcaagaggtgtacattaaaggtatggattctagaatactacaaaataacagtttgggagagatctccaacctcttatggtatagaaagtgttagttacccagtacctggtacatagtaatttcagtgactgcttagtacatattattagagctacttcagttaaagcagacagaagtgtggggaagaggttagcacttgaaattacctactactatggctggactccaggcaagagtagtaaaattctaaagagaaaatgagataagcagatgtatgcaatgaaaattaaaagcacatatctggaggacagttggaactattcttccagctttctgttggaaaaatattatcctttgctttcatcactggtactttctaactagtctcacttttgtcggttattgttttatttttaacatatttagtaatccaagtgtaacatagttaaaataataaaaagtaaaataattggagaaaggattatattgggagtaaaggaaatttgaagtcttaagtcatttatgtgtccttaggcaaaataacctttttgaacttgtgtttttaatctactagaatgcagcaggaaaagattttactagtattctgaagcataaataaggcatatttgctgccatggtttttactgttatattacacaaatacgatttctagatgtctctgtgttcttggttcttatttatatttgagtaatatagaatatgtatatattccttataatagaagtggccgtgcaggtatagatagaacttgttttacctatgagccttgccttgtatttattcactgtggcagaatatataaaataattattgaagcacagaagatcaagggaaaagtgatagattatttaagggataagtagagcatcttcatacgctgtacagtggcatgcagtctgagaaaggtttaaatagtcattgatacgctcacgttaggcattgttttcccacacaaaatgcctgtcctgtgaatatttctag

SEQ ID NO: 2069 - DNA, 1580 bp, Homo sapiens
tcgttgcctccagcattcctcctgccttggcctcccaaaatgttggaattcactggctagctaccataccgggcttaaagattttttctgatattttgatatgtgtgctgggatgaacatacttgtatacgcctttgatcaattggattaaattcctagacatagaattgttgggtcagagggtatgcatattttaactttcgtgcattttgccacactcccctgaagaaaaatgacagatttctagtcaaatcaactagggatgaaaaacacttgtattttaaatgttttttgtttaagtcaagggctattgaggaaactggaagttggtaaatcagagaagcatataaaatatgggaaagagattgcggggtcatttatttctttgctgttgaaatagttgtcatgatattaatgttctagtcgtacttagagaaattcagcaaaaaagtgcttctgatcatggtttcttagcacctcctgtattagtatttaaaacctctatcatgtcttccttgggatttaagacgtttgtgttttatgggtagttaagaactaaaatagataactgcttgagaaactgaccatctcctgcgcatattcagtttaggagtgatctggaaaccacaaggatcgtagacttgaaaataaccccaaggtgacaaagcaatctctgagtaccagtagcatgtgaacacacctcagaagagtcaaatatcctaatattttaagtctttctagaagccagctgttagtagaagtgttagaaaagaaaaaaagaaaaactatagggaagacagtagtagaaaagggggacgataggttgtagaatacaagcaacttttggaaaggacgcagaaaacttggtggttacattttgtacctttagtgaaataacattttcacattccttaactcaagtatgtagaattctcttgatggacagatacagagctcatactttcatgtaacgctatttttcagggtaactgaggtgcagagcactgtgtctgtatctcattttattctcactaattaaatctctggatgaaagtgcgtgtatatataatgtgttgatatttaaacagctgatctgacttacaggagttgaaccttcagaactttggtaatttctatgaaatacagagaaattcaagaaaatggtgacataggtggaaaaatccttatccattgctaaataagattattaaaaggattgtttagtaaaaagaagatagtgatcagtaagagctaccaaaattctacacagtatgtttaacaaagtagctttcaatcttttatctttatgggcaggataaatatgagccaggtgatagtatacacaagcaaggaactgaaatctagcctgtcatcaggaacttatagacagaatcaaatccaaggcaccttaaaagcatgcagtatataaatcttcgtgtacctctgtagctatacattaggcatgtcctcatagtatccaccaagtaaagatcgtttttgtacttagaagacatggaacacttcagaagagttttcataaaaagatccaacacttaaacattaatctatagcattcccct

SEQ ID NO: 2070 - DNA, 1036 bp, Homo sapiens
tcggctcactgcagcctctccttcctgggttcaagtgattatcctgcctcagtctcctgagtacctgggattacaggcatgtgccaccacactgggctaattttgtatttttagtcgagacaggatttctccatgttggtcaggctggtctcgaactcccgacctcagattatctgcccgccttgacctccaaaaatactgggattacaggtgtgagccactgggcctggccaatagcactcatttctaatcacaactattaggctacaactgttctcaaaaattgttattgttatcttaaaaattgataaaagatccattgtggtcctttatcttggcacttctgtgagtcatctaagaaactgaatttaattgatgtcttatggctgtataactcttttaggcatagcttgttatataaacttaatgtaatttcaaaaattttgtgtttgttttttaatagactgacttccttttggtagtactgcgtgatgttgttcaggcttatcctgaagttcgcattgttcttatgtctgctactattgataccagcatgttttgtgaatatttcttcaattgccccatcattgaagtttatgggaggacttacccagttcaaggtaatattgtgggggtggtataggaacatcttttgtgcaatagggtttgtattttcttaatcctggagattggagttacaatttaaagaatacttaaaatacaggacaaattatagtatcaaatgtatcatagcatttttgaggagtttctcttctgttattttatacagtagtgagtacagtctgagaagtgagaccaggtttcatttactacttgagtagtttgcatatgcagtaagtttccaggcctttacttataaagccaaacttttaaaaattataaagtatagtcaaagggaaatcactgtggtgtataggtaattatgggaattactgttaaaagtttaagcagccaggatcaaattaagaatcctttttagagcctgagcaactagattttgaattaagattaaagg

SEQ ID NO: 2071 - DNA, 1140 bp, Homo sapiens
tatatattcccgactatttcttagttctcgtgaacactggtctagttcccagaatgagtactttgctgataaccttatagtggtttgcaaagtaatttattagcatttagacttgaagtaaattctaccacattaaattttaaatgactttaatttatactttcggtgtacagatgattaaaggactttatgacatctaacatagaaaaaaaccaacccatgtttcttgatgagctgtagtacttttcttttccaactaggttaaaatatagaattacttcctaaaacattgagaactggaatgcataaccagaaataagactgttgagagacagaaggtagttgggcaagatggtaaatttttaaaggctgtaattggaataactaaacaaagtagtgagtggttctcttctgtcataagccagccgaaattttagtttttcctcaaaattataagaaagggaaaacttcatgtgctagaatcttgagatgaattttacaggtaatgaaacaggcaccaaggtataaattgtctttaattcatccaattaggaggctataagactagaactcgtttgtctagaacaaaatatgtctgtgctttcagcggttgactgtcatgctttccagtcagtagctaagtactcaaagtgtagactgggtaaaaacgtcagccttcattccagtaggtgtcctcttagattatctccatcttctctacaactaacagctatttaagagtagcagataaatactttgtggtcctatcagtcaagctcttattctcagagtagatggttgattgggggactttaaaaagtaatcaccccggccgggcgcagtggctcacacctgtaatcccagcgctttgggaggccgagtcaggtggatcacgaggtcaggagatcgagaccatcctggctaacacggtgaaacccgtctctactaaaactacaaaaaattagccgggcgtggtggcgggtgcctgtagtcccagctacttgggaggctgaggcaggagaatggcatgaacccgggaggcagagcttgcagtgagcagagatggcgccactgcactccagcctgggcgacagagcgagactcgtctcaaaaaaaaaaaaaaaaagtaatcaccccaag

SEQ ID NO: 2072 - DNA, 1042 bp, Homo sapiens
gctgctaatctaacttaattatatactaattatatctaacttaattatatactatatacttaatcttaaattgataccagtagaagcaaatgcattaggaatttgagccatgtctaccactaggcacaccaccactatggaatcagaatctaagtgaagcttgagtaccctttcacatactctgtatattgattcaaaactagtggtaagcactgggcaaaaatggaatagagcttaatggacagccagtaggctcagccatcatattcttgaaaacctagaaaatgccagtattctgggtctcttaaattcattattttaaagtctggatgatctggctgggtgcggcacatcacttgggctcaggaagttcaagatcagcctggacaacatggtgaaacctgtctctacgaaaaatccaaaaaaattagccccgtgtggtagcgcacacctgtagtcccagctattctggaggctgaggcaggagaatcacttgaacctgggagttggaggttgcaatgagctatcacgccactgcactccagcgagggcaacagagcaagactctgtctcaaaaaaaaagaaagtctgaatgatccatattgctggactttgttttttgtttattatatattgcatatatttttattatattttatttggcttgatagactttttggcttaagactcctgctcatagctagcagtgaattttaagaagctagtgctgattataactactcttcatatctgtgtttgcctaagtttggggccattataagtagtttttttttttaatattaatgcttaagaagttaaatttattctataatgtgccatgtgtgaagttgagagataatggtctttttctacatatactccctctcttatttttaatgtatttcgccactttaggattaaactgcaaatatctcatgaagctgctgcctgtatcactggtctccgggcagccatggaggctttggttgttgaagtaaccaaacaacctgctatcatcagccagttggaccccgtaaatgaa

SEQ ID NO: 2073 - DNA, 1082 bp, Homo sapiens
agaacttcagaaaaacagatggatacaattgatgactgttttagaatagcagatcaattttatttcaatttctatttgtgcatttggcttcattccctttattaaattttcaaatataactaaatgtgtacatttggtaagtcgttgggaaataataagaatgctttgctaaagtgatggttttgtgcttttcctaggtatggagatggtccacgtcctcccaagatggcccgatacgacaatggaagcggatatagaaggggaggttctagttacagtggtggaggctatggcggtggctatagcagtggaggctatggtagcggaggctatggtggcagcgccaactcctttcgggcaggatatggtgcaggtgttggtggaggctatagaggagtttcccgaggtggctttagaggcaactctggaggagactacagagggcctagtggaggctacagaggatctgggggattccagcgaggaggtggtaggggggcctatggaactggctactttggacagggaagaggaggtggcggctattaaaacttggttatgtcagttcctgtgtgtagacagtaaggaaaaaaaggcatgctatgtgttacgtgttttttccagtatgtttatttgccaccaaaaagtaaatgcattttcacccattctgtggttcattgtagtttaaggaaaccaagcatatagatgcattagtgattttgtttatattatgtaaaatataacgatctcttaaaaataccacagtttgtattttttctttaaggagtaaagatttgcctttaaataacttggtattttcctggctttcgtttaatacaatagaaaataaagtattacaccgaatacttgccgtgtagtttgtttgttgacctcgtatgttagaaaattttacaatgccagctacatctgttgattttaaatgtcagagaagttgtaccctgtttcaaaagtatactaagtgatactacttgtaatagaataaatcatcttggaattgaattgttaccttttgaagtaaatactggcaagtgcacaagccacataaacctgaataaaacttt

SEQ ID NO: 2074 - DNA, 1057 bp, Homo sapiens
gctttcctgttctttctgacttaacgggattctggctctctgattattctgcatttcggctgttaggattgtgatttcccccttttttttctgaagcgttaatcagaaactcccatccccacttttctctttgctagcaaggtcatcacagcgcattcttggatcggaaacaagaaggtccgccttaaacactttcgcctttaaaatgtttagatgtccttccagggctgagggtgattgctctgttgagttaagggggaatttgaggggagcaaatgccttcgctgcctatattgcctatgtgtaattaaaacataaattcacttttgaagttattgttctttatagctgctcagccttaattaagaaccacaaagcgatttgactgctaatcctggtgcagaatgaacaaaaggaagtgcactcactgtaattgctgggcatagccttgtccctgggtaaaaaggctctcctttactgtcttcccttttgctttcattcaaagcaactgtagaaacacgtgtaagtgatgtttcagaaatcaggaaagggatgtgtagaaaacttcatggcagggcagtggattgaggatggacatatgtatctggaagcaccaaaaataatgttcggtctagctaaggttttcttcatcattgagatacgtaaataggcagaaagtttcattattgtgtttaacagaggaatctatgtgtgagaaacacgtttgacttaacacttcactccccattgccttggaaggcttgattattaccagtagctggtactaatgaacttccagagagaacagactgcctcaagccattcttctgtcaagggagggtaattttgtaaggctaatatcacttaggggtgttggaaaggaacatgttgtaggcaaatggttcttttgatcatgattttgctgctctccggtacactaaactttatgtaagtatcaggattccagagaaagaattggacttaacaaaaagtactttgaaaagtgggattaaattattgtgtgtggaataagtgttagaaaagcagaattatttaa

SEQ ID NO: 2075 - DNA, 1025 bp, Homo sapiens
agctccatgccctagagaccacccttcacaatttcttacattaatatgaccctctagaaatttttcatgcatacacatgtgtatataaaattataggatcattttaactgatactttttgggaggctgaggcgtattttaacagatggcaaatacaaatctgattattgtgcctgtatcatcacttgctgtacaaaagccaggaaaatcagtgttgattctgaaaacagcgctctcttaagcaccatacacagtcatccagggtgcagggtgcagtgcatcctcggataaaaagagttaaagttgctatgggaaccagaattgcactttctgcttgttgtggggagaaatctccaccagccacttttctaagaagaagtcttttttgtttcaccttcaacttctggatggattattcagttgctgttaaaaagtttgggttttatgtcttataagttatagtaagtttttatcagtaccagtggggtagtagttgatactaagattgtagctaaggatttgccttttatcaaacagccccattaattaatttgataatcattgtggatggaaacttggcagacaggatcctaatcttgagaaaggtagcttttcctctttctaaaaacaattagattaaggaaaagagtgcttataaaaccaacccaatcaaagtttatgaaactcctaaaattaacactgaaaccagattagtttccaagctcctcataaactgtaggaaccaatagtgattaaatgaagcttttaaatctgcatctgcatatcttttttgtgtgtttaagttagaataattgatatataaggctattgccttttattctctttggtcctctgctgagtgtgtatgtatttaacatggaacaaatggcaatttttccccccaggaaaacctttgcaaggtgggttctgactatgtcagggaatagctcactgtggtgacttcactgtggtatttgtgcaccctgaggggacactattttagtttgtctcacaaaggcctgattt

SEQ ID NO: 2076 - DNA, 1050 bp, Homo sapiens
aattggcaacttgccaattgaaaaaaaagttcagtatatttttgaagtgtagctgtagttcattcatttgcattcctgtctagttaagattatactacacctaagcttttgattatcctgctgatggattttttgttgttgttgttgttttacgaatagaacgcttctatgggcattctcacacatgtctcctgatgcctatgtgtgagattctctctacctgggttgctgggtcataatacatgagtttttcaatgttataaaataatgcaaattgtttcccagagtgatcgtgctagtttagatgctcaactagcagtgttaataggcctgttgatccacattgggtattgtgagaattctcaaattttgatcatttggtggtataaaattgtatcttagtggttttatttataaaggagagtatcttttcatgtgtttattggtctttcatatttcctctccgcaaaatgtctcatcatgttttctttcccttattgatttgtagaattcttcatatattctttatactaatcctttgtcagttatgtgttttccttatcttccagtgtgtccagtgtataatttgtcttttacattttttctgtgatatcttttgaacaaaatgtcttaattttaatgcgatcacatttgtgggtactttttctgttagcccttttgagtcttatgtaagaagtctttccttatattttcttttaaggatcttctgaagttttgcctttctacatttaagtttatctggagtcgattcatgtgcattgtctttatctgctaggacaatttcctttccaacttattcttctattttagaaatatcttagctatgtttaggcctgtgcttatccatgtaaaatttagaatcaggttgtcaagttcctcagtaagctgtttgcatctcgattgaagttgcattgagtttgtgtatccatttggattgaattgacatctttattattgatttttttctccatgaacatggtataatttatatcttctctgtttaactccaataatatttaatagttttct

SEQ ID NO: 2077 - DNA, 1028 bp, Homo sapiens
tgggactacaggcacccgctaccatgcctggctaatttttttgtatttttagtagagaaggggtttcaccacgttagccaggatggtctcgatctcctgacctcgtgatctgcccgcctcggcctcccaaagtgctgggattacaggcgtgagccaccgtgcctggcctctcagattcttaaagatagaatcactgggccaggctcggtggctcacgcctgtaatcccagcactttgggaggctgaggctggtggatcacatgaggtcaggagttcgagaccagcctgaccaacatggtgaaaccccgtctctactaaaaatacaaaattagctgagtctggtggtgcatgcctgttatctcaggtacctgggaggctgaggcaggagaatcgcttgaacctgggaggtggaggttgcaatgagccaagatcgtgctgttgcattccagcctgggcaacaggagtgaaactccatctcaaaaaaaaaaaaaaaaaaaagaattactgaattaaaagacgtggatatttttaaggcctttagatgttacagtcctaaattctgagttagcaggttatgagaatatctgttcctctgagaattacctttcctcttctcctttcaaattatttttttatctgaggtgtttacttttcaatattcaatagttaataagtcacagctgtctaggatgcaactctgattttgattgttatgatggattaaagatgaccacagatgctttgacactcctccttttgtgtgtggactgggctgtgactgctttaaccaatatgggacagtatgtgtgatgatatggcagttctaggcttagcctttgagaggatgggcagcttccacctgccttttggatcctgaactgccttctagaagttcaactatcctgagaccaccatatttgacaggacatgagcaggcatttctggtgagcattcctagctctgtccagcctttcctccatccccatcaaggcaccaggcagatgagcccacctggcagctgagtacca

SEQ ID NO: 2078 - DNA, 1048 bp, Homo sapiens
ctctcaaaatcatgagataaaaatggtggttgttttaagccactgagctttggagtagcttgttgtgcagcagtagataactggaacacttactgagtctctgggattattgagttggagtgcctatgctgctcttcccaaggggaatcagccttttttccttcctggaatggttgcttagaagaacctgtagacacccagaggaagttacacttttctttggctttaactagagagccatgggagaggagccagaaatatcccgaggctatgcatttctgagttctaactgaagcctggcagaaatttcaaaccaagttatcacagggatcttgtgtctgagagagcagactgtcttctggtcagtatccttgtgtgtctaatgaagggaagacaggtgcagggatccatcttcagggtgttctccaggagagccataaatgtaacagtaggaaaacaagctatgttcatattcttggtttctgcttatttctctgataaaaaatcattcctttcattggtttctgcttgttcatctgataaaaaaatcattccttttgttacctgtcaaaacatacagccccctgattgcaactcaaggtgctctgcactgcgtatccaagagtaaccatcacttctgcttcccctgttttgttgcatgtgttggctagctacctatccatttttgtgttctcatccctttttctttctgttctgtctttcacaattaccctactttccattcctcttcccatctctcccaaactctgctaattgatattctggtcatactaaaaggctaatctatctatctttcttttgttctttcttttcttttttttttgacacagtctcactctgtcgcccaggctgagtgcagtggcatgatctcggctcaatgcaacctctgcctcctgggttcaagcagttctcatgcttcagcctcccgagtagctgggattacaggcatgcgccaccacgcccagctaatttttatatttttagtagaggtggagtttcaccatgttggccaggctggtctcttaac

SEQ ID NO: 2079 - DNA, 1031 bp, Homo sapiens
agttactgttggattaaaaagtgtcttgtgtatggaataagaatcaagtggcatttttatatttttatatttcagtcctctttctttagtaaagatggagtagaactggcccagtcccctctgctgctgcccagtgctgctgaaagggcagtgtggtgcagtggttagagcatgggctgtggaggcagatggatctcaggccagccatgcttcagctgcctgctgccatgtgtcaggcctccttggatataaagttccataatttcctcaggtattaaaagtgagccatagtgtttcccttatgggattgtaaggtttaaatagaatggtgaacatagagcagccagtgcagcacccaccccatggtcgatccaccctctgcttccttttcattttctctgatacttgacgcttgccatatatgggctcctcttgctcccagtttctgtttcttccctgtatgaccttaccaaatctggtgtgtttattatccaccagtcacgtcccactgtctttcaaggcctgacctgagccatcttcatccttgaagagttcttccaccctcctccccccatccccccgttcaccaattcattgatctgtcctgaatttctccagtaatacctgtttggcacttaactagtccatgagggggcataaagggacctcgtagaccttggaagtcatttagtcgaccacgctcattatacaggtgaggaagctgaggtccagggagatagcaattgcttaagatcaggtttcccatttctagactagagctttctccaccaccctatgtaccgtttctgtttttaagcctgtaaaacaacaaacaccacaataaacaccaaaacctggaaataggagattatgtatgcagacttgtacttcatgggacagagagctgcttctgggtttgtactctgctcagaaggtgtatgctttattttactttagttggtaggtatactatatgagtaattctcttttctttaaaattgtaacacatgaattaataaacatacatttac

SEQ ID NO: 2080 - DNA, 1023 bp, Homo sapiens
cccagcccccatactcccttcaaaaataaagtcctttccattttagtctttggttattagtgtgtgaaaactctgcctaaatcctgaactttctactctgatttgtcagaggaacagttctttcagttttaatttttgtctttagattttttggttggtgttttttttttcttcccctaggctcatctgtataggactgtgagcccagaaggaaagttgggaaataatttgtcagtattctttggcatttacaagatgttcctatagtctcattataacatggtttcctgacattttgttatggttgttgttgatagtgctttttggaaaacaacatctatatctttttttcttttttaaaaagtgcttatatcttttaagttttatgttactttgagatattactgtaagttcttttgttcatagattatgaaaaatgtcaaaaggaattctaatcagaaatcagttttgctctgtgaatttgtacattgaaatttaaatgattctagttaatacattctgtctcttattttcatttaatgttgaggtgaatacacacatgtaaggccatataagaagagaataactaatgagtgcctattctgtccagtcttgggcttcacagacatcatttatattgaatgctcataatacctgataaagtaaatattaataatctagtaaggcaattaagactttgggcaattaaattctcactgtacgtcattgggacatggcagagaaggaagcctatgtctttttctgactatagtgccagttgactctgcacgtttgcatacagcagttctcagatcttcttagtaacagaatcctttatcccatgaaatcagactcccaatatataaaacaggtaagaatagtgttcagttatatacgtttattgtatttggtacgttaaatttaaggtggaaatctatgtttcaatcttcacttggtttcatcttaaaacttatttctatatattttgtttgcaaaattaaaaaagttcaaagtttcaaagat

SEQ ID NO: 2081 - DNA, 1435 bp, Homo sapiens
gaaacattgttatgcagtgcatgactgtatgtatagcgagggagacagagactgtatatatatagaaagagatttaagtaattgacttatgtgattgtaggggctggcaagtccaaaatctgtggggcaggccagcaggctgcaaatttggataagaattgatgttgcaatcttgagtccaaaagctggaaactcaaccagaatttctaggttgcagtttggaagcagaattccttcttctggaacttaagtctgctattaaggcctatgacacattggatgaggcccacccatattatggatttgttttactcagagcctactgatttaaataggttaatcacatctaaaaatgctttaaaagcaatggctagactggtgtttgatcaagcagctggataccgtagcctagccaagatgacacatgagattaattgtcacgtgtatatttttgattataatttttgaaacattaatattttaaaattaagtttgattcagtgtgaatatgtctttggaagtctggagctctgagaagaatgacaagtagttgtttactttgagaggcaaatggtattgaaagagccagtgatttgcagctgggtgatttgggttcaaataaattccagctatgccatttacagtttgtgtgactttggtcaggtttcttgaacttgagtctcaatttccatgttaataaaataaggtattactttatcaagctactttaataagcgagagaatgcttgtaaaactcccactgaagtgactggcatatagtggcatttaatacatgataacgcattattgtcatagtgattatcattataagcttaggtttatattacaaagttttttatttccctttatatcttttaaactatatccttttaccaagtgtactgtactttctgtagtttgtgggaaaaattgaatcaaaatctagcattctcaactttagagttcttttttctaagaatgttgtaattgaacaactaaaagagacaattgacattatgccatcagagggttggacgaaggttaactgaggtatcctgaaaagcatctgccatgctggagaggatgtggggaaataggaatgcttttacactgttgatgggagtgtaaattagttcaaccattgtggaagacagtgtggtgattcctcaaggatctagaaccagaaataccatttgactcagcaatcccattactgggtatatacccaaaggattataaatcattctactataaagacacatgcacacatacgtttattgcagcactgttcacaatagcaaggacttggaaccaacccaaatgtccgtcagtgatagactggataaaggaaatgtggcacataaacaccatggaatactatgcagccataaaaaaggatgagttcatgtcatttgcagggacatggatgaagctg

SEQ ID NO: 2082 - DNA, 1025 bp, Homo sapiens
atcctacggagaagtcctgaccttcttggatcttacacatgaacagggtaggcaatgtatgaatatgtgaaaactgaaatacttgtaatcacctgtttttaaaaaatagataaagcagcagtagaaaagatgccacatatcaagaatgatccaaaactgccaggctagagaagcagatggcatctaagctgggtcttgaaagctttggataaggaaggagaggatgccttggttggatgcaagaggatggacatgttgtaagcagaagtttagagacgggagagtataaacccatttaactgaaggaaaatctcttaaatttgtagagttgtaaaccagaaagatagtttcgtggccagagaccttaaacagcaggtgaagaatcttggacttacctcccctgtgttagaccatgagatcccaaaagcagaaaacttatttttgtttacattgtttccggtatgggattggtgcttagtgaaagttgatgggaactgtacccaatgagaaatcaggcagaatttttggagtaggactctggtaagaaaacagtgggccaggaggattaatgtgcaaacagggtaaaaatagtatacaattgagggaatttatattcctgttatgatgctggattaggcaacaaatacatgacattaagctggtggcagcagaatggaaaggaacatatagatgcattttattgtgaaggaaatgttaccaggacttcagtcaaaggtccttttatttagtgatcaggagaatggttggtaccattaacaaaataaagaagatgagctaaactgaagagtttggttatacatatgtaaaatttcaggtcatgggggacatcaaagtttgtgcagcagtcaaggataagagcttgagagaagatgagagctggagatctaaatttgggacttgtcctgccacactatcaatgattctgaagtattttagtgtatcagtgaatggtagttgaagctatgagactgattgctgtcattaaggaagcaagtgaggggaac

SEQ ID NO: 2083 - DNA, 1087 bp, Homo sapiens
cattgtcatcatccctgttttacaggcgaggcacagaggttaagttacactggtaagtgacagggaagggtttcaaacccaggcagcctggcttcagagtccatgcttttctgaaccactatattctgctacctcttgacacacaggtttgacttcaggaattgatcctacaggtagcctcagaaattgttagggactttcttttcatacctggttaatccctacccctgttaagtaaagctaccttgtttaattttttttatccttaaaaattcagacatccattacttaatcttgctcagttccccagtttacacttttgaatggtaaaacttacttctttgtgtacatagtttttctgtgtgcatttctgggactttgcagctgttccattttttggagtatctcttctctccccagatgtaaatgtaatggacacgcaagcgagtgtatgaagaacgaatttgataagctggtgtgtaattgcaaacataacacatatggagtagactgtgaaaagtgtcttcctttcttcaatgaccggccgtggaggagggcaactgcggaaagtgccagtgaatgcctgcgtgagtgccccatgacgtcagtctgtcagttgtcttaaggacttccaagggtggaagaaggaatgggtgactttcttttattcctccttgaaaggaaagctctgaaaggccagctttttgtgtaatttgagtagtattcaagtcagaggaaagtcatagatgagggcaattcactgtaaaggcaaactgagggttttgtgtttccttcatgaacacatgtcccagagttggagcagcatctgcaaggtttagaaatttgtttggatccaaatactgggccagtgtagtctactccggaatatggtttctctagtcgtatttgttcccctttaaaatactattatttttatcaatgctcaggcatccaaggtaattaacatgtatcaaatataatgagttctaggctaagagggccattccaagattatttcttttttcttttctttttttttttttgagactgagtctcactctgtcagctaggctggagtgagtgatct

SEQ ID NO: 2084 - DNA, 1024 bp, Homo sapiens
tttattgacatcctgttgggttttgttggtggtggttttttgtttgtttgtttttgagacagagttttagctcttgtcgcccaggctggtgcccagtggcgtgatctcagctcactgcaacctccgcctctcaggctcaagcgattctcttgcctcagcctaccaagtggctgggattacaggcatctgctaccacacccggctaattttttgtatttttagtagagatggggtttcaccgtgttggccaggctggtctcaaactcatgacctcaggtgatctgcctgcctcagccttccaaagtgctgggattataggcatgagccactgcacctgaccttcttgttgttgttaatgaacagtgcatctggtaatcattcttagtctaccaccatctgtctgtctcagagatgtgggaaattatgtttggttttaagtcttaaaatgctcttcttaaaggtacccagatctgatgtaactcgtgtgttttgactgacagcctgtgattgcaatggtcgatcccaggaatgctacttcgaccctgaactctatcgttccactggccatgggggccactgtaccaactgccaggataacacagatggcgcccactgtgagaggtgccgagagaacttcttccgccttggcaacaatgaagcctgctcttcatgccactgtagtcctgtgggtaagtgacaggaagatggattgaaagacaaaatgatagttccgtggacccccggaaaggaaagctttgtttccaaggcatttggacaactaaatgtggagatgtatacattattgtaacacagaaatcagtcaagatctgtctctaccccatgcctccaccttttttaaccaagttgaactttcagatgagtttctggtgtgtaagaggggggtggtggcctgagtaatggttctgcaaataattagcagcaggatcatagagacaatttgaactttgactgtaaaaggttaactgctttgtgagttcttccttgttgatgattttgtttagtc

SEQ ID NO: 2085 - DNA, 1855 bp, Homo sapiens
tgattttcaacattgatgagtaaattcatcttagcatgtgtctagaaacttaaaatgccatgacttaaagggtcatgattttgagaaagttctgatttaaaatttggtttttattacctttgtgaccatcaggagattgcatactggttctcaggcattgcttttaattaccagttatctttctttaacacattgattttacttacgtatctggccgaatttttgtttgacaataggcattttacattttaggctctctaagcacacagtgtgatagttacggcagatgcagctgtaagccaggagtgatgggggacaaatgtgaccgttgccagcctggattccattctctcactgaagcaggatgcaggtaaaatattttcaaagccagaagaagggggcagaatctatatatagtcaacacatattaatagatcttatggcttattggcagcagggtaaacatttttcctgtaataattgtcaacaagactgaggactagctgtaatggtgagccacaaggggtttggcttgtacagagagtaagcagagttttaatgggatgactatcttaaactgaaaccaaatataaaaatgactttaggctcacacctgtaatcccaacactttgggaggccaaggtggctggatcacgaggtcaggagatcaagaccatggtgaaaccccgtctatactaaaaatacaaaaaaaattagccaggcgtggtggcgggcagcagtagtcccagctactcgggaggctgaggcaggagaatggcgtgaacctgggaggtggagcttgcagtgagccgagatcgcgccactgcactccagcgtgggtgacagagcgagactctgtctcaaaaaaaaaaaaaatgactttagggtccattttgttctatgtgtatttcttttaaaaaagtctgttggctgggcgcctgtggctcacgcctgtaatcccagcactttgggaagccgaggcaggcggatcacaaggtcaagagatcaagaccatcctggccaacattttgaaaccctgtctctactaaaaatacaaaaattagctgggtgtggtggcgtgcgcctgtagtcccagctactcaggaggctgaggcaggagaatctcttgaaccctggaggcggaggttgcagtgagctgagatggcgccactgcactccatcctgggcgacagtgtgagactctgtctcaaaaaaaaaaaaatctgttaacatgtaaaacaaagggctgacttgaagagtggaagttttctcccttctctgattgttttatccatttttcattgaataggccatgctcttgtgatccctctggcagcatagatgaatgtaatattgaaacaggaagatgtgtttgcaaagacaatgtcgaaggcttcaattgtgaaaggtagtgcattctttctctagctgcattgtgttttctgttaccatatttcaagtaaaaaaaaagtaactgattgtgtcttaatctttttcagatgcaaacctggattttttaatctggaatcatctaatcctcggggttgcacaccctgcttctgctttgggcattcttctgtctgtacaaacgctgttggctacagtgtttattctatctcctctacctttcagattggtaatttagacctcatcccccaacctgttagaactgtgagattacacttaaaatatttttaaaaataaaatcagtgactctttgagggctttttgatggttggcaacactttgtattatttagcatgcatagtttttgtagtttggccttttaatttaatgaaaatgtacttttggctttagaatttatctcaatgaatggtgattacaaatgttatat

SEQ ID NO: 2086 - DNA, 1092 bp, Homo sapiens
gacagaagggatttgctttgagggttcatcctctcatctgccatgtgtttgcagaccgcagaccaactcctagcccgagctgatgctgccaaggccctcgctgaagaagctgcaaagaagggacgggataccttacaagaagctaatgacattctcaacaacctgaaaggtagaaaaggctgagataacaggggcaaatgcttccgccactagagtgatttttttttttaatcatgacttttaccatatttattacttcatccccaactccctactttttttatgctaaagtatttcaaagggaaatcccagagctcctgtcattttatccctgcatacttcagtatggatttttttttaaagatgttttcttattaggcaaactcacataaccaagatgcctatttagagaacttatataggtaaatggagattatctttcattttctctgccagtggcatctgattctttgttgttgtttttttttcttcaccccagatagaagagaaatgtgaccaattcactgagcaactgtgaattcttgtctgataaaacagtcataggttctataaatagagaagctttacaggatgctttacagggtactagttgaaaatatgggccaggcacggtggcctgtaatcccaacacttcgggaggaaggatcactggaggccaggagttgaacaccagttcctcactggggaatatagtgagaccccatctctataaaaaaaaattttttttttaattagccgggcatgctggcacatacctgtagtcctagctacttgagaggctgaggtgggaggatcccttgggctcaggaggtcaaggctgcactaagcagtgattgtgccactgcattccagccagggtgacagagtgaaaccttgtctctcaaaaaaaaaaaaaaaaaaagtagtagttcaaaatatggactctggtgtcagtgggccttggttcaaaaccctgcaccctgcaccacaggtcatgtaacttctttaatcctcaattttcttataaaaatgatacagcctattttatgtcaaagacacaaagctcttaactcagtacccgacacacagtaa

SEQ ID NO: 2087 - DNA, 1002 bp, Homo sapiens
atttaaattttacctcagcgaaagcatctaatcaatatgatgtcgtagaaagtgtatgccattaaatgtttatcatttgctgtctgtatgaccccaactaaaaatagcaataatagaacagaagtttccaggattaaagaagaggatacaaatgaaagtgctagataaaatacaaaatgttattatgtgggtagtaattttttttatgattatttataacccaaattgataatgtaagtcatgagatagtataaatcaatatattattatttctggattatatttttaagacattttataaattataaaaggagcgggagcatacttgagaaaaaggaaagcttttttaaaaaaagtacaattttcttttgtgcctagaatgccaccagcaccaaggcagaagctgaaagaacttttgcagaagttacagatctggataatgaggtgaacaatatgttgaagcaactgcaggaagcagaaaaagagctaaagagaaaacaagatgacgctgaccaggacatgatgatggcagggatggtaagaggttttggtatatttgctcattggcagaaagtgaacagtgtttaataataaagatcccccacttgttgagaagagtcttttttatattgacttctgtttttcatcacattgtctcgtcaagaattgggttagtagcttacatagaagacaaagaatttggatcttctgccaggtaattttgttgcacaattgtcctgtcccaaagttactcagttaaaagtaaaacattgctttacacgtttgaggttttaggacattaaaagtatgtgtttatatttttcactgggtaattcataaatgttaataaaaaaggaatgcaatgaagttaattttcttcttattcttgttctcccagcacctttagagacaaagacaagtttcttgtatataagaaatttttgaagatggcattgtctaccaccccaccaaaacatatgaaacttacatctagtttaattt

SEQ ID NO: 2088 - DNA, 1050 bp, Homo sapiens
tggctttcacttccttaaactcatttatctggtattgttggccttccataaaatgacctgcacctacctctgcctcatgatatcttcttactccctgatagaaaccaactgccttagccagagtaatctcattgttttctaatcatggcatatgcattcctgcttaaatctctcttcccatgtcatttcccatgtgggaagtgccacactgtactagcttagcttaaacttcaccttcttttgtgaagacttccttgtgtactctggtgatttctgcattctttaaactttgtagcatttcctgtatcttagtcatttggtacttgtaatttcttaattttgtaatgatctctttttttatatgtgacttatctctgcagctagactaagtatggttgagaccatgtttcagcatcttttaaatgtacagtgtacataattggtgttaaataaaattgtcatgcttttgttttgtttttgcaaaacatttaggactatttaccgtatgccagtgctaggctctgagaatataaaaatgaaccgatacttactctttaggatagtggctcctgagggagacagatgtggcacaaatatttcaatataatgtagtaaatacagtgtgaaatgttttcaaggaattccatgagtgtactaagggaagtggaacttttcctgcataggaggtttagggaaagcttctggagttgaacaccagagttcagttttacttatttttttatttttctcagagacaggatttcgctctgttgcccaggctggttttgaactcctggccttaagtgatcctcttgcctcaagtgatcctcttgcctcagcctcccaagttgcttagatttatagccatgagccaccattccctgtgggctgaattttaaaaggatgagcaggattagccaggtaaaaaagaagagtatagcaggcaaagaacaaaatgagtaaatgcctcagtgcagtgtgtttgaagaactctaaaagaatcctgatactaggaatgactgagtttggttgatgtaaacattatgatca

SEQ ID NO: 2089 - DNA, 1034 bp, Homo sapiens
agcctgtgaagacactttgcagaaccttgattgtgtcagttactttgcatccctgatcctaacaccactcatgctggccctattggaaattggatgtgcttgctgctgctatccagaatggattagccacagtccccactttctctcattagttcacacttaaatgtggggttgatgtgtttgttgatggagcctgaattatgtgtctgtacactagctgcaaatgaagctggtaaatatataatgggaagcaggttctgctttataaattgtggggatttctcaaaaataggaagagaaattcagatgctgggcttgaataccaaccagagagaacatataagtacagttgagagtcattggtataaggattccattcgtttgacaaactgtaccagagatacacagatggatgagatacatttctgtttctgttggtgctagccagagcaagagtggaaagccgtgttcatatgtcagtagcctaacataaatcagtactatttctctgagactctgataggaagccagctctgttatgtgaaggcttttcacttagtgtgtttttcatctgttcaccaaaaattgctattggctgtacttttgcctttcaaatggtgacatgagaatagttgatagaggaaggtgggtaggttttgaggtttttctctttcactccagaaggttatcagttaaagtggtattgatgtataactgtgctgtccaatatggtacccactggccacatatggctatttaaatgcatttaaataaaatgaaatttaagatccagtttctcagatggtgacatgagaatagttgatagaggaaggtgggaaggttttgtggcttttctcttttcactccagtaggttatcagtaacagtggtattgatatataactgtgctgtccagtgtggtagccactggccacatgtggccatttaaatagaatgaaatttaagatctagtttctcagttacactaagcatgtgtcaagtgctcatgtggctagtgactgccatattggatag

SEQ ID NO: 2090 - DNA, 1059 bp, Homo sapiens
catacagaaaattgaagcttaaaaaaaaaagttcaatcaacagagttagacagggcttgaattttatttaattctactcaatccaatataaaatacctaaggtgctaagtactgtgttaaatagtaagatactaaaaagctagctgctctgcccaggtctggtcctcattctcgggttcttgtcagatctttctgcttgggctgggcaagggaggacaagtggaataactttgtgaagggcaagtgtggtttctttgaaattggttacagagtgctctggctgttgtacatctaactcctaggtcctacagcttgggctgggacctcacctccctaaggatggttagatgtgaagaatgagtgggagagagattgattcatcgatgatattgatgttgaccatagagaaatagtagcgcttttaatggaaatgaggaataaaagggaatatttaatgaatatctatggtgagatgccagatagacaattggaataggaccatggctgggttagaattattgcctttgtattgtcttcaataatggtgagacttgaatctacaagctgggaagtatgaattaaagaagtataagggcattagggccagcttcttagggaacaagtaccagatagtaataaagatcaacttctattctcaatggttttgttactctacctatttaggtggaaggagaaagaagaaacaagaagtgacctatcgaaaacgtgagagggactaggaaagactgagcagaaaagttttaatgaaggggttgctctaatgcaatagtttgcaaaatgtggtccccagatgagcatcatcagcatcacctgggaacttactagaaacacaaatttttgagccccatctcagaccagctgaatcagaacctcttgggatatggcccagcaatctgggtgatccagggctagtttttgaaaaaacactggtaaagtatggtattgagtactgagagtttgggaaatacaaggactgagaaaaagctcttagattggtcagggaaggtcattggtaacacttgagcaaatttgctacaa

SEQ ID NO: 2091 - DNA, 1031 bp, Homo sapiens
tttggtgtgccgttacttacattaacactacttttaattctagtatctactcatatttttgctttcattttggtatccttcttgtttggaattctgttaaccttttatctgtatgtgcaagcatctgattactttgttatgtcttctaaggtggtcttatctgaccatttatatattgagatactaattttaatctgtttattatttcaagaaggtacaggggttgttgcaaaaaaaggactatttttaaaaaggcattgggttcattgctttggaaagcattgttttggcataccttgtttaatgtaaaaattgagatgaggggaaatagctttcctgttgtttatggcttaacctactttgcttgtttcattcatttgggttgtgagcttatgttctgtttgaagttatagattttatatttatattatgttctgtttgaagttttagaaatatttaatgttctgtatatattatatagattccactacgatgaaaacaaagtgtgaatttcagagagccaagtaaatgattatgtatttatctgattgactgtataaaatggtaggttttcttaagaaaaaggatgttattcctggttctcagatggaaaacctttcagattgtttttggtgaagacttttaaaactattgtcaggttttagaaaccttgagtttttaggatctttaccttttattgagaaactgtttagtccaaattaacctgaatttatttgagcaacttgtatgctgtgcactatgtgaggcactacatatgcgtaattgaataggacagtttctagtgaaggaaatgtgtacacaaataactttattgtagtcctgtgagtccaataatagatgtgggcattaagatgcactgggagtactcagccaaactaagacctgcttttaggagttactgagtttaaaatacaagaatgggttaaccaaacaaggagggaagtgggagggcattctaggatgagtgaaaaagcatgaataaggatactgaggggcaaaacaacaagaaa

SEQ ID NO: 2092 - DNA, 1034 bp, Homo sapiens
ttttttacataattgttttgttttacatattttttcttcagtaaggagtccatctgcttctgtgttctacagggcattctcatcctggtcttaaaagagccctgcttggtaaccggtatctgtttgtcctgtagtgatcactcagttttcagacagtgaggaacattagaataacattttggtctataactagaatctgttagaaatatatgagacagaatttttaaatgtttgttctaagaaacattaaacaaaaaaagaaaaaggctttgacatttttcctttacctttcacatgaagtcatttcaaataaagataaaataattttcttcataggggttctctgttattgtgggttaactcatattttcctcctctcctctatctagaatgtcttaaaccattctaccttatgagaaattggatgttcttgcagatagtcattgtgggagaaaacgtttcatttaagtcccagatgaggaccgaaaacttgaaatcagaggagcatctgaaatcaagtaatattaggtaggatgaaaattacaagggatttctacatgtttttattccttttggagatgtgtattattcatactctgtgaatactaataaaattagaaacttcctgaaacatttgattttggccaagatcgggatggggcatgctaaagttttattatttatgtgacttcttgagaaccttggcttatgtttatactttgtcttgagcatttttatcttgtggtccaaggaagcttttgaaaattttactgaagtaaatttttaaaaattttgttttatatgaggtctctgaatatttatgataaacgtagggacacatgatttatacctcatcctttagaatgaaagtttctgtggtttttttacatacttagtaaatcatgtgagtgcaggtaacatcagcttgcagttctgtatgtcagcgtggatgcaatcaagcctcccaagtgcctgtagaaataggtgtatgatagtatgctagagaagccctcttgtacatgtgaattagtaac

SEQ ID NO: 2093 - DNA, 1030 bp, Homo sapiens
aatagaaatgacttggactttgtggagtcatttaagaacaaaatttgtacctaattgtacctgactgctttgtgactggaagaattattttacatctcggagcttcagtttttccatttataaaacaggaataagtatagctatcccgtagggttgttatattttccatttagctgtctttatcaattcaatttagcaaggttacttttaaaaagaaagctaataattgtcattattagaaagctaataaaagtaattaacttgtgcttctttcagaacctaggaaagaactgcccagaaatgagcgcctctacccttgttatactgaggaatcaaagctggaatttcaaaatattttaacttttatgtcagtttttgtgacatttttatatttctattagtgcttgactttttagttttacggtttttcttggacagattatagcatggtaaaaataacagagtaaaattttagatctgtgtttatcaatggaagcctgctccagagtctgcaagaactatagttcatcacctgacagcttataagaaaagcagattgtttgtaaattacattactattatataccccatataatctttgactggaagttggtaacatcattaggtggatgttagcatactgaaatgttacttgttcatctttacaaaacaaatcatgtttggaatgagaaaacaacctttagatgcagtatatatcctgaacatacttgagtataaatttttagctaacatagggaagcatagtaaagtatatcctttgtaacttcgcaactcaaggacaaaatgaaaggtcattcattgaatctagtaaaggtacataattaaccctagctttctcactataaggtttataaattagtactctccaataggatttttcaggggaggagcgacatttgtgacattggtaggatagggtacatggtatgctttattaaattgtataaacttaggttttaaaggcataagccaacagctttgcaaatatgtatttttttttaatggcaaa

SEQ ID NO: 2094 - DNA, 1116 bp, Homo sapiens
gtgaagagtagtggaagtagagttcagagactgtcgaatgttgtaggacagtttagattttgttctttaccctcagagtagtgggaagtcattaaagtgttttaaagggacaattgatagatcagatttgcatttttaaaagattcctctgacagctgttgggagaacagaatgaaatggggcaagaatgaagtggaggaaacaaagccaagggatggttcttgaatgagagtggctgaagaagaaataaagagaaatcaacagattcaagatatagttagtagataacattttttggagttgatagatgttaggggtttgggagaaagttgtcatggaggacttccaggtttcttccttccacaattggaaagctatgatgcatttgctaagatgaaacaaccttacaaagagaactagagataggggatgggaatgggtcctgagttcagttttggacctcttgaacacaggcaattcttgatgaatttgagaggggaaaaaagaggcagcagctagaggggaacgtggggcagaaggtttttaaaatgtgtgagatacttggacatgttaaaatgctgaagagaaggaaagatccaaatgaagtgagggaagtctcaaaattggtgcaagggaaggggtaaatcaaaggaacagtccttaagaagggttagcaagaacatacctaagtggaattattgttcttaaatattaaataagaggtgcaatacctctagtgttttaacaagagaaagtaagaagcaagctgtataaatgtagtacatatttagtaagtgggaattgttttccctgaggtatggaactgtcatttggaggtgaggaagggacataggaatcagtagcttgagaagaggggaaatttgaaatagttatggtgactagtgaattgagaaacatagtaggtttttttggcagcattgagagaatttttaaaaagttaatatcatttaatattatcttaagtaaatcacatgtgaaggaaaacagcaagaaagtggactctacttagcagaagaggtcacttaacttttaagtggtccttaaacttttaagtattggcattaatttgccaagaccttgtgctaccctgatgtt

SEQ ID NO: 2095 - DNA, 1033 bp, Homo sapiens
aagttgaaagtcatttgaaatatagtagtataaaacttctgcagcattctatggaatatatttagagcaggttttgccttggggatagagcaggaaggagtcactggtgtggtataatggttttaactgctggggtttatctatctaccgttatgtttttgtttttgttactcagattctaagctgggtccagctgaagtctggacatccaggcaggctctgcaggacctgtaccagaaaatgctagttaccgatttggaatacgctttagacaagaaagtagaacaggatctgtaagtattacctatcatttgagaagtccctgtaagatcaagaatttcaccgagactttaaaacagtttggttcgttatttatttttcaacctgttgcagaataaactttttcaatggaaagtaattctagtatttgtgatatttggccattggtattatttcaaatacagtctttggaggaggtaagaagagaaatgtttagagttgaattctattaaggtcattacggcagctcttttagggcctgtcaaaaaaaacaaatatatctatttcaaatactaagagtgtttggattgtctgtggtcagtcttataattaagccgcgatttaaaaaaaaaatacaagaataggctttagaaaaatctttctttgttaaacgtgattctataatttccctgtcaggaaaatgtatttgcattgtaaggaaagttccttcttttaattaaataagttggtagtatttcctcccctacccccaataaaatgaaaaattttgtgtatttagacttttccgcttcttctttctataaggggcaaaatggcagataaccagattcccaagtgagtaattgtcttttgtggaaggctttgccttacaaattggaacagggacattagcctgatagaaatttaaaaatcaattaagagtactttgtctactaatgtccgttaccctaagttttggtgaagattagttttttctatcatttacatctgccttagatactttatattttta

SEQ ID NO: 2096 - DNA, 1026 bp, Homo sapiens
aaaaggctactatttgtaaggcacgatactagatgctgaggatatggaggtaaattagacagaatctttaccttcaaagaaatatctagactaaatgaaaagatggatacattagtaagtatatttgttttcttttctgattgtaaaaataatgcataccaatttcaagaaatttgtgaattatacaaagtcccaaaaagttcattaatcctcccattctggataaattgccactttaatatatactcttcttgtgtttctatacttttttgcatatttaagaccacactatatatccatttttgtatctgttttataaacataatgtaagcttttccttgttaacagtttagcatttttgtgtataaagcattttctctaatactgtattatttcctgaggaccagttgttcaaattgaaatcattagaaagtttaaagtgaaagtttaaatactgttgacaccattttgtcgttttcccaaaagttcatcatttataacatttttcactagtttcttctgttgtcctttcattttatttagagttgtttgaagtacagaagttaccaggatttttttttttttgcaataccttttcctttgtccatagatcagtgcatatttaataatgagggaaataatcacatttaaggaaacaaatagatattataattcaaatcttaacatttggaaacaacaccaatgttctacaagagaataatagttaaattatggcataactgtagaatggaaacacaaaatgattacaggttgatatttatcaagattttataagatgaaaagattgttttgttgttgttaagtgaaaatcatataaaattatatatatataatttgattctacatgttaattgagtagtctcagttcagtgggatattaatgaaaatggtaacttttttttcaatcactgctttcaactatgctctgttggattcccagattcccatcatttcttggacagattctataacattctggttgctttccatttttgaagcataatt

SEQ ID NO: 2097 - DNA, 1050 bp, Homo sapiens
gaaactactactacttttgatggtttgtgtattcttagatatgattatgttacctgctttatagatattggcattctccaaaccaagttcattatttttattgtgcttgcattcatcaggattgtggtagtttgaatgaaaggaatgagagtttcatttaacagggatatattttactaatttgaagagataacattaaccttcattctatttatatatgtgaaaatgatcttttattagtatgttaagatattagcagtttaaatgtataatgcataaaataaggagaaagtcaaaagtattaactttttttcagttcatgtattcaaataaatatttgactactcatcggtcattgttttaggcactgtgttaaacagtaaatgacaatttcaaagaacattttatatttcttggttatttctaggtatctatatacttgggtaattgtgtataactgcttcatagtatttctgtaagttctttataagtcaggcattttaagagattgtagaacttggacagttaaggtgtcacttagccaaaaatagtcaatgcgaaatagtttttacaggtaatcgctttttggttgatactttctatgtgcaagatattagaatagataattataaatagcaatagtttgttttgttttaaaatatacttagcctgtgacatatgatgtataaggttgggtgtgtgaaaggaacagctaactttgtcatgtcctaggctgttcagcctggaaaagaacaaacaagtctaaatagttttcatagtaagtattcagacatgtgaaggattatttgaaaagaacatacctgtatctttcctgaagtcaaaactaaaatcttaaattttaagttgaaatctatagggggctgaccgtgggatgttgtggattctccattttggagagcttaacagtcagattgacagccatctttcttggattatttaagtgcagtcctactaaataggggattggactagaaaacttcttgagattgcttccagctctggttctgtgaaatactctctaaattggtg

SEQ ID NO: 2098 - DNA, 1057 bp, Homo sapiens
acagaagctactcacagaacactgattacttcagtggatagaggaaaaatatcaagtctatttttagttcttcaaatcaagttaaagattgacaacatgactaatctcttttgtgatgtgttagaagactccctctacctacctgttaaaaaaaaaatgactttttttgcaattttttgctgtttccttaaaactaaagctgtgttcttctgttttgaagggtttccgcccccaacatatgttatccccccgcctgtggcattttctatgggctcaggttacaccttcccagctggtgtttctgtcccaggaacctttcttcagcctacagctcactctccagcaggaaaccaggtgcaagctgggaaacagtcccacattccttacagccagcaacggccctctggaccagggccaatgaaccagggacctcaacaatcacagccaccttcccagcaaccccttacatctttaccagctcagccaacagcacagtctacaagccagctgcaggttcaagctctaactcagcaacaacaatcccctacaaaagctgtgccggctttggggaaaagcccgcctcaccactctggattccagcaggtaagttacagttgtgtgtactatccagctgaatgaaataaggggaaatgctgaaagattcaatgttagaaatgctcattaaactttgacatacttcttgcttagatttatagtgattatgggaaaacaaaagtattgtctctactgtttatgaaagttcaaatgttttccttactcttgtaaaggataaaatactagatcttaagtaccattcttggctgctactaagtgtccattttattgaaaatggattttctgcaaataattctcctataggaacataaactactagggaaatagaatcacagtcttgatgaggtgctaagacagatgtgacaccaatcttaaatgttgtcgttggaagcacagcacttgaagcagaaaggggaaacaaacactcttatgcaaatatattcattcattcattaaacctcttaaatagttgaattaaaag

SEQ ID NO: 2099 - DNA, 1060 bp, Homo sapiens
cctgagcaggaagcccgtttcctgggattggaactacccttcttggccagcgggaagtccccaaggacggagtcgaaaggtcaaatcttatctgtcagtgctgtgtgacagcatcgcaacgggatctgcagaacctgaactcggtatcaaatctattgggagggaggggaacgtgtccgggcaggcgctggggtcgggtggcaaaactggggtgaatttgtagaatttgggaaagggtcattgacatcttaaaataggtggtcgtttggagcaagaatgctcgaaaggggtgagggtaggttaggctctctagtgctgggggaaaacaaaatgtggaaggattggtggaaaccagacctttaagatttatattatgatttgagatttatatgattccatctaggccagatttaaaaaaatatttgacatccccatttctggaatgtaggagataaaggcactaagacgaaggaaatggtagttgtgctgtgtgtattacactgaagaacaaatatttgcaggataaaattaatttggacatttggctggacactgctcggtatgggtccagtttagttggacctcgagcagaagactggctgttgccctgttgtgtaccacaatctttggtttccagtgctgtgttgaaaagagcactaggcttagaatcagaaaactcaggcttaagtgttgactcttccactcataatgtttgaacgagacatgtcacttaaaattctgtctcagattcctcatcactgaaatggagctaataatgtgcactttacaagattgttcttaggattatatatcacgaaagtgtttccaagctctaaaattctacataaatgtaaaatgcatgttgcttgtaccattggttttgggactagtcttataaatttcttaatgatatatggtgttttatctccttcctagaagagatggaaagattctgaagggcagaaacagtttttcttttgtatcttccttccatatgacaaaaagctaagcatgcagaagggactcgatacatgcttgatgaatgaatgaaatgtgaaag

SEQ ID NO: 2100 - DNA, 1045 bp, Homo sapiens
tcagggttgtgaaataattttaattggttatgaccatcattaaaagagaagaaaaaggccagatgtggtggctcatgcctgtgatcccagtgctttgagaggctgaggcaggagggtcacttgagcccaggagtttgagaccagcctcggcaacgtaatgagcacaggtctctacagaataatttaaaaattagcttggcatggtgatgtgtatctgttgtcccaactactcaggaggctgaggtgggaggatggcttgagcccagaaggtcaaggttgcaataagctgtgattgcactgctgcactctggcctgggtgacagagactctgtctctaaaaacaaataataataaataaataaaaggagaagaagaacaaatagaacagaatgagagtagaacaaaatagaaaatatcagagtatatcacaagtagtaaagttttcatgaaacctttgtcttgattttatgtttatttaattatataattaactatgtatgtgcactgtatctcaatggtcaaaagagtttgaaagctgctgaatagaacatgtctcacttttcttccctatgccacccacatagttgagccattctcatgccccatcaagtcttttcttccctacacgaagcatttccatttctttccactcatccatatgtatcacagtctcacatttccttgccacactgaacacagttcaatgaatctagtttgtatgaaaaattgggacctggaatcaaaaacaatgtccctagctatgttctaactgaaacaggggcaagtagaactaccctgttcttggttagcagaatgcacttcactgcattttaatgcagcctgaagtgattagatcgatgaggatgtgtcacagagactccagagccagaggcccctgggctgtgtctcatagtgatgaaatacacagcccaggggcctctggctttggagtctctgtttagtcagtgtaagcctgcagataagctgaagagtaaccaagggcaagttacttctctatgcctcaatttcctcatctgtaatataa

SEQ ID NO: 2101 - DNA, 1021 bp, Homo sapiens
gttaatccatcacatacaatgggtgccttagggctttgtcttaatgtttcttcacataacctcagttgacaaaggttgccagcctcaatccacaaacattaggcatctgatgcattttcatgaccttaactccatctatatattgacaactcccaaatttatatctccagcccaggcctctatctgaacacaagataatgttctctccaatttgatgcaacctcttgtaaatatctgacatctcaaacttctcatgttcaaaaacaaaacccgatctttcccccaaaaactgttccactcagagttgtcatctctcaggccccaaattttagtcatccctgaacttctggtctttctctcacatctttcatccaatcctttggcaaatcctactgtacctatgtttcaaatacatccagaatctgaccaattcttgccacctttacttctaccaccctgacctaagccacatcattctctagagcttgaactattctagttgcctcctaattggcctccctgctttcattgttggacctctacagtctatttcaaacacagcagccaaattgatccagtcctttgctcaaaattctccagtagctcccaattacaatatgtatggtaaaagctggaaaccttacaatggcctacgtgatctgtagtgcctctttcctgactgctgcagtctttttgctgttcttacaatacattgagcaacttccacccagggcactttcccctgctcccgccccaaacccccatggcttactgctcatttctttcaagtctttgcttagatgataccttatcagtgaggcctttccctcccaaccttttaaaaattgtaacggccctaatcactcactatccccattccattgcttatttctccctattgtgtttattattttctaatattttacatggtttgcttatttatttttattgtcttccttttctactagtgtgcagtttcctcaagggcagagattttgtccatcttgtccactactatatg

SEQ ID NO: 2102 - DNA, 1055 bp, Homo sapiens
tacactgtgcctgtgtcttggtttagctcccttgcctacttttactttaagacacttatcacaatgatgatggtattatttatgtgatcatttatgtaatgactatctctgtcactagattaaagacctcatagggtcagggtctgtgactatttcattcaccattgtgattcagcatctgtggattgcagttgcaagcatggatagggatgaaattagtcaaagagaaaatttggagtgaggaaagaaagtcaagacagaacactagggaataccaatatttatggagctggacatgaaggcagatcccacagagaagtctgtggaggagcactggagaaggtaagagaacagggcagaacagtgtcatggaagtcaatgatggagaggattccaagaagaaggagagaacacttaatagtctgggaccaaaaaaaaaaaaaaagataaatgaacttgaaggcatagcaatagaacctatccaaaatgaagcttacacacagagataaaaaagaccaagaaaaataagagagacctggaggcaataacatgttgactgacatatgtaaatgggaggcttcagaagagaagagagtaaaagagaacagagataatatttaaagaaataatgaccaaacatctttcatattttatgaaaggtataaactcacagagctaagaaactcggaacatgaagcaagatacctactagggaaaccacaccaagaacttcattatcaaattacagcaagttactaattctgacaaaaatcttaaaattagagaaaaaagggcacattccatacagggaacaacataaaaataattacaacagagttttcggaaactatgcatgtcagaagacaatggagtaacatctttaaaatgctggaacaaattttgtcaatctaaaattctagacccagagaaaacacctttcaaacatgaaacatgtctttccttagacaaagaaaagttgtgagagttggccagcacacctgcagtacaaggcttgttaaaggaagttcttcaggcagaaggaaaatgatacctga

SEQ ID NO: 2103 - DNA, 1039 bp, Homo sapiens
atggttctgcaagctgtacacaagaagcatgacgccaacatctgcatctgttgagggcctcaagccactttagttcatggcagaaggggaaggtgaggcagcgcatgcagagatcacatggtgagagaggaggcaagagagagatgggggtcatactccttgtaacaatcagctctcactggaactaataaagtgagaactcacacaataccttgaggatggtaccaagctattaatgggggatttgcctccatgatccagacacctcccattaggccctacctccaacactggggattaaatttcaacataagattatgaggggtcaaacaaaccaaactatagcaattttctttaaggagttttatagtttcaggtcttatgtttaagtctgcaatccattttgaattgatttttgtgtatggtgtaaaataaatgtccaatttcattcttttacatgtgatctagtttttgtacaaatgttttcccagcaccatttgttggagagattatcttttccttgttgtatattcttggcatccttattgaagatcagttgaccacatatgcttgggtttatttctgggctttctgttctgttccattgatctgtgtgtctgtctttatgccggtaccataaagttttgattactgtggctttgtaatatgttttcaaatcaagaagcatgagatctccagctttactcttctttttcaagattgctttgattattcaggatccttcgtagttccatttgaattttaaggttatttttgctatttctgtcaaaaatacacttgggatttcggaagggattgcattgaatatgcagaaagttttggataatatggacattttaacatattaagtctttcaacccgtaaacacgggatgtctttctatttaggtgtatcagcaaaaaaaaaaaaaaaaaaaaacccttataaactaataaacaaattcagtcaattgcaaaataaagaattaatgtgtttctatatactaacaacaaacaatctaaaagtgaaatttacaaag

SEQ ID NO: 2104 - DNA, 1043 bp, Homo sapiens
aattcagaacctcttagaaacatcttgaggtctttggcaaatagattgggggtggagtggcagaaaatgacacacagaatacaggcccagagagcagcactctcttagacaagagccataagcagctttgcccagaagccacccttgtctctctctgccctcccccaattgatgctgtcagcgtctgccttgctcctatatctctaggaggtacccagattgctcaggagacagagcattccaagtctgcatcctttgaggggtggtagatttcctattgtgatctcttttctatatcttgggaggaggcaaatggatgcttagtacccactactttgtgtgtagagtggtgggcctttggaaaaatgctgcttctgtaaacaggactcttttccactgagattgtaaaatattgggtgaggtcatgcaagtttgtaggtatcacctagtagatccttcaacacatcccaaataaagcgaatatgagaaatggaaagctcagcgacaggatcactacttgggcaaatgtcaaacatgtggaagaatgaagggattcttgatctggaaggagaagtagttctcagaccaggcggtgagaggcgacccaaaaagccttgagaaagaaaataatggttggctgaatagagggggtggagtgtgatttcacctggctggccttattttagccgatgggcttcagagtgttgaagatttatgcacttgcatcccatctttagcggcttggagtctctgaaaattcagaatattttgagcagcattcaaaggtggagtgtgaaggaggataggacacaaaattgcacagggcctcctgttaagagtagtggtaacgtgtgacttgtaactccagggagtttaaggcaggatggtggcccatggccggcagcaatcacttcctctgccatgagtctgctgacacaggcattcattgctttgggcttccccagctgcttcagctcaggcctttcctgctactgtactttgggccaaggtatcacccatgagggccagaaattgttaatgac

SEQ ID NO: 2105 - DNA, 1082 bp, Homo sapiens
attatatcatttgaaatcacaactgatcagtgtcaggtagatgaagaaggtgttattatatctcttccccagagaggggggtcagtggagttaactgacctatccaggcttccttagttccccggtgggacagccaggatgaaagatagagttttctttctccaggtctccaagcgtcctgtcttggtctgtgtacagaaccaagtggcttctgtagtctaacagacataccagacctgtaaatttgtgacttcaaaccagaatttcccttcagctgtaagattctttacatccccccactctgttctggttaatatataagttagatcttaggactggagccaggctgggtaagaccgaaaagccattggccagtaatcctgtttttcttttcatcattattttgcgatgttgctttcttttttgaaatcttaaaagtttcgcatttgtatctgcttctaaatctatcaagaacggaaagtttcttcccaggactggcacacacaaagctactgtgagccttgggcatgtgtccaggcctttccagaaagcttccctgcctggtgtgctgagaaacgctctgccgatgaggagggcagggctctgcctcgtgttctattgtgctgtttgtgtatgtctttccctttctctgtttcttcgtcctcctcccccttcattcctcttttgtgtgaaaatgcttttttctggctgattgagtatctgagtttgtggtgaactttcaaagccttcttaggctaagctacaggaaggtcactgtcacaaagagtaaaaaaatgtatagatcgccagagttcattaaaaacatcagattgaggaacacaaaatgtccacctaagggcaagtctaatgtggacgaaggctcctctttagaactctcctagttcttctgaggctgcagctctccatagaggtaagtgctgtgtgcccatcagaaatacccacacgagcatgcagagatggaggcaaggatgcacatattttgtagttgtgacaacctgaaaataacttaaatacctgccttccagtagaagaatacttaattatggtgtgtccacatcatg

SEQ ID NO: 2106 - DNA, 1089 bp, Homo sapiens
tagttccaaatgctttaacgttccacattagtgaaacaatgatctacaccataatgaaaacagtaacacatttattttctttctgtttgtacttcaattccaaaagttaagcattaaattggctttagtcatacttatgctttgatgatagtccagcttcttggtgtgaaatcaagatgtgaagaaagttagacacacctgtgaaagcccagccttcactttcacatatgtgggtaataacttagtccagttatagtttgttaactaaaaaaacaatttctttgaagtataattaggtgataatgataattttaaaatgtgctaaaaaattctttttggctgaaaaattttggtaaagtgtttagttaagatgaggtgttgtgtctctgtcaataaaagatgcatggattaatgtatagtccctgtcatcttctccagccttcagcagtgactattccgggaccgtatggggtaactggttgctaggcaggcagagtgttctgttctgttctccttgtctgtggcatgtgattgagtcaggagtgttggtaaagtcttctttgaagatgaagcatagaataatagcatgcaaaacattttatcctttttatccttcagctatttgtctctagccttcagtgagtgggtgccccaacctaaagacaacatgctgtgttattactaacatactggagggagctgtgcacatacaaatgaccctgtctctttttgtgccctggaaccttgtcttcccctaggtggactctgtgacccacagagccatcagaagaaatcacctttgcttatcaagtttttgttctttatcttttaaagacataacttctctacctactgtttctgctacttgaaacatattcctctcattgtaatttgagaaacaaaaggataattttatgaggacattttcagtgttcatgctgaagccctggtgatccttgtcaacttgaatttatgcatttatctttccacactcaggcacttcctttcatcagatggatttctggcctaccggcagtcagttatttcctaacatattaggtggcagattttgtgggatttaatttgagc

SEQ ID NO: 2107 - DNA, 1762 bp, Homo sapiens
gtttttagtgtctgcttcccacttactttcccaggctttagacctggtggttttgtttacatactttctggcaagagtgtcgacagattccattacagggtgaatgtgtatttgaatgactgtgagtgaatgcattactttgagcacaagtacgttttgtgtttagcattttctgtaaagcagttatatatgatatgtgatcacagttaaaacactttgtcatatttttcaagtttcagaaggtcttgtgtgtaatagtccttatgaaaatattgatttaatgttatttcctgatctgtaatgggggaataaaattgataaagtgcccatttctgattatctagtgggaaaattttgctgatggagtatgaagtaattaattgctagtgtttcttgtttctctcatctaaaaatacttcctaaagctaatgtaaaataatttttagtttgcattataatgccatattaagttgtatatttgcatggtatccatatggacagtactctagattgtttctttgctaaattgaatctaaggaatacatgaagcaactttggtaaatgactgtagaggtacagtttgctcagacaaagcaatggtataaaatcatattcatagatacacagagatgaaagagatctgatggatttaaagatgagacaacaagaggaatactaactaaaactagtgacctatctttttcagtgctaagattgcaaatgaagtcaaatttatgttcagatagcctgattagcttcactttggaccaccttgggtccattggtatttattgagtaccctaaatggtaaaagtatactatactgaaattaggataatagtattacaattttctgtaatagtagtagtactacaggtagttgcaaatgggaaaatatcttaagtgacttatacagggactcaaattataagggaacaaaatggttttctagtctttaactactggtagggttttttttgtttgtttttttttccccctcatagacccaatgtcacctcccaattctaatgtaaattttgtttcttcagtaagatacaagaggtgggaaaaccttagttgacatattttaaactcatctgtggttatatgtaaattaaaaaaaagctgagcgaagtgaaatgtcttatacaattataaaatccaggcacagttaagatacagctttctgaaactattaatctccttttctttccccaaaggattgtagttccttccttagtaatacgtgaatcattcatcctttcaaacctgactaaattgtaaatggttctttcttctcagtgtcagagaagaatagtggatgggagaatggagcctctcccatcaccattttgttcccctaggacctcaaatagtggcatttcttttgttgttattgtttcgtggcagttggtaacctttctaaattgaatacactcagccatcttatctgagacaaaaatatttcaaaagttcttcttggcatctgcatattacttgggaagtttagaaaaaagatgtaaacattccatataccaaattgctcctttgcaagcttagctaccatgaagctaaaagtctaagagcttttaaaagttggtttgaataaaattattttggcaagagtattgtacaattaaaggaatttatgccttaagagaagtgaaaataattctgtgcacattagaaatgaatgtcagagccaaagttaggattcctagcctgtggtgatttgcttaatctgatgcttagcttattaatg

SEQ ID NO: 2108 - DNA, 1029 bp, Homo sapiens
atttttgacagtgatttctctcaactctgaaaacaaaaccccttttacaactctgagttagttttcaaatgttagggtttcctgcatgggtatttggggtaagtatgaaaatgttttgctgcttaaatcaaagaactctggaaacagatataaattgagaatggaaaaagagtagtgaataagatggaaatttctattctaaatttcactatatgggctacaattcccatatagttttccttagtgaacaccaccccccaacacacacatacaaacacaccttctgatttaaataacattatatcttcagaaatggaaaatgtgttaaagttgtgttaacaggcttccttcttgtctgtgtcccattctcatcacagtctaccagttagggatgtttagagaaatttatcttgtggcattgaagtggctttatgtgcattatatattgggttttatgtatattgcatactgtgaagtaatcatgatacatgctgacaacaaaagatgtagataagttaaaattttagttgatccattgtctgtttcttctttgccatctttgtagaaaaaaattaattcaagatggacagcctataaaaatgtatctttttctattattattaatttagatattggcgtgccacttttgaagaaggaaaatacttagctacattaaaagatttgcattgaagaagcaattgtgatatgctgccttttatcacagtgtgacttcccatcagtgctgagtaatgaagtttctgattaatatctatcgttgctttatcagaatatctttctctaaagtaaatcattcttgtgaataagaatctagctagttgtaatgcagttcagcataggtggaaataattttttaaggactaagtcaatttctgggattcagactgtttcagaaaagaaacattttctgtatttccactaatggcacagtgtaccttagtatgtttgggttagtattcagttttagcaataatcatggaggcaggggtatctataaatattatatcccaa

SEQ ID NO: 2109 - DNA, 1024 bp, Homo sapiens
aataaatgaaatatcaaaatcattcatgagggtactagatagcatgcggaaaaaacagtcattatttccagtgctcaaagttaaacattaaaaaaaaaatcaaatgcaagaaggaagtaggtgagggagaaaataggaggaaaatgtatggaattcaatgggtttcatgtgcatttcccttggatgttattgagctctaggtcaggtttgtagaagagaagcgatgcttccccatcatgctccccagtcctccaccctccaccctatcctgtggggcagagttgctatagattgatgacactctaggacactggaccatgtttgccagtagaatggttgctgcccactaaaaggtcatgcataatgtccacacaaagacctgtacatgaggtttataacagctttattcataacagtcagactagaaataacctgaatattcatcaatgggtaaatgtataaacaaacagtagtaatctttacaatgggatactactcagcaataaaaagaacaagctactgacatacaccacaacatgggtgactcacaaaacactctgctgaatgagggaagtcaaaacccaaagcatttatgctatatgaatttatatgaaacttgagaaaaggcaaatttaatctataatgacaaaatagatctatggttttttgaggcttgggatggagggtatgtaacacaaaagggcatgaaggaattcaggcaaaagatgatggaaatgatctatatgttgattgtggtggtgtttccatgtctggttatagttttgaaactcatcaaacttaggcttaaaatgggtgcatattctttcatgtaaattatacctcagtagagttgatataaacaaaaaggtcacgtacaaagatgtattatctcctgtccctctttcatgtgtgctatagaagcagtctaaagacctaactctcttttcttctcctttcttcctccatgtggcctgaatggggagaaagccagggctctcttgcttaggatgtgcccagccaaaat

SEQ ID NO: 2110 - DNA, 1042 bp, Homo sapiens
ctgatgttccattttctataaaacagaagagacgcttgtattttttaactcccaatgtgggtaatgctagataagtgtggaagttctttgacaaccagccagaaagtcctatagatatctaaggattcattactttgtattgtggttgctatgatgatgatgtggcaggattcttgtacttaaaatatgagacatgcaacagctgctctggggtgaggctactccaatgggctaaattcaaatgtctcatgcagtggagttgcgtttcaatgagtcatctgatatgctgatgtgccagggaatcagatacttcacagtcagaaggcagcaggaatcatgtgtgttgtggatgtgatgtgactgacgtggtgacagatacattcaaagcatcagcaggctctctaaacaaagctccttctaggaaaactgatcactgtggcaggctccctccaatgactgcaggctgggaattgaccataacagatcatgatgtaggttctagaacaagactgaggggtggaacaggagtcaggtggtcttcagagtgattttattgacattagcccaaccaaggctccaccatgctttgggcaatcagcacatctcagggcttggggttctggatgttggaatacattgcataactggtgcagtagcaggacatgaaggccaaggcagaaatttcatccgtactttatgtaaacccagtagactggtggtctcaaactccagagaaactaaaatccaactgttgggtactacgctcactatctgggtgatgggattattcatatcccaaacctcagcatcatgcagtatactcatgtaataaacctacacgtgtacccctgaatctaagtaaaagttgaaattatttaaaaaacaattgttcaaattcagatttctggtcttcattcccagagttcactattccactggtttggggtgggggccaataatctacattcaacaagccctttaagtgattttgatgcggataatgtacaatttccattttcaggaaataaaatgtagtagatac

SEQ ID NO: 2111 - DNA, 1070 bp, Homo sapiens
taagtgtgagccattgcctgctctggggcggggggagctggcggtgcagcccgccccggctcggctacccgggcatccccgggtgggcagggagggaggcctgcggggtgtctgccgcacggaagggatgggagccgcggtcgtggcgctgcctgcgcggggcccgggccggggctgctgctggtgcggggctggcggggttgctgccagggacggaagctggggtgggggagccgcgaggggcgtctgccggcctgggcggaggggctgggatgtggtcggggctgctgacgactttcgtcacatcgaggcctgggtggctggtgttagacacccctcccttcccacccgcaccctgccgccctcagccttcctgctctcctctagctttgcatgtagccaccgtactttgcaagccagagcttgaaaggaaaaacacaatttaggatcctttgctaagtatccaagtcccttctctcgctccgactgattgatgtgtttgtgtgggtggtttgacccccgggatttctgaagttttgacctttttggggtggctcgtttcgttgcatctgtttgcccacctcggtgtatttattattcgtgcccatgcgaggcagccagagggtgcttggttattgtacacgaaacagatttcactctcctctgcaggcagttcgcgaagtgccgccgccgcggctgcctttggtctgctggttaatgtcctttccctatcatccaccctgctccctccctctacggagggttagtttttgtttttgtttttgttttttcctttccacttactgtttgtgtgagagaagtcctgggcttaagggctctcagcactcgttcatttctcttctaaagctctgaatggctcaggcatgtcggtaaaatttggggtggtcctctttgctccaagagttgcatggccaaagataaaaatatgcacacataaacacgcattaattctgagagacggcaagcagtttgagagagaaataatttgttttcaataggaagtcggtgacctatgggatctcttccattgccggtgggttaggaaaatt

SEQ ID NO: 2112 - DNA, 1023 bp, Homo sapiens
taatttgtatgtgaaagttgatttgcctccagttttttaggaacatattgactacgtaaatctacttatacatctagtcaatcagaattcactcagagatattgggtcgatcagtcttcatgaaaatatacatctcctaaaaatactattttggaaatggatatagtgaagcctccctcccaaggtgagggaagggttacatgatatataatacaggttggaggaccctacacaatgtacgtggtgggtactcagatgacctttttttttccagctttactgtgtaaagatacttttatgaataggcttttagcaaacaaatacatctttggccactttatggtccttctttgagcctcaattttaaaagtcccgtagcatgcagtaaataaaaattatgcttaattgggttcttcataaaacacaaaaagcagattgcaatagaccagtataaagtactgcttagaaaactgaaaaaacagggatagggcttgtgtacaagaaagattgcgacagtgaaactatattttaaataatggtgacagttttgacttccagagatcataattcaagagcttatctgaagtggcatgtaaattacatacatacatattttttaaagtaggcaattatttagcttgactgtctcggttctgaagtttaattttacaagttatagttgcaacaagaaacaacatgacatgctgtggttatgcaattatgacaagagtggttggaggtaaactgggctaggataaacatagaaatgagcacacaacagtgtctccagtcaccaggtattaagaagtttctttgcttttttgttaactatattactagaaaatgtatttcccaggttgtaggctaatcacctaaactaatgattgctttctcttacatttgtgaaaggagatgcagcttccccagtctaaaatggaagctgagaagactaattggccaagctactggaaggctaggcccttttgctcatctcagcaacccccatagcagctagcacactac

SEQ ID NO: 2113 - DNA, 1048 bp, Homo sapiens
taaaccacatgttagaatatattttactttgcctggtgacttatggtttttcccacctgaactgggtgaggaaaggcgattgagaagttgattgttttcactgaagtgtgggaacctttttcatacccatcatcatagatacaagtgctaagggatgtactctcaacaaaccatgacatgcatgcatatcatagccattcctaaaagcttcttcctgaattccacagttgacaaggaggtctagtagagcccctgtattagcactatgtccttttacatgagacaattgaaaggccaggtgtaaagtaaggagatgctgcgggctgccaggctgtgatttgcaggaaacttctcaaagacacagatagtcagggtgacttcagtggttctatctcaaagttctgccaaaagcagtttttctaagataattttgttaacagttcttgcaattaataggttataaggaataagcaacatatatctcattatatgtttcaggtggataatattttgatgaaggaagtgagaatccaggaacatctcttgagttgcttagtagttgctgaaaattcagatattctggtttgtgccaggaatccatgacagtctagatgcgactcccaaaacaaattttatgcctcccttccatggcctccccaacacccacccctgcctcaccctgggatatccttcttcccctctactgtgtctcttgagatccaagatatttctcaaatctcacttcaaatcccacctcctccaaggagccctttttctgctataagagtggtttctcccttaccttccatgaactgctgtaatacttattttaggcttaatttattttattattagttttgatttttattatatatatttttgtccccagccaaatgtaaacccttctattgtgcccactgggccttaaaagtagattggtctaaataagtagttattgattgattgacagcttgtcattgatcctgaggctcacagtttctgtctatgaagaccttgctcccgtttgaagccttctttaatataatga

SEQ ID NO: 2114 - DNA, 1127 bp, Homo sapiens
tgtaatattatgtattagcttatgctgcatgcaaagtttaatgttttatcactttgttagttttgtatgtttggaatctgagtttagccttgtataacttatgcgagcacccaatgtagtaaaaatttggagccatggtttgggatgatgttgaaagtgccagtgtttaatcattgtgaatttataagtgtgtgcgttaatttgtaaggggattaaaaatacatgggtatttacatcctaccagatgaatagccatcaattgtaagaacactttaagttacagcaaatgattgctatttgattccagaagtggaggctgagaagcagtgtcattaaaggtttgtagtataaatagggaagcttattgcagagtatgtttgttactcattctcggactccactgagagggtcaaggagaggtaggtgaggcatcataatgtagcgggaagaatgtgggctatggattcagcggattctatcctagtttcgccacctcctaactccagattagtgatcttgaatgacaacggcaataattgacaatagtaataatgaaagctaacatgtactgagtgatgactctgtgcctaggtactgtgctgagtacacgacatgcactgttcctttaatgcttgcagcaactctatgaggaacccactactgttacctcttcttcacagacagagaatgactaagcctcagtgtgtttaggatcttgattaggtcttgtagctaatagtggtggtgctaagactggaatccgagcgctcctactttaaagtcagacttttaattgtcaactcccagccagttctgttttctctgcccccttcctcgtacactcctttcttctcatttactggttctttatgaagcaaatcagacattgtattatctgctctgtacataatagattgtcatttaaccacacaggtatattctaagaaatgtgtctttagatgatttcatcattgtgcatacatcatagagtgtacttacacaaacctagatggtatagcttgctgcacacctaggctataggatatagcctattgctcctaggctatagacctgtacaatacatctctgtactgaatactatgggcagttgtaacaaaatggtattt

SEQ ID NO: 2115 - DNA, 1037 bp, Homo sapiens
taaataggaaacagtttgaaaaggtcccatggtctggtttctgcacagcatggccatataaacttcattgcagatgggctaatggatgccaggtgagaaaggaagccctaaccttccacatcagggttttagaaaccatcaggtgggccacagacagtctgagttctcattttcactttttattaacctggcctctatttttgttacctaagatgatcgacataagacagagcagctggagaattaataactcaataatactgagattaggcagctaagaatgagaaaagtgtcctaaatagaaattgcagcaattcagtatttcctcgctgagtaggtagatgactcaatacacttggtaaaacattaaaattgctctattaagactggaatgttgtgttaatattgttacatcacagtggggaatggtttatttttgttgagggtggtttatttgcaaatcaaacataaagcctgaaaggaaacattacttttcattaaatagacggccagccgaatgaacagagaaggtgagtgaatttattctgctgcagcagcccagggcttggagggtttgtgcttgtaggaaaattctgcccccaaagagactttcatattccatcccatcagtgagaaatcactgttctactgggcttttcattgccttgcttttttttcccattattttgaatccagatcaacaaaggttattatttgggtcatttgttagggcctggagctttgtttgctaaattgagctataagttaaactgtttaccatcaaggagggatttttatctgtgttgagtctttgtgaggagagaggaatctctgataagctgctaactagatagaaagtgaaggcaattcccctgaaggctttacaccccttggggatagtctgacctttgaagaggcagttgtgaggccgatcaggtttcaccgccttttctccagcatcccaatctgatgaagtctcatgcataataaaaatggcacattagggtccttttatttaattctcacaatgcttcccc

SEQ ID NO: 2116 - DNA, 1953 bp, Homo sapiens
cagaaaactatgtttctgaaaaacgcccaggaacccgaggcattgagtctgtagatacagcggctggctgtctcactgtggggactcttggagcgggatataggaaatgaagtgacaagactgtcagctttgccgttactcctggagccttgtgaagaagtgtctctaccatgaaaatacggtccctgtgtggtggggttatcttcaggcctcttttcccatttatagtttgctgggaagtcaaaaggaaaaggaggaaggagattctcaaaatcagagaggaggagcaaggaaaggtcactctgccttaaatttgccagttttcctgaaaataatttttctttgtatacatattgcagttgcttcctccttcatctcaggtaaacctattgaccattgtgccttcttgtgtgatttacaataacataatatttatgtatacacagagagcttttgcaatagaaggtgtgccttgagaactgcagagtgcgtcttccctgaacctaacaccggaccagagttaagagttgctcaataaatgcatgttgaattaatttcactttttctttttctagaggatctctattgctcaggctggagtggtggggtacaaccatggctcaccgtggcctcgactcccaggctcaagcgatcctccctcttcagcctcccaagtagctgggaccacaggcatgccaacatgcctggctaattttttaattttttgttgagacaaagtcttgctatgttgcccgggctggtcttgaactcctgggctcaagcatttctcctgcctcggcgtttcaaagtgtgagatgataggtgtaagtcactatgctcggccggatttgattttagaccctggggaacccatctttggactgtttctcaaagagagggcagatattattcagcagaatcctcattgagcattggtcttactgtgagaattactgtgtttgtgtacaccaaagcttgactatgtaaacctgaactaagtgtaagagcccttctggtaggaaaaaaaaaaaatgacactgtattagaaagacaaaatcagacagcctaaccaaactatgtttttgtcaataaatgttcaaattccatggtctatttttattttcttacatagctttatttaaaatcctagattgacttgttttttgttgatactgttcctttgttaaaatcttggaaaaccatttgttgagttttatgacttaggagctaaaactgatgggtctcatgaccagtttattggttcttttggccacctttaggtcaattatgtaatgttttcttcttacttttgtgtggggggaaagcaagccacctttgctttcatgattttgtttttcaacgtttgagattgttagaggtacgtgtgatgaaggtcaatacttaataaacagtgcattggttgttggattggccacatgtgtagttttgggctgctatcttcttggaactttcattttaaaaatgatgagacataccttcctttggttcctcctgaccctcactcaacatgacattgttccaggcactggagcgtggccgttgagtaaagttgtggggtgttgcattggagatgggcataggtagcccaagtttatgtgtttaaagaacactaaccaggaagccaggaggcaaggacctctcctgttggctttactactaattaggaatgtgacagtaaaaaatcacttagcctctttggaccttcttcttttgactccttactcggtaagtgtctagactagttttcaaacttaagtgcacatcagaatcatctaggaagataattgaagcaacagttcctgggttttactaacagataatctgttcagtaggtctgggatggagccctgaaatttgcttattttgcgtgttctgttctgatggaggtggtctgtgagccacattgccaaaaacacatggcgtaggtcagtg

SEQ ID NO: 2117 - DNA, 1043 bp, Homo sapiens
gagcattcttggaagaagtccgatgggatggctttggctgatggataagatttcagtgggtcaagatggctagagaaagagtatcaggcagaaaaaggaataagcaatagtgcagcatcagggccgtgtggatgttcccgttgctgatcctatcctctcccgctcatttccctttcgaaactcagctcgaatatcaccttgtcctaggtgtgttcctgaggaaggctttgtttgaaatgcttgcagattttggaatcaaacacttgccttcctcttggtcaagtagcttaataataagcaaaatttgtgtaacactgtaagccaggcagcattcttagcaccttgcataggtctggtcatttaatcataacaacatccctaatgaggtaggagctattattattctcattttacaggtggagaactgaggtgtagaaagggtaagtaactcgcttcaggacacacagctagaaagtagaagtacaaagagtagaacactggttctttgagttcagaaactatgctcttaaccactccactagaaccttgctaggcggcagtttatttgtaaagccttgtgaaaaaattttcagcacactattcagcatgcggtagataattggaagtcttttctattgttaatatttcctgtctcctcagtttgattgataggattttcttcccgtacatatctctctgagagcattgttgcactttgccataactgttgaattgtctatttcacatgttagacagaaagcttcttgaggtcactctacgtacagaacttgtcccccaatggcttggtaagtgttgatggactgaacgaataaaatgttttgtctggcacagattgacttgctgcagggaaagcagtcctgtggagtggttcatacgcaagacgttaaggcatgtactactaggttttaatccagcccctaccatccattggcattatgtcttgtgtaaactatttatcctcccttaagcctccacttccttgtttacttaatggggacaatgagttgttataaagagccaag

SEQ ID NO: 2118 - DNA, 2051 bp, Homo sapiens
gagtaaagcttcatgaaaaacttaatatgttgcccttattttttacactttgcagaggactgacgttagtttccatactggcatgtgggaagctgtcactgacttatgacttgtccattcattctaataaagtcacctcacagatgtgtttataaatgcattaaaatcaggcatgttttcagagaaagtttttagaatataaaatgttataatgtaaaaccacgcccttttttcagacctctctctctctctctctctctctctctctcgcaaggagctgctctccttctcctttcttctgtctattaaactttccactctttacccccccacccaaccccataaaaaaaggaaaaacctattaatttatctggacctttttttttttacctgattcgactacactttaaattaaaacgtgctttgtttttagagctggagtttgttgctaacgaaagggtaattatagttcacaggaacactcaactcattggaacatacttgctgtagatattgaaaaaaaaatttgttcttttgaggcagggacaggagaaaagccaaagacaatgagacaggttttctggagagagctggttaatgcaatgcatgtggcccttaggagggcattagttagcagagccatgtttctcataggtgcattttgtaaaatgaaagttttagttcctatgaaaaaaatgttacatagggataatggtgaagattaattaaaagggcataatcataacctctctttattaccattttatcataacaattacattaacataatattattggctaaatatttcccttgccaagtagaaggatgtgattgtatggaccctgtgtttagaggacaaaatagttacccatatgggtgatatggtagagacttctatgaattttctcgggagattaactctttaaacacagaaaattttaattttgacaattttaatgatagactttagaattcaggaaatgcttcacactttggatcaaagtaaatgcaaagcaatttagtcttttcttcttcatgcctttaggattattgcgatggatgtcagttattatctcaaatgccatcgagagatgctcagggctgcttgaattggttccagagcttggtgcttcagagtagagtatacagtcactttttatatttttctgtctctctcctcactgtctactatattttatttctattccttttcctattcttcagcctcaccttttttactggcttctttcccaagcggcaagtatgatttgtcagctctatcttttaagaaatcctacttttgtgtcgtctgatcgagctcaacactccctataaattattcttgccaaaatattgaacctgaatttgatcaaatcactatatccaagtgccaatctgcaggatatagaagaattaaatgaacatgttaaatgatacttcaatgatacaatcagcaaagttccaaaacaaacagaactttacaggacaaataaccaaggggaaaagaaagacagacagacgtgtaatggatacctatagatcagaagagactaaagacacttgtcagccagtttcagtgtatggagcttacttgggtcctgagtgaaaaaaaaaacaaaacaatatgaaaaaatatgaggccactgggggaagttgaacactaatcagatatttgatgattttaaggacttattgttaattttttaaggtgtgatagtggtagtatggttatgattttttcgtggttttttttttttttttttggagacaggtactgatatttcgggatgaaacgatgacttgataattgaagtttcatcgtgggtataagagactgcattatactgttttctctactttgagtatgttgaaattttccataagaaaatattaaaaagcaacaacaacaaattaattatctgttttgagactcagtcctgtctatctgtactgcccattacttcacaaacatttctagatagagtggcttctaatcactgtagaggctctaatttttctgggctgttcttacagtttcttcttctgtgtg

SEQ ID NO: 2119 - DNA, 1034 bp, Homo sapiens
ctgaactaggtggatctcaagagtgggctctccttcctcgacagtttttgagatttcagaacattagtaaacttacaggtactttaagagtatgtatggcaagcagtagtgcccaaatacgtatttgaataaatacgtatttttggtatctcctcaaaaagttcactccttggccatgtgttgcatagggacatgcctttccatcttgctttctgagtgggaaatcaagtgagaatgggccacgctgcacatggttcttctgtgcccaccacaacaccagtgcgatgggtgggtctgtgcatgacttctagtatactgcagggcacagcacaccaacatagtgaggcttgtgttttgctgcagtcactgcccattctaatctagctttcttttcttgcaggtgcacacatcttgaccaactcagcagcaaggtggattttctttgtgtttaaagaaaaaaaatgtccctgtgtctgtagagatgatttgcagttcagcccggctgaagctgaccgaatgagactatgggctgtgcctccgccaagcatgttgccactgttcaaaatgaagaggaagcccagaaagggaaaaactaccagaacggagatgtgtttggcggtgagtcctatcaaacttgactcttgacccattgattctaggcctttcacttttttttattgatacataatatttgtacatatttatggggtgcttgtgatattttgttacatgcctagaatgtgtaacgatcaagtcggtatttaggatatctatcacctcgagcatttattgtttctgtgtgttgggaacatttcaaaacgtatctttgagctatttggaaacatacagtacattatttttaactatagtcaccctactctgttatggaacattagatcttattccctctaagcctttcatttttgtgacagtgaataattacagtgattattgggttataccgtctgaggtgaaagggtgatgagacctaatggaaatcaatgtggatctttactttggatcatctacatcat

SEQ ID NO: 2120 - DNA, 1052 bp, Homo sapiens
atggtggcagatgagtgatagtgataggcccactttttaaccatttgtaacccattatttctgtggtctcttattgtgtaacaaataccccaaacatagtaccttgaaacataaccagcttattattcctcacgattctgggggatggctggagttcatctgttgttctctcccgggctcagtcatgcagctgcatacagctgggatctcagctgaactcagctatcccagatggatttgggcttctgtccacaaggccactctttccagctgggtagccaaacttttcagcccggcttccaagagaaaaagtggaagctgccaggcctcttaggacctgagcttgaaagttcaagaatgctacatttgctgccttctgttgatgaaagcaagtcataagaccagcctagagttgagggaatagagtctctccacctcttgagaatgtgcccgtagaaagaggaggaattgttgggagccgtctttggagaccaacgcccattgcaagaggaaattatgactccatgactgggatatatttcaacctggacaattatattctgctttctaaaatacccctctgtttttcaccgaataaagtgaccttatttatgctttaaaagctaaacatttaaaatgttttaaatgttattaccacatgttgttgaagatgtgacaaagtctgtgaagggtggcatatttggggatggctctgaagtatgtgtctctgagtgtgtgtacacacacatttgatccttttcctaaaggtgttaatttaatttcaaagcttctgaagacatcctcaggagctttgatgcccaatgtgtttatacaaatggtaatttccatttttttgaagcagtttgggcgccatgatgtcttggttatttaggagctccaccacaacaaatgtgtgtgacagaatttctgtagcatgttccaccatgcagaattaaatgctaaatgggcatcttgactcctagatttcagaaaatttaggaaatcattgacaaggaacttcaccagtgatatttacttacatattttctttc

SEQ ID NO: 2121 - DNA, 1031 bp, Homo sapiens
tgagcctgaaggtgagaaagcttgaagtgtgtggagttgtatctctgcttccaccttggctggctggtttgtaaatttatctttcatccactgatgcttaaattggtgctgtgcagctgctgctagtcagtgaaggattccatttgttggctttctgtttaaaggtttgtggtagaagtcagggtagggtagattggtcctgttgtttgaaaaggataatgaaatatctaatagaagacagttataaacaaaatctaggccaaaaggagaacatttaatttcccaggttgctgattttctcaagagctactgtactatgatctgatcactctgagagtgtggttttgtttattaacttatatagctgtactctgttggtccagccagactataatagggcaagaagaagtaaaaatttacagaaagtcagattctaaaggattatatttctgtggctataatattaagtatatataaaattctctaaaatgtaactcacaacacatgtttaaactatgaataaaaatggtctttgacagttttttaaaggttacataattaaagtttcttggttggaacagccatagctggggaagatgcctgctggagaggacacaggccgtgaggaatacaatgtttatagtcagctttcttcatagtaataatctgtgctggaagctataatataaatgtacatttacattttatctaaaaataattttaaaagtttatgtacatggctataagcattgaaggtaaaagagtaagggtgaagtgaaaaatcatgatgttaaatagcacatctttgaagctaattaattccttcaaattgcaaaacagtcacacgagtacaaatctttatttagactacgtttgattttcatttgaaaaccacattcaagacaagctaaattacatttaaattcccttccagctatagatatgcatgcctcactgtataaatgtcactgttgattttgatctataaccaaagaagaaattgtcaaattatgtatgaaataggattttat

SEQ ID NO: 2122 - DNA, 1043 bp, Homo sapiens
gtcttcggttcctgtagccctatcagccttttcttgttacacctgtcttacctcctggaattcttcatgtctgccatgttgcatgacttgctgttccccccatttgctgtgctccctttggctttggaattcactgaccccttgcccgaaagctccttcccacacataggagctgtgttccttaggactccactgagatatatcacgtcctccaagactccgcttaaccttgattaggggtctcttctttctattcttataaccaccacccccacatgtgcttttcatggccataaaaactgtacacactactttcttattttcttacatcctctcctactcgccattaactcctttagaacagggactgactgcttcctttcctagacatattcccagggctgagtgttgtctctggcacacagtaggtgctttataaatattgttgaagtaaagaagaaacacagaaaggatagcaggggatagtgcccagcacttgactcaaggacagaaagcagatagtttcttccatctttatgtctggactaaaatcaagaggtatttttgctcagacctttttgggccagaagtgtccccataaaatggtgtgatttgtgggagttcatagaagtcaataagaaaaacaccacacctctaataagaaaaaaagggcaaaggatatgaagagacacttcacaaataaagaaatacaaataaatgatcaacacataggaaaagtatccagtgtcactagtaaattttaaaacattaaacaaaaataaaaattagataccattttcatccttcaatttattacatattttacaaaatgataataccctttattagtgaggctgcactgagatgagtcttacaccactgtgttagttcatttgtgctgctgtaacaaaatgccacagactgggtatttttgcaaacaatggaaatttatttttcacggttctagaggctgggatgtccaagaccaaggtgcctgcattttgtatctgatgagagtccgcttgtgccttcacatggcagaa

SEQ ID NO: 2123 - DNA, 1060 bp, Homo sapiens
attgcttgaacccgggaggcggaggttgcagtgagccgagatcacaccatcacactccagcctgggcagtagaatgaaactctgtctgaaaaaacaaacaaacaaaaaaattattaagagtaattatctcagtctgccaggatttataaatattaatgtcccaaactgaagttagggaggcccatttttaccttttttttttaccttttatttttatctctgtgtaattgtgttgggggcaaatttgtcagtgtcttctcttttttaattagcaattgtttttccaaattctcagtaaataatccttcatcaaatttgtcagtattattaatttacattcatttttgtctcttcgaaataccaagttggtatgtagaattcttttgtattgtaattgtggatcagaatctgctgattaacttgttaatatatttaggacctggtattcctaaagggctcattactgaacctcacactagtctttctaatatctttacaaaaaaatagaatcaataataactctaaattgtcaggtggaaaaaacagttggcttagtgaacatgaagtctttattcagatacatgcaaatgtattacattcttaagaatgataattttgagaaacatttgaacagcataattacttgcagaaatattactgtaacgaacatctttgggagttgtgtgttaaggggtgatatgatgaggaaacctgaaactatattagaaagtggtgttatagatactaagataagaaattaaataagagtatagtctttttacccatttaatcatagttaataagaaaatatattgcaactttctgaactgaaatataaactctcttagtgatagacagctgtctttcaggtggttcctatagttagacattacttcatgctatatgccagacaatcgttagtttgttggttgatgatattttctaatttcacaatttctgtgatgtttcccacagattgggttaagaatgattcagagtcacacctatttttgactttagtgcgctcaaatcatttcctgttgacaggaatctgatggaa

SEQ ID NO: 2124 - DNA, 1030 bp, Homo sapiens
tggttcagatcatggctttgcaacttattagctgcatgaccttggccaagaatcttaacacctttgcactctttaccatatcttacttttacacgcttcacctttaaaatatcttacaagggtgctagaattaaatgaactgatgtctctaaaatgcttaatgcaatgcctggtacataataggtcctttgcaaatagtagatgctttagttattagtaatctaaatatagtagttattattttaaaacatatcccatacatgctctattcttctagtcgtaactagtcttagagaggtagaagaatgaagtagttaagagccggactaaatctcagttatttagctctgggccttggacaagttatctctctgggcctcagtttcctcatctgttagatggagacaataatggcacccaccacatagatttatttttagcattaagaatggtgcctgctgcataataagtgctgcatcagtgatagctttgatgatgacaatgatgatgatgacagtgatgatgaaggcaatgatgatgatgatgatgacagctacatctttggaccaaataactttactctattttaataatataagtaattctgtgccttttgagttctttttatgctttcccttggtcatacttcattaatttctcccgagagtcttaaaagtctcttttttcttttttcttttttttttttttttttgagctggggttcacttctatttctcttttgtctattttgtttcaatattttcatcagctattagattcatcaagcccaacacttatgacttttttttccttatagctatttttattcagcaactatcctaccttgaatttatgatcttgcttacttatttccaagtggaaaactgacttcatgatcacccataccctactgaacgtcagtatcctccctttaagagattgccccttttcttctggtatttggggcaacagtcttgatatttgtagaaatggcattgtggtaatattgatgcaggcagaaacattttgg

SEQ ID NO: 2125 - DNA, 1020 bp, Homo sapiens
gtcatcttttgtttttgttttttaatatatagctaatcatgtcattccccagtataaagcccttcctacagtggcttcctgctgctcccgggtaataacctgagcagggatgacctctcactcctctctggggtcctctctctcccttccctctggctcaagctctggccaagctccttccccactagagcctgcactcctgcagcttcctctcttgactgctccctgacccctcccaccacatcctcttccccacacaggtttcattagagcatggaaccctatacttcccctttgtaactcatatcataatcgtaattaaagtcctgtttgctctaggcccctacttctaggtggttaatagctgtttccccagtacctagcctactgccctagcaggtcataagtgctggataaatatttgcaggatgaatgaatgaatgactgtgatcttgaacataatgttaaagaaggcatggtcttttatttttaatacttccggtagatccaagacttaggcaggttggatgctaagaaataaggcttcataacaacttcaaaaataaatgttccgacatgattttttttcagctattggttctttgacaaagaataaagtaaaattaaattatattgcaatcctcatttcaagtaagaagtgactagttctgtatacctttcccaattacaaatatccccaactctgggaacttgctccacacaatcccccataaaatgtccttcaggaaagggtgaatggatgccagccagttccacaggaggccctggccggggctggggagtgggcagtgaatggggtatgtgacggagcattttcttcaacatttggtgtgtacgtctctaccttgggctgcctttgtttctttgccatatccagacttgtacttggtccatgatactcagacctatggggacagaagttggttggcagagtaaagtcatgtgaatggttctgattcgacccaagagtggggtgggatctgtctgagagagcattca

SEQ ID NO: 2126 - DNA, 1044 bp, Homo sapiens
gtcatctttagcttgtcagttattgtcacaacttgttgggaagatcatcagcttagccacatagagttgcctaaatatttgagcagaaaccccagcccttctgcagggtctcacgtgaacatcctaccagatgtggggatatcaaggtaaaagacagggcaattcatataataataccaacagcatacactatgtgccaggcacagttctaagcactttacatgtcttaggaaaaggtttttcgtatccttattttagagatgaggaaaacttaaacacttaggtaacttgcctggggtcacacaaccagtaaagaatggagctagattcaaacccaagcaggctggctgcagtagccagaatgacccaatcgtagttcacagtagtattcactcaagggattcagtaggatccataatgattcataggacagaatgcatatctcaacaaaacatatgtttgttttgtgttgtctgaaggttgtagatgaagtacctggcaagcatgtcagaattctgagctgccactggatgagaaacttccatgtcagagaatcctttctccttcctacatggagaggtggtgagttagtgagtacaataagagatagtgcttatacgtagatgagttattagaaaatctttatggagcacacgctatgtgtggagcatgtgccagtaacaagacaaggatgattgtctttgtgtctctgagaatccagcagacctctagggagaagaaggagagttcacttcaatgagcccagagtccctcactctcctggctttttggagactgcctgccttccatagccacattatcctaagggaggaaagaaagagttaacattccatggccttatccaaagccttctttgactgttattgggaaacagtgctttgggggatgatactgcttagtgcaaataaaatgtcctctggcctgaaccttagagaaccctgagcatggcatccaccttgctgtgggaaccaacactttaatttcctttcctctggctcaacgcctgtaatcctggcactttgg

SEQ ID NO: 2127 - DNA, 1460 bp, Homo sapiens
aagtaataataacaactactgcttactactctagagttagaatatatatgcaaaatacctagactggactaggtagaagagatagaacacagctgttggtcttacagaataataataataattctccttatttacttatttatttattttgagacaaagtcttgctctgatgcccaggctggagagcaatggcgtgatctcagctcactgcaacctgcgcctcccaggttcaagtgatctcctgcctcagcctcccaagtagttgggactacaggaatgcaccaccatgcccggctgatttttgtatttttagtagagaccaggtttcaccatgttggccaggctggtcttgaactcctgacctcaagtgatccagcctcagcctcccaaagtgctgggattacaggtgtgagccaccacacctggcctaataataataattctctaaggctaagagaacaggagacaataatactataacattctgtaaattggaaagctgagagagtgaagagttgcatttcttagcaaacccaagaaagccagttatatgtagaatgaaccagaggctcaggaattgctagcactagggatctctggaaaccttagctggggtcttttctaattcagctatcacaggacacagcgagtcacctctgccatgtttcacctgctgcttacacggcacacagtccagaattagaaggtgaggtttgaaaattcacctgttttcgttctgctacctacagaagttccacagtagaaaggaaggagacctggatcaaaggataggctttaattatgccactaacagtatgaacttcatcaagtcctttactctctctagacgttagttaccactgatgtaaaatgaagggctagactagactacccttaaaagtgccatccttgctgtcaaacctcatgatgttagaacaaaaaagtatttcaggacaagactctgaggttgacctggttacttttcagaagtgtgtgcacacacatatgcacacacataataaatttagaacagaacaatattgtattctgatattattcatgaggataattaatagtatctaagaattattgaatatccaccatgttccaggtacttgcactatcttacttaatctcatttgatataataatagtgttttatgagagaaattctgttatcttcagtctacagattaagaaactaaggctctaagagtttaagttacttacagactttagaaacattaagtggcagagtctagcttttaaagatctggccaccttcagagccctggttctctagacctcaccatgcacctcttttctgaacactggtgcttctccagaaaggtcatcacattcattccagttcctatgattgctttcagtttgtagtatgactttattaccttcaactggaaaattatttggggtgtccccctgtaaagtggattggcatt

SEQ ID NO: 2128 - DNA, 1077 bp, Homo sapiens
gagatcacgccactgcactccagcatgggtaacggagaaagactctgtctcaaaacgaaacaaaaaaaagaagtgaagataatatataccttggaaacatcggaagactcaaacattttgtgattctaagtgattgtgaaaactctgatgtcagatgcatctggaaagtttaaattgtttcatgaaatgtgcatatggaaaaagtaatacttttaaatatgattttcacataatatgtgaacttaaatatatatgtcactgaattaacaaaccatataagtagtcagctgaaggtttcaaccacatccctaaaggattacgtatttatgtttgccaagacacatttctgaggatctcattggaaagacaggaaccactttacatttagacctatatgattcattaaagctcctaatcatgttctttaactttttttttctttgccttttactcaagtaggaaaagattttcacttaagtggagaggcaaggaataagggcaaaaggaaactggctcttaaggctgacttgactagcaggacctagggcgtgaaaaagaatggagagaatgtgcttattatatctttaatgaacccttaatttgaaagcctcctagtgaaagagtctcagagggaagagccgtgagagcagcaggggatgtggctcatttgttctcactctttctccctgaccagcagctgtccctgtcgggctgcggagggcccagtcctgtcactatcccgcatccacaggacgagctcagctcgggtgtcttaggggaatgcacaccaaattcgagggcaagtgtgaagaaagaaagtatgggagtttttaagaaagcttctaaaaggctgaaaagatacgcaaatgaagaaactcggggctcaacacaccactttaaaggactacaggatcctgtttgcagagtttagaatgaagatatttctagcagtacatttctcaaaaaggaaagaagggagaaaaaaagaatggcacttagtctctattgctaaataccgtatttcaattttgaagaacatttttaacccaaattctagctacaaccagtctcttccta

SEQ ID NO: 2129 - DNA, 1051 bp, Homo sapiens
aaaaattaatactgggggtcattttttactatagcataacctaccctattctgactgattaaaaacactctgggtaaaaattgaatgtggttcttccaagttcgttgattttctgtgtgtgtatataatacttatttgaaaaacttggagatatattatctttttaaaacagccttaacttataattcccagtggaatttatatcatagcttattttaattattgacatggtgacttaatgacttttaataaatttgttggtatgcaattaaatctgttctgagcaattttttacaactctgtttactttcttaagattgtaaatgtttgcagtctaccttgaaaagcaactttgtgaaaaatgttaggtgctttaaaactgatttgccccacttcatgtttgtttgatataaaatgagatacatggctgtattttaatttatagaaaaataacttccaaaaagctgagactttacatgccaactttattactactaaataattgtaacaaaatactaataactctaataatctctgtggacaggtaattgtaatggaagtattgacttcaggtaattgtattgatactggtggcttgagttaattgttgaatctggcagcttgggcttcatttgtaaacatcctgaaattctgagagtcaaggtggcttctctgatcaccatcattcagaagacaagataaaattcctttgtatttgaaggagacagtgtcctatctcatgttaataccgcttgagaaatcaagtgtaagacatcaaatgggattgttttcttagagattacatcctgtgggttactcccccaaagctagcattattgtttattttatagccaaatttttaaaatgtgtgtgtacttcaccacaaatctcttgcttctagttgtcaaattattttttctagttttcatgtgcttctgaaatgcagttgtgcaaatgtacacacacacatgctcacagtctgtgtgcagggcacaccctttgagagtcccaatttagtgcttttatgtctcctctctgtgtagggcactca

SEQ ID NO: 2130 - DNA, 1054 bp, Homo sapiens
agggaaggaggcagcatggtgcaagagaaagagcccatgcttcaaacctgggccaaagccaaggattggctctggcagcagctgtgtgaccccaggttaagttaaactctctgattctcagttttctcaccaataaaatttgagaaataatactaactggtctgggatattgaagaaaatacacagagtctccagtagtgtttgctgtgttgtatgtgctctgtaattggtagccttcattttggttgaagtcgcctgtgtttgtaccatcaaggccatttatacaggaaggatttgggatgggcttgttgggggtggtgctaaaccgaacctgaaaatgcagaacttagaaacttggatcctgcgtgagcaagtgccttcctacggtacaaatatctccttgtagaaagagtagtagaatcgcacagtttccagtgtattcatccacctccctcctatgtggtgtaataaacatgttcaggagttagattcttgtgaacacttacagagccattaaataacctgtgctaactttcgagctgtgattacagaatgagtcagtgagtcagtggcatggatacagctacagctgaatccctatatatttttttctgtttggaagttttactcttaattgttgtgtctcatttgaaaggcttttataagccttttaaaagatattcattggccaggtgtagtggcccatgcctgtaatcccaacactttgagaggctgaggtgggaagatcacttgaggccaggagtttgagaccagcctgggcaacattgcaagaccctgtctctacaaaaaataaaaataaaaattagccaggtatggtggcattcacctgtagtcccagttacttgagaggctgaggcaggaggatcacttgagcccaggagtttgaggtggcagtgagctgtgattgtgccactgcactccagcctgggtgacagagcaagactttgtctcttaaaaaacaaaaaagtattactatcagcctaaatatgcttgtaacaacaacaaaaaaaatttaggaaaggggctccaaaca

SEQ ID NO: 2131 - DNA, 1015 bp, Homo sapiens
atcaggcattggattctcataaggagcacacaacctagatccctcacatgcacggttcacagtagtgttcgtgctcctatgagaatctgatgctgccgctgatctgacaggaggcagagctcagcttcactcactcgcctgtcgctcacttcatgctgtgtggcctaattcctaacaggccatggaccagtagcggtccatggcttggggactagggacccctggcctagactatttgtctattttaaacctgtggaggaaaagtacgttaggcacattggaggaacagtttcttaaagtcactctttgagctgttgctctttaaactagcaggatttaaaattaggatgatgtcctttccttagtacttctaattcttatagacacacttcaacaaacaaaaaccccttacactagaaccttagaaatgtgtgttctgcactgacatcaacttacacttccaggaggataataatacagataactgaagaagacgtggaagcctctacacagagtagggtgtggtcggaaaaattttggtaggcaaaggttccttggggttttttgagtctgcacccgaaggcactcatggttctttcaaacaagccttctttgtcaccatcactaggagtttctgttctcccagctttcgagggcctcctagggatcttgctctctgcagctttcagtgtgtcctttgcacaagggtgggattgtgactaagatcctccagttctaattgagtaacgcatcctgacaaagacttccatttggggttcctttaagggggaagggcatacttctgcgaagaattgctgtgtatctcccaaacccggctcccacttcctgctttctgacagctgaaggtcttcaggttctctttttggcacagttctttaaaaattaaatgagacatgaagtcatgctacagaagcaggctccctgtcctgcccagtagggccagtgtgcagatggggtcccctgtgatgctgagatggggcccctccaatgacaa

SEQ ID NO: 2132 - DNA, 1025 bp, Homo sapiens
ttgagagaaaattgattacaagtaactatttcaggctctgctttgaatttctcattcacatgctcttttttctttttccctccaagggtcgggattactgttcggaagaagaggatatcacatagcaccaattttaccactcaaaccaggagctactactgtgtaaataggttacaccccagttgaaatctttgcaaaggtcggttctattcagcgaacagcactatagcaaaagaagatcgttccatattgtacgccccattaaattacagtgtttcttaatgaacttgcaaaggaatattgctaaaaacaaacaaaaaaaactgttatcgaactttctttgttgctgctagttaaaacttgttgcaacttttcacttctcttgtgtccaggtatgcagcaaaattctgcaatttcaccttaaagatactgttggttttacagatgctctccaacctattttctataagatgaggtagtggtgaactcagataacaaacttctcttctaaactggttctgcttctaagacaagcatctcctgccctctctccttcctccccatctctcgcacgcagtctagagatggactgagccttgcttctcactggcagtgttgagctttggagatgggatggttgctatgccaagccttgtttctctgctcagaagaagtagagaagctattatcaattaaaagcatgctgtgatgtgactcctggaagtgacgtaggagtgagtggcaggttgtttgatttaataggtatcttaatcaagaattaagcttgcaacattggctttgctcagatgcagatggaagtgtgatcacaatcattttgaatccctcttcctcacttttttttctaagaaaataaacattttactgtttttatggatccttgtcttctcccattcatccagctcagtgttttaagatgatcctgggtgcagaagttgagccctcctttgcattgacactgataattagcctatagggctccctacccttccattaagaatctacca

SEQ ID NO: 2133 - DNA, 1103 bp, Homo sapiens
aaggtggcccacacctgtaatcccagtgttttgggaggctgaggtaggaagatcacttgaggccaggagttcaataccagcctgggcaacatagcgagatcccatctttatgaaaagttaaaaaagtagctgagcgtggtcatgagtctgtagtcctagctgcttgggaggctgacatgggaggatcgcttgagcctaggagtttgaggttacagtgagccatgagtcactgagccactgcactccactctgggtgctggagtgagaccctatttctctctctctttttttttttttttttgagacggaatctcgctctgacgcccaggctggagtgcagtggcgggatctcggctcactgcaagctctgcctcccgggttcacgccattctcctgcctcagcctcccgagtagctgggactacaggcgcccgccaccatgcccggctaattttttgtatttttagtagagacggggtttcaccatgttagccaggatggtctcaagaccctatctcttaaaaggggaaaaaaaaagggaaacagaaatgaaagcttctgatctcaggcagaaaccaacccaccaaacaaaaaaaaacacacaagatcacaaaaccccgaatgtgcagcctttagcaccaaggccaacagtatagaggaaaacgatagctagctcattgtttcaaatacatatgcaattatggcaggtggatgtggagaagtatggaactagctattctctttaagacagagtgggaaaaaaacggcaggaatcattagctatgacttgggggaagctagatgtgtgaattttaatatgcagtatacctctttttgacttagaagataaaagattagaggaaacaactggttgctggctgaagtattcaagttgaaagacattgctaaaggtagagtattttcttagctcaggagaacaagactgtttttaggcaatgtactgtcagaaacatttagcatgctttgatccacagaatattacagtttagagagctcttgatgctacttaacataaaggtttaaatttacaaatgaggaaactggaccctcagctataagtgaccagccctgtggttcacccaa

SEQ ID NO: 2134 - DNA, 1053 bp, Homo sapiens
agatgttgtccaattccaggagcccaaataaaagccaattgtgggctgcttgtggtggctcacgcctgtaatcccagcactttgggaggctgaggtgggcggatcatctgaggtcaggagtttgagaccagcctggccaacatggcaaaccccgtctctactaaaagtacaaaaattagccaggtgtggtgctgggcgccttgtagtcccagctactcaggaggctgaggcaggagaattgcttgaacccgggaggtggaggttgcagtgagctgagatcgcgccactgcactctagcctgggcaacaagagcgagactgtctcagaaaaaaaaaaaagccaattgtgtctttaaacttgttataattttgtcttttgataggcccccagtagacctagatcttgttcagttgtgttgacaaggatctttaggctgttgggatctagggagcacattcttgtcactggaaaaaatccttaagatcattttgtgtggcacctcacttcgtatcttctttgctggcttccactctactcttcagcttttcagactgtatcttggccatccattcttgttcttttcctctttgtctactctgtgtatatgttagtatctatacataggtgactctcagatattgttcattgaaatcacttttcattgagatctgaaaaacagaagctaaatgtatttcacattcttggcttgggcaagggggaaccacaggcagaaatgtagcttctcactaaacagaagagaaaagattaaatcgattttggggcagggtgaatttagattaaatttaaatgaagatgtatattgatctaaagcaaagagacactaattctcaagagtatatctgttcagtgacatgttcataagaattgagataatgattttggcagtctgcaagactttgcccctatttttggtctcaggatcaactgctgtactatctggtaaggtagcatccatgtggtagtatttaagactgtagataccagagaacatattattgtaatgcagacttaacagaaagataaggaagacta

SEQ ID NO: 2135 - DNA, 1052 bp, Homo sapiens
tctgcttaagttctcatcttccattctaggactctgtaattccttaccctccctgcctcatttttttcccatagcacgtatcactctctcatgtgttacctgctacactagaattatgacccctaagagggaagagactatgtcagtatcattgattcttattaacaccattatttagaaccatgcttggcttaaagtagtagctgctcagtaaatatttatctatgtgtgaatttttaagttcttcctttatattgaattaaaattagtctcttgtgtgcagcagtctgggtttgtcttatgttgaaatacttatgttgacttctacatacatttcagattctacttctgtgtttacaaatatttttatgtaggtatatgttcgtatatgtccctctaaaggcttaatattcacattcctcatttcttttttgttcctcatatgacactcaagattggtgtcattcttaaaatgctaccatcaggacagtatgtagtattatagacgtgatttgataaatgtaggatataatagacttaatgttctttatatgaacatattctttaaacgctgcctgcagttacattaatatagctctgtcacatcaatccttttttggaaaggtgtgggataaaaataaatatattgagtcttaataaacctgttaggtcactgtaatttatggtcaaataacttttcatttgctttagttgtggattttagaatatattttagtctttatgttgtgctatcaattttttgtcccattattttagcccgttcatacctttttttcaaaaattgtggtaaaagacatataacagaattttccatcttaaccatttgtaagtgtagagttcagtagtgttaagtacattcttttttttcttttaaacgattggctcctcaaagctgaacactcacaatgttgtgcagccaatctacagaactcttttcatcttataaaattgaaaccctgtatccattaagcactaactcctcatttctccctccccccagttcccggtaactgtcattctactttgtttta

SEQ ID NO: 2136 - DNA, 1050 bp, Homo sapiens
gtattatatgtgatgtttttccccattaaaataccagagataatggagatattttgcactttagccttgatgaaaagtacaagatatgttcaaagcttccctaatttttttcttatttgtagccacataagtttcaagaataacatggcacacagaacaatggaaaaaagtttgtttccattggaaaattatatcattttgggttgccacatcagtttataaatttggcgctcttttaattacactctgtagaaggttaatagagcttgagccctgctttaatatgtagtgaaagataattctgtagaaaaacgtcagccagtagggtaaagtcattctactgttcttaatttttatattgaggaacaatattgggtgtttgggagccagaaagctttgttgacagatcagaaataagattgacttgggtgttatatttcatctctctccagactctaggtatatttccaactttatatatcacagtatttaaaaagacatgtttgcattgagaaattaaccctaaagggttttcaatagggtgtagacctccagtacctttgtaactaaagtctgtctagtcattgtaaatatttatctgtcagttttgacagattggggccagcttgatgttttaaatcttcagcccggtatgaaaacttaaaggtatatattcaattttttaccattttatggaaaatatttaaaatctgtttttacagggttttttttttttttttttttttgtaatctgtgccatgaaatttgaaaaccaccaaaaatcaagggaacttttatatattcaattccttttctggtgtaatgttaaagttgtatagattattaatgcatgcccactgaatataaccctggttttgtgataaaactgcttagattttgttgatgacattagattagtagttgcattaaataactaaattcccattgtgattaattgaaattttgtctttaagcagagagttatttgtgactataagctttgtgcttagagaatgtatgtgtttttatctgtcagtatgggaggatata

SEQ ID NO: 2137 - DNA, 1034 bp, Homo sapiens
gcctccaggtttcaagtgattcttctgcctcagcctcccgagtagctgggattacaggtgcccgccaccacgcctggctaatttttgtatttttagtagaggtagggttttgctgtgttggccaggctggtctcgaactcctgaccccaggtgatctgcccacctcggcctcccaaagtgctgggattacaggcatgagccatggcgcccagcctgttctattttattattattgttgttaatatcttactgtgcctaatttataagtgaaactttatcataggtatgtatgtataggaaaaaacatagtgcatttagagttcaatactaaggtttcaggcatccactgagtgtcttggaacacatccaccaggcataagggggtgggggtgactactatacttaggtaagatttatttggagagtgcttaataaaaattatgaatttcttgcatacctattttgtgtcaggtcctgagaaagataatcaggaattggtgtcaatctgccatcttttctttattcaccctgatcctgcttcagatgttgtctccatccttaactgacttgtgttttgtttattcttgatgtattagtttgctagggctgccataacagactgaatggcttaaacaacagaaagttgtcaagcatgatggcttgcacctataagcccagctactggtggtggggagaggatcacttgagcccaggagttcaagactgcagtgagctatgatcgtgccactgcattcagacaacagagtaagaccttgtttctaaaaaaacaaaaacaaaaaccctccagaaatttgtcttacagttcggaaggctagaagtctgagatcaaggtattgtcagggccctattccctctgaaggctctaggccactctcctaacttctggtagttccttggcttgtcaacataactccagttttcacatgttctccctgtctgggtatctgttgttcagatttcccctttttctgtggacaccagggttaattgaattaggggcccaccctactcca

SEQ ID NO: 2138 - DNA, 1026 bp, Homo sapiens
ctcaacaaactctaaggccagtgcagtggcacatgcctgtaatcccaattatttgggatgctgaggcaggaggattgcttgagcccaggagttcaaggtaaaatagtgagccctcatcttcaaaaaaaaaaaaaaaaaaaaaaccccaaatacaaaaaactctcaagaactagattttttagtgattaaatctaatcctggggttgaaaatagattttttctttcttttcttctgtgcatatgcttacccaagcaaatagattttaattgagatatttagatgtcaattctaattagttgtcagtgttgcctggagtattaggacgagaagagttgagactgaacctcaactgaatccatgaaacaaatgtggcaattgatgagcaatatctgccttatctgggggaaatgtgtgaagctccccatccttgtagtttccatcccctttctaagttatacttggaagtatgttaagttgtaaagggtgctgtgagctggattggatcagaaacaaaaatttgagaaatagaatgattcacaagattttgtcaaattgtgcagaatgtatgtaaccctataggtctagaagaaactggtgtacaagggagccaagtaacgttgatttagattagaagtgtgaactttgcagaaatgtggtacaacccgggaccccatagaaaggagtccttgacaaagaagtctacaaatatcttttagcacatgaagtgtacgtcttcaaattttgtatagtgtctgtatgagaatttctgctggagattgtatagttggtctttcttattcatgttaataacatgaattaacaaattcatgttaattaatctgtactttgccaagcagtactgaaaattcttgatgaagttctcaatataaataattttctttccttttacaaatggggcctctgttacccatagggatctcccagagtccctacaacaggtgacactatcaagaggaggtatactagactgggaatgaaggaagaaaaccagtacttgttgtgtc

SEQ ID NO: 2139 - DNA, 1058 bp, Homo sapiens
cagctcaccgcaacttctgcctcccaggttctagcgattctgcctgccttagcctcctgagtagctgggattacaggtgcccaccaccatgcccagctaattttttgtatttttagtagagacagggttttgctgtgttggccaggcttgtctcaaactcctgacctcaggccatctgcccacctcagccgcccaaagtgttgggattacaggtgtgagccaccgcaaccagccaaattttcctttttcgtgaggacaccagtcatattggattagcggcccacgatactccaatgtggtcgcctcttaattatatctgcaatgactatttacaaagaaggtcacattttgaggtgctggaggataggactttaacatatgaatttttggaggacataattcaactcacagcaaatcatttagcaattaacattaaaaaaccaaaactctaactcttttactagggaaactcagtttattctaaaatttctgatcaaaatatttgcattagggactatcatagactctaaactctgatctcttttattggataggaacagagttctcagtggcagttatggagaaaggcattaatgtttggggtgctatttaagttctcaaaataatttgtattgttaaaaacctgttacttttttttttttttgagacagagttttacttcatcacccaggctggagtgcagtggcgtgatctcggctcactgcaacctccacctccttggttcaagcaattctcatgccttagcctcccaagtagctggaactacaggcacacactaccatacctggctaattttttgtgtttttggtacagacagggtttcaccatgttggccaggctggtctcgaactcctgacctcaagtgatccacctgccttggcctcccaaattgctgggattataggcatgagccaccgcacccggccctgttacttttaagcatgcatttaataaagtcgtatttaatcttttgttggtgatgtccagatatttaattttgagatggggaaaattacataggagctaggaattctggg

SEQ ID NO: 2140 - DNA, 1044 bp, Homo sapiens
caataatttagttgattcctaatattatttagagaattatatgtttttaaccatttctccattttgactttattgatattctaaaaatgttcgtgtccttttatttccagtgaattataacaaagagcgaaatgactttatcataaggtacttttgtttagacctttattttaggttcaggggtacatgtgcaggtttgtttttaggtaaatggcatgtagtgggtgtacagattatttcatcacccgggtgataagcatagtacccaacaggtagtttttcaaacctcaccctcttcccaccctccaccttcaagtagacctggtgtctattcttaccttcttggtgtccatatgtattcaatgtttagctcccacttgtaagtgagaacattcagtacttggtttctgttcctgtgttagtttgcttaggctaatggcctctagctccatccatgttgctgtaaaaacatgatcttgtccttttttatgactgcatggtattctatggtgtatattccatggtgtgtgtgtgtgtgtgtgtgtgtgtatatataaaatatatatataaatatatatatatgtgtcacattttctttatccagtctactgttgatgggcatttaggttgattccatgtcttggcaattgtgaatagtgctgtgatgaacatatatgtatcacaaaatacgtttaagacttgtaatacatgtaactgtaataaatttcacagatgttgtaaccattcacaatcttaccaacagtacaaatattccaggtttatcatgacactagtttgagtaataatctttcaaaaaagttttctttcttacacagtatacttcaaatttgctgaagtttgcatctctttcactatgactaaatgtgagctttgttcccgttgtttttttgctatctttttttagagttttcctttcatgtagtgtttggtattttatttttttcttatgaagttgaacaatctcttcagatatcataggttttaatctattttaattgttcataaaaatttatgtatttcaga

SEQ ID NO: 2141 - DNA, 1026 bp, Homo sapiens
taatagcccaagcattcattttatctgcacacaattatttcccaggaaaaaaattaaccaaggtgaaacacccagaaaaagtaaaatattgtggcttcaaatttacttttttatattgccaattaataactgcaggataaaaacgtacattcctcatctgtaaaatgggaaggatagagagagtataccacagttatggaggctgtgtgaggattaaatgaaagactacatgtgaaaatcttagcctggtgcctggctcctagtcagcatctgtaaatgacagcataaaggctgtctggcaaaacacatatttgatttttggcccttctcactgcaccattttcataaatatctgtaaagtccctcctgcctttactcttggccaggaactctcttgggtctgtattagttgtctggtaaaaacattagtagagcaccccttatttttttattttttgaaaagtatttgcttggctaacatctgctaacacccactcaaaaatggttcctctgtcgttttctgtgttttgtttaatagctcaaatgtggcttaaaggagactcgggaatgttgcagggaacctttttcttttttcatgggtaacttcggttcaagactctaagattttcttggtatagattaatttattcctcactatttcacaatttcactagatagagaatattaactcacaaaaattacatttagattgcttatgtactacctgtaatttaaccaggatttgaaagactctactcatgacctgcgtgattgaagtaataggcaaaatctagcacacaatgtgtcaagaagaaggtattctggttttggcatgatatgtacatgcagcttttggaaaaaggaaaaaaaacccagcaaattgaatggaattcaaccttcttcttggagaatgcaggcatcttattattaaaataagatcataagatattgttactttattgctgctctatctagaacaatgttctcccaaatttcaagactgcatttcaatgctagaagggagca

SEQ ID NO: 2142 - DNA, 1054 bp, Homo sapiens
tgcttctgtctttactattgtaaatagtgcttaatgaacacacaggtgcatatgtctttatgtagaacaatttatattgctctgggcatatacccaatagtgggattgcagggtcaaatggtagttgtgtttttagttcttgtttttttgcatcatctagatagcatgatgttttatgccaactccagtttatattatcattctcccttttttcttgctatcattccattcttataaaagaaacacttgaactctacaacattttgtatcttgaagtccaattctagttaggattttccatattgattaaaaaataaaaataaaaaagtctttagctgaaaacctgtatttatatgtagtagaaatgacacagaaatgaataaatgttacccaattgttaaccctccaattaaaaatgcatctatattaaatggcattatattgtaagaggctgaggcttttgttaaccaacagccttgaaaataaaatgtattaaaataattggaacttcagaatttttgaaatcatacagtcaatatttgagggctatgagcatccacagcctgaattaatacagaagtagttttgaatatctgccatatatttaaagcctttcttctttcctctgaggtttagccaaatactttttagtgcaaattcttgttggctaaaatagatttgtgtgactatgtttttgtctacaaagcacaaggataattagtcaactcagtcagaaacccattaactataagaaactgtaacatgcatttaaaaatatttttctaaccaaagcagacaaatgataatttcattacatggttttcaacttgttctggagaatatttacactcagcctttgaggctcttatttctgctcatattttgattaaaccaggtgaccaaaagatgtactttatgagctccatatctagcaagttccctgaaaacaaaaatatgacctggtattcacgtgtatataaggaaagccataatgttgaatctcagcccaggtacctggtaaaacataaggttgtttcattcttgtggtccaatg

SEQ ID NO: 2143 - DNA, 1056 bp, Homo sapiens
acagaacttgtatggttccagatcataattctgtagttttaaagctcaatccgtagattgtttcgtgtttactcttatgaaagaatttgttaaattattcattgtaaataatgcattcccagtgtcgtctctctgcagttcccacagtcgtgggccttctgtgaattggtgatttagttcttatatgaaatttattctttttctctagttcttacttttgaatcatgttgtgaagccgtctaagaaatataaatggaagcattttatgatattttgtaataactaaggaaaaataaatcaacagcggagcttaaggttgatttttccccaaaaatattttttagataagcattgtaattaaagttgctggtatatgaagtattatgctatgtcctaagcccacagtattatcatactgttgatctgtcatttgggaaatgtagatttttctgtacttagattcacagaatcctaaaattagataggttttcagatctgctaggattcaaatgctttattttatagattaggaaaccagagcccagaaaggttgagttgtgtcagtcacagtgcttggaccacaaaggctttggctgatatacaacatttctggaaaattatgaccctataaggcaaaatacagttgtcccttggtatccgtggggcattggttccaggaccctctcacctgcccaccccatggatatgaaatccatggatgctccagttccttatattaaatggtgtagcatttgcatatcttaaatcatctctaagttacttataatacctaatacaatgtaaatgctatagttgttatattatattgtttagggaatagtgacaagaaaaaacatctttaatgatacagatgtaatcatgctttaaaaaaataatttttcaatctgtggttggttgaatacatggaagtggaaaccacagatgtggaaagctgactatatacatttttagtactgccttttataaagtatggttgactacatttaaaaattttgaaagagcactaaagaaaaatttatctgacattcaatcaga

SEQ ID NO: 2144 - DNA, 1028 bp, Homo sapiens
aacaagctcattgaaacaataaggaaacagcctccagtaggacatttcagacttgaatccattctctgggctttagttttaaaatgcaaaaccgttttgtgactgacagtttactggtatcagatataccaccccagcatatctctggtagccttaactttgtggtactgaataagattcacatttttaacagaatccaaatgatgatgattcctaaattgcagtgttcaaaatactgtaactgtgttcctgcagtctctgtttgttttatagctcttttggatatcatctcttttacattttcatcctcactgattatgaactccttgatttaatcattcattatattgcctagctcttttattcaatatctttggttttaagctatagaaatgcaaatcaaaggagcataagccaatagagggaatgaatatactgacttccatccacagaccagagggaaaacagagtaagagctacccgtagtaatgatttaattgaaggactggttacgattcctcattatgagcgtggtgttgaaaaacatggattctagagccagagtgtctgaatttaagtccctcctttgccacttacccagctttgtcactttggcaagttatttaatcaacttttctcatttcagtttcttcatctataaaatgaggattataataatggtacccacttcctggggttttatgaattattaatgttacatggaaagtacttacaataatgcgttgtacaaagtagaagctatatgttgttattgtattgctatttatctacttaaataactcttactgtagtatgtattgctcaaggacagagattgtgttgctcatctttgtgttatcccacttagcatagtttctaagcaaatagtatagttctttcatatatgcttatcaagtaaatgaatttgactctacctcctaatgaactattcagaaattcatgtttacgattttagcaatgagaacaccaagacttagcaatagagtatcaaagataatacaactagg

SEQ ID NO: 2145 - DNA, 1050 bp, Homo sapiens
aaccccgtctctactaaaaacacaaaaattagccgggcatggtcgtgagcccctgtaaccccagctactcaggaggccgaggcaggagaatcacttgaacctgggaggcagaggttacagtgtgccgaggttgcgccactgcactccagcctgggtgacaagagcaaaactccgtctcaaaaaaaaaaaaaaaaaaaagaaatctggtgtgttgcttactagtttagtatcctctcccttatcccaggtatgagtaaaaggtttgatctctcatgtcaactctggttgatttgtggttgtttcctgctgcattgtattgagaagaactctggaactgcatctgaactttgcaagaaggaatacactatgtaataagtatttgctgcaaggcatgagatagcctcaggatagtatcacttctcttgctaaactactcccatgataaagacattgcaaatgatattttacctaaatgctgtatcttttcttcttgtgatataggagattttagttcctaaaaatgggaagaacctacattgtagaagagactgttggccagtatctttcaaacataaatctccaaggaaaggcttttgtctctggccttttaataggacaggtatgtatcttttactctgcatttataactaaataattactctgtaatttattttaaaaattacttgttgatttaaagttaaaagatgctatttaataataaactcaagattgggggatggaagaagaaatgtggaagaagtaactttaaagtaggtctttgaggaaacatggagaagtagacaaacctagcccaattttgctcgtcaggacaccttcccctttgaccatgtaaacgtaatttataatatggaaacttcagaattagaatgtttattgaccagatttttcacattttgttgtctttccaaagtgttttgtattcccttctaatctttttaatatctggttgtccagttctttacaaaagaagcttttgaaaattttattcctgttctaatttgtgttgtcttatatcagacttatggcaac

SEQ ID NO: 2146 - DNA, 1049 bp, Homo sapiens
ttattgggacaattttctttctagatatcttagcctgatgccttagaatcttcaaattacataattaactttccttattctgattctacccatattcccaagctactttcttttataatttgatgccccatgttatctacttataaagaatacactgtccagaggactcaagtgttcagatgccttcatgacattttagttttctacatcattctgaataaacttaatcaatgtcagtctagccatgaaagacaggctcattttcagaatttttacaaatcagatttcttaatttgcaagacagagggcagatctacatggttcaaccaggtagcaccactctgtgaggcctctcattagacagccagactgcctctcttgagaacagtgtgaatttctttttaattcagttgtaatgtggggctctttttgttaggagttttctatttaagtttttttctttctctttgtttaaaacatttaagagaagaagagtcttagagaaagatgtgatcagtagagataaaaagtcagggagaaagaccctcttctaaatttgtcttaactggataaaggttgtttctaaagctcaggcaaactgccatcttacaaatgagtgtctcataatttaaggccttccttcttttttttttttttgagacggagtctcgctgtcgcccaggctggagtgcagtggcgcaatctcggctcactgcaggctccgccccctggggttcacgccattctcctgcctcagcctcccgagtagctgggactacaggcgcccgccacctcgcccggctaattttttgtatttttagtagagacggggtttcaccgtgttagccaggatggtctcgatctcctgatctcgtgatccgcctgcctcggcctcccaaagtgctgggattacaggcgtgagccaccgcgcccggcctaaggccttccttctatctctttttatgctgtagtatgtattgctcacggacagagcaattcattcctttcagtattctacgtgctttttcttccagagttcattacttttt

SEQ ID NO: 2147 - DNA, 1042 bp, Homo sapiens
gctaaccaaaacactctaatctctgagtgtagatgatagaaaaaaatccatgtggtattaagaactagccacaatcatgtgaagggaaatacagatatggagatatcatggtagtatgtatcaaaaaccttaaaaatatgtataacttcttaaaccagttatccacctcaagggatttgtcctaaacaaataattctatgaatgcagaaagatgtactaggatttttaatcaatattattttaaggtaaaattagatatagcaaagatgcccagtatcagtaagtgggcttaaaaatttgaggttaatctatgcaatagaaaataatggattttcaagtcagactccctctgttcaaattccagatctagtatgctgctaaaaatagggatacagaggtagaattacttattcccttaaggagctccctgaccaactagtagggttcacagataactatgatataagactatgtgataaaatccatgggaaaactacaccaaagccctgtcggagttcagagatgaaaagatcagagaaggcagcttcctcaagctgcctttgaagtatccagtagggttgagacatgcagaagtataagaaaaagtcagtttcggcctagggaacaccctgagtaaagacacatagttagaaagcctaggatgtgtatggaaaacagtttatagcctcatttgacactacttttcaagtagtttttgacaaatatttgaattacttgaggaaaagtagtgtcaaatgagggtataaacatcattgaccagatcctagaaagtctgaaatatcaatctaaaataaaacttcattttatttagctgatggtgggacgccattgaaaaaatatttcagtctttgatctcctgagaaaaggatttatttattgatgtagctaaaggatgttgttatcagatagttttatttataaagtagttttaaggtgaaaagctaaggacatgctaagcagacagtttctcaaacagaaaggattgcatataatgccaatttgttagctaataatatatttc

SEQ ID NO: 2148 - DNA, 1035 bp, Homo sapiens
acacgatccatggacttccaaagacagaattttaaaagtgaccattcctgcagaagcagggctttttttttttttaacaacaacaaaaaaaatctttagtatttaactgcaaagtttcatatacaagccctttaatccaataaatagtctcaggtttgacctcatataaaacagtggtactttttcttatggagagtgtatatttgagaagaatctcacgagtgctttgattctatttattgcaattagcgggattcataaaaggtaggaaatgattttcaagcaccgcaagtactatagtgatagcagtttgtatgtatgattatatatacacatatgtatatatatgcacacatgtacatatatgtacgcatatctttaaagtgttatgattttgtaagaacttttggatgcgtgcattttttagtttattttttgatagtttatattcttttagttaccaataatgccttttttggttatttctgtccttaattagtgaagaatattttgtcgaacttatgatatccatgatccaaaggtaagaaatttactctttaaagatttttctgtgtcacaaagtattttcaatcaaaattcagcttttatttagttttaataatttccattgccatcacttcctattgatgcctacaaacaactgtagtttttattttgaaatatgattaattttattacagataaggaaaacttttttgtgcgtgacagggtctcactctcttgcccaagctagagtgcagtgatgcagtcatagctcactgcagcctccacctcttgggctcgagggatcctcccacctcagcctcttgagtagctgagactatagatgtgcaccactgcacctggctaattatttttgttttttgttttttgttttttttgatagagatagggtttcaccatgttagttatgtttgtcttgaacttctgggctcaagtgatctgcctgtcttcgcctcccaaagtgctgagattacgggcttgagccaccacggccagccaactttttaaaaa

SEQ ID NO: 2149 - DNA, 1047 bp, Homo sapiens
taccagtgacaaacctatctaaatattgataatatttcttttccttttagattctgaaaaagagttccacgtcctcccttatcgagtctttgttccccttcctggatccactgtaatgttgtgtgattataaatttgacgatgagtcagctgaagaaatcagggaccattttatggagatgttggatcacacaattcaaatagaagatttggaaattgcagaggaaacaaacacaggtcattatatgatgctatttaagaacctggttagattacagctaagattttacctatgagatgtctagtttaaatatcatgtctttagattttttttaaagctagttctgtttgacacttcgaaatattaactgagacattttaaaatacatgtttaatttctacatgtctagacatacagtgagtatttcctgggaaattgtaccaaaatttaagatactaaggtatttttcaagcttagcaagtagatcttaataaaacaagttcaggattaagtaggtaaaattacaaagctttaaggtatttctttcaatataaaagttttctcaaaactcattatcttacttggtaaagcatcatgtcagaacagaaggttttaaaacactaatttattaaacattttctccatattatttgccttttttttttcatatacctttcatgtaattgggatactaagccaaaatgggcagttccagaaattagatgacttttatagagcatagatttgctttactatccaggttttgtaacacatttttttttccctagccatcactttcacatttgactttatactttggaagactgtttgggttttttgctttctttttgtttctagtgagttcagtgtatgaaaacatgtctataaataaatatgtaagttccttttctgatttcttagttattctttgcatagttaattctcccttcaggaatagggtgtttgattcagagtgtgcttgagattatagtgagtcaagtaagtatttgattggggaacttcaaatctatagtaaactgcctcaag

SEQ ID NO: 2150 - DNA, 1057 bp, Homo sapiens
gagctaagtagatttttgtttgtttgttttttgagacggagtctcgctctgtctcccaagctggattgcaatgttgcattctcagctcactgcaacctctgcctcccgggttcaagcgattctcctgcctcagcctcctgagtagctgggattacaggtgcgtgccaccaagcccagctaatttttgtattgttaatagagatggggtttcagcatgttggtcaggctgttctctaactcctgaccttgtgatccgcctgcctcagcctcccaaagtgctgggattacaggtgttagtcaccaaggccagccaatagagttttttaaaaaaatgtctgtgtagatactatgtttttactaacttcagacttgttcagactaggtaaactccttcactaaactttcttgtagttccctcttctatgctgttcttctataatactttacatacttgtaattatttaaatcatcaattgcatatttaatgttgatctttcacattagactataagatttttgagagtaagtagagtatttatctgtacctaaaacatggtaggtgttcctaattatttgttactgattcataaatactgaataagtgattcttaggaaactacagcacttcttgttttcacatttatttcatacttgagaaattattagcttatgcctgtacagacaaggtttttaagatttgtgtagtatagtatattgaacatgttgagggtttaaaaagtctataatattcatagctgtatggctcagtagttcagaacattttcaggagttttgaacatttaagacatgaaattatgtcttttatatgaaaatatgtagcactagttgttgccccagaaattttaatctagtttacagcatttagtatgtctctttatcagatgtttattaagcttatgctctgttcaagacaatataatagatatgaatcaataacttgattcctttcctttagaagcctagaggaaagatagaatgtatatgcgtgattagttatgcagagaatgtagtaaggtcctaagagtacctaagaact

SEQ ID NO: 2151 - DNA, 1048 bp, Homo sapiens
gttaggagtcatgaatactgtattgaccatacaagtggattatggttgtctggatggcagataccaatagcaacattgtcatatgcagtttgcctcaaatcagaaacaagaagacatcggaatctgagatgctgccctagagaggacagttaaagaaggttcagtggtcctcagtttgcagtgctctagctcctggcagaagcaagagggaaacattcctaatttagttccaagattcctacagattattatcaagtagtagtattttatgactagagatcacaggcacaagttgaaacaaactaacatgacaagaaagctatagaaaaaataaacattgaactcagttcttcaaggtttcatcaccaacataaggaatgaagttggaaccacaggcagatctgaaaaagaaccaaatagagctcctaaaaatgagaaatatttattgaaataagaaaaaagccctcagacatgttgaatattttattagactcagctgaagagacaagtgaactaaactataagctggatctaaagaaattacccagtgagcagtgaggagaaacaaggagctagaaaacattggaaagttaagagagttcgagggaagaattataaagactaggagtcctagaaagagaaaatttagagaataaaggagaggcagtacttgaaagataacacaattttacaaatttgttggaaaaacatgaattcataaattcaggaagcacaatatataccaaacatatatttaaataaaatccaggcctagactcaaggtattgtaaatgacaagataccaaatacaagattttaaaagcaaccatggggagaaaaagatcagtgaaagcaagacagtcaaatacttagtaggcttcctaacagcaacaatgtacccaaaagagggtagaattctgagaaaaactattagcttagaatttgcaacaagcgaaactgaaacaaacagatgctcagatgaaaaacagatgttatcctcagcacaaattcagtaaagagactacaaaaggatgatcttcaagaaggg

SEQ ID NO: 2152 - DNA, 1091 bp, Homo sapiens
ttccagtataatttattccttgaacacagaagttatttagatgtatgtgtatttattattaatagcaaatacatatttgtaattaatttctacttaattgcattgtggtcctaaagagtaatttgtcttacagtatactagttcattattaacttttgaaaatgttccttgtgtgttggaggtggaaaagtggctactttactaattattagttacaatgctttatttttattattttattattattattttgagacagagtctcactctgtggcgcagactggagtgcactggtgtgatctcagctcactgcaacctctgccacttgggttcaagcgattctcttgcctcagccttccaagtagctgggattacaggtgcctgccaccacacctggctaatttttgtattttcagtagagacgggtttcgccatgttgccaggctggtcttgaactcctgacctcaggtgatccacccacctcggcctcccaaagtgctgggattataggcatgagccaccgcgcctggccagttgcagtgtttttaatatgtcctttagatcaaacttgttaattctgtggttaatatctacatagatactaattttttgttacgcgatctagcaaaggttcaaagaactgcactgaaatttctgatggtggattgccacttttttcctgtagtctgtcagtttttactatgtatattctgtgacattttattagccatatatatgtttaaaatttttagatcatcctagtggtactgtaccattttatagttatgtaataatgtaagtaatattatgtatataagatatatttctatatctaataatgctttttctctttaaatgtatttgtctgatattaattgatacttgcttaaagaattgtatttgctagatatagtttttccatcattttacatcttgcttttctgtatccttatgttttgaatgtatctcttttgaatagccaatacctgggtttaaaaaatgtctaattagacaatatatacctcataactgttaaattgaaatcatttatggtttttgttactattattatgtttggaatgattgcctct

SEQ ID NO: 2153 - DNA, 1050 bp, Homo sapiens
tttttttactctttgacatctaaataaaactgttaggaattatttgatttcaaaaattaatttgcccgctcaaatattttttagattagcataacaatttatataaagatattacttaaagtacatactgaatagtgtcaataagaacattagatattgccatatttaattttaatttaataattattttttcttctagctttgcttgcctgtatgtgtggcctgtccttcaaagtcttcctccaaactttggcttttggcttcttccattttagggactggatttgatataatctataggaggaacaaagaaataataatgacacaagaattccaggatgtacatacatatatatagagataaatatataggtacatgcatatttatagtctcctgctgccagattccataagtaggctaaggataatcactcagtggtaaagtaagtggtaaagtatttagaatgtttctgtccgcaatgtaaaaggacattaatttaacatgtgttattaaagatgtctggacttaaggattttatataattcatcatttgtcttttcttaactcaagccttccagttaagtctatgtggttagtgaacattatttattactgattttcctaatttcctaatattatgtgaaatttgaatatatgacgtaatatatgttacttatttcatataataaaaattaaattaataattatatacttgctatgaacactatgtgtcaggcattgtttaaattattttatgtgtcaaaactcatttaattctcacatagctatatgtggtaggaacaattgttaatgacatgttgtaaccgaggaagctgaagggcagagagtttaagttacttgcccaagatcatacaataagtggtggagcaaagatttgaacctacattttctgactttggagccaactcttaatcattacactattatggaaattaacattctataatagagtcatttttctcagtatgatttggcaaatcaaatctttgaattggcattaaaaaatgatggtctaaggaacactattc

SEQ ID NO: 2154 - DNA, 1068 bp, Homo sapiens
caaaaagagacaagtgaatataattaatataatataatacattacaatacaatacaatattaattgagatagatctgtactctcgtgagttgttctgagattatggacctgaaactttctaatgctggtgtctttaaaaagaaaagaaagaaaagcctctgtaacaaaatactcaggatacaggtttttttactctaaagtctcatatttaaatagtaatgatggaataagaaaattaattcaccccatttgcttaattgttatatcatggaaagcagcatcccagtgtaagggcattaactcttgtgtatccagttatgttgatcatataatgcattttgaggaaacatgttctgtttttttacttggtaatcctgcatgctttttcaattctttatcttgttaaaggacttgcaattgtgaccaaatatattacaaagggctggaaagaagttcatgaattgtataaagaaaaagcactctctgtggagactgaaaaattattaaagtatctggaggctgtagagaaagtgaagcgcacaagagatgagctagaagtcattcatctaatagaagaacatagattagttagagaacatcttttaacaaatcacttaaagtctaaagaggtgagtgaattatatgttacagcatgtgattaaacatgagtaatttagtgtaggtgctaaaaggataaacttggggtagctatatatttatacttttaaaaagaaattatttaaaatatatcttgaaattgatgtctgtttaaaacacctaccatgatgtccaacatgatgtaggtggcatttgtgttagtttcactccagaaaatctactgccttgctaattaaaaaaaaaatcatctatgcatttccttcataaaatatacttcacatcctttttctagtaaaaaacaagttagcttatttgataagccttttacttagacatttttcattctgaaagtactttgaaccccaaatgaaagcctcagagactgtattatgaatatttttttatataggtatgttatactgatttattttcccttaattcctggtattt

SEQ ID NO: 2155 - DNA, 1111 bp, Homo sapiens
ctggcatacaaagatagtacaacatatgacaaccaatcaatgtaatacatcacattagtagaatgaagtgacaaaaaccacataatcatcttactgatgcagaaaaagcatttcacaaatttcaacattccttcatgatgaaaaataaaaccactaaacctgaaatgaacttcctcaacatgataaagtccagagatttaaaaaacaaagatgtttaaaccccatagctaatgtcataatggtgagtgattgtaagattttcccctaaaatcaagaaaaagacaaggatgcccagtttttccactttaattccacatagtattggaagttgtagtaataaggcaagaaaatgaaataatgaaagacattgcaattggaaagaaagaagtaaaattatcctcagatgccatgatcttgtatttagaaaaccctaaagttaacaaatgaattcagcaaagttacagggtataaaaccaacacataaaaatcagttgtatttctatatactagcaatgaacaatccaaaaaaagaaattaagaaaacatttccatttacaagatcatcaaaaaataaaagacaggagtaaatttaagaagctgtaagacttatacactgagaactacaaaacattgctaaaagaaattaagtcatgaataaatagaaacacatctgtgtttacagattggaagacttaatattgttaagatgacaatactatccaaagcagccaatctacagattgaatgcagtccctttcaaaatcccaatggcatgttttacagagatagaaaaacccattctaaaattcctaagaaatttcaagtgaccccaaatagccaaaacaatctttaaaaaaagaacaaacctggaggactcttcagtaactctttcagttactacaaagctgcagtaatcaaaacagtgtggcactggcaaaagaataaacatatagaccaatgaaatagaaagtccagagataaaaccttgcatatatgttcagttgacttttttttttttttttttttttttgagacagagtctcactgtgccacccagtttggagtgcagtggtgcaatatcagctcactgcaacctccgcctcctgggttc

SEQ ID NO: 2156 - DNA, 1044 bp, Homo sapiens
gtctatctactaaactagctcttggggaaatagcttcaggatactgtagtttcctctatctaatagagaactttttgttaacagacactgtaaaatagttttgctttgttgaataatacgtgtgtacctaaaagaggtaagagcaaaaagtgtaattccacatcatgttacttgagaagtgcttaacgttttcttaaatgttttcattgggaaaggacagctttgataatgtccaaatactctgaaatgcactagaccatataactgtgatgaaatatgaaactcatctgtaaacttttataccaagggggtaaaaaaaaaaactaaggcatttgattaaattatgaatgagttttacaaattcctttcagagttttactaagatcacacaaataacagctttcttattcagtgaaaaagatattttatttctgatgttttatttgcacttgtggaatatgttaccattaatcagaaacatcatggcaacccctaagaatagactaagtttgtgttggctgagggattctatttggtttgcttttttttttttgctttgttatattttattgctacaaggggtgtgacttgataatgatttcctctgaattataataacatagccagatgtagtctcacactgtttttcatactcttaagtgtaaataatataaaatgtttcaagcgcttaactccccctcattcacaaagtataacaattaaaatctcaactataaccagtttagctttttccttacttttaaaataaaattttttacttttaactatttttttagttaatatttttaaaagtatacatgtcaatggcctctttgtccattattcattttgtggcaaaatattcttctttgatagtgtaaacaaataataaagcaatctaggtcctttaggtttgaaaggcaatttttgagtagcatattaccagctagccagtcactaggaatttttttcagtattatttgtatgtattaaacttttcattacactaaagtgcattattttattgagcaagtatccttcatt

SEQ ID NO: 2157 - DNA, 1031 bp, Homo sapiens
accgtgcccagccttgtttttaacaatgtaatgtctttcgctctttaaagagatggattatagtgattataatgcttacaaagtatgtaattaacagaactaaatacttgggtatctgtgaatataagcctttggttcatgtttagcaaactttctttttttaacctaaaaatggttatttctatatattctgaccaagccatatttaacattttaaatttttatttaatgatcggacttggtgatgtagaacaggaattctgttaacctcattttgcatatttatattctagaccattctaccttttatacttttatttatattctagattattatacttttaaaatactatgcatgtgtattaaatagagtatacttaagacactaataccaaacttttgtctttgcttgtgaatcatcagatctttacggactctatataacatggaatcattatatatgtgctgtggtttctcagaattaacatataactttatatctacgtgggcttttacgtgttttactcactcatttccaaaagcaaatagcaagtatagagatctgattttaagtttgtttttttctggacttcaaattgggattggatatcagatattttgttaatatacttgtttttaaattgtcatcagatttgtttttgtattattaaattatgtgtagattaatgaattcattcaacaagtacttattgagcatttgtgtcagatcctgttcttgttgctggtcatacagctgtgaataagacagatgagccttgtttagagagagaagtcagagatacttctctcaggaggtaacagttgagcagagagacttggatagcattcctctacgtcaaggcagggatcaagactgaggtccagtagagcaacagcaaggaggccagtgttgctagagtttggagaactaagggaaaagtcatcagggattagatactcccatcttatgcgatctgcctggttcttcctgacttcaatatataattcatggctgaagatttagtttaaat

SEQ ID NO: 2158 - DNA, 1008 bp, Homo sapiens
agcattattagcattttggtgctaatgtacttcaagaaaaatgaattacagcaacaacatattcatgtcagggaattttaatacatataaagcgaatattatttttatgtggtttagtttatatatcttaactgagatttattgaaaatccattgcacactggttgatacattttgtgtaagcctgtacaattcaactcaatttagctttgcattttgttaaagaataactattagtttacccaaaacatattagaggttttagttaatatctgtaacataacttttaaaattattctgccgatgactatggagttaatgccacaatcacaaaacacttgagatttattttagaaagaaagaaaagttattgttgccacgtatatcagagtaatcttgaaatcaagattactaataatttttagtaataaatttaacatcactttgttttaaaatgctgtaatattgatcgttgtaagaataggaaacacagaaaccagtttggaaatatattttgttaaataacaaaaatttatactatgaaacatagttttggttacatatattctcttatagtttagtatataatgctgtagttatagatgactttcagaattgcacaaagattttagttttctttcagcttaatagagctttttattccactttctatttacctgcatcagtgtaactttaattcaattttaacaaaattattgtcagtgttaaacatattttataacttttaatttcctactactccttgtatttttagattaaccactgttctttaacatacaaatgcttttattttctgtatttctctttattattttgaacaaatattaatctttaatgtcccttttaactttatgacagatgttttaaatcaattggtttatatgaaaaaaacctagtatatttaataacatgctatatttgggtgtttgggtatgtccttgatgggaacttttccattggctattgctggctgaacattagtttgttg

SEQ ID NO: 2159 - DNA, 1032 bp, Homo sapiens
gtgtaacagatcaaaggagaaataactgctggtgatgaacagcagtgtggaggttttgttgcctatggttgatcagctgcctgaatcctgagttgtctcatagggtggcattatgttagtaatttgctgtagcccagagaaaggctgagaaactaagtaatgttagtataccatgagaaactgattcattttaattaagcttatgagagtagcatttgaaatcaaatgctgatttattaatttgcagtgataaatgtaattaacaagggcactggattctcacctctagcacataacatgttctctgtgtaaagctacattggaaatcacagtgtactgtgcaatgagcatataataaattatatccttcaaatgtttagtggtattaaagtagtctgttatttttaactcttcattaaaaaaaaggacttgttgcaagtccagggtacctttccccttgggcactgcttagataggttttgatttgccattgtgatttctattccttgttgtgtctgactaatcccttgccagatggatatgatgtgttatttctttagatgtatagattactgagtcaactttaggactgtgtttcattccattctatttgatttgttaaaaagtgttggtgagggaactagctcttttgaatttgggatttataatgtagatatccaaaggatctgatttatcacaggagaggtgaggagcgatagactgacctttctgcacgtttgagctgtaaatttaggattagtcacatttagctttgttgatttggaaggggagagaagagcagggatttcctgctgggttttggaaatctttctttctttttaaagagatgaggtctcactacgttgcccaggttggacttgaactctgggctcaagccatcctcctgccttaagtacctgagattgcaggtgtatgccactttcctcagcatggaaatcactttctctacctttcacttattacaggttgatagtcaaattaatgaggctccttaaacctcaccctcccaat

SEQ ID NO: 2160 - DNA, 1034 bp, Homo sapiens
tttgtaaagggctacagatttttttttaagtttaatttcttaaggaatcctttaaacacatcttcttcttatttgccttttccctctgatgtctattacccagaattactccaagctacatatttagctgcataaagcagtgacagcttgtcttctaaacaatgacaaattttaaaatcagatattaagaaaccttttcatagtttcaagggcagtgagctgtatgaacttgcttatcaggtattagtgcctccagggctataaaaaggtaacacatttaaatgactatcatacacaagatattgacataccttccttggtcaggccatttatgtgaagaggattatgcccactgaaaatacttttggcacgccatcacttcagcaaaaaagatgctatcgaacatgcgcacatcccccaacagtctgcctcctgcgattgcttttcacagtatccaaagtgtccatctgtctgcttgtcttcgagttaccctccttgttcatatgggtcctagtcttctgaaattttccctttctttcattttctctctttcgttaaacaaaagagctgtagttgcccgttctgcttgtagcactgttgactcttcccgacagttgatgcattgaagctttttacatctgctattttcctggctggacaatgcagtgctgtgttctcgtctcagtatccatatttctactaataacactgagctgcaatgtaaagcagccagagctaaaatgtagtgcttcagttgtattggaaaagaataggatttacctctcttctttcgttgttgcctggcagctgcaggaaggattttgagcagttttaatggggttttagtctataatatgaaatccacggttcctcagctgctgcacaggcaggcagcagtttaaatgtgggcttgacagatgctctctctgacagagcagaatttaacgtcactgcttggctgaatcccacgtgattgtttgcattcattttgactaaaaacctaaggtagggagaagcttagagattttgctttt

SEQ ID NO: 2161 - DNA, 1099 bp, Homo sapiens
gcactcccagctactcaggaggctgaggcacaagaatcgcttgaactgggaggtggaggttgcagtgagctgagattgcgccactgcactccagcctgggcaacaaagtgagataccatctcaccaaaaaaaaaaaaaaaaaaaagtgtatgtgcaaagaatgaatgttgtttaattctcttaataatcctgtgtgacagttatttttgccatattcatttaatagataaagcagtttttactcaatgtaatactcatgaatcagtaatcctaaggcaaatatatttgttttaattagtcagtgtatagtgattaaacacctgccatgcacctggctgtatcaagattggaggagtagtagtttctgatgggaagtaaagtaccttgcagtctgattgggggaagcagacaaataattagggaattatatagtataatgaggtgttatggtctgaatgcctcccaaaatttgtgtgttgaaaattaatccccactgtggtgatattaagaagtaggaccatttggaaagtgattaagtcatgagggcatggtctttacaaatgaattaatgccctgtaaaagggctggagggaattagcttaaattcttttttgcccttccaccttccaccatgtgaagacactgtctgtcccctccagaggatgcaacaataagacatcattttggaagcagagagacacaaaacctgcaggtgccttgatcttggattttccagccttcagaattttgagaaatatgtttctgttatttacaaattgcccagtgtgtggtattttggtatagtagcacaaatgtcctaagacatgataaaggtatccagaaaatgccaaaaggtcaaaacaagggaacattggaattaagggaagagagagaatgaggaaagagagaaaaagtttgtgaagggaagtcttcaaatcagaggttacaaggtattagtagttagaaagcataggctttggattcaaaaaggcccagatctgttctgcttactaggcatgtgacctgggcaagtaactggtttttgcttgtttgtttgttgtagtttaattttctcatcgtacaatagatacaacatcta

SEQ ID NO: 2162 - DNA, 1029 bp, Homo sapiens
ttcaatgtgtttagaagttcaggccgggcacgatggctcatgcctgtaatcccagcactttgggaggcagaggcgggtgggtcacttgaggtcaggaatttgagaccagcctggccaacatggtgaaactctgtttctactaaaaatacaaacattagccggacattgatggtgcgcacctgtagccccagctacttgagtggctcaagcaggagactctcgagcttgggaggcagaggttgcagtgagccgagatcacaccactgcactccagcctgggtgacagagcaagactccatctcaaaaaaaaaaaaaaagaaattcacacacatatttaaacattctaatctttgggaattctaattatccagaattcataggaataagttactttttaaaataaaggtaaaagcattcaagggtatgactattatttaaataatttttaaaacatatgtgacttttgcccttattaatacaacagaaaagtagataggaaactcctggagtctgcatatatgttctatatatgttttcttcataaaaactttcaggccaagcgtggtggtacacacctgtaatcctagcactttgggagacttgagctcaggagtttgataccagcctgggcaacatggcgaaaccctgtctccaccaaaaaaaaaaaaaacaaaaaacaaaaactagcctggcatggtggtgcgtgcctggaggctgaggtgagaaaactgcttaagccccagaggtcaaggctgcagtgagccaagattgcaccactgcactgcaacctgggtgagatcctgtttttttaaaaaaaagttttcaatatttcactgtttcaggtaacattttaaaattaaatataatgtatatagtgtgttctttttcacttgcaacaaatatttttttctgatggtattatatattacgatatctgttccacttgtttaagcagcacatactggtactttgcaaatatcagaagattttagatgatctcatttgctaaaataatgaaagcaaggattg

SEQ ID NO: 2163 - DNA, 1060 bp, Homo sapiens
cttggtgaaattataatgcttctgacttttcaagagaaagcaggttttcctctccacttagcacaacttgtcagctcttttgtttttgtgccgatacctttcttttccccgctgggtagtgttttttcttccaatccaaatctttaaaaatatggaattgtcagtctgttccatattccagattattttttctgtttcttaatacattccgtgtgtgtgtgtgtgtgcgcgcgtgcgtatagcctttgaaaaatgacttcacctttgtctcttcatctttagggtggagggtggtggggttgatttctgcattccgttatgcagtgactactccacctttacttaaaaataatggaaatcagagtagaatgtgcttttagcctcttgggtggtgttggctggggagtcctagaaatggctataaattcatgacatgatttgcaaagaacttcccagttttgttccaagaaggtcatattctactgttttgtcattagtctgttgtgtgtcacaactgtataactctttgtatgtgtattggcgggggtgggtgtgtataccaactcaaaaattaaagttgtactgtactgaccttggcaactgaaattttcagtaagccttgagaagacaaaattaggtaacattttttttctattgcaacagacaggactttgattcaactgaggcaaatgaaagtgtgtgtggggtttgtagagtgctgagatgggagatttgactcatgtaatcaagaatggttaagggtaaagtaggtcttgcaggccactagaaatagatagtagatattataaagtgtattatattctacctcttttcttgcgttatagcttaattctctctttctgccaatgcattttctccatgagtcaagggtcatcatcatcagtgattttaggcttatttccttgtagctagtggttttaacagctagctctagtctgtaaaaaataatcccagagaaggacttttgattgatgtagtctaggatataaacctttcctagtgaccaggggatagagcttattgccaaaagggagtgatt

SEQ ID NO: 2164 - DNA, 1049 bp, Homo sapiens
gatcactagttggagcgaaggtggttaactgtattctgctttaatattttcgtagtgtttgttgcattctcatggtacttcttattaaacagaagctgtcaaattgtcctgttgtgttacatacatacctgattatttaattttggtatttgttaggaatttggactgttgctcactaatcttaatatggtattatttgaagtgctactggcttgaagttacgtccttccagagtgattttgtgattgctttgccaggtgcttcaagaatatctcaagccttgagttgatttttgtgttaaattcttaacataaggatttctagtccatctgggtagtataaattcaaatttgaatcagacctgagtgacattggaacctggctgacaaattatccaggagccccttttcttcccctgctccagaggtagagcaagatggatatgcttccccgacatttgattggaaacagtttttccctctactttaaccttttgttgatcatgtgactcttctgtggctctagttccagttcctctgtgtcctttccctatgtagttggtaaaagccaattcttagtactgcctacactttcctcatgggcaacaccagtgcactttattggtcgtcagcattttcttcatttgtagccgatgactattttctttctagctcagcatttcaggtatatgttacattgtatttagcatttccaggtgtttatgtataaagttcccgttccaataatgcagtgtaccagatagtataacccattttagtaggaacttattagtctgccaaatgtagcaaatttcttaattcatgtttcataattgtttgagttgtacctgaggggaattaaaaatgcagattattggctgggcacggtggctcacgcctgtgatcacagcactttgggaggccgaggtgggtggatcatgaggtcaggagatcaagaccatcctggctaacacagtgaaaccccgtctctactaaaaatacaaaaaaaattagccgggcatggtggcaggtgcctgtagtcccagctac

SEQ ID NO: 2165 - DNA, 1056 bp, Homo sapiens
aaacgattgggtgtaacttcctgattttggccatgttggcagccacatggggccgagttccaaagaggaaagattgtgcgcagaaggagctcagacgctatgtagagggttctccttacatccgccaaatactattcagcacatgtatgtgagaaaactacatgaggcctgggaaaaagtcaccgggaaagaaacaggcagaaaaattaccagagcgtagactggactgagaatagtacttgttcccaacagccccaggcaatgcaaaatgatctagccactttggaaaataatatgggagtttatttttttcccatcacattgaaaatactactctactgtcttctagcttcctttgttttgatgataagttagttgttagtgtgataatcagtcctatgagggaaatctgttccgtgtggttattttaaagatcattttaaatttatctgctgtagctagatgcggatttcttttttatataccccacttggaatttgtcagaattaaatctgcgtattggtgtttttcatcagttctcaaagtcttggtcgttttgataatccatgaaataagcttttttttttttttttgcatatgttctgttccccatccccccttttttctcacctctttttggaacttaaatgagacatactttagaccttctcattctatcttccatgtttcttaaatgattccattttctgtctcattttctctgttgcctgcatttttcattatttcgttacttttaatttatagttgtccatttctttggccacaccttaatctgatcttaagcctatccattgcaccttaaacttcagatattttatatttcagtttttatggttctgtttagttatttttcaaaccattatctgtctttgtaattcttttttactgtacatatttgcaagcttgttttattttctaagccttggtttttggtaattgtagcatttggagtccttagtcatcttcctttgaatgttgtttcatacatgataacttgttttcttgtgggtttagttttttactgttcattttatt

SEQ ID NO: 2166 - DNA, 1247 bp, Homo sapiens
agtactgttgtttgttatttaaggcttaagtctgggtagtacttgataggcttaaattttgccctctttaacatcctaagttgtattccatctggtcattgctgccattagctgatgcttctaagctgagagtggagttgtagtggaacaggatacatttgacagttgacctagggtagctgaattgatagtgctgtaatatatagcactttggtcacattctttgttaagtttaattagctctagagtattatatactttactaattccaatatatacagttatttttcatgatttaatatctctgaaattgtaatatgtcatataattgatggtatcttagagttgctgtggctaggtggcagtcctgacatagtttttattactggcacatgcacaaaatagtgatggcaattcctagtttcatcagttctgtgagatatgtgcatagatggtactatatatgttgaatttaaatgtagtgcaaaatatcttcaaaaaagatacggtgcaatttagcattgaaacagttattacggaggaacaaagagagaggactcacactacctgatttcaagacttactatcaagttgcaataatccacacaatgtactaacgatgtaaagatagatagatgaatgaaaataatggagattgcttaaatggggctatactattttcgacaaagacatcaatgcaattcaattaagaaacaaatgccttagcaataaatggtactggaacaattggataaatatatgggtggagaggaatgactgtcagccattacctaacaccatacacaaacattttttaaggtagattgtacacacaaacttaaaagctgaaactgtaaggcttctagaataaagcataatagaatgtttttgtgactttgaaatagttttttttttgaagggtgaaccataaaaagaaattttaaaacttctgttcatcaaaagacaccattaagaaaataaaaaggccagccacatgctgggagaaaatcttttcattgcacatttgtaacagaaaatttgtatctagaatcctgtgtgtcagtatttttaaaaatcctattaaaaataagcaagagatgttgacactccacaaaacaaggtatacaaatggccaatcagcgcatgaaaaaaattctcagtatcatcagttgttgaggaagtaaaaattaaaatgatgttgagatactatttcacatacccattagaaagactaaaattcaaaagac

SEQ ID NO: 2167 - DNA, 1050 bp, Homo sapiens
tgtttgaattcttccgcattagaggaatgacattcccattcttttttttttttttttttctcctgaggcagagtctcactctgtcccccaggctggagggcagtggtgtgatctcggcttgctgcaacctctgccttctgagatcaagtgattttcctgcctcagcttccagagtagctgggattacaagcgcacgccaccacacctagccaatttttgtatatttagtagagacgggatttcaccatgttggccagacgtctcgaacccctgacctcaaatgatccacccaccttggccccccaaagtgctgggattacaggcataagccactgcacctcgccctaatcccgtattttttttttttttttttttttttttttgcaaagcaacaaccaggagctttatggaacctaaaaatggaagatagcaatagtagatgaacctattttgcctgagatacatatgaaacaattgcctatcacacacccagcagtgcagcccaagccagaagaaataaccagttttctggagggatgatgactgtgatttatgtagaatatcatagtttaattggcagtagttttttcctttcatagtggtacaatataatggtgtagctcacaatcattgtgtcttagatttgatgaactgcagtagggtgaacaggtaaaattatattgactctgtggaatactaatctttttagtagacttaactttagggaagaggtcataagatctatccttatgttttcaaatgagatccttgctgaaaagcgttttgaaataaagccttttttattgctaatagagatgactaattctaagaaaatacgtagatataatcagaaattaacatgctacagcatctaaaaattctaggacggtggttaattgtaaaaaccacgttaatgtttctgagcttttataaaacatatcaaccaatgtgtagacctgcaaaagttgaaataggtgtataatagactttttattagtttggtattgtaatagatcactcatttgtatgtattttgcattctagtcatat

SEQ ID NO: 2168 - DNA, 1047 bp, Homo sapiens
tatatatataatataatttaaaatatatatatatttaaaacacacacataaatatatatatatatatttaaaattataattcttctctggtacctaatagatactttgagtaatatagaaaatgagtaagatgagaatttcagatatcaagcttaaaaccaagtaggaaagttatatcacttgtattttatgtttgcagtgtatttgcagaaataatacagtgtatacaaatctcatcactatgctgtaaaatactgcttgtgtgtattagttagggtctccagccattgaagcctccagcattttccctacttccttattttccttttcctttaattgtccttccaagaattcatggggagtaacatttttattctgcttccgtgctgatgctatgagacccagtagaatataagtgacctctgtccagcaaattccctttgctttggcaggcatcttgggctttcaactgttgtaagttacatcataaaactgaaagattatttaatagtgtgctgcattgccaaagatgattttgacagtttgaggcatgtatcccatgaaaggggaaattttttaacttaagatttaattttagtctcagagattttttttaattttttattttattattactatactttaagttttagggagattttgagcaggttgagaactttaagctggcagtttttaatagttgtaggtctttgcttgaatagaaggtaaccctggtttaatgtttttttgtatgtctgcagtcgtcattaattgcagtggttatcaaagtgtggtctgcagacctcaggtcattcctaagaccctttcacagagttgcaaggtgaaaactattttcataataatactgagatggctattctcatgatttatctgcccttaaataggaacagtagcatacccagtgccctagcatagtaatttattctcctccttctcttcttctcttcttccttttctctgtacttctaccttcctcctttctcttctccaacatgcccatgcacttgtttcttcatttatacaatg

SEQ ID NO: 2169 - DNA, 1131 bp, Homo sapiens
attttataaaataatgaaatttgagggcctacaaagaagtttgttctttctaggaaaactgggttgtttggttgggaaaaaaatgctttaaaaactacttataaatttagggtgaatgaaacagttgtaaaacaattgcaaaaattataaaagtctaaatggtttctatactcagattacttcctaagtaatcacaagaactcagataaggccctgggacctcgtaaaatggttgatgagttcctataatgtaatatttttagttaaagtaaaatatttaagatgtgtttgaattttaaatgattttttaaacaacttttttgattaatagttatcaaccactattccctattacattggaaaagtgggccactactctaattaacagaagggaacagaaagggcaaacaagattacatacgagtattgtccattgaattatgtttaaaagacttaggtgtaaaaaccagatacatgagaagtatagcaatcattaatacattctaatggcaatatcatattgaaaaggtggtaagtactgtatttgcttcatggaaggattgataagactctttcacatgaatgtttatgggactgttgcctaagggatttatagtagctaaagctcaagtttgaaataatctccgtctgtcccctacctccccccacccacttttctacttgtagggaccgcgttgtagccgtttttgtgcagggtcctgcatggcagttcaaaggttggccatggcttttgcctgatggatcaccagttgatatatttgctaaaagtaagattctctttgtatttactgtatccagtatagaaatgttctcactttatttaagagaaacagtcatatagttctgcgcatatgatgtgtatgtcaaaagattgctgttaagtaacatatgttaatgtttaagcatctgtgacatatttttaaaagctttgtatattaatactttctgtgtaggtatatctgaaagtgaatattgcctatcccacaacattactaattatttttagatcacttaaaaatcattggccagacacagtggctcacacctgtaatctcagcactttgggaagctgaggcaggtggatcaccttaggtcgggaggtcgagacca

SEQ ID NO: 2170 - DNA, 1020 bp, Homo sapiens
ttatgtttttagcagccccagtttttgttagtggtaccatcatttttccttagaaaatacccaagcttgaaagttttagtcatttgttcttctgttaccttcattcatttaaaaaaaaagaattctaatattactgactgtaggaaattggtcagggtggtgggagaaatagaaaaaagatgcaaaccttcttggaaggctgggaggttttgcaaaagctttgaaagataatttggctgaagtcaactggattctcttacccggagcctgatagcaaagattagataacctggggatgtaaagaaattgatctagataagttagtttacttaggcctcccagaacgtggcctttaatcaactgcaggagtcgggaggtaggggtggcgggttggaggtggtgtggtggggtggcgaggcagtggtgaccacgttaattacccacaagtgtgttgactcaaagcctttgtcattaaatctgtaataaaaagatgctggcatgtcagggctgcggctgctgtgactctttacggcatcctcctcgacgtctgtgagtggcccagtcccctagctgcacgtccaggaaaaaacctgtgtctgcgtacattttccttctgtcgttcggccaggatctgcaggttgggcccggcaactgacattatgatagctttttatgttatttctgaaacttgagtgatacacagagttggtaaatgggaagttaaataaaaagggaatgagaattttaatgaaagtaaaatgtcaacgagaattcttttttacctacttgcttgccttgttgaataatgtttcaacaaaaaatgattaggatgtctttaagatataaatgttgtatgaaattcattaagaatataaagttttaatttttgttcaaatttagtcttctgaaatttagataagaatttagagaattttaacaatcatcagtgatttactttcatgaactgttctttctctttcacctgttccttctatactgactcctttttctcagcgttta

SEQ ID NO: 2171 - DNA, 1027 bp, Homo sapiens
agaaactttttactttaatataatcccatctatttttgttgcctgtgcttttgaggtcttagccataaagtccttgcctcgaccagtgtcctgaagcagttctccagtgtttttctgtgttctcttgtattccactcagtttctgtgacatcattattttgaattctttttctgatatttcctaagtttatttttcattgggatctgtagctggagaattattctgtttttcttttttttggaggtatcataatttcttactttttctgtttcttgtgtcctatgttgatatctgcacatctggtataaacattgcttcttctagttttttgaatttgcttttttaggggaggacttttccccgaagatgtacctatgattttgattgggtggggcactttggctttggttcttcatactggctgtgtaatttctaacctataaacagcgtcagtggtgtctgtggtttcctcagtggcttaaggtttgcttgttagtggagggtgtggtgaagttttgctggggtcagtgacatcaggcaggctattccttgggccccagtggtggcagcagcaggctgagcctgcctgtttttgagtcccaaggccacgtatgctggcacctgtgctagtaagtccagacatcatcttgggtgccagcagtggcagtggtgagcctggagggtgagcaggtcaagtttctgggcagtgggcaatggcagtagcagtgaaggggcaacctctggctccccagaggtccacactgttaccaattgtggctttgatgggctggacaggacagtgcgcaggcccacagggggtgtgtgcgggtgggtaacagttgtggtggtagtggcaggttggttgggcgtgtcttctgcccctgggaaaagtgctcaggtgccaacagtggaggatgttgcagggccaccctcaggccccaaaatgtgtgctcaggcactgctagggcggcagaaggggaggacagagcccagccaagttggcctgtcctcaggcctccaggtcgc

SEQ ID NO: 2172 - DNA, 1044 bp, Homo sapiens
tttaatattagccttctagtctgtaatggaaattgtatattttgatagaagttttttctccattggttaaattagcattacttaaaatttgtttctttagaaaataaatgcaggttataaatgtgtgtatatttagagattataaggctctctgagccatcttctgatttttcattgctctataattctttttactgaaaatactatgttatgaatggtattaaattttagtctctggaacatccaaaaccaagcaaagggatgtgactattttgaatgaatcagaatgtcaacttgtatgtacactatatctacacttactcattatttaaaaagaataatgaaaaatctagatcaattcttcaatttgattgaactgttcagccttttcaagatttctttatttacaaatgattacatttaaatgaatgtacattcttctcactgactttggtgattttgaaacctagaatgatgtgtttctatctgtaatatctttccatttgaaaaaaatctcaaaacacagattaaaaccacaataggctgtagtattttttattttgggagccagagtatgatttgggggaagaatatgtatcagccctattgcagtataactttaagctccttttctctttagtccacttttgattgtaatttttatggtataggattttgaatcttctattttaggcttgtcagtcttggagttcttatcttccattatccctaaatattgataaactcccaggcaccaaagaaaacatttgcttaattgtctgaaaagaaacaagagaaaaacactggtatttttatgtctgtattcaatatggtataaaatataaaaactatattttaacttagtgaaatattttactatttctctacttcagacaaaatgttgcatccaaggtacatcaagtgaccatttgccttgaaccttgatttcactttgttttttttttttccttaaaggcaactaggaagctttactttcctaaagtgtttttgccattggaatttttgctgatcacagtcttatgt

SEQ ID NO: 2173 - DNA, 1031 bp, Homo sapiens
atatttaaacaatgtttaatgtatttcattattaactagtattatagtttgtttttttcccatgtctccataacttttactaacatttgtttttagcagcacaacagtaatccatataaaaacaactaattcataatgaggaaaatctcataatttttaaggcagaaagaagtattaatttttgatctgccatgtagaatgagacaaatacagtttgcttatgaaaggaaagtggcatacttttaaattggtctacacagaaaagtaaaagtaaactattcatttaaataagattcattatctaataaatattgagggaatatttttcctaaataaaaatttttctgactgctaacaaaaattaaagtgattacattgttcttttttggaggggtggggaggaatatttgttgaactaaagtatataaaattttttgagactagcagtatattttataatattacaaatacaacaattatttataaaagctagtcaaattaatggcttagaaagtagctgtaaactttgtgttttgaaattgcttgtttaaatgcaaaattatgagtaagataagtctttttaaattttttatttttaatttttttggaagtttattaaagcccttcatatacacatactttttaaaaaaagattcttaataaagaaattattggtttgtctggttaaagtccatatagaatgctgagaaataatttataaaataagaactatagaaatttgttctcagctgaaaagttggcagctgctctgtttctttaaaaaagtacaacatgaaaatttaattacattagccttaatattacttgactgaatttctactatttattcacttgtgtttgagattcacccagctattctaatgatagaaataaaaagtggagaaatgactaaagttgacttaagttaagaattggagtgggaattttgaaatgccatgtcctatatattctggcatatttgttggcacatttgcaagtatgttgatcccagcattgtttatatctgttgg

SEQ ID NO: 2174 - DNA, 2023 bp, Homo sapiens
aaataaactttctagcaattaaactacattaaaatgtggtagaaaaagagaggcatggccactattggggactaaatagtggccttggatatcatgtagaagtagttatctttggaaaagtaaaaatccaaagacacggagatttcaaaaatcaaaacacctagaagacgagtctaagatatttaatgtgagtaagtgaagaaccacaaggagaaaaagggaaacgatacaggagggcacaattactaaatactataggaaactttagttcgaaagggctctcactctaataggttccaagcaacatgggtggggttggagtgtggggacacacctaggcagataaatttcattcaaatatttattgttacttcctgcagtgacaagtactgttttagttgctgggaatacagggtgaacaaagcaatgttagttcctttattgggtggaaggaagtaaatgaataaatatgtctcaggtggtaataagtaatacaaaaaaaaaaataaagcatagtagagtgactaggctatgttgggataaggtagtggcaggatttactattttatatggatggtcagagacatctcagataagatatttgatcagcaatttgaagtgaggtatctagtgtggtaaatatgtggtggtggggggagagcaagggcagggggagcagcattccagatagggaacaggaggtttaaggcaggcaggaacatacctgccatttaaaggaccattaaggaatccacttggctagtgtggagggagcaagaagagtgagcaatgagggcagaggcagtagtgaacaagattacggagctttgtagatgaatggaagcctttttggctttaatttgctgatacatatgggaagccatttgaggagctgtaagcagaggagtgatacgtgatttaagagtaattgactcaaccttcttgttggtagcaaaggcagaagctaggacaccagatcattggatattgcaacaatatagacaagaaatgacacaggcttggacccgtgtggtatcagtggagtaaaacaaatggtgagattctgtaaatattttgaaagtagatggataggattacaatgtgtgagatacaaatcaaaaacacttcttttttttttttttcccctcagtaacaggatggagtttctgtttatactgtgatggggaggattgtgtaaggatcagattttgcagtggtagcagctggaggaatcaatttagtttcggaatgttgagtttgagatgctattaaacatggaggagatattcaaattcttgaatttcagggtaaaaagaggaatttacaaaggaaaaagaaaatgacatctctagactttagaatgcaaccaagaatccctttttcaggtaagatcattcatcttgaggatatgtaatgatccaaatgatatatctgtatgtgtataacttcacataaggaaaataacttaaaaactttaaacagacagcaaattataacaaaggcctgtattctctgatagagtgactgggtatttataacataagtgttaagtaatcttcaagcagaaaagataatacatggaaaaatctcacactagtaactatcagtactaaagtaagctatcttagcaaaacttagaagtgacagctgagccagaggagtagagtgagtgaaagcattctaaatttcacaaccctagtgacaacaaatgtttgccttcatggaagaacaacatttgttcttgcaactaatcagaacttacatatttttaacaagtagctttctaaaagccactaaagccctttggaatattttttaaaacaacttcttttgaggttatggagatttttaaataggtcaggaaattatttctaagttgttatattgtgaagataaaaaagttttggtaggtaatatgtttgcagccacaaaagcacaaaatacaatgtttttaatattcaagatgtttcaaaatgttctttacgtggcacaaacttttttctaaaagtattcacagacttct

SEQ ID NO: 2175 - DNA, 1032 bp, Homo sapiens
catcacttttattgtcattcttaccagactttatttgatggaggatgtgctaattcccttaaaagaaagcaaaatgaatattggtttaccaaaaataactacaagggcccttattgaataacattgagtatatgtttaaaaagcatttttatgatattgacaaatatttaaatgctagaatgtttaaaaagaaaaaaagatgatttcttatttctcttaagagtcaacttgattaggaattcatttacttattcaataaggatttactgatctgctaccatgtatgaggcactgtcctagggctagagatccagaaataccaaatctgtgatgttttttatttctatcctcaagatcatcatcatttggagagattagcaatgaatcctatgattatattgtagaagagagtgctaagttgaaatacatatggggtgagatgagaaggaggtgggtggctcctacctcaaccatgggctctaaagaataaaagagagggtgatgcttggactgatcttgaaggtggatgagaacaaagattgtaccaggcagagggtactttatgtgcaaagacaggaaggaatgagggaaaatgatgaatggagggatttaattttatgtaatataaccagatcataaaaggttcttcttgaaatgttaggggtttaggctttgtttggaggcactagaaagctggtgaggaattttaaataaaagaattatatgctcatttttttattatgctaaaaaacacataacataaaatttaccaactttaacccactgttaagtgtacagttctataatatgaagtacattcatattttgaaagctctccagaaccttttcatcttgtgactctgaaactctatattcattaaacaactctctttgcccccctccccatgcccctggtaaccattctattttctatttctctaagttgtactattgaaatacctcgcgtaagtggaatcatatactgtcttttgtaactggcttatttcacttaaaataatgtcctcaaagttc

SEQ ID NO: 2176 - DNA, 1027 bp, Homo sapiens
agccactggagtaactgggtccacagatgcatgccactacgtggagctaattttgtttattttttgtagcaatgagatctcactatgttgcccaggctgggcttgaactcctgagctcaagcattcctcctgcctcagcctcccaatgtgctatgattacaggtgtgagccctggcaccaagccagtttgatcttatttgtctatttttgcttttgtttactgtgcttttgagatcatatataaaaaaatcattgccaaggcaaatttcatgaaacttttcccccatgttttcttctagtaatagcttcaggtcttacacttaagtcttaaatccattttaagttgatttttgtatatggtgagacagagggatgtaatttcattctcttgcatgtgaatattcaattttaccaggaccacttatttaaaaaccaatcccttccccattctgttttcttggcacttttgtcaaaaatcagttggctataagattgtggacttatttctaggcgctgtattctgtactgttggtctgtgtgtctctttttatgccagtaccatgctgtttggttactatagctttataatatgtttgaagtcaggtggtgtgatgactctgtgttcttttagctcaagattgttttggctatttggggtcatttgtggttttatacagattttagttttttttcctatttctgtaaagaaagttatgatattttgttagggactgcatagaatctctagattgctttgggtagtatgcacattttaataatattaattcttcaaatccatgaagatgatatatttttccatttatctgtgttttcttcaatttgtttcattaatattttatagttttaagtgtaatctcttacctccatgatgaaattcatttctaagtaattttttttttgctgttttaaataggattttaaaaagttttagatagttcactgttaatgtatagaaacactgctgattttcatgttgattttgtatcctgccactttactgattttg

SEQ ID NO: 2177 - DNA, 1069 bp, Homo sapiens
tggatatattgtttcattatttctatttatgtatcagttgtcttttaggaactaggttgaataggtagtcacatagagttgcttaaaataatctcaggtagcatttatatccttctgtaaaaatacagttacaagtaaaaatgcttatatggttaaaatagaagcacagatgatttttttttcctcaggggtgtcatttgatgtgtggaaaaaaaaatcagagttgtcaactgacattggtgatagtcctttgtcactactcaggttcaaatagatatattttaaacttagattttaaaacatacagctatgaaaaatgatatttcaacaggataatcttcagtgatttttgataacgataaagtctgacaaagtatttctatttaaatacactctgtgaagtaacatagtatagagtctcgctaacatagtatagggacctattattctctcactaagtaggatttaagcttctggtgagtgcttcctttggatagagtaaaaagttatatatctgtagacaaatgaagtaattctctctactcagttaaaaaagaagaaagaatgtatatcttattctatttgctcattgcagatgaaatcaggcattctcctatctctttaataatgtatagactgtacaatgtcatggattctgaggcagtgtttggtaaattaatgaaagtgtaagctttagctctacttctgtaaaaattaaatgtggaattcaatagagtgtgtctagactgaacagagcattaaattaaatttgtacttcattttggcttgagaaaataaggaaattattggtggagcatagaacgtggactattcatagaactggagcaaattattagttttcgatggcaggcttattcatatttaaaagaatgcttggatattatgtaagccataagtttttagcttaagcatatagcaagagcaaaaatatattaaggccaaaagattgacaattgtattttgtatttactctctatttggatggaggaaatctacacaaaaaaagtaattataagatagattctccatggaaaacatagatcaatga

SEQ ID NO: 2178 - DNA, 1040 bp, Homo sapiens
cataagttcctttttcatatgttagattgaataatcttcatacaacttgaataaatattaaacaattgactggcttttgttagttcattgtacatgctaaacattttttgagaggttttcattgttgcttcattacctaaaaatgtaacctctactagcaacattggtttatttattattctctttgcttatatggtctcatacataaattggaaaatatttttattttcaaagtcaacaaaattataatttatgacaattttaatacctatgtttgagtcattacaaaactaattttttattgaaaatgtcacaaatgtcattactgaaacaattatatatatatgtaattcaatctgtgtgtagaatatatatattcaatatatattcaatccgtgtgtagaatattgtttggagattgggatcaccgaagtgttagaaattgcactgagctaatttatacatacttaatggtaagtgatttttttaatatgagaaactcctagatattagagctgagaaagaaaagatagactcttcaccagagacatatgatgcatcacagatagccattcataaaaagggagttttgaattacatttctaagttaaagaaaatactcaagatcatcttaacttagtggtgagcaaacttgtattttctttataagagagtaactccattaagaagaataatgattatggaccaagttttgctttatatgtaaatatttatttatttaaaaattaggcatctaaaattgatatatgcattattttattcccaattacttaagaatttatgttctgtggtaactgtggtcatggtaagtgaagttttagctattatttcaggaaccatataattatcatgcattgccattcctggttgtaacaccaggctttggtacacattttttaaatgaaaaaatatgttctcaatcagaatatggcttaccttcctttggctatattattaattgatcagttaaaataacttgttccttaatataattttaaaatagatgtttctttcacgat

SEQ ID NO: 2179 - DNA, 1021 bp, Homo sapiens
gccggggaagagggctcaggggaccggacgcggtgccccgcaccacgctaggcctgacaaccggaagagaggggccaggaggggctcctccagagcgacttcggctccagtagggaaaccgccgaggctcccccagctccagggagcgccggggacgcaggcgggaagcctccatcgggcagccggcctggactcacgacgcggggtggggccggcgcccgccccgcccctctcctcggggatgccgggatgtttacactcctgacagcggcggcagcaggaggaggatcgggagtcgcgggaggatgggccgccgctaggctcgcactccggacgcgcctcgcagtgcgcagggtgggtgccccgcgcctgcagcgtccgccggggcggcgcggcgggaggtggccgacaggctccgggcctcgcagcctcagcccccggcccagcgcgctttccgacggcggcgccgcgccgagccacccgcccgcccaaggtctctcgcgggcgggagaacggaaaactcccaacttcctggtgagtcgctgcccagggttcaggcgcccggaccgggcagctcctgccgggaggggccgcctgcgggagtcgggccgggagagggaggtcgggaccgcgcggggcggcctccgggataccctcgctcggggtaggtggggcggggcgcgctgcgctcgaggcggatgggggtttcggtcttgttcgttggcagcggtgggagggggcggcaggaaacttcatacctggccccggctctagaggcccgaggccgccaagggcgccgcggtaactaagaaactccgtggccacggcggcggcggcaacaggtctttggtttcgggacccgaggaacttaagcgaagtcccgccttccggcggatgctcattggcgacgtcggttatttatctctcgcggattggtgaagtccgtctgtcaggattcggcagcagcccgacttaggaaagtgaagtgcgctgggagagagtgggtggtgggagccggcag

SEQ ID NO: 2180 - DNA, 1057 bp, Homo sapiens
aaaatcagctgtcagtaaagattgtctttagttacatagttctcccgtttactcctctaatcactttttttaagtggaaaggaatttgttactgaacatttaatagtatttaatggttgtgagggagtttgagcttccagcagaatgtcccagtaccaggcccccaagggagtttctgcctcttctgtgatcagaagtccaccggtctagggccatacagccactgctctggtcaagacacagttacagtaagaaaaatcctgctatttgggggaccctagaaccataccctgcctattgtggtccaggaaacaatgctgtgggccctagctctatacaggcattattcagagatattgcaggttctagtctagaccactgcaataaagtgaatcttgcaataaagcgagtcagatgaatcttttggtttccaagtgcatatgggagttagagttacactatactgtagtctatacagtgtgcaatagcattatgtctaaaaaatatacataattaaaaaatattttattgccaaaaaatgctaacgatcatctgaaccttcagcagttcataatatttttgctggtggagggtcttacctcaatgttgatggctgctaaatgattacggtgacggtcactgaaggctggtggctgtgtcgttttcttaaaagtagacaaccataaagcttgccacatcaattgactctttctttcatgaaaaatttctctgtagcatatgatgctgtttgatagcattttacccaaagtagaaaatcttgtacaattggagtcaatcctctcaaaccctgctgctgcttaaaagtttatggaatattctaaatcctatgttgtcattttagccatgttcacagcattttcatcaggagtagattccgtcttaagacgcattttctttgctcatttataaaaagcgactcctcatccattgaagttttatcatgggattgtagcaattcagttacatcttcaggcttacttttaattctagttctcttgctgtttccaccacatttgtagtgacttccttcactgaa

SEQ ID NO: 2181 - DNA, 1012 bp, Homo sapiens
agaagtgttcatgtaggaaaatcaagggactttaggacctgaggctgggacagactctccaggatgtggttggattttgggctaaacagtctttctgtggtcttgaggactgcctttatagtctgtgaaaccctatccttcaattgtggctttacagagtttaagaaaattttgttcgtatgcagatttctgcagtcttcctgttgccaggaagaacctacagttacacaggagtgtgtgtgtgtgtgtatgtatgtgtgtgtgtgtgtatgtgtgcagacacgtgtgtgtaaacacacaaagtagactgaacttaaacctgatttataggagtcaggaaacctgagtttctttgctttctccttgtgtaattttggttaagttgtgtaacttctttctttggagtttcttgtctgtaatctggaaattatttcccactcactccactgtgatgttttgagaagatatctgtggaaactttttgaaaagtacaaaatgataagtgtaaaatgtcaataaagcatattgatgcttattttgctagaagagtacatataaacataaaatttagaaaccttaaaaatcacggccagagagaatcatgatttctacacctccctttttttttttggtgggggggtgcttccagttaaaagtaagcattcagtttgtactaatatttaaaagcctttgcatcatagagaaaattaatcaataacgaagtatcataatttagaatcattattgttactaacattttattccttattctaaagtaatttattcaggatgtgtgctgagacctgttgttttaactgtatagctagatgaaaatatgagagaagaggtttggatgaggtttctttcctttgtaacagtttgcttgaggaatgggcaggcttttcctcacttgacagatggtataggaagggcattgagaagcttgcatttgcttggtggtgatagagacagggctagaattcataatttttgttgttgttatttaacacat

SEQ ID NO: 2182 - DNA, 2040 bp, Homo sapiens
gagaaaaagttcatatttatttgcatctttcgagttaaaagaactaaagattcgttctaactctgagtggtatgaacagtaagcagtaggatactactaagtagaagatcatagtagtcaggctagtgttaggtcagactttccattattaatccttcttttggtatatataacttttggttgaaaattctaaggaacaatttgtatacaaattttcggcctgggttgaacaaatatgtcatgacccacttacaggcctcattaaacatttggattaatgttaagggcttttaagatgaaggcaaattttatgttttagaatatgttttcaaagtatttgttcttttgggacaaacagcttaaagttattttattcattccttctggggctgctttatttttagtattaaactcagaatagctaccaagctcaagtgataaactttaaaaacctataaattgtaatcattatgaatcaaaacagcatttaatcgcaagaagctgttggatgtgaataaagaatttgtgtattaattgattaaaaagttaaacttatctccaggtttcaatgatatttttaaaaagagaggagggtcattattttgtggctacttaattatttaatttgtattgccatataggcaaatgttaagaatgcaacatcttgaataattctttcctatactttgagtaattttattttgaaaaatgcttgcattttatttgaaacacatgaaacagaagtattttaatgaaaatattactgccacattaagttttctgttcttgaagatgtataaaaattaccccattttatctccctaacactatcagagttgccatcaaaatccgctatgaaaacttatcatttagtatatattaaagcattcatctgggaacatgttgtcagctttcagtcagttgcaacaaacaacagacttttagagactcctctaaatttcagcgtgcctccgtcttcttaaatctatacccctgatattttctcacacaacaagtaaaccaacctaaactggcagagaggtggaatttttatgccagtatttttctttaatgcttttggatgacttaagctttaataaaatgcatatttattaagagtatactgttttatggacttctagaataaaaatacagttttactaaataaaattgaacagaattaatcagatattatagagaagacatgcttctctgtgtatttagaggatactctctaaagtcccttgtaactctgaattttaaaatctgtgactcattctggtcctagatcatttttttgcattcttataaatgcaaatgtatctgtaattaagtaattgttaatggaattacaaattgagaaatttagtaacttttcctaggaatggtttgtttcttttttatttctaccgttattaggagagtggccctgaaagagaaggatgataattttttttgttttatttccaacatatggaatttgttataatcttcttagaatcttggcttttctagactagtagaaggattttgctatgcttcctattagataaatagtaaagaggtggtcatgagttttatatagtactttgtttagtgcatttgcttttatttcatactttgatgtattcatatcatttatagattttttagagtgttttgaaacaagtagtaacatcaacacttaagtttacaaaatattttttttctaactcagtagatcaaacagggaaactaacacatcaaggggtcctaggcctttaatcccgctgggtcctggcagaagtgaaatgctcttttcactatgtggctattacaaactgtgctgtcctgaacatttttgtatgtctttgtgcatatgttagagtttttttggagtatatactaggagaagaattggtgggttgtagggatgttgtccttcaaatatttctgcctgtagtatatgtgagttccagctgttccatatccttgttttattttgacagaatttaatttttttagcccatctgataagtatgaagtggtatcctgttgttt

SEQ ID NO: 2183 - DNA, 1050 bp, Homo sapiens
aaacaagcagaagtacaaaagatcagtgaaacaaaaactggttatttgaaaagataaacaaaatcgataggccactagctagattaaccaagaaaagaagagagaagatccaaataagctcaattaaaagtgaaactggagacaattacaatcaatatcacagaaatacaaaagatcatttgacattactatgaacacctttatatgcacaaactagaaaacatagaggaaattgataattatcaatttcctcgaaaacgacaacccttctagattgaatcaggaagaaatagaaattctgaacagaccaatcacaagcagtgagattgaatcagtcattaagaaaccaaaaacaactgccaagaaaaataagcccagggccacatagattcacagccaaattctaccagacattcaaggaagaattagtacaagtgtactgaaactatttctaaagattgagaaggagagaatcctcctgaactcattttatgaagctagtgtcaccctgatatcaaagccaggaaaggacataactgaaaaagtaaactgcggacaagtatctgtaaaacacagatgcaaaaatcctcaacagagtgttagcaaaccaaactcaacagcacgtcaaaagaaataaaaattcaccatgatcaagtgggttgcagggatggttcaacacgtgcaagtcaataaatgtgattgatcacatgaacagaattgaaaacaaaaccatataatcatctcagtagatgcagaaaaagcatttgataaaagccagcatctccttatgataaaaaccctcaactaggcataaagaaacatacctcaaaataataaaaaccatatatgacaaacccacagccaacatcatattgaatgggacagagttaaaagcattccccctaagaactggaacaagataggaatgcctactttcaccatttctattcaacatagtacttgaagacttagcccgagctatcaggcaagagacggaaataaaggacatccaaattggaaaagaggaagccaaactatctctgtatgctg

SEQ ID NO: 2184 - DNA, 1098 bp, Homo sapiens
aataatggggatgatatggcaacatctggttagcccagtgacttctttcacttttgtaatagaagtctgggcataaacagaaaactaaggatgtcaagtttctgagtgtcaaataccaattccctgttataatgataagtgatgtatattgttggcatatccattctttttcttgtttcaaaatgaatactctcaccccataatgtataatatgtggtctcatttttggtacagtgtaagttccttttgttttgttttagaatgtgagatttatgtttctttattaatgtattttgaaattttttctatcagctccactccttcccaccctcccttcttttccccctttcttcctttcttgattctttccactaacatctagaaggtactgaaaggatattttgactagattcttgttctgtatattttcattgcctttggactcttgtttttggaacagtggatttagctttttaaaaataaaaataaaaattcaaactgtataaagatggtggttgggaaatagtaaaatttttactctttactgtaagactaattttaaacaatggaagtttacaattaacattttgtgagtattttgatttatggttattgggtgaagatggctatggtagagtcacatttttttccaaaaagttaattataaaccaattataatcagagtacaattttaagaatttttgcgagttattagaaggaggattaattttcattgtgatatgatcagaggcctaggttatttttttttaatttgaagatagtgtaatattttggctacttatgaaagagaaaagacatgtcactcagatctgtgggtagaaaaaacagatattccttattcttacagtgtggaaagtatgaaaatcttatcttggagtcttgcaacttaaccagtaaggtagactgaccattcctttaagcttcatggcagttcagactgtaatccatttactattttgcatctctgtggagtgactgtggagggatgaaataaagtttaccttgagtagcatgttcagggtagtaatcagggttcattgtaggccagccagaaagtatccctctctattgagtggg

SEQ ID NO: 2185 - DNA, 1507 bp, Homo sapiens
cacctgttcctcattcattcattcattcattcattcattcaagaaacttattttccagtggggaagtcaaataaaatgctaaaagcaagtagaatatatgatatgccagatgttgataaatcaattgagaaaaattaaataaggagtttggaggaggtgtgttgctattttattttatttatttaattaatttttttgagatggaatctcactctgtcgcccagggtggaatgtagtggtgcgatctcagctcactgcaacctctgcctcccaggttcaagcaattctcctgtctctgcctccctagtagctaggactactggtgtgcaccaccacacctggctaatttttgtatttttagtagagatgggatttccccatattgatcagggtgatctcgaactttgacctcaggtgatccacctgcctcagcctcccaaagtgctgggattacaggtgtgagccactgtgtccagcctgtgtgttgctattttaagtaagatgatctcagaagaccctcttaagtcctaccaccctcacctctgcctgccttttccttcaattactaccctagttcttttttttccttcacagtcagacacttactcctgaccctctttccaacctaccactcgtaatggctcttcaatgacctctctcatgaaaccagaggactttgtccagtcttcattctgcttgatttctcagcagcatttggctctgcttttcattctcttcctaaaacactcctccatcggcttattgagtcccacagtgtcttgattttcttcctacctctctggagactatcatttttcttaactgactcattctcttcttcctggcctttaatgatggaattttaagtttcagtccttgactttttttttttaatgttcttacgttatagctgatctcattcatacctacggattcaattactctctatactcttgttgacttccaattttttatctttagcatggagcgctctttaaattctgactctatatggctcaatatgtctgtaaacaaattccttacagactacccatcctcccatgttccctaactcgaggcctggcaccagtttatctcgtgcactctggaaaccaggacttttttttgacatttcactctcccttacctcttcttttcaatctcaccagattctgtttattttttcttctaaatgcctttcaaatttctccacccagctccctttccatttctctccctatcgtctctcatttggagagagcgagagctttttgtctcccaacatccagcacccattccttaaatccgtttctccatcagtctttaagacgttagaagggagagaaacaaagaaaaaagaaaaacttcctttcaatcacatctttctaggttttcactttaagggtaaagactaaaatgtttggcaagattcagcaagccttgtgtgatacagaagatacgctccctcagagaggatccgagtccgttttgtgtattcacatatccc

SEQ ID NO: 2186 - DNA, 1609 bp, Homo sapiens
actgactgttctttttaatctcactttatctatcactagtactctgatgcaatagagaaaacattttaagtatttccaagtattttcttatcagttttagtaatgtggaaacttctcttaagaattattcacatggcagcaatgcagggaccattctttttagtaattctgatgcattcatgtgtttttattgttgatcttttagttttttaatattctaaataagttgccttgatattgatgtaccagttttcaggaggcaactgttttggggaagttttgtgactttatgggtacttagttttcttgtttgctaaataatttaagaggtttttttccctcaaggtgtaattgctcatgaaaaatattttctgtttcacattttctaccctaagatgaaatatatttttggcttgcattaataacttgcaccattttaacttttgggaatgaattgattatatttatattctattataatctaaaaacagcttagcactcttaatagattttccaacattacaggaaaagacaaagactagtagaccttggataagaagataaaatgagatgctagtgataagtattctcagtgatctcatgactgtcaggcccatcctactttacaccttctaatgcaacttaagatatctgaattgtattcattgtgccaaaagagaaaatacttatgcactgtaaattagtgttacataccaaaattttaattttatataatttcccacaattatgtatagcaaatatttgtgaagtttagtttgttgatacctcattatgccttccaaagaaaaatgtttccatagaaagattaataaatgataaaaatcacacttagaactgtccattatacttccagaagcatcctatctttttcatcacccagtctctgtgaatttaattctttgaaataaccacgacaaaatatagtcttataaaattgcattataattacaatgctgtgtttgagaacttaacatcccctctgatggtaaatgtttgacctaattacaaacttataacaaagaattctaactgcttgtcatctcatgttaagaccttttatagtattaaatggaccaatagggatctctgaggtttttttgttgttgctttgtttttactaattggatatatgaaggataaggcataccaagaaactattatttttaagtatgaaatgtgccaaacagacatttattatttctgttttatttgaaactaagactgtagacccacagattatattttagaagtggtggagacgtcatagatcatctccaaactctgtttataatagagtgaggaagctgagacccatcaaggttaaatggcttgttcaaggtcacacaaccagttactgtcaaaccttataatcaggtctattattataagatggatatggattgtgttagtggcacatttaaacatttgacaacactccaagcaggaaatgcttccttatatttaacataaatcacttacttcctcttactagatacttggaagaaatggagagcagctggtgcctgtaattctagttctcttatgacttcattatttctcatcatttaattaacatttttcctaatcc

SEQ ID NO: 2187 - DNA, 1056 bp, Homo sapiens
acctacaatcataaattcttgaaagataagtggaattacatgtgctgtagtcttcaagcttctcaatacataggacagtaattcgcatgatcattttaatgtctaatcatatcactccataactctcttttcttgtacagctgttaaaagaagtcacaacattcttgaggcaacagtaatcgtagacacagctgtcatgaatctctgaaaaaggtttttggaaataattatatcttcattaattttgaaatgttgaaaacatatcactgcatttaaatgtactgcaaattttcctgagcacttaaacttttaggcctctctgctagatagagagaggtaaggactaatcagtttacgtgatggggctgaacctctttgctcagtgtcagtcagcgtgagtccttgtccagaacggaggggcatatgaagaagcgtgtcaggagacagtagacctccctcttaggcctgtgttccctagtgaattatgaatttatcctattaataattatagtgcagaatacaaagttactcatcttatataatgactgttggaaatttgttgatcaaagaggtgagtagcatccttagctttacattttaatatatactaacgaatatatgtagtttaaatattgaaataaaacatgcttatttaatataaagaggcttgttatttatattaagaatcagtatctaaatttaaagtatcagtgttaactgagtgtgtaactttttgcagtgacctccagcagctcactgaaaaaggatttttgtacattaacattttttacattttaagtttagcttagtagaattcctaatcattcttttcctctgctcccttcacttgggtcgtccttgagttcagtttgtgttgcagttaaggtgttatgctggggctaatctctgtaaaatgctagcatttgttcttctttttccttatcatcaatctttcacactcatatcaaacccctaatgtacagcaggtttcccagagctactggttaaaattacctttgcttttggtaaactctgaaccttcaagcctcagtgttt

SEQ ID NO: 2188 - DNA, 1086 bp, Homo sapiens
acactgtccctctccttttttttttttttttaaagttagagaaatggaaggcaggaggggagggttctttctggcttctcctggaatagtttagcagtgcagcctgataatatcttttctgctgcttcactcaaatgtttaagaatttctggcatcatttcctatattgttgaaacaagaaaagtcttgattttctggagtatttaaaatgaacacagggattaaaaagtacaggtattttttcctatggttgattatgtatgaataacaaaaataaatttttaattgaactaaactgatttcagatatttataggttattggagagtataacatatttatgtggctttgaataaaattacaatactgaatttttttcaacttttgaaatcacattttctttaatgcgattatcaattttcctgctaaagaagggcaatgtcatcattcccactttacatatgagtaagtagagacctagacaatgtttagagcaaacactggacatcacagtggtacctgtgcggcatggcatccccctgtttgtgttacaagaacacagagcccaaagtaaactctcaggtgttttatgaatgagcatttcatgatttttactcttagacttactaattctttatttttctcctctctgttcttaaccctttcactcaccatctttatctggaatctccttccctagaagcatagcaggttagagggcagaggcacaatgaggtgtttgcttagaatactcttctggctcatggtaactcaggggcaatgtaacattgaaaggaaagaatgaggaaacggcagaagggtaggaattatttccatacatttgagtatgaaaaaccaagcatatatctcaagatagcaaatatgttgatccataatatattgaacaaaaaaagttacagtttgtcataattttactaatactttgttttcaaatggctactgttaaggaaaggaaatcactaaatgaaagctttaaaaatataactgggtttcaaaccgaatatttataaataatttttgtttattttaaatttagaataaatttaaagaagatttttaagggagt

SEQ ID NO: 2189 - DNA, 1032 bp, Homo sapiens
ttgagttaggtttctttgtgacacccaagtgaagagctgagtaggctgatggcttataaggatctggagctcagaagaggtgctttggccttatagggtaatgggaggagtagaggtgataatttaagctcaggaatgctgtaccacacttaccatgttaggtaataatgtagagggcaggagggagctaacttttaattggtaccttcttggaaggcaaggctctatgtgtaggtaccgtacagtcttggtaaatatttgagtgcgtactgtgtttcagacgcagttccaggtactagtgacacaggacagataagtatcttgctctccttcaggtaccttatagtgagaggaggtagaaataaaatattatgggatagtaatagttgttatctagagaattaaactacaatgagtgactgggtggtcagggaaagtgtgtttgaggaggttacatttaactgagatctgaatggaaagagccaaccattcattcggttaaggggaggaacattagaggcagaaggcctctagtgcatgggccaaaaggtctgaacctggcatattctagcaacaggaagagttgggtgtttggaacatagcggcctggggaaagtggaggaagttgaggtcagagtaggagtaggcagtacatttgtggaatatggagaaactaaaactcagagaagttaattactgaactcaagatcccatcaagtaaatggctgggccgggcatggtggctggtgcctgtaatcccagcactttgggaggccaaggcgggcagatcatctgaggtcaggagtccaagatcagtctggccaacatagtgaaaccccatctctacgaaaaatacaaaaattagctgggtgtggtggcacatacctgtagtcccagctactcggaaggctgaggcacaagaattgcccgaacccaggaggtggaggttgcagtgagtcgagatcacgtcactgcactccagcctgggcgacagagtgagactctttctcaaagaaaaaaagaaaaaaaaaa

SEQ ID NO: 2190 - DNA, 1053 bp, Homo sapiens
aatatgctgtttcagttcatttttttttaatgtggtacaattccaaactttaaaaaaaataatagttttataccattggtaaaatgatagacacatttgaagtcttctcttaagtatatttagctcttgaagacttgtttttaaaatgacctattttatattcagtatgaagttttacattctcttgagggctgaaaaatctatttttgttgtattcttgaaacagtctttgattagctgtggatcctttcccttttccttgcattggggtctttttaaaacttacactttcacaacttaggttagtggatatgctttaatgaaatggaagcaacccctggactcttgtcttccaccttccacccttttgatcttggcaaatcattattatgtttgagcctgtttagcaagatggtgtagagctataattctgtgcttatcagctatgtgcccctgggcaagatgtcctttcttgagttctttatctgtaaaataaggtaagagggttgtcagaattaaatgacagaatgcatgtttaggactgtgtctgacaagatgttataaaggtcatatatgaaaatggatgtaaaagcagtaagtaaatgctaggtggatatataggtatgatagataaatttgtaatcctgataatgagcatttacttttcacagctaatatttagatgccaaataacttatattagccattttttactgatacaggaaataaaaatccattgtttatacatttgataagttatcttaaaatcaaataattttccttttacagctgttctactaatagtttctgtttatttcctacaatactaaagtgtaaatgaataccagcactatattctgcaatttaaaactgaacttcaccatcacgctgaggcagctatattaaatttaaagctggctcactactgggtagtgcatctacgaagaaaggaaagtgttttcaattattaaatgaggatgatatttttagatgtcaccaaaatcccaaattgatacatccactcttgacctctttccagagtcctatatctcc

SEQ ID NO: 2191 - DNA, 1068 bp, Homo sapiens
cttgtagtccctttttggaatatactcagaaagtatcttctgtaaaggaaatttgtatctttgtctcattccagagtatatgtcaaagtttaatgaatcatcttttcagttaaagggttattgctatatttttagagggaatcttaaattctatgacataaataataattattaattaaattctatgtttcttttataaaaatcttgtaagagaattttttccattaatctttatagaaaatgtgccagaggaacttcaagaaccattttacacagatcagtatgaccaggaacacatcaaaccacctgttgttaatttgcttctatcggctgaactatactgtcgtgctgggagtctcattctcaagagtgatgctgcaaaaccccttttgggccatgatgctgtaatccaggctttagcacagaaaggtctttatgtcactgaccaggaaaaattggtaactgaacgagatctccacaagaaacccatacagatggtgagtctttatatacccaagattattttaagtttgaagtgtgtacttttgagtgtgaatgatatactgtaaaacagagggaaatgttttgaaattggattgtatttttgcctagagtttacaactcatctttttcttaaccttgtttccaaatgaaggaagattttaacgattttggaatgtttggtgccatctaataccttggagaaacaactacataatttccaactaccttaatgtaattttaattgaaaacttttattttttccgttgtagagactggctagaagagatggaaaatgcatccttgactttatcattaggaaagagttgagattaataagtgctgatttatggccgggcgcggtggctcacgcctgtaatcccagcactttgggaggccgaggcgggcagatcacctgaggtcaggagttcaagaccagtcttaccaacatggagaaaccctgtctctactaaaaatgcaaaattagccgggcatggtggtgcatgcctgtaatcccagttacttgggaggctgaggcaggagaatcgcttgaacccaggaggtgga

SEQ ID NO: 2192 - DNA, 1028 bp, Homo sapiens
aatttttcaagaaataatgttagtactaattctttttcttcaaagtctcagtataaaaatttcctgtgaaataatatatatgaagacagaaatctttagaagaatttacaccagactgttaactttggtttcttctgtgaaatgggattaaataggattggagaaataaatggtaactttcatatcttatttgatgtatttctgcactattaacatttttatatgattttactgttttaaaatttaaaatgtagagaagaaatttaaattcaaatagaaattatcattatctgaaataacatgccttgtatgcatactaaatatttctgatagttaaattgttaaagagaaataagtatcctgcatttagcctttaagcagacataggaaataagaataaatattgaagacctctctaaatggttaaattccaaatatcccgtaaatggcaattcaaacctttaagatatcttttctgtagttccttttagtaatcaatctttaaaaagaaaagatgtggctgggctcagtggcacatacctgtaatcccagcactttgggaggccaaggcgggtggttcacctgaggtgaggagtttgagaccagcctggccaacatagtgaaaccccatctctactaaaaatacagaaattagctgggcgtgatggcaggcacctgtaatcccagctacatgggaggttgaggcaggagaatcacttgaaaccgggagaaggagattgcagtcagccaagattgcaccattgcactctggtctgggcaacagagtgagattccatctcaaaaaaaacaaaaaaacaaaaaaactcaacgtaacttctcaaaacaaaaacatttctctcaatctccaccccaaaattaatactacaatctgcttatcagtcaaacttgccttagtcatacttctttatttatttattttttcgagactgaattttgctcttgtcacccaagctggagtgcagtgacacaatttcagctcattgcaacctccacctcccaagttcaag

SEQ ID NO: 2193 - DNA, 1026 bp, Homo sapiens
gacatttttgtcttattcctcatcttatcaggaatctgttgagttcccattgttaaatgtgatattatctgtaggatttttgaagatgttctttttcgggttaagggagtgcctttctgttccacgtttgctaagaaatatatgtatgtttatgtttttaaaatcatgaataactgctgtatttttcaaatgctttttctgcctctattaagataatcatatggctgttctcatttatcctgttaataggtgagttacgttgatttcaaatattaaactggtcttgaattcctggagttaaactcagttggtcacggtaaattatctcttttatatattgttaggtttaatttgttaatattttctcaagggtgtttacagccatgttcgtgagagatatttttcttctcatttctttgtcttgtgttagcatcagggtaatactgtttttatataatgagttgcaaagtgttccctactccactgttttctgaaagacttcacttaggatttctgtaatttcttccttaaatgtggggcagaattcactaggtatgccaccggggcttgatgttttctttttttttcttttgttttttttttttttgaggtggagtctcactctgtgcccaggctggagtgcagtggcctgatcttggctcactgcaacctctgcctcccaggttcaagcgattctcctatctcagcctccgaagtagctgggattacaggtgtccccccaccacacctgggtaatttttgtatttttagtagagacagggtttcgccatgtttgccaggccggtctcgaactcgtgacctcaagcagtccatctgccttggcctcccaaagtgctgggattataggcgtgagccatgtgcctggctgatattttcttttttttgagacagagtcttgctccgttgtccaggctggagtgcagtggcgtgatcttggctcactgcaacctctgcctcccaggttcaagtgattcttgtgcctcagcttcccaagtagctgagatt

SEQ ID NO: 2194 - DNA, 1026 bp, Homo sapiens
ttgactgttttgttatgggctatgtgggctaatgtagctggtgactttagatcgaagccagtgctcatttaccattctgaaaatcctagggcacttaagaactatgctaaattgactatgcctgtgctctataagtagaaaaacaaagcctggatgacagcacatctatttatagcatggtttactggatattttaagcccttattgagacctgctcagaaaaaaaaaaaaaagattcctttcaaaatatcactgctcgttgacaatgcgcgtggtcacccaagagctgtgatggagagggacaagggcatgaatgttttcatgcctgctaacacagcttctgttctgtggcccatggatcagggagtaatattgaatttcaagtctttttatttaagaaataacattttctaagtatatatctgctatagatagtgattcctctgttggatctgggcaaagtaaatttaaaaccttctgaaaaggatttaccaatctagatgccattcatgattcgtgggaggagatcaaaatatcaacatgaacaggagttgggaagaagttgatttccaacttttagggatgactttaaggggttcagtacttcagtggcagaagtatctgcagatgtggtagaaataggaagagaactataattagaagtgaagcccggagataggactgaattgctgtaatctcattatcaaaattgtctggatgaggagttgcttcttacagatgagcaaagtggtttcttgtgatggatctattcctggtggggatgctgtgaacattgttgaaatgacaacaaacaatggatttacagtattatatatcaagttagttggtgaagcagcggcagagtttgataggactgactccacgtttgaaagaagttctactgtgggtaaaatgctatcaaatggcatcacatattatagagaaatttttggtgaaagaagagccaatcagcacgcaagttttgttgtctcaagaaattgccacagccatcccctccttcagcaa

SEQ ID NO: 2195 - DNA, 1095 bp, Homo sapiens
tatttcataatctgaaataattgttgtcttaagtagtttaccggaatactactcagcaataaaaagaaatgaactattgatacatataacagcttgtatgaatatgcatagacatgctaagtttaaaaaagccaatcccagccgggcgcagtggctcaagcctgtaatcccagcactttgagagtttgagatcgggagtttgagaccagcctggccaacatggtgaaaccctgtctctactaaaaatataaaaattagctggttgtggtggaaggcacctgtaatcccagctactcgggaggctgaggcaggaaaattgcttgaacccgggaggaggaggttgcagtgagccgagatggcaccactgcgctccagcctggatgacaaagcaagagactccgtctcgggcagtaggggtgggggagaagacaatcccaaaaagttacatactgtataaatcccatttatataaacattcttgaaatgacaaaattatagaaatggagaacagattagtgattgccaggggttggagagaagtagatgtgactgggaaagggcaacatgaaggatcctgtgttgtagtgttttgtggcttaattatatccatatcagtatcctggttgtgatattgtactatggttttgcaaggtgttaccattgggggaaactgggtctatggtaaatgggatgtttctgtgttctttctcacagttgtgtttgaacttacaatgagctcaaaataaaaagtttaataaaaagatgtatgaggaatgaatttttaagatgaaaagaaaatgctaccatgtggagcagaaatggtttcagtgtcatttctcactggtagtgagaaagtatggagtgatcgagtacattatctctgtagtggacagaccccaacaatgatcagcagtttgactttataacatttctaaaactctctgagcttcagttttcctcatctatagtaagcaatgataatattgtctgccttataaataggtgtgaggattaaatacaatagtggctgtgaagtatctaatgtggtgcttgacctatagtaagaaagatcagtaaacgttagcaatcatcgtt

SEQ ID NO: 2196 - DNA, 1050 bp, Homo sapiens
tccctgactcctcctcagctgtagaaaatcacagttacattctagacctattcatcttgagaaactatgcaaccttcacatcccattacagacttcccattcttgaacagtttctcctatcttcctaacccacttgctttaaataataatttttaaaatgttgaacctcattatgacttataaactattgagcctattaatttctcacaatcttattggacttcatatttgtccatcttgaacttagatttttataagtactctcagttcttatgtctccccttccctccctgttactcatttggtaacagctcagatggtttagcttagttacccattttatttctaacctgcatttgcagaggcaaatattgctggagaaatttacacaaggaagttggtttcactttaagttcataagcacaaacttccactgccagtccaacaaatgtgtccctaagtttgctttcccacgcttcatgacaactgtgttacccattttcctctaattctcggaccttctgtaaccctttccctactactgtcagctaaatttgccttatcttttcttgagaccagagatgggaaggctttaggtgggaattatcttccctttatactagcaaatctgtaaacagttttggatcgcactcattgcctttcttttgtcctactgttacaatgaagaatttcccccttcacatcaaacgtgagttttctactacttgctctagaactttcttcccttttttgtggtcattggtcctgtacttcagttcttactttttaatgtacataagaattacctggtgtattagtccattttcttcttgtaacagaatacctgagccgggctcagtggctcacgcctgtaatcccagcactttgggaggccaaggcaggtgggaggtcaggagttcaagaccagcctggccaacatggcgaaactccgtctctactaaaaatacaaacattagctgagcatggtggcagatgccagtaatcccagctactcaggaggctgaggcaggagaatcacttgaacctggg

SEQ ID NO: 2197 - DNA, 1035 bp, Homo sapiens
ctttttcctgacaaccttatctaaatgaagtgcctctatcaaccccttgttttctataccctaacactctactttttttctttcatagcacttttcagactaattacttttcttaatcatttaattttttaaaatctgtcttcctcactagaatagtctatgtgaggataggtacaatgaactttttatttctagtgcctacgatgaccttcttcttttcagttttagtatctagaccagcacagtgtttgacaaagagattatatttaataaacactaaactaataaagagaaggatagtttaagccattgaattaagctaggcactttagaactttggaaatctacacaaaattaaggaaatcacttaactaggaatgttcagcacctttatgcagtcatatccacctcattccattttcaaattaggtttaaaacaatttgattcaacctgaactgcagtgtattttttttccttgatccattctaccagccccagcattattttttattctcgcattatgactttacccttgcctctcagatttagtatatgttttctccttctggctcttgttttggctcgtcctaacccagttgccttttttcctggataatgcatccacaagtataaaaaaacctaccaaagaaaaatggcaataacatggctaaaataattatcagcatagtggctaaaatgagtttaaacttaaaaaagcaaaatcacagaagacaagattatattgaatgattgaatcatgcagaggtacacaaaaatcatgaatatattaaccttatattatttggctctacctctgtttcctatctcattttgtgacttctttgggttcactatgtcattctgttacttaaacacgcaagtatttttcctaccacagggcttttgcttatgtttttcattctctctctggaatgctctttcctctacttttcccatagccagcttgttctctttaagatctcagcttaaagttacttcttaaagaaattgtcttagtctgtttgggttgttat

SEQ ID NO: 2198 - DNA, 1028 bp, Homo sapiens
aatggtaatacatttccgtctcaggcatctctacatccacccagcttgtgtagtttttgttttgtaatgtggggttgggctgcttcctggaaatttctcaaacaataaaaatttcaaggtgcaacagttacaagcaggtaccttttcacagtgtgtacctgaaaacccaaggaccctgggttacaacaatagaatatttattacaatattaaatctttaatgttttagtacatagtattaggaactaaactgaaagcaaagtaaaaatgtcctatcatattaatacctagataatcctgacttctcacccaggtatatgatagggacattagtttgtttaaaaatgtatttcagcagctcctataagcagctttttatttgaatctattagaacctacaatttatattgactttggactccctaatctatctgattttttacgttaaaactaatgtcttttgtgggtttttggaaattcagacacattaaaaatacatttcaaaaattatgagtaaaacattcaaagtaatttctgtatgaattcttggcttaacacaaaaatatgaaatttagcaggcatggtgggtcaatagtgacatttccttccttgaagatttagaaaacactcagtgttctaggtcatcactcttgctctattaaatctttaaattccactttcaaagtggaggaaagtaaagctttccactcaaagattagattattccataattattctaggaacctaaatggacagtctcccacatttctgaaaaatgttttaattcatgtcctctggaaaactcatctcttttctgtctctcagacatctcagcagctcatttttcctatttttcccagcagaaactctttttataatgcagatggatgtctacattcttttccttgaaaagttattgtgtagccattattctaggctattctgagttcctagtcatcctctcatttctataagtctccatatggtccattgtagttctccaacactgtggaacttttgagaaagaat

SEQ ID NO: 2199 - DNA, 1774 bp, Homo sapiens
ctagtagctggtattacaggcatgcaccacaaaataaattttgtatttttagtagagatggggtttctccacgttggtcaggctggtctcgaactcccaacctcaggtgatctacccgcctcagcctcccaaagtgctgggattacaggcatgagcccccgtgcccagccaaggtactgcatctttttatccccatagcataataaagtgtctggcaaactacaatatatgtaatttgatagatgaagacatatgaatgtttgaactaattgcttgaatggtatcttctgactttctccattcagagttaaatctctctctgggtttccatacaaagcctgttgtttgtacctcttctccttgtgattttttaggctccttgacctgaggtaccatatattttaatatatgtaatatctgacactatgttgtgagtatgttagacaccaaagaaatgtttattgaattaagcattggcagggacagttgacaaggagacattaagacagtgaaccacttctacaacagcttgttactttgctgaattctgaagcattttggaagcccgctgagaactagggctgtccctaaggattcaggtagaaactagggcaggcccaggaggcctatagataatgaactagctctcaaattaaaagtactgtagaagggaagtataatcatccccatcttttcttcaatggaaaaatgttcattatagttcagaacctatcaagcagactgtcagtacctcaacttaaaatcatgcagcaatagtttcatttatgtgctacaacattgggtggctaattttgggatgtttttacttgaggtatttttactgagcttatattttaaataaaatttaaatgcaattttaaaaattggtgggggaactacctactgtaagttattaaattagggttaaaaaaaatttgtgcttttttgttttgtttttatggttgttctttgcaaatctcataggttttgacagagtgtaattaaataagtttgcctgtcctcttttttgatggaactgttaccactgtagttccgttcttccttcataatttctcaaccacacccacattcagaagggttgtaatagttcaaactttcagttataggactaaccacaaaatgtgactacaacaattgaaaatgagaatattggtacctaaaatgtttgatcgttttcaatgaaattcgttcttaggatgatcaaaaagcagaaaatgatatggcaatgaaacgggcagctttgttggagaaaagattaagaagggaaaaggaaactcagctccggaaacaacagttggaagcagaaatggagcataagaaggaggaaacaaggtaaaggaaattgctggcccagtgctagatctgaactttaatgatgcatgggcatatttagaaaaagttggtaagtactcaaagaggtggtctctcattaatttttattaacagatttctttcagagaagtttgtagtatagatagacagctggatcaatgctattttttggtgctttgtagaaatcaatttattttcccaaagtattgcctaattttatatttttatcttaagtttaaggcatctcatgggaaagttctctagaaacattaatttaaataattatatgtttaaaaaacattaaaataactttcctgggagatacacacacacacacacacacacacacacacgacctaaattatctcaaatacctttatttttatttatttatttgactcttccttccctcctttattta

SEQ ID NO: 2200 - DNA, 1064 bp, Homo sapiens
tatgaaatttttttttgttattgtttttttctttaggatcacagtatcacgtctcatattaacactttccttttggaacgcaagttagttttatcattgtttcctaaaagtaggttccttgctaattttaaataaattgtgtatatatgcatgcaagcatattatgtgtttaaaagtacagagaaaaggaaaagaaactacagaagctcaatttttatatgctggtgttatctaatgaacagactctttgctagttgctccttttaaatttctgattttgtttttattcaggatcatgaatttatcgtgttttttcagtctctagcctttctttggcatcgctgaacacgggtgataacgagagtgtacattcaggcaagaggacgccaaggtaaatctataacgtatgaatatttttacagaaaagaatatagtacctgcaattatacaaactctaagtaaaaattcttcagtgtttttacattttataatgaccaaatcataatcacaaattttactaagttttgctgacttaggactgttagagtttctgttaaaataaattatgtaaagaggtgtctattcatctttcagtgcttgtcttttagaatttagaattattgacattgataacatactttttataagctatgaaacattaacagtaattatacatcagtaattgctaacatgattattaaatcacagtcagtagaatgagagtaccaacttctctagtctattaccaactaagacaaaggagttttccccattagaataattccaaagtgggttgcctatgacttaggaaggatctcttttgtattttctttctctaggattctttctctagattagaagctaaaagtcagtattttattactttatactataatatcatatcagaaaagaacatttctagtgacagtcatcatcttagagttcttatctttgtattaccatcctttgtgttatttgccagttttcacattgaaaaacattcactctttcaacagatatttatagaatgcttactatgttctaggaacttggatgtgtagctg

SEQ ID NO: 2201 - DNA, 1051 bp, Homo sapiens
tcagtgttgtgacaaatgtgtaaactagcgggggaagacagtattgtatcataaatgagatgcgtagtttgttttctttcatgggaagtagagataaaaatatatacatttctctaattgagttgtttagagaaagaactaatgtctcatatgatgtatttacttattttaaaaaaaagaataggaatgagatgtccctgagctgtacttttctattattataaggcctttaggcatcagtgcatctgggttatcaacattttctcaaatgctgtcaatattttactgtaatttatgttcttatatttatgtatatttgttaaaactgtaaaaaaatttcacagatttttttccaatacctgtgcaagatacatgtgtagctcaaaactatttgtgatctactgtttgcatgtaagagaccaggatatgtaactcttatattttaagtgtatacatattgtgtatataacatatggatattaaaaatggggaattgcacattttaccttttggacagtaatttctatcacagttagaaggaaatgatagtcaaatacacgtttagattaaaactagtttaaaaaattataaatgaatctaatcaaaatgtgaatagtagtcaaaaggataatttaataagcattttacgttactaaatttgttcatttcaatattaactaaatttccctcatcaaagcaatctttgtgatattacttcgctattaaataaagaaaattggatgcaagacaatggagaaactttaaaactaaacaggaccaccctttattcttaaatttgtgtgtgtccaacagttgaattgaatgtctataaggtctaaaggtagaatgtgaatattgccacagagttcattgctctcagtataagattttactttattaatgcagaaggaatatggatatatttctttaagtctgcagatttttttattatggtgcagcttttttttaattatgtttttaaaattatacagttgaaaaatatgccatttcataaagtctgaggattttcgtcaaccttactgaaacacac

SEQ ID NO: 2202 - DNA, 1032 bp, Homo sapiens
caccatcatagctcactgcagccttgaactcctgggctcaggcggttctcccaccttagcctcctaagtagctgagactacaggcacacaccaccttgcctggctaatttttttttttttttttgtagagacagctgggttgggaagtctcactatgttgcctaggctggtctcgaactcctgggctcaagtgatcctctggcctttcagccccaaaagtgctggaattacaggcatgagccaccaaacccaacctgaaggtatttttctaaggtcaagtatgccccccgaccttgggtcctagttggtagaaagcatttccgaagtggagacatctggatggcagatgtgaagttggctgggatgggcgaaggtctggaaggcttcagattccaggccccatgactcactcctccatcacagcaacccctcagcagctgggcctcctgagccctgggcaggacagggttagtgggccaggcccaggtgggcagtggtcctttgccttggacactgtatggtctgaaaggatcccggcaggactgatcacttttgaaactgctttctgaaagctccaagcttccttctgagtggagcttaagatataatattaagcaggtcattctaggactgtatgagagcagaatgtggcatctctttctgttttagcttgcagggtacttctaggcggttggtgctctctcctgggcctggtggatggaagggagcaggcagggaggggtggggcaggccctgcctacagagcctgtcagtagggaaccagtgagtcaccagaagtccaatacctcagtccagatcctggatgctgttggatcacgggatctgtctgagcatcagtttccttttctgaaaagtagggatgataacagcctaggacggtgggtgaatcagtgaggtaatgcacaggaacacgcatagtaaatagtttttgccagagtgggtggttatgagtatttagagtggcctgagcctcccaattgaaatatcctggccttttgtcaagtcctaaga

SEQ ID NO: 2203 - DNA, 1078 bp, Homo sapiens
agggagtggagagaccagcgagcaggtttttgttacggttcgagtgagggttgaacacaggcagtggtggtggagatgggttgcagggataatcttgagagagatttaggagacaagattcacaggttggaatggatgtgggagaaaggaggagcttaacgccttggcttagtagccccatctgagaaaatgagcatcagattttgagagggaaagaaagaaacggagtttagctgtgttgactgtgcggagtctgtgagcatcccagtaaggatgtcaggtggacaagtgtctcagtggagaagttaaggccagagagaggcagatttgagagtcattacatagaatcagtagttaaaaacagagctccggccgggcgcggtggctcatgcctataatcccagcactttgggaggctgaggtgagcggatcacctgaggtcaggagttccagaccagcctggtcaacatggcgaaaccctgtctgtactaaaaatacaaaaattagccgggtgtcgtggtgggcgcctgttatcccagctactctggaggctgaggcacaagaatcacttgaactccggaggcagaggttgcagtgagctgagattgcaccactacactcgagcctggacgatatagccaggctctgtatcaaaaaagaaaaaaataataaagctccctgataaggttctaagaatttttttaaaaatgaccagaaacaccatcctggctaacacggtgaaaccccgtctctactaaaaatacaaaaaattagctggggatggtggcgggcgcctgtagtcccagctactcgagaggctgaggcaggagaatggcgtgaacctgggaggcggagcttgcagtgagctgagatcgcgccactgcactccagactgggtgacagagtgagactccgtctcaaacaaacaaacagaccaggaacagagctgccatgtttcacaagtggtcagcaaaagaggagccatgcaggacaccacaaatgagactgagaagggcaaggaaaggccagtcatgagtttgtatcagtcattcttaccagaaaccacttttcatatttg

SEQ ID NO: 2204 - DNA, 1054 bp, Homo sapiens
taagcaccataggcatctccagggagagtttgagggggaaaaaacaacactttatttggaaacaattctgctgagatacaatcttgtctcagcttcactttctctgctatttattatgaagtgctatgtgctcaaaaataggggctgagttttaaagtcacaggccaagctctgggctctgaaccgaggagacagcttgggcccggttatctgccctagagaggaagggtcttaagcaaagcggctcatctgtgactcgggatacctcattcttccaactcctgggacgtaggccccagtcatccctgaaagcctttgtacagtgaatgacctctgtaccagaggggtccccaaggctggagcagagaaaagccccaaaggagagactctccaggtctctccaggttgctgagtgagcctcctcccttgacttgctttctctgtttctctgtgactttctcttccttttactcctgccccatgccctgtgtggtgctatcctgctctgaaccaaaagtggacaataaccccaacgacttctccttttcccctgaagcatggtggagacaggctggagttttcaaaaagtttgtgtctcttcaaacatggatcctggaacagaaaaagaacattagtggaagaactggtggactccaaatacagtctatactttagttaatagtaatgtgccagtgttgatttcttagttttagcaaatgtaccgtggttatgtaaattctaaaattaggggaaactgggtgaagcgtagatgggaactctgtactatctttgcaacttttctgtaaatctaaaattacttcaaaataaaaactcaaaaaaataggtgagggagtgacaaaaaaaaaatggaccaagatgagtcagaaatttcaagcctggggaggcttacaacactaaggtacctgatccctcagtcctagtaaaagagcaaaggactctcctgagccgaaaagccctcaagatcaagtttgtcctgggatcacaatcctctagcacttgagagattccctacctgaagtctggctctggaagt

SEQ ID NO: 2205 - DNA, 1028 bp, Homo sapiens
tagaggatggctatgattcacaccaggggtacatgaggctgcacactgcagggaaccaggtcaatcctttactttcccagacaaagggaaacttgcctcaacaaagtaataaatttccttttcacaaacctgagattgtccagagggcttgtctcccagctttgtcttggtgccctgctccagcgggccaagctggggcttagaacacagcctgaccctgagatcaccggacaggatggtatactgcttctgtcttctctgtgccctgctgggcaggtggccagatatcccttcttggcctgggagctgggaccttttgagccctttctaggcctggtctatagcagtgatcttggagccactgcaaccctaaaaacagagcagcaacactcattcttccatgacaagccttgtggaggagggttatgggttaaggactcagcatttgcaaagcaagccatctccttccacaataaatatacatgcaagagaaccagggcatggcaggggacaaaaggaaaccaaatttctctggcaccgaaaagccatcagaattagaatgtggtaaccaggaaactatgtggagctctatttttacatttgcagttttgttagtgtaatggcttcctcatgtggatgccacattgttagagcctaatgatctccatgcacctaacccagcgctcgttcacgattattatccgatgagttgatgagaggtcttttacttttaacgtctgttgcagactagcattaggaatcccccaggcttgtcagctggaagaccaccctcactggttagatgtgaaactgtctgctagatcacggttgggtacctctggggggacagagtgccggggaacatttggaggagggttttaccagaaaagtgagaaacactggctttctccaaggctcctagggaagaggagcagggttcactgcactgcctctgctctggtgctagctagttgtcatggtgacccatctctgccgaggatacgccgagctctttgatgggttggatg

SEQ ID NO: 2206 - DNA, 1051 bp, Homo sapiens
cagaatgggatttggaatgaatatgccaggtctctgcccttcaggaggagaaagacatgaaatctaaacaacagctcagctgttatttcattttataggtgagagaactgaggcccagacattgaataccttgcccaaggtcacagggcattgaataccttgcccaaggtcacagtggtaaagctgggatttgacaaagactctctagctccgtgtcctgtggcctctcgtcgtctgatgcccagagccagtccttcctctcttgtggctcagcctttgcataggctgtatccttcctgaacctgagacttgccctgttgcctgtggtcagattcattctttcccttcctttggtttcagatcagtggtcacctcttccaggacctcccctgtgactcctctaacccacccaccttatcacttttctagtcagtccccaacagaagctctggcccccatgcacggatgatgcctgaccacagctgcacatgccaacctcttggctgcaagctccctgagggcagcccctattgtatgggtggactcagaaccctcaagacagtggctaagtggaagccagtggctgctggtcagggcacagcccggcatgatctggtggataatcagtgcttcagaggcggtgatgttcactcatttgatgtgtctcccatttgaaatgcagccacttccaagggaatcacgtgggattcacatcctacatagaagactgcaaaggcctggtttggagaactcaggaaaggtctgtagccaggagacctgaccccttgagttctggtgcaggcaggagtgtgataggcagaactactcccatcacaacagtggcatcttcagataaggtgccttttgtcacttggccactggtaggttctgcgaaaggaagtgatgtcagggatttagggacaggcctgggggtggagggctgcacaggagtgggagtgggcaggtgggtgaagtcaaatgacaaaagcctgcccttacctttgctactggttctcttctgccgctaactcaaatatatatcatctggcaa

SEQ ID NO: 2207 - DNA, 1030 bp, Homo sapiens
atgaaccttttatcacatgtatgatttggagatattttctttcattctgtgtattgggtttccttttcattctgtagatgtatcctttgatgcacaaaagctttttatttagatgaaatccattttatctgtttttttcttttgttggctatgctttgagtgtcatatctaagaaatcactgcaaaatctaacgccatgcagcttttcccctacgttttcttctgagagttttatagctgatggggttttttggaaatacaaattctaagcctcagacttaccaatgcagaatctctgctacccagaaagccacatttttctaaagcttctcagtaattttagactagtccatgttcctatctagtacaataatcttatctacagtatccctgacagacagtctttcatccttggcttgcataggcacagtgatgggaagcttattccatatcatacagaattaagttataagaaagtttctaaatattcaactgaaatctgtttcgctgtaacttctacctattgattcaaattctgtcatctgggaaaaatagaataagggtgtaactcttcatccaaatatttcaacatgttcttaatatagctcaaatattctctagaccaaaaagaaaaagaaaaagtccctagcttatttcagtacttttttcaatgacccagtttttcgaacctttcattgtcctggtcaccctcctctggaagctctcaggacgtcaatgaccctcttaaaatttggcacctagactgatcacccgcttgacactagaagtagtctcgccagggtaatatccaaatcatgacactgcagacaactttgagttggctgctgactgtcctagatgacagctcgggccatttttaccacttggaaatacaaaaggaatttgtttttctaaaaataggaaagtctggaatttaatctaaataagaagataagtttcacagccatctgtccttccatccctggcatccattggagtgggaggggaatagaggatgggtacccataca

SEQ ID NO: 2208 - DNA, 1084 bp, Homo sapiens
gaagtttttgcaacactttttttttaagttattgggtgcaaaatcccaaaccaggatatgtgtatgtctgtgtgtttatgttttttatttgaccctcccctctttcaacctacccccttttatatctaatgtagaaaaagcgaaattgaatctggaaagcaaactgttgtatatagttgcggtaacaatcatgaagagagagccgggctgtcccctcagtaattcattttaaataacaaattatttaaaaataaaattcatgccagagccagctgaagaggccttccttcatcaccactgaggccacccccaatctgggccctctgtccatctggcatgtctcctcccagcaagattcatctgttcaatgccatttgcgtttcaataaagttatctcctgtactgtccactggttctctagctccctctctgcctggtttctgtctccatttatcttgtggcccattccttgattggcaaggccagactgcttgtggtcatttgcctaacccagaagtaacctgaaaccctaagctagagtctcctgactcccatggttgggggtgggaggaacccctgctcgcacattatggacatagaatccttcaccggatctcaaaacatccagcccaaacatcaaggctccggagtcctccatctgggttgctgcagtgtttgaaaacataccaccctcttgactttgctaaattttcttcttggggtaaaagtgaactgacctattagaagctgttgtaatcaagttcaacttcttttggccacttcaagaaagtaaataggcttactattccccattgcaaaattgaagggtccaagaagcaatcttttccctatgaaattgtagtaacataactcatctctgccctcttaacatgggaggtgacaagtgtgttgagaactctcttcaagccagttgcagtgggtgtacctgtagttctagctactctggatgctgaggtgggaggatcacctgtccagcctgggcaacatagcaagacccccccaactcaaaaataaataattgagaaagctttcttttgaagtaatcttctgatgagatgactta

SEQ ID NO: 2209 - DNA, 1022 bp, Homo sapiens
tctccttaaagccctctacatctattcccatcccgcctcctctctcctaacacctgaaagatgcatgaatataaagtcatatatcatgaactttattccaaatgagattgctaacttactgtgcaactttaggaaagccccttaacctgtctggggctcagttttcacacaaatccagagatccttgcagagaaaggtgcagttctcgttcaggcagcaggaggcgctgtctctggaggcttagattcattccccgccctccgcccgctcccgcccgcctctggtgcgcaggcgcggcttcgcggattggccgcgcgcgggggccgtcattcggtggcgggtcccggccgcggggctggcgggctgaggggagaaaagatggcggcggcggcggcagctggtgcggcctccgggctgccgggtccagtggcacaaggattaaaggaagcgttagtggatacgctcaccgggatcctatccccagtacaggaggtgcgggcggctgctgaagaacagattaaggtgctggaggtgacggagggtgagtgaggcgggaccgtcacgaggatggctcagccgcacaatccgctgaccgcagctccgtaccggctggggacatggggagcctgagccagttggagatgtgggcgccgagaagtggagcaggaagcgagagattgatgtcgctggtggttgtgaaagtccgagagaggagaggcgcgcctgaaggatagggtcgggggaggtggagcctgggagtgggggagggagggtggagacttgaaaagatagatggagcctagaatctgcaggggacggagatggagctagacttggtgctgttggaggaagtagcgcggtcggggaaatattttttgagtccaggaccaaagtctttcgctgttctcttcaccagctggattgtactgggataagagtagggggagctattagtaggagtggtgaagggtagggcctcgaaaaggcggctatcaaagcttaatagatgtcatcaaacaagt

SEQ ID NO: 2210 - DNA, 1050 bp, Homo sapiens
aagcaaaggaacctcatcacattcaagttgtcacctgaataaaacttgagagtctggtgcaaattcatcttaactaaaccttccctgagtggtacccagtgctcctggtgctccaaatgcatgtctggcacctttgtatgaaaggtggaccttgacttgtatttaaactgtcttacaacaactccacttttgctctgatcttttcaactttagccaaatgccatggtctcatctgggcaaagtcaattataaagttctcgaggtcttttttgaaactctgattcctcactttattcatcttttttttcttgagactgggtctcgctctatcgtgtagactttggagcagtgatgccatcatggctcactgcagcctcaaacttttggactcaagcgatcctcccacctaggcctcccaaagtgctgggattacaggcctcagccaccacacctggcatctttttgagcctttaagtgaaaaattaaatttcagaagtacagaattttgatctaagtcactgatgagaaatagatcgactgccccccgacccccataacttactggtaatgtgctgttgggcagactatgagaatgaaaagtatggaaaggcatcgatgcagtgacctgatattggtgatctagtaatagagcatatgactcaggttttggatttggttagagggttggatcagtctctggagtttagtgcaatgcttcggaccctttggaggctgcttgtgtcttttaagtagtctggctccttaatgtctatcaaaaaaactatagagatttacccccttctgtacctgttttaaggtggagaatggcggtccattccctcagatgcggtctgctttcttcctcttgtggcctttaacaagttatctttgacattgggttcagagtacctcccaccttaaactctgtctgaatctctcagatgttttctgaacatggtgcaatatagtagctgcttctttaccagcctcaacccttctttacatgaaaacatagaacccagctttccagccgggatttagccaactatc

SEQ ID NO: 2211 - DNA, 1044 bp, Homo sapiens
attatttaaatcatgccttaaaagaaaatactaggccaggcacgggggctcatgcctgtaatcccagcactttgggaggctgaggcgggcggatcacttgaggttgggagtttgagaccagcctgaccaacatggagaaaccacatttctactcaaactacaaaattagctgggcgtggtggcacatgcctgtaatcccagccactcgggaggctgaggcaggaggatcgcttgaacccgggaggtggaggttgcggtgagctgagattgcgccattgcactccagtctgggcaacaagagtgcaactctgtctcaaaagaaaaaaaaaggaaatgctgttatgtcccagataatttgtgaatgtgcttgtagattattgtgaaggaagttacataaggcacaccagaattggttcaccatgtccagggaggccaatcctgggtggacagtgacattctaagcagacttgaagccatgaagtctaagtatcatccattatcacactaagtatctgaactcaaaggaattgtggatgcccttactagttgtctttctcctttaaatggatttcacatgtgcattttagagtgcttttttccattgaactggaacattgctatccaagagatgttcctgaattatctgactcatctgtgttttagaatcagttctgatagttgactcccatatcttcgggttgtagatacctgttgtttcttctcttgctacaaatgggttttatagatttaaccagagtctgtactaaccaaattaatcctaagaattagaatggattgcagtatctgtagggggattgtgcaagtttcaagtgtttgcttgtgatttaatcatttaataactctttcagaaagaatgtggcttcttctgtggcggtcatgccaaaaaaaaaaatccactttcctgagtgaaacaataggtgccataggagtggatcaaaaactgcagcttaaaggcataataagaatgaattaagaatctaagaattcagtaaaacaggacataaaatataaaaatcaatagct

SEQ ID NO: 2212 - DNA, 1058 bp, Homo sapiens
atgtagtgggtggggaatagttgtaaagaagtgggtaatgaaaacaaggtaatagggttgaggaagaagtggcacttcttggaatattcctttttgtatagctttgactctgagaatcatggtaatgtttcacataccaaaaataaataaataattaaaattaaaatcaaacaatagggaggcactaaaaatggagcagaagtagtaacaaatgaacctaaatgttttacaaatgaataacataactttttaggtgagaggaagaactaacctaagtaactttgtaaaatagtatttacaaatagtaaaatagtatttgactgcatcatgtaggttacagttaaaaaaactatacaccaaaattgtagttcaattaataggtgtgtttttcacaaaggtatggattaatacttctgtaattgctttatattttaagattgaaaaaataagtatagatgatgagagccaagtgtatcactgttagagaaagaagttacaaataagggaagagtagaatgaacctcgaggtttggattggcatctgggctatcagtcagtatgataaatggatggatggctatatggttaggtatactgtacttcctagctctgttctctgagaacgcctaggaatagtgatactcctgtagcaatgaacatacctagtgctcacatcttggtttctaaatataattctccactaaaagacagcagggttccttggaggagaagttgatatcttggcttggacagagaaaatacaagataagtatagaatatcttgtgtattcaaaaaataaggaagtgcttgataaagaatggggatgtatagaagtacacaggagttaattggaaggagttccagtggccaaagctggaacaatttgagcaacaaaaaaaataagatagtattggattaaaactcacagaataaaataaatacttatgagttcatataggtataaataaatattaggaaaaacaaaccatttttcctctgctctcacactacaacagtcaacacagaagacttctgtgatctcaaaaatatgtggaga

SEQ ID NO: 2213 - DNA, 1034 bp, Homo sapiens
cctgcctctgcctcccgagtagctgggattacagccatgcatcaccaagcctggctaattttgtatttttagtagagatggggtttcaccatgttggccaaggtgatctcaaactcctgacctcaagtgatccacccacctcgacctcccaaagtgctgggattacaggcgtgagccaccacgccaggctccatgtttcaattaccacattaattggtctaagaggaaggtgttgtcatcttggaagagaagatggctggaaggtgctatgcagtgactggaaaaagtgtaagggtgttgaaacttcattgtaacaaggcatgtcctgcaagccaacttgtttcttttacttggaggaatcagtcttagcagttatcagctctttttgaaacaacagattaagtttctttctggaatcttgttggcatcagggttagagcttagtaaatttctatggctttcctaggtactcttagactcaataaaattttctctttcagaatttggtgttcacttggcagaactgactgtagatccccagggggcactggcaatccgtcaggtaagtccagactggcccaatttataaatagtttccctttccttggtaatgaaactttcttataggaaagaaaaataaggccagtgtataaataacctaggatgttgtgccagatttagatatacttcagatgtatcaggctatgtatatagtttttatgtgtgaaaaaaatctttttcttgctgtactacttggcttattctcttcacagctggcatcagtcatcttgaaacaatatgtggagactcactggtgtgcccaatcagagaaatttaggcctcctgaaactacagaaagggtaagtcagttacttgattagtctacctgaggagatttgagggtccattttaagagattagactataacattctttgacagcatggagcaatcaaaagactaggcagaaaaggagattggtggctggcattgcgggcatagggctatacattaaagagctcaagtatcaggctg

SEQ ID NO: 2214 - DNA, 1035 bp, Homo sapiens
agattctgcctattgtttggaacaccctaaccgagagtgcagctttatatcctttcttgaaagtttaagggagctactaccacctatagttaggaatctcgcactgggtttcacattcatatggttccactcttcttacacaggcttttttaaggtgtctacttttagtgttggaatatgtaacatttccatgtagattatatgtaaagcagactccaaattctatttctttactcttcatcatacttatgtgaggacagaagtaaattacacagaagaagtagaagatcctgtggattctgatggtatgtagtttatttgatctttatagaaataccagttagtgggaaaagaaaaagaagccagagatgggggcgggaaacagtaacttgagaggcttcactctattaagtgttttctaattcagtttattttcgatgtattcgatgtggggaaatgagaattgacaatctttaatctgttccacataggtagttgcataaatctcataaaatcatagaatttctgcattggaagagatacttttaaggccatttaatctagcctacttctggcattttgttgtgtttcatttgggggtcccagatcatgaatctttcgtttctgttttaacatttctcattatttcagattagaacaatagacatactggaaaatatatccagtgtttctgattcttttacttgaaaaaccaaagaatatttaatatcctcaaaattacgttttgtgacctctgagccctctctcccaattcctcaggaatgatcattagcaagtactttaaatattcagtaatttacaaaggttatgtagttcattttctgcatatatgctttccttttgctttcttgtcattaatttcttctcttctgtatttcctgcaggtgaagtcctgggctttgaaaatctcgtctttagcatttttgaatttgtccatgctctactagaaaatagcaaattcaaaagcactgttaagaaagccttgcctgaattgatttattatattatcctgta

SEQ ID NO: 2215 - DNA, 1016 bp, Homo sapiens
atttacaagaagctgagcaaaccaaaaacagtggcactgagcactggtaagagtgagccgctaattggttaagatgcttttgtttaccccttcttaaaaagtcttgaaaggatggatttatttttatcttaatttgaaaatctggttttaatttaataacagattttaatctcttattattaaaatttcactcttttcagctataggttagaatggaagggcttaaggtaaatgactcttttggaagagattgtgctggagtgcccttttctgaatcttgtttcctcaaatatttatctcttttggcagtttagtatgttttactaggctgtagtatcctttcacaggtggaagatccatgaggcatgcatgcttgccctaggctcagtgaaggccatcatcactgacagtgtgaaaaatggcaggattcattttgacatgcatgggttcctgaccaatgtcatccttgcagacctcaacctctcaggtatgtttcagcacgtgccaggattctagaaactctttaaacctgttgtggggttgggggagggatcagcattaggagatatacctgatgtaagtgacaagttaatgggtgcagcacaccaacatggcacatgtatacatatgtaacctgcacattgtgtacatgtaccctagaactcaaagtataatatatatatatatatatatatatataaaggaaactctttaaacctgtcattaacttggttatattgttcacttagactggtaggccagatattcttgtgtcctttgagtgaaaattgtttgcaccctacagcttgaactcatccgaacctctaaaacagcccagaggccgattcaagcttcacctaatgacaatctaatattgcctagttcataattcttccgtgatgtttatgtttcttcccaaattggcgttcccattcatggttgtttttggcatttgaatggaatccaaatctggttgctgtaccttgagaattatcgagtactgctcccattgttaa

SEQ ID NO: 2216 - DNA, 1035 bp, Homo sapiens
ggctaaggcaggtgactcacctgaggtcaggagttcaagaccagcctggccaacttggcgaaaccccatctctactaaaaatataaaaattagctgggtgtggtagcaggagcctgtagtcccagctactcaagaggctgaggcaggagaatcacttgaaccaggaggcagaggttgcagagaactgagatcacaccactgtattccaccttgggtgacagagcgagacttggtttaaaaaaaaaaaaaaggtagccctttactattagaccgatttcttccgcaatacagagcagtagctgagaatcattgttgtctatgtggcattttctgctacttgcttctgccatgccatgccttttctcatccttggagccagatcaccatccgaaaacactgcctttgctttctctctcagtacttaaatcatggaacctttggtattgtttgctccattttcggtccatttacttcctctccataggatagttctgggagtagcttatgtcatttgaaaatgttctgctctgtgattttaaataggtaatctattatcgggtgtctcagtccatcacttccattctctgaatcacaaattaaaatggttgtacatccagagctcagatgcgttgggaatatcctgtttcactctgtacttatcatatgctgcattgttgaatatgttttcttactcctactagtaaggtctctgagagtagaaatcatgtctaatctttgtatcctacaagtgccttgagtaggcatcccatagttacacattgaatgatttctgaagcccatcaacacatttcttatagagtttaccctagcaaagatttttcaaaaactttggaaattttagaatatttgttatttagtctggaaaaaggctcaatatatatcatttgttaatcctacctgtagctaaaaccttttctacaccaaccattctgaaactttttggttacaaattatcaataatttaaaagacatttttatgtggctttaatttattaatatttaacatactaaaga

SEQ ID NO: 2217 - DNA, 1023 bp, Homo sapiens
tacttcaagtacccttacaaccattctgttttcacttacagtatagtattcaataaattatatgagatattcaacactttattataaaataggctttgtgttacgtgagtttgcccaactttacgctaatgtaagtgttctgagcatgtttaaggtaggcccggctaagctgtgatgttcagtattaaatttaaatgcatttttaacttacagtattttcaacttacgatgtgtttatcaggaagtaaccccatcataagcagaggagcatctgtattgcgtaatttgactggcacagtttattaggttctgttcagtgttttccgtcaacaagatgtttattgtgtgagtaaacaagttaagccctgtgacaagctgaataagaatagtctctcctcagcagcttatagtaaacaagggtagtaatccttacattagtggctagactatcaaacgaaatatataacatgtaagaacactaaagacagaattactgtggcatagagatagttagaattgcttcagcctaagagatgaattaggtaatgcaaggaggtgaatatgttggcttgcaatatgaacaaggcagagagctgggagagtaagatgtaagttgctaaggagggatgtgtacttgagtttggaaaccataaagggaaatcataggtaatgctagagtcactgatcttagggagccttgaataacgtgatgactaaggtaatctttatttggtggactatggaattaattgacagattttaaatagaagaatgacatgatcagagctataatttatgttttaagagtggtccaaggctgcacgcggtggctcatgcctgtaatctcagcactttgggaggccaagccgagtggattgcttgagttcaggagttcaagaccagcctggccaacatggtgaaaccccctctctactaaaaatacaaaaattagccaggcgtggtggtacgcacctgtaatcccagctgctcgggaggctgaggcaggagaatcgctcgaacccg

SEQ ID NO: 2218 - DNA, 1050 bp, Homo sapiens
gttgtttccctgtggattacctaaactagatccaagaacatgaaagaccatccctcagggagctggcatttgtctaaaaaccagcattccctgtgccatttgattgtggttcttgctccactgcaaatgggtgacttgcaatgtctcactaatgccactcttgctctttcctccaggcatatctcacagatttcctctgccagtttgctcagcagccctgctacataatgttttcaggccaccttaatgacaatgagaggcgagttctacagaccatcggcatctaaaaaggggagcctttctacatttgctccttctgggccagccgcaaaccattttgcagccctcactggccttgagatgcactttcttctcaacctaaagtggcatcttgacccttggcccttggcctcggcagtgacactgatgacaattcagaccaggctcaccggtgccgtcacttaggaatgctggaacaaaggacatttctcaaagttcccctgaagacatgccatctctagaaccttttttctccccgactctacccccacctctgttcctagagccctctgctggcgagtccagaaacattattgcccagaaggattatgtgtttatggattattttgccccgcctcaggagcgcaggaagtcactaccatttatattctaaaacagacctatctatgttcataggacttctgatgtgttcagataggaatcctcatgagagatcattatgctttgtgccctggaccactgctgctctgggttctcaggaggaacaggcaagagcagcttcattctaagcctttccagtgacctcagccttgcttctcttctacaacactaaggctcctctgtcagaggaggtcgtcttgtttttgcttcattgcatgacataacccttcccctcaagctgttcctatatatacatgcacacacaaaataagccagacagatggcaatttgatcttccttttttagaaaaaaaaaaaaaaatggggaaaagggattttttttaaatccacctgacccaactatatttaa

SEQ ID NO: 2219 - DNA, 1074 bp, Homo sapiens
gcctgtaatcccagttaacttgagatgctgaggcaggagaatcgcttgaacttgggaagcagaggttgcagtgaaccgatatcacaccgttgcattccaaggcaagactcaatcacacacacacacacacacacacacaaatcatggggagaaagatgaaacctgtgttcccctttttttggtagtgcccacatctggtgccccatttttaataaccacaggatatttctttagattgatattctcacaaagaagaaatagaatataggctgggcgtggtgtgtcacacctgtaatcccagcacttacggaggccgaagccagcggatcaccagaggtcaggagttcgagaccagcctgaccaacatgatgaaaccctgtctctactaaaaatacaaaaattagccaggcatggtggcatgcacttgtaatcccagctactcgggaggctgagacaggagaatcgcttgaacctgggaggcagaggttgcagtaagccaagatcgcaccattgcactacagcctgggcaacaagaggagcgaaactctgtctcaaaaaaaaaaaagagaaagaatataaagtgaatctgaatctccactcaaggggatggccccaaggatattgtagctggtaatttcttcatgccactaggtgtccccagtgttcaacctccatgactgagattggaagaagtagagttaaaagtttttactacctttgagaagcctgcgggcatgttcacagtcgtcccatgccagccaggttctgaggctaactgcttgtgcccctgctgcttcacatggcattgtgggagttgctgatactggggaaatgatggcagatctgaccaagtggtgctgagaaaaccaccctcggccttgcagactccatagtttatctcaaggcagtgccagtcggatttggtgctaaaggcataaggccaagtcagcctctgatattggcacaaaagaatggtctcatgccagtagcattgaactgctgagcttgggaaggcttaaggctcccacacacagactgagaatgatgggggtccctctgcgtctgctaattaga

SEQ ID NO: 2220 - DNA, 1097 bp, Homo sapiens
ttaactgaactatttttttctgttcctttgaagatggagctatttttatttttagattacaacaattagtgattttagtttggtctaacggtttgtcacaaacatatatccctatagtttcttcttgatttgtagtttgtttgaaaaattaacctgaattatgatacccatttgaaaatcttgtctctgtccttcagacactcggtgattttttttttttttccttctccagaagaaagacagttatttaaagctcaggtgtgaggccgggcacggggctcacgcctgtaatcccagcactttgggaggccgaggtgggcagatcacctgaggtcaggagtttgagaccagcctgaccaacatggagaaaccccatctctactaaaaatacaaaattagctgggcgtggtggcgcatgcctgtaatcccagctactcaggagactgaggcaggagaatcacttgaacccgggaggcggaggttgcagtgagccaagatcatgccattgcactccatcctgggcaacaagagcgaaactccgtctcaaaaaaaaaaacctcaggttcgtgagtcaggaccgatagcttctgaggtaacataaagctgaagagaatgtgatctgaaggattggggtttcatgcaggagaaacccatcaagccgattgggctcttctccaaggttggttttgggacattgtgcagaggtcattggaaaatttgaaaagattctattcattgtactttgtaaacttggttattcagaagctgggaaaagggaggtgacaaaaaatgtttgtaggttatattcacttacaaaggtatagtcagggttgggcgcaatggctcacgccaataatcccagcagtttgggaggctgagttaggcagatagcttgagctcaggagttcgagaccagcctgggcagcatggctgcccatttccccagaaaaatggaaaaattagccaggtgttggggcatgtgcctgtggtcccagctactagggaggctgacatggacggatcacttgaacccatgaggttgaggctgcagtgagattgcaccactgcactccagcctgggtgacagagaccctgtc

SEQ ID NO: 2221 - DNA, 1087 bp, Homo sapiens
tctgtcgcccaggctggagcacagtggtgcaaacttggctcactgcaagctctgcctcctgggttcacaccattctcctgcctcggcctccagagtagctgggactacaggtgcccgccatcacacctggctaattttttttgtattttttagtagagacgggggtttcaccgtgttggccaggatgccctcgatcttctgacctcatgatccacccgcctcggcctcccaaaatgctgggattgtaggcgtgagctaccgcacctggctgtttttgtatttagatagagtttaagtgcaaagtaatctgctgatttaaggttgttttaaattcatatctgaggaataaaggatggacaggcaatttccatccctttgatgttccatagttctagctatttatatcattcatttgccccttcagcatggattggcttacacctgtaatacgttccagaatagctggatttcttttgttttcccatcggtgattttcatagagtagatgctcaatgacatataatgcagaaaggccaaaaatagaggtaagtaaagctatgaaagaaaagaagaacgaaagaggaagcagagtagtttgattttgtttattgctgcttaaaccagagagatatgttattctggaagggtgatttgcttgtttttacacatatgcagcctgactgttttaggcttggcttcttttttgtttgtttgagatggagtgtcgctcttgttgcccaggctggagtgcagtggcacgatctcggctcactgcaacctccgcctcctgggttcaagcgattctcctgcctcagcctccccagtagctgggattacaggtgctcgccaccacacccggctaatttttacatttttagtagaggcggagtttcgccatgttagccaggctggtcttgaactcctggcctcaggtgatccacccacttcagcctcccaaagtgctgggattacaggtgtgagctatggcacccggctggcttatttcttataggctttgggccgttgctaattttccagctgatataatacaatccagctttattcgaaagataagtattctaactct

SEQ ID NO: 2222 - DNA, 1030 bp, Homo sapiens
ctaaatgaaaatatcccttgacaatggaaggatgcaaaaagatattgtgaggtggccgggcacggtggctcacacctgtaatcccagcattttgggagactgaggcaggtggatcacttgaggtcaggagttttgagagcagcctggccaacgtggtgaaaccccgtctctactaaaaatacaaattagcagggcatggtggcacacgcctgtaatcgcagctccttgggaggctgaggtacaagaatcacttgaacctgggaggcagagattgcagtgagctgagatcacaccattgcactccagcctgggcaacagagcaagactccatctcaaaaaatatatatatatataacatatatatgttatatatatgctatatatgttatatattatatatgttatataatatgtatgttatatgttgtatatatgttatgtattatatatgttatatattatatatgttgtatattatatatgttgtgtgtgtgtgtgtgtgtgtgtgtatatatatatagtgaggatagtagtagtgaaaatttgacctggcatttgggaaggaaaaaaatacgtagaatagtgagacatgttgaaaattatttttggagcttggaaaagattcagcataaagttaggaatagatcatacatcccaatttgctttgatttccctgaggcacctagcaagagattcagtatctttttggcacaattttcaagtgcactgctcgttaaatggcagtgagtaatctagatgaccctgcagaccctctcaccttctgtttgtttttcattccttacttctgagttaacactctgtagtgatggtcactttccaattttgttttgactgcttcagtgtgaaagactttacataaaacatcaaaacagttccatattcacagaaattcagaaatggatatagttaacttaaatagttacattgtctcatagaaattagccttgagtactttgttttaggcttttttcctcagagggaatctcctttttatttatttattttattt

SEQ ID NO: 2223 - DNA, 1046 bp, Homo sapiens
accaaccttcagggtttcttgacctctactcagggagccttctccactctgtcagccacccatattcacacccatgctctggagtctagagcctagacatcgtcattgtcatgaactgtaccatatctgaacttttaaggcccttgagccccttgtcctcattcatcctgactctgctaaccttccagctctctgacggcctctctcccactatattccaccatgtctcctccttgagctcatggcagcctcccttccggcaagccactcatttctcctgggcagtcaagaccctcctgactgggcttccctccctggcccaagtgtgtggttggttacctcttaccaacaccccaaagccccttgcccacttcccgctgctataatgtcccagtcccttgttatacaattccttttctctacttctataagtgggtatttgggagatgtagaaaatagtgaaactacacagtaataaccactacacctttctcaattcttcgtgaaaagttggaattaaaggaaagttgaaatagacatgtgtggggttttccagaaaaatgtaacagatgtacagtcttcaactgcaggtgtgctttcaaggttgttcaacagtcctcttatttacctttccatctcactccctttaagctgttctaagactttactcttctctttaagtttgctatccaatcccatcccctcatttaagcagaaggtcttgtctcctgttttattgagaatattaaattcatcagatatgattatgtcagtttcctgtcctccacttaaaaagttatcttcatctgcttttatccttccggactgcaacaaaggtccttccttctgtttaaagccaaatctcttcccttacatgtcctctgggactttgcctcatcatttacatctctctcttcaaatctgcagcctccccctctagacaagcaccagtttctctaagatctatagcaaagcaaaaaacaaactcaaggctgggtgtggtggctcacgcttgtaatcccagcactttgggaggccaaggtggg

SEQ ID NO: 2224 - DNA, 1039 bp, Homo sapiens
ccagctacttgggaggctgaggcaggagaatggtgtgaacccgggaggtggagcttgcagtgagccgagatcgcgccactgcactccagcctgggcaacagagcaagactccgtctcaacaaacaaacaaacaactcaaaaaacccttaactccatattctcttctggcacgacacactgtccttccctctgtagccaggtgacttcagtggcatgtatacgcactggctgcacttcttgaaacccccccaccccacaatcatttattgctacaacccattggaatccagccccccacccttgccatgccgttgaaactagtaagagaggccattcgcctcaatacggataacatatgtgatgctttttagcccttgccttcatgttctgctgtttttcttctgcccccattgaccctcctctggcttctgtgacaccacccatgctggtcatcaggcctcctggttagtccttttctcatctccttccctgactcctctgcccagctccttgtgtgtcgatgttgcccaaggctctgtctttgacctgttcttttcttctacatgctttccttggagagctcacccattcttgtagtttaacatattttctgtgttctgcagccaggatgatatcttaaaactaaatctgataatgtcacttgttggcttaaaatgctcccatggctctgaaggtccggttctgtaacagtgcacctgaggctcttcatgacccgaccctcttgggcatctcatgtcccacctcctgccactgcctccctcattgcaatctgatcctgtcctcaagtaatcccagactctcggtgcttcctcacatgcatatgcagtgttccatggctacgtctttgcttttgatatttgggaagtacctgatactggtttccctgtatcttttcttcctgttagaatagttcctatgcttcagcaaacgcagaggaagttttccctcatccgggcctggacccatcccactttgccatcagtctcttttttttttttttttgaaacagagtcttact

SEQ ID NO: 2225 - DNA, 1135 bp, Homo sapiens
ggtcaggctggtctggtactcttgacctcaggtgaaccacccacttcggcctaccgaagtactgggattacagacatgagccaccaggcccagccagtctcattcatatgtctgtgtggaaaagcagttctaagcgcagccaggggctcttggtcaagcagagcctttggctgcaggatccctgagtccattgcatctttccattagactggatcttcttgttttgtttttgtttttgtttttgtttcctccaagccacctttgtttccctatctttttattaagaaaatttcaaatatttagaaaattgaaaggatgatgcattgaacacctatagaaccatctactttgtcatattagttttatgagtggatttgtttttatttttgctagaccatttaaaagcaagtaaatctgtgtgcctctctgaagaatagaggcattctcccttataaccacaatcccattattgtacctaaggcagttaacaaatttctattaacattagtaggtttgggtcggacacagtggctcatgcctataatcccagcactttgagaggctgaggcaggtgaatcacttgagcccaggagttcaagaccagccagggcaacatagcgaaaccctacctctacaaaaataaaaaaattagccaggcatgatgatgtgcaactgtagtcctagctactggggttggggagctgagatggaaggatcacttgagccccaggaggtggaggttggatcacaccactgtactctagcctgggcaacagagcaagaacctgtcttaaaaaaaaaataaaaaaggtttgtctcttaaggttttattcaattccagattctactattagaacgctttcttatctctcctctaagtagggagaagaaaactaacatttactgtataaatgtttgaagggcttttgtgtgttgtcttatttaatcttcactcattttacagatgaggaaactgaggctcacagaggttaaatcacttttgcaagatcgcattcagtagtgaagccataactgcgtagcacggttccacctccatgaggctgtcttgggttcttgtttctcaggtgtggtgagcggtctcttggatctgtgtggtgatccgatcttgcactcc

SEQ ID NO: 2226 - DNA, 1050 bp, Homo sapiens
agctggaccgtatgcggctgtgagctttatgtgccgcagctgctgatatctgctattcacgtggtggctcaccacctacacctttccagaagtctggaatcccattgtgtccacccaactcattcattttgttgactgtagacgtccccatgttagtatggattgggacgcgtattgagatccatctccatggatctctggcgcccaagaagatgcctgaattagagcacttctgatgagaagctcctcattccagctgtgatgcccacatcccttttagcacctagccatggctgctgttagactggcactgggggcagcagggctggacagatccaccaggcaagcttcttaggcatgtgtatgtgtgtttcttgcaggggaagcagaagtatacacttccgctgtaccacgcaatgatgggtggcagtgaggtggcccagaccctcgccaaggagacttttgcatccaccgcctcccagctccacagcaatgttgtcaactatgtccagcagatcgtggcacccaagggcagttagaggctcgtgtgcatggcccctgcctcttcaggctctccaggctttcagaataattgtttgttcccaaattcctgttccctgatcaacttcctggagtttatatcccctcaggataatctattctctagcttaggtatctgtgactcttgggcctctgctctggtgggaacttacttctctatagcccactgagccccgagacagagaacctgcccacagctctccccgctacaggctgcaggcactgcagggcagcgggtattctcctccccacctaagtctctgggaagaagtggagaggactgatgctcttcttttttctctttctgtcctttttcttgctgattttatgcaaagggctggcattctgattgttcttttttcaggtttaatccttattttaataaagttttcaagcaaaaattaagttacggattgagtgactattaaatttcttccaccagaggtcctcactgtgtttgttcaggaaaggtcactgggggaggcccag

SEQ ID NO: 2227 - DNA, 1071 bp, Homo sapiens
caaacccatctctcatcattaccccacacacaacctctgggcctaacctgtaaccctgctcccagcagtgtatccattttcacatttcttctctgggccttagcatgtgctcttccacttgcctggaacgtgttcccttccctctcttcacttggctaattcacctttcaggtcttagcttggcttagatggcctttctcttggaaaactttctctggtcaaagtctggtttaggagacttggttctatggtccccataatatccccatcacagctctcatcacattgcgtggtatttaatttttttttgagacagagttttgctcttgttgcccaacctggaatgccatggtgcgatctcagctcaccacaacctccacctcctgggttcaagcaattctcctgcctcagcctcccgagtaactgggattacaggcatgcgccaccatgtgtggctaattttgtatttttagtagagacagggtttctccatgttggtcaggctggtcttgaactcccgacctcaggtgatcctcccgcctcagcctcccaaagtgctgagattataagcatgagccactgcacccagcctaatctgccttctttcccaccagcctataaaactgtctgggaagaaaccaaactgcttggttcatagctgtctccttagcagctaacaccgtgcctgacaaaaataggttttccttttttgagatggagtctcgctctgtcacccaggctggagtgcagtggtgtgatctcggctcactgcctccagagtttgagcaattctcctgcctcagcctcccaagtagctgggattacaagtgtgtgctaccacgcctggctaatttttgtattttttagtagagacaggttttcaccatgttggccaggctggtctcaaactcctgacctcaggtgatctgccagccctggcgtcccaaagtgctgggattataggtgtgaaccaccgtgcccggccaataataggattttcaatacatatttgttgaataagtaaatgagttccccaacagctggaatcctgtttatgtcctcctgcagctg

SEQ ID NO: 2228 - DNA, 1046 bp, Homo sapiens
taattttggggggcacatttgtattgagcacttcctggatgccagatgctgttgtatactgggatacaaacatggcatacaactgtgtcttgctctcaggcatcccacagttactgacaaactcataattttaaagatctattctggtctatattgcttgtacttcatgttgattccatttcctattaatctgttcatagtaaaagtggagaaaagggtattgatcattatctacacatttacctttgtatgttttaagataatcaagaccttgtcattagccttctctaataaggataaacatgtgcattctttaatttagtttccaaatcattaatcgttttgtctatctctcctgggaatttctagttccctttgggtcccctggctctgtgagaagagactgtaatgtcttcagctctggggaccaccactagggtgaaagactattataggaccacttgaaagtacagagttgcaggactgtcagatatgcgtttgttttattagaagattatgaagttccaggatattatagcaaaaagaacattagaggacaccatttgacccacctgtgccattttattttattctatttatttatttagagacagagtctcctgtttgttgcccaggctggagtgcagtggtgcgatcttggctcactgcagcctctgccttagggttcaagtgattctcctgcctcagcctcccaagtagctgggactacaggcacacgccaccatgcccagctaatttttgtatttttagtagagacgggtttcaccatattggccaggctggtctcgaactcctgtcatcaagtgatatgcctgccttggcctcccaaagtgctgggattacaggtgtgagccaccatgcctggcccattttattaatacaaatgagaaatatgaggcctagaaaaaagctaaaggaataccttaagcatggtacagaaataagatataatgaaatgttctatttatcaaacttctgcttgatattcttttctgtctatggaaatgtagttatttgcaaattat

SEQ ID NO: 2229 - DNA, 1065 bp, Homo sapiens
ccagcactttgggaggctgaggcgggcagatcacttgaggtcaggagtccgagaccagcttggccaacatggcgaagctccgtctctactaaaaatacaaaaattagccaagcatggtggcacatgcctgtaatcccagctactcgggaggctgaggcaggagaattgcttgaactgggaggcggaggttgcagtgagccaagaacgcaccactgcactccagcctgggagacagagcgagactccatctcaaaaaaaaaaaaaaaaaaaaaaaatcagttgtgttttcttaatacagtaatgataacaaaatacattaaaaatcagacattgagcaacagaataaaaatgtatgaatattaaataaatagactaagaaactacaaaattatgttttatttaggaacacctaataataccagatgtattaataatgatgatgttgattataatgcttttgatgacaaacatacatttagaaattgtggtgctattagagcaaattaaatagaaaacttcatttacatatgggtgcaaaacgtagaacctcactgattgttaaacaatgtagactaaaataaaaatatagactaaaatgattcaacaggaagatcaagagaaggggctatttcatggagtcactgtactgtgccatgtgcatagttttatgtaccaaaactatggtacttaagtggttccatatagtgaagtcatgtgcatagttttctgtaccaaaattataattaggaagtttatgtagagaactatatgaattaaatataactttacccatcctgaatttttagttggttgcaaaacatttttaatacaatacaaaattttattcagaagatctttacattacactacttataagccattttagaacaataaatgattgggaagatctgatataaagccttttagctctaacgtattgatagtaagcattcagtaaatattgagtattgttatgtttagttagtaaagcaaagtggttaagattatgagctttggaatcagacatagttggtttctaatcctggttttgctacttacataagc

SEQ ID NO: 2230 - DNA, 1149 bp, Homo sapiens
tttacatatagtaaaatgcatagaacttaaatctacagtttgatgggttttgacaacgtatacaaccatgtaaccaatatggtttggatatctgtcccccgcaaatctcatgttgagatgtaatctgcaatgttggaggtgggacctggtgggaagtgtgtgggtcatacgggagggtccctcatggtttggtgctgttctcaagatagtgagtgcagtctcaggagatctgttttttttttgtttttttgtttttagagacggagttttgctcttgttgcccaagctggagtgcagtggtgtgatctcagctcactgcaacctccgcctcccaggttcaagcgattctcctgcctcagtttcccgagtagctgggattataggcgcctgccaccacacccggctaattttttgtatttttagtagaaacagggtttcaccatgttggccaggctgatgttgaactcctgacctcaggtgatctgcctccctcggcctcccaaagtgctgggattacaggtgtgagccactgcgcccggccaagatctggtcatttaaaagtgtctggcactgccccccgcaaccttgctcccattctcgccctgtgatgtgcttgctccgcttcgccctccactgtgagtaaaagctccctgaggcctccccaggagccaagcagatgtcagtgccatgcttgtgcagcctgcagaattgtgaaacaattaaatctctttttttaataaactagtcagcctcaggtatttctttatagcaacacaagaatagcctaatatggtaaccatcacccaaatcaagaaataggacatttttgcctcctttgaaagttctacccaccaccccttcatcctcccccaggctaccactgttataatttctatcattctagaattagtgttggctgtatttttctttttttttttcaagaaatattaactattctttatttgatatatataagccatataaaatgccttttaataagttaaaagaaccattttattttgagatggggtcttactgtgtcacacaggatgggttgcaatggcaggatcatggctcactgcaaccttgactcctgggcccaagccatccttccacctcagcctcctgagtagctacgactacaggaat

SEQ ID NO: 2231 - DNA, 1035 bp, Homo sapiens
atttgtaggcattcttgatgttttctggatataagtccttggtcagataaatatattatagatattttaccctggtctatgccttgtttctttacgttcttgttttgttttgaataaactttttatttagaagtgatttaagatttacaaaaaagttgcaaagatagtttagagagagagtatttgtatacccttcacccagctttcctgaatgttaacattttacataaacatggtgcgttattcaaaagaagtttttttgttgttatgttgatattctggatgccatttccttcattatagtttcttttttttttttttttttttttggagacggagtatcgctctgttgccctctgcactctgctggagtgcagcggcatgatctcagctcactgcaacctctgcctcccaggttcaagtgattctcctgcctcagcctcccgagtagctgggattacaggcacgtgccaccacatctggctaatttttgtatttttgtagagactggatttcaccatgttggccaggctggtcttgaactcctgacctcaggtgatctacccacctcggcctcccaaagtgttgggattataggcgtgagccactgcgcccagccccttcattatattttccaatcagtttttcttatattataaaagtaatttttggccggttccagtggctcttatctgtaatcttagcactttgggaagctgaagtgggtggattgcttgaatccaggagttcaagaccagcctgggcaacaaagcaagaccccatctctagaaaaaatacaaaaattagccaggtatggtggtgcgtgcggatagttccagctactcaggagtccgaggagggaagatggcttgagcctgtgaggcagaggctgcagtgagctgagatcaacactaaacttcagcctgggtgacagagtgagaccctgtctcaaaaaaaaaaaataaataaagcaattttgcctggacaaggtggctcacacctgtaatctcagcactttgggaggctgggcaacat

SEQ ID NO: 2232 - DNA, 1027 bp, Homo sapiens
tttctaccccaacccactttctctatattctttcgtctttgtaaccttacccactcccatggcctcatccctcattatgtactaatgatgtcgagatctgtctgaccctgacctgtttagacttgacttttttcctggactcaagatatgcatttccagctgcccattagacatcttgatgtagatgtcttacaggtttctctcggtctcagtatttccagagcaaaattgttctcatcctatcacaaaatttgttgctcctcctgttttctcttcttgaaaagaaatatcatcagccactcagtcatttaagtcattgattcccaattgactgcatgagaatcacctgggggcacatgttaacaatagaggctgctgaactgtatcctccaaagagcctgattcattaggtctatggtaggacccaggaatcttttattctgatgcttatccaagtttggaaatcactgatgaaaactgatttgctccctccgtccccatctccaccgtctactgagttaccaggacttgtcagttctatctgtgtaatgtctcataactctgtcttcttgtctccatttacactgctagtattctagttgagactgtcatctttatgggaacttgtaggtacatagtaggtatttttaaaattcttgttgaataaatgaatgcatgattgccatagtctgccataggtctattttttcccctaatttcacatctttacagtctatttctaatagtaccttgttatttttaaaataccaatctaatgatataacttttctttaaaaaacaatccatcattggctttcgagcttggttatacatcagaatactcattaaatgcagattctgtctgtttaagaatgaggacaattaaagaaaaatacagatgcctgagccccaactctggaaatttcaatttagtagatctggagtacagcacaggaatctgtatttttaccaggtatcccagagattctgatgcaattttgcattttgaagccattcacatgcagag

SEQ ID NO: 2233 - DNA, 1049 bp, Homo sapiens
attatgagaatgtccaaattcagcaataattaaatactatgcatgtagctattttctggcactgaagaaaatcatgatagcaatggtagtagtaataacaatggcactggcaagaatacagcatagtcctaacataaatattttcttttttacttttgagatggagtcttgccctgtcgcccaggctggagtgcagtggtgcaatctcagctcactgcaacctccacctcctggactcaagtgattctcccacctcagcctcccgagtagctggactacaggtgtgcgcccctgtgcccagctaaaaagtattttctatatgtttgatttttttaggagacagtatgccaaattccttaaatttggcagattctcatagtatatgatctcatgctctgaaagagggaaatagaccactggaaaaatggatagttctcagctagtgcattacacgcacatgcatacacacattagaaacaaaagaagcaaaaacgaaaacccaaggacaaagtgattctgatgtcattatttccacagcaaacagctgggatttttacatatgtgacattaacttagaaaacttagaaaatgtaaagctcctacttcatcctcactgtcatgttagtgtcacctgggggctgtgatctgaatcttcactgaactctcttcgttattatagcattcattgattttgatgatattaaattgccttttggaaaatattcactatttagttgttggagtcccttcctcctttaacctgttctcccaaaacagctttggtttttttaagagacagtgtgccaggcatgctggttagcctagaattagtagacacaaggaaccttctgtcagagggattgttgtgtctggcacaggatcatttgggcacagtatcatagcttgcctggcagaagtctaagcaaaggggcacaacactcttggcaagttgagagtggcaagggtaatgtcttatgttgcccaagtaactctgttttagttagaatcctgactagctgaaaaagcatacttctctcaatggctttggt

SEQ ID NO: 2234 - DNA, 1067 bp, Homo sapiens
tcttttgcctatacagcatcttacaacatcctccattctgttctgaaatttctcctctacctctgtcctacataacagttgttcagagtttgggcttgaggacactctataaatgagacagttgagacagattgaaagcaaggtaacacacactctttccttaaccttcagtgcctctgcaacagcatctgaaattttctgtcttggcaagcttcacctaattctgagcaccctgctagtgaagtgctctgggaggctgggatttgactgcagataagtaagcacttaccatcaaaggagacagggggcgtttctcattttcatttccataaagggatgccattgctttgccaggctatgtggaaagtctttgccttaacagtgaatcttgagtcctctttcaggtttttacctgtccatattctacttttggaacatgaggtttctacctttttgctattcctgatcttttcctggacttaggaatgacttctcttaccaacaaatcacggaagcttttcttgttaccttggtactaccagtaagctagtcggggagagtggaatctaactcttctatttgtgatctcaagggatgtttgtgttattcattggtttgtatttttcattctacttcccttcttctaggacatagcagtctgaagtttggactacaggctatgttttgttgtatcattatgcttgatgctttcaggaaaaaaccaagttgttcagatttctcaagtcttaatctctagtgtgtgttctgttttcagcctcaatagtgaatttatattatcagatatacaaaattgattatacccagatttggactgttaaggcctagcagaaacaagacgcagctttaagagaggtcaactatgtttctgctcatagccagcatttccttggcctcggacagtgctgaggtcagagcaatgtagaaaaacaattttctgtccaaggggtcagatgcctgagagatgcaactcaaacacctacagtgaggggtaacatatacagacatttgtcaaaacttagtgaatgtatacctaagattcgtgcttt

SEQ ID NO: 2235 - DNA, 1052 bp, Homo sapiens
tgtttgacaagacaggaaccccaacagtgagagtgagatgttgaacatggtcagaccaacaagctataaaataatccacaggttttgatttatagtcaggcaaacactgagaaaagaatagtgtacctaagccccattttcactgccatattatccctccaaactggagtccatgatgagatgaaatgtttctgctagaggggaaagggtcacacattaagtttacaatggagtctgtgttttcctctgaactctgccatggctggcctacctataatgaagatatttaacttactctgttgtctggccaccagctcctgatgaggtctggctttgctgatatgatttctctccatgatgggagaatactacccttcttcatgtctcagtctctgaggctcactgaatgtcagtcaccaaaaggaagttagagaaccatcagttctatagagaagaaaggcaccagctaagtttacagtataggagatgaccttttattcattgagacttgaacttctattattaatcatgcacagtatgctccggaaatggtattgtagtacctgtcagaatttataaatgttcatctttttgatatttgattatttattgagtacttacatgttctaggcttcaaatatttgcaacaagtatctgaacttgctctattctagatcacttttgttagttgccaaggtatgagaaaaattggagggatctgcctgaactatggtcattgctttgtgatttgtacccttgcgtcagatctcttgttctctgtagccaggtcttcacattgctattggcataaacacccacagtacccttttgattatgctacacctctgtttaaacctatgaccacctccctcactctatctttgcctacagagtaaataaaccccaagctccatagtctggccttcaggacttttcataatctagctctagctgacctttccaatgctgtacatagataaggacatattttggccaaactggactgcttaatttcctcaaacctgccctgagctttcctgcttctgaacatt

SEQ ID NO: 2236 - DNA, 1046 bp, Homo sapiens
tattattgttctgtattttgtctctgagcagtcagtttttggtgactcaattatttatgattatttagcatagacacttaacgccgttatggatttattttttttatttttttgagacggagtcttgctctgtcgcccaggctggagtgcagtggcgcgatctcagctcactgcaggctctgcctcccgggttcatgccattctccttcctcagcctcctgagtagctgggactacagctacctgccaccatgcccggctaatcttttatatttttagtagagacggggtttcaccatgttagccaggatggtctcgatgtcctgacctcgtgatccgcccgcctcggcctcccaaagtgctgggattacaggcgtgagccaccgctcccggctgtcgttatggatttaagcatatcttttttctgtttgtcttgtgatagagacaattgttaggcattatttcaccattttgtaatggagaacctgtgaagcacagagaaggatcttttgttttgttatggatagtctacgttgacttctctggcagcaaagaaaggaaacagtatgacacaaggctcaaagaaatagaactaggatataaacttttgattaatttgagaagaataccagaaaaagaaatgaataatatgtgatgatatggtagaagaatagtgactagatattctgtaatttctttagagagaagttatgagagaatattgtgaattgacatagaagagatttaaggtagaagctaagaaaaactttttgattgccagcattaagagaaacattagaaaatgtgaccgagcaagaatgggtcattttctcctacttgaggaagtattaaaaatagaatgtactgcatttgggagtttcaaatgtacttaaagactaaggctataattatcccttgttaagattagaccaggtgaaatcttatcaaaatttagatttcagtttgacttcatattattttgaatatccaaaggaaggagcttttatatttgtgtgtattaagagattgtcttttctccaatgtatg

SEQ ID NO: 2237 - DNA, 1078 bp, Homo sapiens
tatagaaaccaacaaggtcatctgattataaagggactgatttgacaggacagaaatggcaagtggcaagctgttggcagatagctctgcagaaataccagggccaggcagcagctgtcacaatagggtagtggttgggttcattttccaaagctccaagttttccttagcaacaaaatgtaaacaattcccattgctaatattagagtctaatagtgtctgactttgattcttttgtttttcctttagctttttctctctcacccaaccctgaattttacctcttttttaattgtgctctttcttttctttgtagaaatggttaaaaatagtttttctccacaataagctaaaattgtctttcccaaatagctcacattacatatgactctgctttgcttggtcaagatacagtgagtactggctgagtcatatataccacacttatggaccttcttcagtcccttggggtctttataagctaggtagttatacctactaatgtgaagctgtcagcagattaatttggcatcatctttggaatgttcaaaatttaaaccaagaatttaaactctgagttatggtttttaaaagtcatttgatttgttcccctgtgtccaagctaaagactggcagttgtcaattcaaaaaggtactcaaagaggttccacaaacgactccaatctttctccagttttgttctaaagtgattagttatctaaaagtctgcggccatgctgccattaccaagttttttctctactgatagaaataagctctctcttcctaagtatgaatattgaacaagaagagagtgaaacatatgtagcagtgggtacattttctactatattacaattctggaggtctctggattgcttatagaattaggattatgctgtgggactctgaacaattctggaatagaaagaaaaaaggtgattcttttagtgctttggccctaatccttaggtagcaaaatgacaagaggcttcaccaggctgaatatgccttacaaacaaactgctttcagtgtcatatggcacctctatgtaattttttttcagaatatgtctct

SEQ ID NO: 2238 - DNA, 1236 bp, Homo sapiens
ccgagatcacgccactgcactccagcctgggagacggagcaagactctgtctcaaaaaaaaaaaaaaatttttttttagtaagacatatactacaagatacatctataaaagctatatactcaacttagttcctttcctgtttggagtgaacatgtttaaataccattctctcctcaacagatttgaggtataggactctaaagctacttcaaaacccaatttcccattggattccggacaaaatttattttgttatcattctagagaaagcagcgttgttctctccttggaaattatgattatttcttttttcattcttctacttggagtagttttattttacttaggtaaccctatgaaccttcatggagaatatttcaagggaattaagtcctcttccaaatgagttagccatacctggtaaaaataattaaggggaactctttgattaagatgtgatgaatattgtagcacacctatcctttctttattttccaaattattactgatgagcttttaatatgacaatgaaaataatgtagtagtaagagtgttggtcgtgatgatagtagttctggtcatggtagtagcagcaaacgtgtgccaggttctattctaagtgccttacatgggtttgcatttaatcttcacaactctattaatatatctgtatatatctgttacaactgctcatatcttcattgtataagaaactcgggtatagagtgcttaaataatttatccacaatcacctaccaagtaagctgagaagccatggtacaaacccaggcagtatgatttttatgccagggtactttatcactacactatacctgtcaaaagacagtttaggtcttttattattatttattgtgacttttaaaatattcactggtgatttgctggatgttttgcacaacttcctttttatttttcttttcttttcttttttatttgaaacaggctctcactctgtcaccctgggctagagtgcagtggtgcaatcatggctcactgcagccttgacttcctgggctcaagcaattctcccaaaacaacttcttgaggcagaatttgtccatttatagtgtgtgaaggggcagtataaactttagtgacaaagtacaaagtgtatctttgaagtcatgcttaattctctgtaatcaattatttgaatgccactgatggtgtaatctcaatatcataccaaatacaaagaaaaattcttcctgccc

SEQ ID NO: 2239 - DNA, 1102 bp, Homo sapiens
gtccctatctgtttttctcatctgatcctattccttcttacttcccaaggaccagtctttgaggttagctaagattatagttgggaatatataatcacttaatacttgaaatttagcttttgtagattatgaccgtaagtaaatttgcctttaaggctcacaggttcttggaagagtgcctgtcagaagattgttagttgctgtcattcactttaattgcttgttgtcatttgaattccttaattaggagtagattatggaatttactagtctttttgccttgtcaacgcttagtctactgaatatgtgcaggaaaaacattttggggatttgtggaggggatgacagaaatcttcaaagtgatgaccctgtgcttgcttgaaatgatagttaggagggatggatgtgggggaagagaagctgaaatcctgattcttcaacaattttaaggaaaaaagtgatgaaaactgacattaatatgtcacagtaaagactcatataaggtgtgggaattgagcatgggatggcataattaattttgtgccaaataaacaaaatcagatcctttcttgagaataaatgttcacacagatgtgcctttatagaatatgtacttttaaaaaactccatatatgacatgttgtatgagaaggcctctcttagatcactggtgacctctagtactttggactaaaactaatgaaatattatttaggcagtttatgtatcatttctggagttcttgacttagagctaagggcgtgtgtagatactgatatccagcaagctgagccattttcaactataataacctaatgggtaaagcttctatagtagtctccttcaaacctgtcagtagcaatcactggggttatttgtttacaatgtaggtttttagacctctccccttgagattctggataaggaggtgacatggtggtagcgggtggaagtcctggaaatctatattgtaaaggtcttccaaagtgtttcttaacaggcaagtctgatggatagtgttcctagaggtataatgtttagggattgctaacatcccaggtaggccaatcattaaagagtaggattaactgtagcacactaa

SEQ ID NO: 2240 - DNA, 1056 bp, Homo sapiens
tatttttcccatagattttgggggaacaggtaatctttggttatatgaataagttctttagtgtgatttctgagattttggtgcacccatcatccaagcagtgtacactgtacccaatgtgtagtcttttattccttacccccctctcacgctttcccctgagtccccaaagtccattgtatcactgacaccttttcgtcctcatagcttagctccctcttatgagtgagaacatataatgtttggttttcagttcctgagttacttcacttagaataatggtctccaattccatccaagtcactgcaaatgccattatttcattcctttttatggctgagtagtattccatgttgtgtgtatatatataccacaatttctttatccactcattgattgatgggcatttgggctggttccaaatttttgcaattgcagattgtgctgctgtaaacatgcatgtgcaagtatttttttcgtataatgacttcttaggaatccaattttatttttttattttttggacagagtctcactctgtcacccaggttggagtgcggtgacgcgatcttggctcactgcaacctctgcctcctgggttcaaagtgattctcctgcctcagcctcccgaatagctgggattacaggtgtccgccaccacacccggctaatttttgtatttttagtggagtcggggtttcactgtgttagccaggctggtctagaactcctgacctcaagtgatcttcccaccttggcttcccaaagtgctgggattacaggtgtgagccaccacacgtggccagaatccagttttagatatgttggtttgagatacctgttagatttccaactggaaattttggcagtttggttatacagatctgccaaaatgctgtggagtatttagatgatatttaaagcaatgagactgtatcaaataacagaaagaaaatatagaaaagggaagagggcccaagaagtatctggtgtcctttccagtgtgagtgaaaaaaaaaaatgtatcatgaaagaggtagttgtcaacagtgttaa

SEQ ID NO: 2241 - DNA, 1054 bp, Homo sapiens
gctgttatgaattctagactatcttccaacttggctgtgtgctgttgatggtctcctttaaaaataaattgtttgtttagtatgagatcaaaaattatttatataaaaatatatggaagagtagggcttgatattttttaacagtatggagatctttttagtgatacaaattttgagatttcctataatctctttgaagacacgaatcatgtcttacagtactttgtatatccctatccctaatagtaccttgcatagaataagaacttaatagttgttagttgatggaagaaaagtatcagttgaaaataaaaataaaaatattttctttggatcttatattcataaatggactgaaaatgactgccctgttccaaaaggaggaacagagatcttaaactatacttcttaactggtaatacttgactcatcaccttcttgcctaaatctgaactaaaatactgtatattgtatctactcagaagtttataaactaacctaccaaaaaattgatttgaggacgaggcagagacatttttgaaagactaggtaatttccacctaactgttgatctcctttgggccttaaaggaccttgtggttttgttactagaaaagcagtccgatctggaccccaagaaagggttcttagatctcacgcaagaaagaattcagggcaagtccatacagtaaagtgaaagcaagtttatttagaaagtgaaggaataaaagaatgactccatagacagagcagccccaagggctgctggttttatggttacttcttgattatatgctaaacaaggggtggattattcatgagttttccaggaaagaggtgggcaatttccagaactgagggttcctccccattttagaccatatagggcaacttcctgatgttgccatgacatttgtaaactgtcgtgtcactggtgggagtgtctcttagcatgctgatattttataattagtgtataatgagtcatgaggacgaacagaggtcactctcattgccatcttggttttggtgggttttggctggcttctttatc

SEQ ID NO: 2242 - DNA, 1044 bp, Homo sapiens
aggtcatctcgtacattgttctgactgtgggcagaactgcatacacacacaacccataacattttggtttactgtaaatcattgcatacacacacacacacacacacacacacacatccaaggtctctttaccgttttcataaccttgaacagaaaggaagctttcagtgggaccctctgccatttaggtcttacgacttgaaacatgagccaacacagtctttcacttattttgactgaggggaggatttctggttcaattgctgatctcctcccaactgtactcagaatattattctgggattttacattcttggattgggaaaattcaattagatttattgatggaccctagctttgatttggccctggagatataatatgttcccatctgtcctgttgttgtctgtttaatttggaaagcagctaagttttacattttattcctttggcctgtaaccaaacttccttggtatcccatctgatcaaaaactcctcattgggtttaggctaaaccaagagtcagttgctgggaaagagaaatggaacgggagagaagcaactacagggggagggaagaaactagggggagagatgctgtttcttagacaatgatgtctacttcccggctcaccatctgctcctcatcatgagagaagcagtttcctaggaatttagggagagcattactgaagataatgatgcctttttgataatagagagcaagggccctagtcacttgcagacatttgaaattctatgaaatcttcaacctgcacagagtaactgaatgtcttcttctgtttgcatattagcaagttgcttctccatatatctactgattttatgataggagatttagataatgtgatttttatcagtgaggtagctccatcttacaagtggcaggatcagatagtgctcagatctcctgagtaaggtttgcctgagtcagcagacaaacctttgaccgtgaatctgctgatcacacagcagctgggaggcagcatttttactcccttctgaattcaataatgttcaaca

SEQ ID NO: 2243 - DNA, 1095 bp, Homo sapiens
gcctcagctctctctcagcataatattgacaaacatttggtaaaatgtgttaccagtcgttatcttggcttcagccttcctctgcattggctgagttgccgtttctagcatgatacatgctttattagtgacaggatgtgaagtgtctcagggatttccttttggtgaggaccccagaccacccgaagaagaattagaactttctggactacaggttatatactgtgattttgctctgtcaagcaacataaattgatccttgaacgctgtgagagttatggacacagaccctcacacagttgaaaatctgctatgacttttgactgcccgaaaacttaatagcctactgttgactggaagccttattgataacataaacagttgattaatgtgcattttgtatatgtagtatataccttattataataagctcgagaaaagaaaatgttattaagaaaatcaaagaagagaaaatacatttactgttcattaagtgggtcatcatgttgagcaggctgacgagtaagaagaggaggggtagtcttgctgtctcaggggtggcggggaaggaagaaaatctgcatgcaactggccctgtgcagttgaaggccctgttgttcaagggtcacagatttagcttcacttacccacccctcagatcagaattactcaagatttccctgtcttcaaagagacgcaaggaaattatgccaaatggtgaatatattgggtggaagataaatgagagaaggttgtatgtgtcactgatctcaactatagcatttgctgctgatatagaacatgctgtgtatatatctataaatacacacacatgaacacattgcatgtatataaaaattgttcacacttttagtggtgcttactgggtattggtaaaggattgagtaggcactgtgatgaaacttcacaaagcagatggaaaagatgcattaatagccacagggggcagggtaagggagcaattcaggaaaatggagaggcttagctaaaatttgtcagtcaggaattttggcatttgagacttgttttcatactatgtatatgtaatagacaaacccttcattttgtagtaac

SEQ ID NO: 2244 - DNA, 1050 bp, Homo sapiens
cagtgcaaaggccctgaggcctgcaggcccagtgagcctgctgtgtttgaggagcagcaggggtgtcagtgtggctgcagcagagagagcaagagggagagtggctgaagtgggtgttaaatgggtagtggagcagatcatggagtatcttataggccattgtaaggactccgagtgaagtagggatacaaaggggtatcttgtttttgcttttccttccacttgcaggtggtaggggtctttgtcgttccagtgcctggagagagagggacatgttggattcattcaaagaactttttttcccatcaatccatccccaggcccgctccctgactgagagggaggatatgggttagacagagaaagggagtaacctcgggatgggtcgcaggcaaggccctggggaaggaggagcatgaggaggctggggtgctctttgtgctggaggcagtaggtctggacatgctgtggctgatgctggatgtgagacaggtggtgtgggaatgtggccccactgaggctctggcttgggggctgtgtgcctgcagaaccagtcttcagtatggcatcatgtgtctgaagaggctgaattatgaccggaaggagctggagaagaggcgagaggagagccagcatgagatcaagggtaagctcgtcaggcttggagagggttcgggagcagcctgcttggctggtccctgccttgggccaagtggaggggaggcattctgtgtctcagggaatcttccagtctgaaaaggaagatgcagcctcaccttagggagctcccagtctgatggaggagacatagtccatgccaagttgtctataattcccctccctcaaccccacataccagatagcagccaccaactggacaaatgcagtgaatcctctgggacggtgttatagactggtgtgcctgtggaacttgttgatctggatggggctggatgggagatgcaagtcttagaggagaccttgaaggtggaaagaataagaaggccattccagcttgggtcagggggatgacccgtgcaagggttctgg

SEQ ID NO: 2245 - DNA, 1027 bp, Homo sapiens
gtctttgttccttactcctgggtttcccgagacccatggctctgctctcaggagagatgaggctgcttggctgttccttgttcctcacaggcatgaggggtggggtgaggatgaggcgtggggccaacaggaaagggggaggcctgtgtgtatgagagagccttgaggactccccagcactctagaaagaggctgctgtgtggcctctccagggcccagcactctgctctgcctggtgtggagaaaatactctgcaatagctggagggtttgaatagctttttccacttccctttccaaaatactttcatagcagctctctcaactgctcagccaacagcccaggtgaaaaaggaaaggcaaggattgttatgcctcatttgacagatggggaaactgaggcacagggcagggaagtgacttgctcaaggtcacacatcaaggctttggaagaactgggactggaagcccagtgtcctcagtctacatggagtgctagggctgggggtggcggggaaacaggagtgttggcagaggttctggggaggctgcctggggcaggagactcactgggatatcttggcaatgtcatagctgctgtcaatggtgaccttccccgcagacagtgctgcgctgagcaggagctgctttttccctggctgggcttcctttataaattcggccttcatttcctagatgggagacaggcaggtgagagaaagggtcccaagtggcatgagaggtagactcatcgagggcggactaggtctctgcgcaacccatttgctgtactccccaacctgcctggggcctagtggaagtgataaagtggctcatcagtggtcccatcctcaagtcacccatccttttcctaaaaaactgactaatcttctccccaaacccatgcacacccatcagcactcaattactccctgtcctggagggagcatcggacagtgggtgacccctattggcccacagatgactttgggagacatttgcctttcggtctgtgctttgttctagct

SEQ ID NO: 2246 - DNA, 2049 bp, Homo sapiens
tttatttttctaatgaggtcctgggcagagagtgaaaaggcctctcctgattcctactgtcctaagctgcttttcttgaaatcatgacttgtttctaattctaccctcaggggcctgtagatgttgctttccagccaggaatctaaagctttgggttttctgaggggggggaggagggaactggaggttattggggttaggatggaagggaactctgcacaaaacctttgctttgctagtgctgctttgtgtgtatgtgtggcaaataatttgggggtgatttgcaatgaaattttgggacccaaagagtatccactggggatgttttttggccaaaactcttccttttggaaccacatgaaagtcttgatgctgctgccatgatccctttgagaggtggctcaaaagctacagggaactccaggtcctttattactgccttcttttcaaaagcacaactctcctctaaccctcccctcccccttcccttctggtcgggtcatagagctaccgtattttctaggacaagagttctcagtcactgtgcaatatgccccctgggtcccaggagggtctggaggaaaactggctatcagaacctcctgatgccctggtgggcttagggaaccatctctcctgctctccttgggatgatggctggctagtcagccttgcatgtattccttggctgaatgggagagtgccccatgttctgcaagactacttggtattcttgtagggccgacactaaataaaagccaaaccttgggcactgttttttctccctggtgctcagagcacctgtgggaaaggttgctgtctgtctcagtacaatccaaatttgtcgtagacttgtgcaatatatactgttgtgggttggagaaaagtggaaagctacactgggaagaaactcccttccttcaatttctcagtgacattgatgaggggtcctcaaaagacctcgagtttcccaaaccgaatcaccttaagaaggacagggctagggcatttggccaggatggccaccctcctgctgttgccccttagtgaggaatcttcaccccacttcctctacccccaggttctcctccccacagccagtcccctttcctggatttctaaactgctcaattttgactcaaaggtgctatttaccaaacactctccctacccattcctgccagctctgcctccttttcaactctccacattttgtattgccttcccagacctgcttccagtctttattgctttaaagttcactttgggcccacagacccaagagctaattttctggtttgtgggttgaaacaaagctgtgaatcactgcaggctgtgttcttgcatcttgtctgcaaacaggtccctgcctttttagaagcagcctcatggtctcatgcttaatcttgtctctcttctcttctttatgatgttcactttaaaaacaacaaaacccctgagctggactgttgagcaggcctgtctctcctattaagtaaaaataaatagtagtagtatgtttgtaagctattctgacagaaaagacaaaggttactaattgtatgatagtgtttttatatggaagaatgtacagcttatggacaaatgtacacctttttgttactttaataaaaatgtagtaggataaacttgtgtggtgtagagaagttaaaatcctcacgttgtacatttgtgtttccctttcagatccaaatcctttctttgtgtttaatagtatttctcctcacttgcactcagacaatctatagcatgtgggtggtataaaagaaaaatctggttgtatggctgggccatttccaagcatcccctctttcctggaaagtagctccttacttccctccgttttgtttgtttgtttgtttgttttgagacagttttgtcactcaggctggagtgcagtggtgcaatctcagctcattgcaacctctgcctcctgggctcaaataattctcccacctctgcctcttgagtagctgagattgcaggcatgtgccatcaggcccagctgatttttgtattttttgtagg

SEQ ID NO: 2247 - DNA, 1046 bp, Homo sapiens
ctgcacttcagcctggtgacagagcgagactccatctcaaaaaaaataaataaaaataaaaaaagattctgagctatgtactgcctctacacaggatcatcctagaaagtgtggaatattcagaaaagcatgaagagaaaactaaaacgttcacaagtccagacataactgctaacattttggtgtagtctcttttagtcttttatatacgtgggtgagtatatacattttttaaacaaaattgggaacacgttgcataataagattttgatttaatttttttttcctacccaatactagatcatgagcattttcccacatcataaagaattggtcacaagtcagccccaaacatagtccagtggaatccaatgatagcaggcaaccagaggcaaagtatctgtggttttagaagggaaataaagaagctgatgggctgggcacaatggcccatacctgtaatcccagcactttgggaggctgaggcttgaggccagggttttaagaccagtctgggcaacttagtgagactccgtcacttaaaaaaataaaaaataaaaaaattagccaggtgtggtgatgcacacctgtagtcccagctactcaggagactgaggcgggaggatcccttgagtccagggctttgaggctgtagtgagctctgattgcaccactgcgctccagcctcggcaatagagcaagaacttctctctaaaaaaaacagaaaataacaacaacaacaaaaaaaacaaacggctggacacagtggctcatgtctataatcccaacactttgggaggcaaagcgggagaattgcttgatcccaagagttcgagaccagcctgggcaccatagtcagaccccatctctacaaaaagtatgaaaattagctgagcgtggtagtgcatgtctgtggtctcagttactcgggaggctgaggtgggaggcttgcttgagtccaggaggttgaggctgcagagaaccaagatcgtgccactgtactccaccctaggcaacagagggagactctgtcttaaaaaatttaa

SEQ ID NO: 2248 - DNA, 1059 bp, Homo sapiens
ccctgatttatgaatgaggaatttgatctaggaaacaggcccagagagggtcaatgacttgtccaaagccacaagtcaagttagtgcagtgctgagaatagaacctgtgtctttgaaatacgaaaccactgtctgttccctatgctataatgtacaagcaacagagaatgggggggattttagtaagtcttcctggcgatggtggttttaataattggcaacaaaggctacaactgatgccaatctatctctggctagggccctaggactgccctccagcctgggttcatatgacttgtttctctggacaggtctgctcatgtctgctctcacggttttcatcctgattctatactttgtgattgacaactttgtgataaatcgcagaccatggctccctgagtgtactcccatctacatccagtactttgtcaagttcttcatcatcggcatcactgtactggtggtggctgtgccagaggggctgcctctggctgtcaccatctcactggcctactctgtgaaggtgagactagaacaatcctatctcttcctttaggatagagatgggagagaagggtaccatgtaacctttagtgaaaagataagccattctatcatctataaactttggctggtgcctcacaagagcagaagtccctggtattatggaaggaccatctctgtcagatgcatcaatgttgaaatgacccagcagaatcttaagagaatgacaaaaatggtatcttggatttttttttttttttaagacagagtctcattctgtcacccaggctggaatgcaatgatgcaacctccgcctcccgggttcaagtgattctcgtgcctcagcctcccaagtagctgggattacaggtgtgcaccaccatgcccagttactttttgtatcttttacagagacagggtttcaccatgttggccaggctggtcttgaacttctgacctcaggtgatctgcccgtctcagcctcccgaagtactgaaattacaggcatgaatcactgcacccagtcagtatcttggatttttgtgtgggact

SEQ ID NO: 2249 - DNA, 1124 bp, Homo sapiens
gcctgactccagcgcacatagtcttactaccatgctgcactacatgagagcaagtatcaatgcagcaaactgagagagaaggtaaaataagtcaagaccagaactaacatttaaaatgtttaataactagtacaacaaaaaattagccaggcatggtggtgcacgcctgtagtcccagctatttgggaggctgagatggaaggatcacttgagcaggaaggtccaggctgcagtgagccatgatcatgccactgcgctccagcctgggtgacagagtgagaccctgtgtcaaaaaaataaataactagtgcagctcagatattgattaattagaatggacaccagccataagcaagcagtatatctgtaccaacacattcttactcttagttcagaccacacttaacctccagtgcttctcctctccccactaggtgagaaattctttgatattgatagtgggaggaaggcacctctacattcaccacccagccagcactataccattgtttttaacaccttcgtgctgatgcagctcttcaatgaaatcaactcccgaaagatccatggagagaagaacgtcttttcaggcatctaccgcaacattatcttctgctctgtagtcttgggcacattcatctgccaggtgagattctatctgcagttggggcaggagatctggaatgataaagggcagaagctgggagccagggttccctacatacctaggaaaaggaatgaaggaattacggggactggagctgtaagttgaacactttgggattcccaatctgctttcttttgcatattgctctagaattggagcccattgtgtcaagagctccagtgcagggcagcatgttgactggaaataaaataatacttctaaaatcctttcatgatctttctaaatacacagaaatttcacagaatgaccaaaagaagtattctcttctagtccctttctatggctcctgtcagcctatatgaaatgtgcatgcacatctagtatagactctccctgtccctgccctttgttctgaagggcttatgataaaaagtgttgtgcaactcaaagaaagagaagtaatgggatttgtacatgtatattacatagtcagccc

SEQ ID NO: 2250 - DNA, 1053 bp, Homo sapiens
ggatgaggaagaggaggaaaatcctgacaaggcttctaagtttgggactagggtgctcctgttggatggtgaggtcactccatatgccaatacaaacaacaatgcggtggattgcaaccaagtgcagctcccccagtcggacagctctctacagagcctagagacatcagtttgaattttctttctctgactctcatccctattttacctatttccattttcgtctatcccatctatgaggtgatgatgggacttttcattgtcacgtcagctgctgtgttaacagcagtgtgtgtgaagtgaacctctacctgaccatgaagaggcaagagcacagacttacaaggatttcaacttaagcttgacttggggtttgtagcgggacccagtcaaaccccattcaggtcatggtagaatctactccttggtagtcacttgtcatttttaaagaaatgatgacaatcctcttggcatcaccccaccccacattctccccgatgttcctctcctgaattctggattttgtcctacaagtctgtgccatttataagctaagttgagggttcagagggagacaaatatccccaagtgaaatatgttgcggtagagatggaatgtataaaatccgccagtagtgtgattgtttttcaatttttcccactttgaaaacttacacctaaaggcctgtaggcctctaactctttctgccctttcattcaaacctctccaaagttctttgtcttttgtcttcccttcctttccttttttttttttttttttatgatgattaagaaaatggaaaggatatggatgaattgtgtaaacttagatccttctcccttttggcccaaaagaacccttgatttagttccagaatccaaccagtttctttgttaaaagggtccttttgaagcaattaagtgctggtaagaatatttctctgttgttgccaggttaccttctgcttttaaattgccatcttgtaaagtgtatgtggttcttaagtgccagggagatcagccttgcccatgaaggttgcatatgtgtggtata

SEQ ID NO: 2251 - DNA, 1104 bp, Homo sapiens
gtaaaagaagtgtgagccggggtaggccagggtcccacttagggacttcaacacttcaacgacacctgcaagccacacatcctatccattgggctgttgccaacaaagacagtggtgctgttgcaaatggattagatgaagctgagactgagagaagtgatctcttgagtgataccttgcatggagaaaagtctacaggcagccaagatttaacagctgaggaccttagtgactctgattcagatgaacctatgttagaggttgaaaacagatctgaaagtcctattcccgttgcagagcaaggcactctgatgcgtgcgcaggagagagaaacaacatgttgtggaaatccagtctcaagtcacataagtcaggcaattatccaaatgattgtggaggatatgcatccttacaactatttctcaaccccagcctttcagaggttcatgcagattgtggcccctgattataggttgccatcagagacttactttttcactaaggctgtacctcagttatatgattgtgtcagagaaaaaattttcttaactttagagaatgttcaaagccaaaagatacacctgactgttgacatatggacccatgacccatccactgactattttattgtgactgtacactgggtttctttggaaactgcgtcttttctcaataatggcaggatccccgattttagaaagtgggcagtgctttgtgttacaggtttggctaaagactgtttgataaccaatattttacaagaattaaatgaccagattggtctgtggctttctccaaatttccttatccctagcttcattgtttctgacaattcctctaatgtggtacatgcaatcaaagatggtggttttacccatgtgccatgcttcctgcattgtttaaatatggtcattcaggactttttctgcgagcacaaaagcattgagaatatgttagtggctgccaggaaaacttgtcatcattttagtcattcggtcaaggcccgtcagatactgcaagagttccaaaatgatcaccaacttccatggaagaatttgaagcaggacgaaactggccattggatttctactttttatatgttaa

SEQ ID NO: 2252 - DNA, 1211 bp, Homo sapiens
aaaacccagtagacatttcccaaagattgtttctgtaattttaggtaatctttttaaaaacatacttaatgacccattatactgtattaactgtgcggttgttttggccactgaattcttaatgaaaactaagcagtcggtatttttatgtgttaggaatcattggtgaaatgagtgaattgatctcattttaagatccctttctactctgaaagtatgtttctgagattgagtaggaggccagaaaatgatgacttttagtaaaagtctattaaaagtttcagactgaataactaatgtgagatcccaatttttcctttttttcattttagatttggggatattccctgcccaaaaaattcctggaaaattgactagtattaagtgtgagtaaaaggtgtccacttttttttaagttttgattttagttttgtcttggatagtatttggcaagatttagcctagaaattatgtagtatttattacataagaatcaaaattgctttgttactgggctggtttcaaagtttagaactcatttctatgtatcaaaatcgggttttttttggttttgattttttttttttttaaattcttaaatggtaaatatgccattgtgaaatgaaatctcaactccaaaagtttacccttttactaactggagtaaatgtatacttacaaagtctttagctgtagccattagtagtaaagaatttggacctaggctgcgtaagcaagcctttccagggccactatttaatggcaaaccagtgatactggtgttgatacaaaataagaaataaattttcccttagataaagctttctgtgttttgacagtgccagtttagaatggctataatgctgctctgccttctacagcttgctgcaccactctgtagttactctattaccatacgtttctatcttttttggttaaacactccctgatgacgatgatggatatatatacatacatccatattatacataatgatatatgtgtaaggatttaccttcgtctttattttgtgggctgggcaaaatttagtgtaacaataacttcatgatactttggtataagagtaagttctttatttttataatgaacccaaatctaaagtcttttatagtgcattttaaaaggggaaacttatccaaatgttatatttctatacatttttgtgtatatgtgtgtgtgtataagccagt

SEQ ID NO: 2253 - DNA, 1054 bp, Homo sapiens
gcattattttttggggagaagtaatttctttaatcctctatttattcattatccaggtcttctgtgccttagtagtttcatagtgttttggttttgtttttaatttaatgtgggtcttgcatacttcttcattttcttcctgtatatgtgtttttttttttttttttgagacagagtctcgctctgtcgcccaggctggagtgcagtggcgtgatctcgattcactgcaaactccgcctcccgggttcacgccattctcctgcctcagcctcccgagtagctgggactacaggcacccgccacctcgcctggctaacttttttgtatttttagtagagacggggtttcaccgtgttagacaggatggtctccatctcctgacctcgtgatccgcccgcctcggcctcccaaagtgctaggattacaagcatgagccaccacgcccggcccttcctgtatatctttttattgtgaatggtctcttcctgtatatctttttactgtgagtggtactctgccatcatctgaatgattattgctggtatgaaggaaatttactgcttcttgtagatcttacatttttattattttcaatttgttttagttgatagattttctagtttgcaagcatgtaatctgcaggttctggatttttttcttttttgcctcatctttttttttttttttgatatggagtattgctctcgttgcctaggctggagtgcaatggtgctgtcttggctcattgcaacctctgccttccaggttcaagtgattcttctgtctcagcctcccaagtagctgagattacaggcgcatgccaccatgcccggctgatttttgtatttttagtagagatggggtttcatcatattggccaggctggtctcaaactcctgacctcaggtgatctgcccaactcggcctcctaaagtgctgggattacaggcgtgagctattgtgcccggcctgtctcgtctttttaatatatgtttgtaatttatgcctttttttccttttgaaaaaattgagtaaataaatgtcctattcatca

SEQ ID NO: 2254 - DNA, 1059 bp, Homo sapiens
ttgtgttttttagtagacacgaggtttcgcgatgttggccaggctggtctcgaattgttggcctcaagttattcacctgcctcagcctcccagagtgctgagattacaggtgtgagccacgcccggcgaatggtatttttgttgcatatcatcccgtggcacacagttttaattttctcattactggtgatgttaactttgatcactcaattaagatggtatctgccagattgcttcattataaaggctttctttttgtaattaataaatattttgtggagaggtacttttagaccctttaccccgtttctcatcagacttcaactttttccccgttattgatgtgaattaatgcaaacttgtggtgatacgtttggctctgtatcctcacctgaatctcacctctatcgtaatccccatgtgttaagggagggacctgatgggaggtgattggatcatgggggcggtttcccccacgctattctcatgatagtgagtgcgttctcgtgagatctgatggtttaaaagtgtgggactccctttgctcgcgctctcttgctgccatgtaagacttgtttgtgtcttgcgtcctgttcacctcctgccataattataagtttcctgaagcctccccagccatgcagaactgtgagttagttaaaccttttttttttaaataaatttcccagtctcagatagttctttatagcaatgtgaaaatggactaatacatgtggttttctattttaatcagtgtgtcgtactctgttactatcattacttttatgctccgattgacccagatttggcaagtaggagcctttcaaactgatttttgtgttcttttgatgtttccatcattctttgagcatctctgctttttggcctgacaagattttccaggctcatcctgtacttttcctacttcagccctgtattcggccatttatccaaggtgccctggtttcttttagtgaataatggtatatagaagttaagatttgggctgctcctagagtgtcatcactttcaggtcctctcagtggacagagctgagga

SEQ ID NO: 2255 - DNA, 1042 bp, Homo sapiens
gggaaaatcagccaacaggatgtcaaaaattaaactgcgctttccatcacaatagaggacgatatgttgatggccttttcctacctccgagcaaaagtgagatcagtttttaattttaaaagaatatcaaatgaacacctattatgcacactgtacaacagtacttttcagacattgactcctttcagtcttgtgaaacagcagaattatttccactttacagataagtgaactgaatcttattaaggttaaatgatttatccttggccttagaaccattatatatcttggcatgccatttaagttattatacttacttcatttctcatattcttatcagacccataaacgttttcaaaataaatttgattttctaggtcaaaggttggcaaaactggtcctctgcctgttttgtaaaataagttttattggaatatagccttgcccattcatttacatattttctattatcagttttgtgctagtgctatagaattgagtagttgagacagaaaccatatggcccacaaagcctaaattattaactggctctttacagaaaatatttgccaaccctactctagactataatctaaaataaaactaaaaagctagtggttattcccaaagttcattttaaagtaatttaaaagtggaattggccatttaaaagccacagttgctacgtgattaaaatttgatggctacatctttttacctcaatttaagggaaaaaagtagacttattcctttctggtttggttcaagtaagtgtcatatgcttgggtcttagaagctacttctttgctgagcaaaaagcctagaattgcagtattaaaattaaaggtctagaatttgtgaacaggtactatgcttcttctagtcttctgttgattctgttttgagtgcccactttgtgtttatgtacagtggagagttagtggagagttaattaggtaaaagcacatcttttccctccctgggactttagaacttaaatgaggaaatttagtataaatgctcataagacaaatacactata

SEQ ID NO: 2256 - DNA, 1893 bp, Homo sapiens
tgattgtaccactacactccagcctgggtgacaaagggagactctgcctcaaaaaaaaaaaaaaaaaaaaaaaaaaagcttgatcccaaatcagtaaaagaattatttctttatgtatgttcttaaaaacaaatttttgctcactttgtgtccgtgagactaggtgattcagccaactatttttaaaacggcagttttctaataatcttttttttcttacagtcttgtgctgcctccaacccagtcctcttcagattcctcacccccggaggtgtctggcccttcctcatcccaaatgagcatgaaaactcgccgactcagctctgcctcaacaggaaagcccccactctctgtggaggatgattttgagaaactaatatgggagatttcaggaggcaaattggaagctgagattgacctggatcctgggaaagatgaagatgaccttctgcttgagctatcagaaatgattgatagctgaaggtggtagtgaggacactttaaaaaaaaaatcgccaaaaaactggacttagtttcatctattgtaacatttacctgagatgatcatttctttagtctagaatttgccccaaatcagaagtatacctctgaattatctgtatgtgtcctggattccttggggtcagatttttaaagttactttataaccattttgtccatttgatgccattgtttatcatcttttgagaaaaaagttctgtcatacccttctctccacaaaaaagagactgagagggagatcaagtgaaagggtgcaagcgaacttagtgactccttgaggtgtttgtcagttttggcttttttcttctttgttgtattctttatgtattgtcttgatgtacttaatattacctgagtttgaaatggatgaagacagctgctaccattaaggaccaaattttatgctaccactaaacaaaaatacccactcagtctgtgttaaattgtatgtctttttaaaggtatttaaagattcaactaagctttaaagagggctgagcagctcaggaagcctgtaatgtgggcataactctttggacctgatcttgatgcttctgctgctctgttagcctctgaagagcaatatctaatttattattactgtaattttttaaaaggctttaaagtgcctcaggggtcccctgaaactaattttctatttctgggattccctggattcattatatgagatggtgacatgattagaggaattcttttttagtatgaaaattgtcctttttcttcttcagtacttgcctccttgctggcattgaattaacacagggacaaaatttggttaattttttatttctaactctcccaacaaacccctgttgcccagtatttgtttggtggcctttaaccacctgagggaaaaaatgagcttattcaagctgccaatatttatctatgggctgtagcagtacactgaattgtactgtgccagggatattgagatgctctgggggtgtattgtatacctgccagttttcttcatttctgaattgagttttcttttcttgatgttggtttccttcatatcacctcaaggtttagatttgtgaaggaataagcatgatggaaataatagtcttgaaaggagatatgttgtatataatcaggaggaagaggaaggaaggacttacccattttgatattttgctgtaggtggccagttttgtttctcatagggaaatctgacccacctgtcatgttggctcctaaggaactgctgttgtaagcggctcatcaagagttgaacttcacgtagccttgttgggaatatggaaaaggaagaaagccacaggactgcccattcagtcttgggaagattgggatgattctgcacaagcaaaaatgactgaagtttat

SEQ ID NO: 2257 - DNA, 1033 bp, Homo sapiens
ttgttttttttaatggcagaggtagttgaggctttattttggaaaaaacaaaaaacaaattgttttatagctggagtcatgggccaggggggtaccccaggcaataaactccctccatgagtgggctgagagctaggactgagcctctcttaggtgaggctatgttcacttctgttccctatgctcccctgcacagtggcctcttccacaggctctggggcatccacaggaagggatgggctgggaggggctgccatggccatttacttgggcaggacatcagaggacttggacaccagcttcccatctcgcgtctctattttctttacaactacggcacctggaggaaccctggagaagctggtgcggctgaaggagctagagcccctgccagagccaaagctggagcctagccatagatgaggccagggcttgtgaggccccataggccaagctcagtgcacctgagcagccattggtggtctttatatatatacttatgttcggcatcccagactccagcctgttcttgttgccctccagcagcttcatgtaggtggcaacctctgtgtccagggccagcttgacattcctcagctcctagtatgcctgcttgggggtggtgtcttttaaaaaaaaaaattatttttaaatttttatttatttttttgagactgggttataagactagctaatttttgtatttttgttagaggactttgctgtgttgcccaggctggtctcgaactcctggcctcaaacaatccatctgcctcggcctcccaaggtactgggattaacagaggtgagccactgcagccagccgcattgctgtccttaatggcggctcccacgctgcttggcattcgtgatggcagcctccagggaagtcttctggcctttgaggctctcagtctcagcctggagccagctgatgttctggttcatttcagagatttttgtctttgtgcgacacatcatcttcatgcttcccagccagtgtctgcagttcctcgtacttgatctggtgtgt

SEQ ID NO: 2258 - DNA, 1069 bp, Homo sapiens
aaaaacagtgagggcttgcgtatctttttgggtgcttatacctagccacttaatttctatgggttattaatatttattacttcactcaacaaatatgtaagagcctacatatgttaggtagcctatgaggcactgagaatatggtaatgagcgacacacagtctgattttatggagtatacagagtagtgagtcagtagatgctcttgcccatcttagtcaaataatcacactaattcatggtaaacctacactatggcaagtgctacagaaaagagatacatgaagcagggagtgggtgggatttagagtgttagaggtcaagaaaatgttcttttgaggaagtgaaatttcagccaaaagctgaaagatagataattaagtagtcaatcagagagtttgaggttgattgaacaccatgtgtaaaggcctgggtaggaggaagcttgatgtgactaggttagaattttgtgaaataattgttggagagggaggaagagtgagcagatgagagaaatgtagaattgctgggcagttagaggttgatgatgagcctggtaagaatcacagtagggctaacctgacctgttacttttctccagctgcatggggtgtaagttattagcttatatagtcaaaagctaattagtaatttagaagctctctttctctatagctttgatgactgctgcttctgagctcattctgtcttacactaagacttcccttagctgggtgtggtggctcaagcctgtaattccagcactttgggaggctgaggtgggtggatcacctgacttcaggagttcaagaccagcctggccaacataagtgaaacgccgtctctactaaaaatacaaaaaattagctgggcgtggtggcgggcgcctataatcctagctagtagggaggctgaggcaggagaattgcctgagtccgggaggcagagattgcagtgagctgagattgtgccatggcactccagcctgggcaataatagcaaaactccgtctccaaaaaaaaaagactcccctccacccccactttccaattacaatgtgaaacttcag

SEQ ID NO: 2259 - DNA, 1027 bp, Homo sapiens
aacatgtaattccataatcctatttcatagccagtttatgtatcatttcccccagttatctcaaaaataccttgtatttttgtcttacttgaattaggatccaaagtccacacattgcctttggttgatatgtctcataagtgtctttaatctataaaacttaactttccttttgttttcatgtcatttacgtgttgaagaaatgggtcatttgttctgtagaatttcccacgctctagagttggcagattgtatccttgtgattttgtttaatgtgtttctttaccctctctatttttggtaaactggtagtgcttgaataaattcaagtttaaattttttgccaagaaagctttataggtaatgctttgtacttctgtttaatcacatcagagtcatgtaaggtctgcctgtctattttagtcagtcatgttaataatctgtgggctcaggtggtatcagtctgatccatctgttacacaggtcactcaagaaccttttacctaatggctttagccatctcttatctgaatgccaatttgtctaaccctttgcttgattctagaccttctaaatactgctctttaactattaggtatgtataggaaactggctgtactggagtctggagtctccaaaatggtggtctgtaagagataggtaaataaactggacagactgaacatagccatttccaaataatgaaactttttccctctccactactacataaagcccttttgtgagcttcatattaacattgccctttgaagaaagcccaagttagtaatctttttagattgaccatctttttttcttctcaggttgcccaggctggagtgcagtggcactatctcagctcactgcagcctggacctctcgggctcaggtgattctcccacctcagcctcccgagtagctgggattataggcacatgccaccatgcctggctaattttttgtatttttagtagagacagggttttgctgtgttgctcaggctgatcttgagctcctggactcaagc

SEQ ID NO: 2260 - DNA, 1080 bp, Homo sapiens
aatttaacatgccatataaagaatattttgttggttttgttttgttttgtttgagacaggatctctctgttgctcaggctagagtgcagtggcaagatctcggctcactgcaacctccgcctccgtggcacaagcagtcctcccacctcagcctcctcagtagctgggactacaggagtatgccaccacacctggctagttttttgtatatttttttgtaggtacaggttttctgcttgttgcttaggctggtcttgaactccaggactcaagcgatcccccttcttcggcctcccaaagtgttgggatgacaggcgtgagccaccatgcgtggcccatttttattttttaacttgtcgttttgaaaaaatttcagacttaataaagttgcaaaagtattgcatagagtttctctataccctttatccagagtccccaaatggtaacatcttacataataatagtatgatgatcaaaaccagaaaattgccccaagtaattctgattggttatctgttctgacttgcaattgcattggtgcttgtggatggccatctctgttgatttttgtgatttgggttgcttgtgttttatttgaaaggacaaatgagagaagtgcttttcatataattttatacctttgcaaatgggttaaacttttcattttggtcaagaagatgccattgtttaaaatggtagttcttttttttttttttttttgagatggagtctcgctctgtcgcctaggctggagtgcagtggcatgattttggctcactgcagcctccacctcccgggttcacgcagttctcctgcctcagcctcctgagtagctgggactacaggcgcccgccatcatgcctggctaattttttatatttttagtagagacggggtttcaccgtgttagccaggatggtctcgatctcctgacctcgtgatctgcccgccttggcctcctaaagtactgggattacaggcgtgagccactgcacccagcctaaaatggtagttctttctaaattgtctctccaaattttcccatgtatacaaatgaaataaatatgactaactttgtgt

SEQ ID NO: 2261 - DNA, 1364 bp, Homo sapiens
cttgtaactgttttaacctaagtaaggtagtaaggctttggaaatataaatgacagtaataggattgctttattaaagaattgctcctggcctgtgcggtggctcatgcctgtaatcccagcactttgggaggccgaggcgggtggatcacaaagtcaggagtttgagaccagcctggccaagatgataaaatcctgtctctactaaaaatacaaaaattagtcaggcgtgcgcctataatcctagctacttgggaggctgaggcaggagaatcacttgagccagggaggtagaggttttagtgagccgagattgcgccactgctctccagccagggtgacagagcaagactccgtctcaaacaaacaaaaaaattgctccatctgcattatatgttagtccaacttcgctttgaagaccactgtggtcagaaaatgctgtctctcaaactttttgttgtctccgtttgtccacaaaaatgtttctggaaataatgttttttataattagaattttgaaaatgtttgcttttttcaatagaaccgcattgacagatcagttgtaggatctgtatccttcctctagcagcctttatcagatggtgatgatattttccatattttatctctgaacctggtagtggttggtgaacctgacccacagtagacttattttgggtctatctcattcacatagcctcaaataatgaatagtccagattattaaattgtttgcagcttgatcttttcgtgtagccaagtttttgtcttttgttctacttgaaaaatttctttgtaagtccttggaatgcatttctcttttagattaatgtaatatctaagaatttctctgtactgtgttgttttccttggttctttttattggccttgagaaaaactttatttgctgctgcttcttaggaaatgtttatagtaactgggaaaaataagacaatgaaaaaaattaatttatatacaggtgatggtaatgggaatttaaaccataaaattatccttgacacttagaatgtcgctttagatgaagatgctattgttttatgaagcaaacggggaaaaatccagatttcaagatcccataaccctgtatgacttaacacttgaaagttgaaattaaatgtaaaaagccatacactcttttccttttgtttgtgagttaggcgaatttggtaatatataggaagagatgacaaaaatagactccattatgtcctgcttggaaccagttttcatataaaaatttaaaagcttgatatggaagaacatttttagctatttttcactgttttttttcccgattatattttggtaatatattttggatatggcctgtcttggtctttgtca

SEQ ID NO: 2262 - DNA, 1042 bp, Homo sapiens
ttagagtgtcacctgtagaagggaatttagggaatagattctatttacttgagcaactacaagtccttaccttttaaactcttcagtactgtttcttaggtgttatacctgatttagtgttaaaagagaaaagtccatgcctgacaccattatatccatccattagtttatccacagtaggtgtcaagtagatatatgttgaatgaatacatgtccactgaataaaggcaagatgttctttggcgatgtagtgtgacgacattgagttttgggttcatttgtgttgtttcaacatctctgataaacctctgaatacagaaactcatgtttgttttttttctgttaggatgtgggtactgccattgtttcagatactacagatgacttgtggtttttgaatgagtcagtatcagagcagttaggtgttggaataaaagttgaagctgctgatactgaacaaacaagtgaagaagtagggaaagtaagtgacaaaaaggtatgttgtggaaaaattccatgttgattctgtttgtgtgctcatagtatcatctgttgagatttctttgtatctgtttttacaacagattgctcacataatcccctttttaactttaattaatttttcaatccaattttaagattcacattaagtaatgttaaccagggctgccttaaaagcccctacttagtcaaaagcagtaagctactcttttttcccctgattatagcaacaagctaccttttctctccctttgctaacaaggtaaggtgctaatcaagcttgtccaacccacagcctgtggaccacatgcggcccagaacaactttgaatcaacacaaattcataaacttttaaaaaacattatgagttttcttgcgattttttttctccttttagctcatcagttatcattagtgttagtgtattttatgtgtggcccaagacaattcttccagtgtgacccagggaagccaaaaggttggacacccctgttgtaaatgaacagcagtctgtaggagaaaacttatttcttggaaatct

SEQ ID NO: 2263 - DNA, 1091 bp, Homo sapiens
tttttttttttttttttttttttttttttggaggatagggagtatggctgttgtgaaaagggaggtaaagagaaatggtagatctgaagaggcctcatcagagcacatattttaggacaacacatatggaaattggacatctttaagttggtttccatagagctatgcatgtatccttacccccatgggaaaatgttggtgtgttctcaagggtatgcatgtgtcattttgaagaccaaggccctagaattgtcaaacttaaggatcataaaaatcatgagggttgcttgttaaaaatgtccaaacgtgcagagactgatctttgagatctggaccaggaatttgcatttgaacaagtgttcctggaatctctatgcaagttttatacagaacatacttttggaatccttgccctagacaggggtgtccaatcttttggcttccctggtccacaatggaagaagaattgtcttggaccacacataaaatacactaacactaacaatagctgatgagctaaaaaaaaaaaaaaaaaaaatcgtggaccgggcgtagtggctcacgcctgtaatcccaacactttgggagatcacctaggtcgggagtttgagaccagcctgaccgacatggagaaaccccatttttactaaaaatacaaaaaattagctgggcatggtggtgcatgcctgtagtcccagctactcaggaggctgaggcaggagaatcgcttgaacctgagagggggagattgcggtgagctgagattgcgccattgcaccccagcctgggcaacaatagcgaaactgtctcagaaaaaagaaaaaaaaaatcgcaaaaagaaaaatctcataatgtcgttgttggtttttttttttttttttgagacagtctcactctgttgcccaggctggagtgcaatggcatgatctctgctcaccgcaacctctgcctcccgggttcaggtgattctcctgcctcagcctcccagatagctgggactacaggcacataccaccatgcctggctaatttttgtatttttagtagagatgggggtttcactgtgttggccaggctggtctcgaactcctg

SEQ ID NO: 2264 - DNA, 1034 bp, Homo sapiens
ttttttccttgccactgcggtacagattttttttactcactgccactaaactaaagcaaggcatagtttatatgtgaagtgttcagagtttactgctataaggaaacttccaaatactgacatttaccttttagctgtagttattgggaccatgtgctctggttttctggagactgccaaattgctcccatttttctgcatcccacctggtttctttctgcatgtcccctttcactttcaaacctcttcatttggatgttaaattatatggtcacctagttataggtaagccttgttcgagttgatatcttgattgtgaggaaggatctgtgtcattggagcttgtttctgctgcaacgtgctgtagactatgaataatgaaatcacaccacattaccatcagatttcttgttttagttgtcaaattaatatttatgattgttatcttgggcgaaaagttcagagcagagatgacaaatcattagaacaacgatgaatttcagtattacggctaaaaagttcttctgtctgaatattaactcactctccttccagtgtacttcacagtaattggtatgcttttttatttaatgcttaaatcaaactttataaaaatcttagaccagatctttaatatggtatgccatttccccagtctaccaatggaatagtatgggtttctaatcctaggcttgtacaatggattggagttgagccatgccagcctccacactgccactaacttctgtaatgtaagattgagtcactgccaagcatttgaaatatgcagttgtgttttaattataatttatgtatagttagatgtatgtagtgcattgtgtggtattatttggtttgtaagaatttatttttaagggtcaaggtcatttgtaacattttgtgtgtgtcaattcaatgcaatgttggctgccttttgaagtctttgatatattggtgaatattcttctgatctataatacaaagctatgtaatgttacctcttgactcgcttttgaaaggaagacaattgttaa

SEQ ID NO: 2265 - DNA, 1260 bp, Homo sapiens
gcttgagcctgggaggtggaggttgcagtgagctgagatggcaccactgcaatccaaggtgggtgacagagacgctgtctcaaagaaattgaggtcaggcttccttcttacagaattatttttttctctgtagtttgcctcattttttcactttcttttcaatgagaatcgaagtgtttcttttgggtttttttttcccccttttaaaatcaacaggaaatgtttcaaaggagggatgaaatgcttcttggcttcctcagcacttggcaaggtagacctcatagcaaccttgaatatgactttctttagtctctagctatgcactattaagtgcctcttgggtagaggtagagttaagtattgagtgccagtcttgacgtccgtatgcctcagtttttctcatatataaaaagcagtatacatacctacccttttctacctcatcatttgttgtagggattaaatccgggagagcaattctgaagcctataaatttccttgaagagatctaagaacctattatgctcttggtgtaccaagctctggggtatatattcagaatacctcatgttctggaagctgagcactagctcccctttattgcctgcctggcagagcctgtttgattactgcaggcccttttacccatgcttctagtttaggtattctttctttgatatgaggctcttgaccagaaaagagttctttctctaggtgttctgagagaagtttgtaaatttggatagtacattctatcctgataaaaccaccttgctgtggtcttgatgtacaaaaaaaaattttttttttgagacagagtcttactctgtcacccaggctggaatgcagtggcgcaatcttggttcactgcaacccccgcctcctgggttcaagcgatcctcctgcctcaacctctcaagtagctgggactacaggcgtgcaccaccacacctggctaattttgtatttttagtagagacagggtttcaccatgttggccaggctggtcttgaactcctgacctcaggcgatctgcccgccttggcctcccaaagtactgggattacaggcgtgagcaactgctcctggcccaaaacatctctttctacatacacttgagtaggtggcataaaatgcactgtcaatatatagaaaacatgaaattttccaaatatttccgatcagagaatcacaagagcagcaaatgtggtttcatcaagtgggaagaaagcagcaatttaaaataactttttgggagac

SEQ ID NO: 2266 - DNA, 1029 bp, Homo sapiens
gaggtccctattaggcagagatcgaagatagcagtgaggaaggggaattctcactggggtgaggtcagtgagtaggtgaaagggtgtgagatccagaagtcagcatcgtccttggtcacaaagagtcacctctgggaggcagaaatgaattcttactttgtttttattttctatgggggaagaaaccaaaggtgcaagtgtttattgagagcaggaggggaggtgggaagggctggcttgaggagggcagtaaagctttggcttggggcagagcaaggctctgagcaggaactcacgggtgacctgtctggtgttgtagaggctggtaatttgtgctggcagcaccctagtggttgcgatttgttttctctctagtggtcctagccagagggtaggaacagagctgaacgattatcaggctaatccagggttgggggttgctgggagggcatgtaagggtgacaaaggagttgggggtttgtttgggtcagagaatgctcaaaaggttggaccttgaaacctcggctagcagagaaggaggtggggataggagaaggctgatgaatgtggagaaaaggagatgggggtactgagggaatgagggagcaggtacattaagaataaagaggagtgagagagacaggagagggcattggagtttacaatttggggggtgggatagggaagacaaaggtcagagtatactcatagagcatgacagacaaggaatgaatggaaagataatttgcagtggcaagagctgagaggctaggttgtgggatgggctgtccacatgacatggagatgcccccttggacagtggtcaggaaggagggcagcaggtctctttgatgactggagggtgggggagaagagtgcaatggcagggacctcgaaggccaggctgaagcaacactgagtacagtagaatgctggtcccgtctccagagggcacaaaatgagggaggaagaggaagaaaaaatcactgcgattaatgagggctccggggcaagtggagctgcagtaag

SEQ ID NO: 2267 - DNA, 1061 bp, Homo sapiens
gcctggcatataataaataatgtataagtattaaaaagaaagtagaaaaaggaacaaaagaacagaaggaaagaaggacctcttagctatactttctttcttactgtcctaagtcaaagcccacaattccactcctaatttacaaggccccaactggacttcttttcttttcttttcttttctttagccagagtttcactcttgttgcccaggctggagtgcaatggcgcaatctcggcccatcgcaacctccgcctcccgggtaaaagcgattctcctgcctcagcctcctgagtagctgggattacaggcattcgccaccacgcctggctaattttgtatgtttagtagagatggggtttttccatgttggtcaggctggtcttcagctcccgacctcaggtgatcctctgccttggcctcccaaagtgccaggattacaggcatgagccactgtgcctggccaactcctttcatttcatgaaggtttcaggctctcatttgccttatagtctttgtctactgtattccctgtctggcacaattctctcccttgtcccccaactctttgcctagctaactcactgtttttttgtttgtttgttttgtttttaaatttaagagtttttttgaggtataatatgcaataaacagcacagatttaaggtgtacaatttgatgttttgacatgtgtatacatcagtaaaacatcactacaatcaagataaagagtatatccatgacccctgtgtttcttcctgcttcttttaatctttctctctcaacccatgcgttgggccacctgccgtctgtcactacagatgtttttcatttctagaatttcatatgaatggaatcatgtagtatatatcttttttgtctgatttctctcattcagcatacttattctgagatttatccatgttatgtgtatcaacaggttgttcctttctgctgttgagtagtgttccatcatatggatgcacctgtttgtttattcattcacctgttgatggacatttcagttgtttccagtttggggctattacaaataaggctgc

SEQ ID NO: 2268 - DNA, 1066 bp, Homo sapiens
atctcctgctctgaaatccattcaataatttgtcctccgggagaattatcttttttcttgagataggttctcactctgtagcccaggctagactgcagtggtacaatcacagctcactgcagcctcaaccttctgggtttcagtgatcctcccacctcagctcctgagttgctgggaccccaggtgtgtggctaagttttttatttttaaatttttttttgaagagatggagtctcattatgttgcccaggctggtctcaaacttctgggctcaagtgagcctcctgcctcagcctcccaaagtattgggattataggtgtgagtcaccacacttggccaagaactatctttccaattgtctttctcttaggacagaatgcctagctagactatctctaagccagtctcctactgtcccacttactagggctaagagagggtagggaaggcaactgcccagggtgcctacccagttttctgtggcacctagaaactttactatcagacctcacatccaccaacctgcctccccacagtgaaacaaaacagagcaaaacaaaacaaacaacaaccaaactacatatgtaatctcaaagatgaaaggaaacagagtacctacccatctcccatttaaaaaacaaaaacatgaaagctgttcttaagctcctattcaaatattttcactctgtctacagaggatttaggatggggaaatcaagtctggacgtgataagtagcagagaggtaaatggaaatcatcctcccaaaccccaggattgaaaatgtgctgaagaacccacaaaaatagtaattcacacagagcagttaaaattggtgctcacatcttggatttccatagtgctttcttctgagaagtcaaaacacgcatccacctttgacctcatatgtgtctgcatttcagaaaatgctgaggagtctccccattttgtaagtggagaaaacggggtccagaggataagccctctcccaaagagaggaagagctgggattagcacccaagggtaccgattccaccaggttctccccaatcacccaattatctcc

SEQ ID NO: 2269 - DNA, 1043 bp, Homo sapiens
tggacctagggattccaggggtttcatcagagagaccggaaggaaggtcactgtggcaagggagtagagaggagggaagagtgccaggacctggggagatgaaagccccagctgggtggaaaacagcccttggaaagggcatggagttggaatgaggctggaaaaaaactagtggaaagaagctcaatgaggggaattcagtgatttcctggccccatgagaccccagggagaggacaaaggttggcacctgatgaaaggcaggagaacccagggctcacattggtcctaactaccccccactcccccaaccccctcaatgctgggtggctctgggcaggatgtcaaccttctccccgctctacaatgaggagtgtgcctctctccttgcatgaggacaattaaagtcctctctggggaagaacttaggagaaaggaccatagaagtccaagtgccactgacccttgatgatctgtggcacagaactgcccctaaccctggtatattctggaatgtattactcatctgatagtcactgggttgtctttttggatcttttttttgtttttgaagcattgggtttaccttttgaattccttttagctcagcctgatgtttaaataagctggcatttactgtggatgtcagacattctgtgtaacttctactcacccttcagctttcagcttaaacattactgccttaggaagccctgcctgattcccagatggggtctggttccttgttatattctctaacaagcaccaggttcctcttcattatagcactcatcgtggtttgcaattatacattcatttttaaactgatgtttgtagcagaccattgcaaggctctggcctcaactcttttctctcctagctctctgcaccttcttcccatgggcttttattgaatctagaggttcccatgatgttaatgacactccagcctatatctctagttcatatctctctccagacctgaggtatttataattgcctatttcatatgttataagcttctcaaacttccaaattatgata

SEQ ID NO: 2270 - DNA, 1126 bp, Homo sapiens
tttaaatatgcttatttgccattcatgtttctctggtaaaatgactgttcatatctattgcccatttttgtttagagctgtcttcttattgaattttaagggtttctatatattgtggagtctaaaattttgtcagttttatttaaattataaatatttctcttcatttgtgtcttgtgtttttatttttttaatggccttttgatgggttgaagtcttaataatatagttgaatttattattatattcttttataattagtgatgttttcttgcttaaaaaatcttaacaaatctagtccaaggtcataaatatatatatatatatgaatttttagtaaaaaatagcttaatctctaccaaactttaaaaatttttaaaaagatactttttattttatgtatttattatttttaaatttattattatttttgtagagatagggtctcactattttgcccaggctgctcttgaactcctggactcaagctttttcccttatcttcgaattagagaaaacaatagtgcctacctcatattagtgttttgccctctgcaatacgataatgaaggcaaaagaactttttgtgcacagaggactgtagaaaaaaaaatgattaattcatgttcagtctttcatctctgaccatttgactctgacaggtgccatccagattccaacagtgacttttagctctgagaagtccaatactacagccctggctgagttcggaaaatacattcataaaggtcagctgcaaatcaggggcaaggggtgggtggtagaaatagcaatggagacacagttcttttacaaagtgataaagaagtttattttgtgactgatcagaggacaatctaattcccatgggcagagtagagactgtagatttgctcttggaaaaactaagccaccatatgtagggcaacgattgagagttcatccagccattgcattagagtataaactctctcaaactttgccctacatatgtgtcattcaataaatgttaaatcatcaaaaagtagaactaggatttccttctacttgtgcaactgcccagaactatgttccatgctcctcccacccctacctccttacacacccaaacacaccggtacatata

SEQ ID NO: 2271 - DNA, 1097 bp, Homo sapiens
ataacacatacactagatgtgtggctttttaaaaagaaaaatgtctctgaactttttaatataatatttaaatataatttggttaatgaggcctactaatttaatataataatttaatataatttggttaatgaggcctcctatggtcaaaatttaatgcatccctcatctgcatagccctttaacacatacttgtgatagcatgttataggtctgaccaagcctgagcttgagatattgaccatcttagtagtgagtcttttttttttgagattgagttttgctcttttcacccacgctggagtgcaatgaacttaaactataccctagaacaaatggacttaactgatatttacagactattctacctaacaattcagaatatacatttttttcatcagcacatggaacattctccaagatagaccatttgatcggccacaaaacaaatctcaataaatttaagaaaatcaaaattatatcaagtactctctcagactacagtggaataaaattggaaattaactctaaaaggaaccctcaagactatacaaatatgtggaaattaaataatctgctcctgaatgatctttggatcaacaatgaaataaaaatggaaattaaaaaattctttgaactgaatgataatagtgacagaacatgttaaaacctctgggatacagcaaaagtggtgctaagacgacatttcatagcattaaatgcctacatcaaaaagtctgaaagaacacaaatagagaacctaagatcacacctcaaggaactagagaaacaagaacaaaccaaacccaaaaccagcagaagaaaataaataacaaaagtcagagcagaactaaatgaaattgaaacaaacaaacaaaaaacaatacaaaagataaatgaagcaaaaagatggttctttgaaaagataaaaaaaattgatagaccattagtgagattaaccaagaacagagagaagatccaaataagctcaattagaaatgaaacagaagatattacaactgataccatagaaatacaaaagatcatttaaggctactatgaacacctttatgcacacaaactagaaaatctagagg

SEQ ID NO: 2272 - DNA, 1786 bp, Homo sapiens
aagaagaattggtaccaatcttactgaaattattccataagatagagaaagagggaatcctccctaagtcattctatgaagccagtatcaccctaatagcaaaacaagaaaaggacataataaaacaagaaaactacagaccaatatccctggtgaacatagatgtgaaaatcctcaacaaaatactagctaactgaacccaacagcatatcaaaaagataatacaccatgatcaagtggatttcatgccaggaatgcatggatggtttaacatacacaagtcaataaatgtaatacatcacataagcagaattaagaacagaaattatatgatcatctcaatggatgcagaaaaagcatttgccaaaatccagcatcactttatgatgaaagccaccagcaaagtcagcatagaagggacataactcaaagtaataaaagccatctatgacaaacacacagctgacattatagtgaatggagaaaagttgaaagcattccctctgagaactggaacaagaaaaggattcttactttcaccactgctactcaatattgtactggaagtcctagccagagaaatcggacaagagaaagaaataaaggacatccaaattgcaaaagagaaagtcaaactgtcactattcactgatataatgacatgatatgatgacataattgtatacctagaagaccctaaagacccatccagaaagctcctagatgtggtaaatgaattcagtaaagtttcaggatacaaaaacaatgtacacaaatcaggagtacggctatacaacaccaacaaccaaactaataatcaaatcaagaactcaaccccttttacaacagctgcaacaaaattaaatacttaggaatatacctaaccaaggaggtggaagatctctacaaggaaaactacaaaaaactgctgaaagaaatcatagatgatacaaacaaatggaaacatatcctatgctcacaaatgggtagaaacaatattgtgaaaatgagcatactaccaaaagcaatctacaaattcaatgcaattcccatcaaaataccatcatcattcttcacagaactaaaacaaatattaaaattcatatggaaccaaaaatgagcctgcatagccaaagcaagactaaacaaaaagaagaaatctggaggcatcacattaccagacttcaaactatacaacaatgctggtagaagaggtgaggcaggactagcttgtctgtcataatgtaaaagagtcttggaagatgtctggggtccagggtctaaaacccttcgtggcctttggaacaccaagctctatgccaaagggtggaaggctgccctgacatgccaaaatctaagcccagggcataaaaccccttgtggcttgtatggaatccggggctcagggcataaacccccttgtagcctctggaatgtgcacagacttgttggttccttgcttcttacttgtaaacatgtcctccattatctcaagcagcagagcatattctatatgcatcaaagaaaatgctaaaccatcacagctacgcttaatgcaccactacctttctacccccacgtcctcatgccctcacctctttacccccacatctgcacgtcctcaccatctgcttctttgtttggtctccaataaatagtgtgggctcccagagctcagggccttcgcagcctccaatctagtgttggccccctggacccaatttatgcacttttaacttgtcttttctcatttctttcaccccaccggactttgtagcctgatggc

SEQ ID NO: 2273 - DNA, 1051 bp, Homo sapiens
gctgcccttaacatttttcccttcatttcaactttggtgaatctgacaattatgtgtcttggagttgctcttctcgaggagtatctttgtggcgttctctgtatttcctgaatctgaacgttggcctgccttgctagattggggaagttctcctggataatatcctgcagagtgttttccaacttggttccattctccgcctcactttcaggtacaccaatcagacatagatttggtcttttcacatagtcccatatttcttggaggctttgctcatttctttttattcttttttctctaaacttcccttctcgcttcctttcattcatttcatcttccattgctgataccctttcttccagttgatcgcatcggctcctgaggcttctgcattcttcacgtagttctcgagccttggttttcagctccatcagctcctttaagcacttctctgtattggttattctagttatacattcttctaaatttttttcaaagttttcaacttctttgcctttggtttgaatgtgctcctgtagctcagagtaatttgatcgtctgaagccttcttctctcagctcgtcaaaatcattctccatccagctttgttccgttgctggtgaggaactgcgttcctttggacgaggagaggcgctctgcattttagagtttccagtttttctgttctgttttttccccatctttgtggttttctctacttttggtctttgatgatggtgatgtacagatgggttttcggtgtggatgtcctttctgtttgttagttttccttctaacagacaggaccctcagctgcaggtctgttggaataccctgccgtgtgaggtgtcagtgtgcccctgctggggggtgcctcccagttaggctgctcgggggtcaggggtcagggacccacttgaggaggcagtctgcccgttctcagatctccagctgcgtgctgggagaaccactgctctcttcaaagctcagatggaaatgcagaaatcacccgtcttctgcgtcgctcacgctgggagctgtagaccggagc

SEQ ID NO: 2274 - DNA, 1086 bp, Homo sapiens
gagaactcctggaagaaacagccaacaggatctagtgctggttttttaagcatagactccttttttaaaataaaaatcttgcatagagcctcaatatatgaaacagatcaaagcagtatttttattggtataaatctgcttttaaagtacaaatttatagagtacttattatactgtcagtcaatgagaacaatgaggctgttttcatgaactaaaaatattgagatcaggattatgaatcagttatagttttatattcatttcagcatctggttttggtttaggtagtcagtccaatatcaagaaaattctgattagcatagataagttattgtaatcttgagctttaaattgatttagatggaaaaaagaagatatttttgttttaaagttgagtcactatcatcacctagcagctattccccttcataaatattaattggataagccccaacatgtataataggcatcgcaacaactgatgatgagatggtatgatattaagcatgttgattttcgctacccaaccacggtctaacatgaacccagcctaggcccttgagccttctatggcatgtgattgaaccttgctgctgtgtgtcaagttataggctcacctgtacagctttattggaggaggcacacacaggcttgaatgaaaaaataaacctatgcaaagctacatgtattctaattaatagcatattgttcagaagttccaaggcatacagtgattctttcttccagggtttacataaaacaatgctagcagcctgcgagacattgcagtggtatctaatgcagggagactgggtcctgggtctcttgctcatgtcagtgagggttgctcatttgaatggatgtgtcaccgttttttaaattgaaatgtgattttctgctaattccagagtatctcagaacacagtttaaaagctcctgctctctgaaaccaatactaatactgtaactatcgcacaaaatgctgtaaggatggaaataaatacatgtgaaaagtacttatagcaccttgcaagttcttttttcttttttttcttttgttttgagatggagtcttgctctcaccca

SEQ ID NO: 2275 - DNA, 1164 bp, Homo sapiens
aggtctctcaaaactttctgtgggatgatgatgatgacaaagtaataatagtaacctttcgtaaaattcacactgtgaatacctcccactgtagtaggccctagatgtgtattttctctgaacctttcatctatttttgcaaagtttttttcctaaactatttatgaaagtataaaatacttagagaaagtacacatattataaagtgtacagctcaatgaatttttacaaactgaatacagctatgtaatcagcacccagatgaagaaagaatgttactagtatcccatgaaccctccttctctccacttcaagtcattactctctgaagggtaaccattatcctgacttctaacacaatataagtatttgcccatttaaaaatttgtttgtgtaaatggaatcagataatttttttcaacaacttgaatatgtaattcacttgccttctggcctccattatttctgatgagaaatcagctgtggttcttagattcttattattgcttacttgtatgtaatatatcatctttttgtttgtttgtttgtttgttttaaagagatggagtctctgtcccccaggctggagtcctgttgcatgattacagctcactgtagactcaaacttctgtgctcaagcaaacccagtccttccatcttggcctcccaaagtggtgggattacaggcgtgagctgccatgcccagcccttctttatttggctgcttccaatatttattcattatctttggtttttagttctttgattatcataagagtgtaagcgtggttttcattgtattcctttggcttggttaaatataatatccagacaatccctgatctgtcaaatatctaatttgtagaaattgtaggaaaaatatcaattttttcctcaatttgagaaaaatttttggcaaatatttttttctgtcccatctctccttcctgttttgctttgttatcaattgcatgtatgttagactacttgattcagtcccacagcttgttaatattctgtccatttttttcaaatttttgttttctgtatgctttagtttagatgatttctaaagtttaccaatttggctgggcatggtggctcacacctgtaatcccagcactttgggaggccaaggtgggtggatcacttgaggtcaagagt

SEQ ID NO: 2276 - DNA, 1044 bp, Homo sapiens
ggcacccacactatcatgtagcccccttgctggcccttcagagctacagagggtccttgttccccatcttgtctcttccatgcggttgtgtctgctctattcattggccaggccctgactcagcaccaccactgcctttgggttgaacaccccagtgagtcacacagcgtgttcatgtgcagcctggaaactctgctaattactctcgagttagtcccttcagggctaccagtcattgtctcccctcagagaccaatacctgccctcaacatgagcctcgtctgtgcccccagagctgggagcatgacagtggtgagcaaatggggatgaggggaaaacagggagggctgggggactatatgtgacagtacagtggggagaaacaatagaataagcatccatgcagggttgctgcttgcagagatggcagccactattgaagacagcataggaattgcaccaattcaaattattcattttgttttgcttttattgggtttttttctgattgaaacgagattgatttgctcatcaaagtgttaacattaaaaaaatgcagcattaataaagtgttttctaaaataataaatagaatgcaggacacaaatgataaagcagaccacctccacaggaagacagcagctgacaggtgtgcacttccggacaggggtagcaatagttggcaggtagctcccgatgcagactctgcctgggcccagaccatcaggaccctttttcttcattgctgtgagtcctggatgtatgtgtactttatttctggctactgtttgttcttggattggacacattgtcaatctcaaggaaccaaaaaagctaatatctcagtttctgtgggtctggaatccaagtacagcttagcaggggccctctggagaggtaattgcatatcattaaaaagttaaaaatccagaaaagtgcatgctaaaaagtaagtttcccaacaccaatcctggcgccccaaaaagcctctgttcctaaccacaatgctgaacctttttatgaagcacaaaagatgagttcaaa

SEQ ID NO: 2277 - DNA, 1028 bp, Homo sapiens
gactgggggacagcactgaaagggtgtgatgactacttgtttatagagttcttgaaaaggtgtcttcactgggacccctctgcccgcttgaccccagctcaagcattaagacacccttggattagcaagtctgtccccagacctctcaccaccatagacaaggtgtcagggaaacgggtagttaatcctgcaagtgctttccagggattgggttctaagctgcctccagttgttggaatagccaataagcttaaagctaacttaatgtcagaaaccaatggtagtatacccctatgcagtgtattgccaaaactgattagctagtggacagagatatgcccagagatgcatatgtgtatatttttatgatcttacaaacctgcaaatggaaaaaatgcaagcccattggtggatgtttttgttagagtagactttttttaaacaagacaaaacatttttatatgattataaaagaattcttcaagggctaattacctaaccagcttgtattggccatctggaatatgcattaaatgactttttataggtcaatgcatctttgttattatcgtcagatgtatttcaactgatgtattatactattggtttaaatctctttctctcaagatagaaggtgtagcaaaagtatcccaactactcctcgcttctagtgtccctcggcatctgttctggaggggtaatttgggatgtggtgttagttgtggctgagagccagtgctaggtcccttgccccactaggccattctctaggctcattctaggtgaaagagctcacagcagactgtggggtgggggagcaccaggaagctgttggtgacctggacaactggtgtccctggttttcagtgactcgctcctcttcccttcagttctctgatgtttggtgttattattttatgttgttattttgcctctgatttgtttcctagtcactcaaagcattttacagaagccttaccactttactaaataaccctgtaaggtactgatttaaaaactgagtcata

SEQ ID NO: 2278 - DNA, 1023 bp, Homo sapiens
aggaagtttgacttatgaccatattagtatgctttattccttggtgtttaagggagttggggcagacaggttagctggctaatgtcattacaatttagtttttgtgacaatctgttaagaagggggcttattgcataatcaaaaaagaacaataaaaaaataaaaatttctactgtgaaactatttcaatctgtagcagctggtcatgttaaaacactttctgttttgcttaattcgtaactaggcataattaaagttaaatgctaaattttaggtagcagctgataaatggttctaagctttcctgacagaatactcctactactttggtgaatcatggaaaactctttctcctttatttttaattatttcttttccatctgttattgatgtcatcaacacggaagttggaaaggtgacaatgattgttctagactgcctctgtaatgctttttctcctctgagaattaaaaatacatacttacaccttgagccaggtagaattgccagaacatgttttcctccgtgtcttcggtctagatgaccaatctgtagaacgctataacttactatgcgtagagcagcggcaggcattcatgctatggaaaacctggagtcagtacaaataaggagtaagaaaaggccagggattggcaaatcaaagaagagttctcttctgccagggattagcctcctagttttaaatatatttttaatatccccattttaacatactccattttcaccttcaacctatccttcctgaagcccaaacttttaaagaatttacttccagacctggccttcagcctaatatgattagggtgtttttctgagtgtctgtcaaattatgctggctaatttcaatgagaaaagattttagagtcacagtgaacccatccataaaaggactaaaagctctctctggtccctgagatccacaacccctgagagaagccagaactacaaatgcatcgtctagactttgaagaagcagggtatgattcttaatatagcccaccc

SEQ ID NO: 2279 - DNA, 1018 bp, Homo sapiens
gacaagaggggaggtcagcgaagggggctggatgggtatttgctgctcctgagaacagtccccaaagttggaggggaacttcaacagtagcttcatgcatttttttaaccactccctcccccttttaagagagtatttgataggcaccttacttactattttttgtacaagaacatgggaattctattatttttatttttattttttttgagacagagtgttgctctgtcgcccaggttagagtgcagtagcacgatcttggctcactgcaagctctgcttcccaggtccacgccattctgcctcagcctcctgagtagctgggactacaggcgcccgtcaccatgcccggctaattttttgtatttttagtagagatggggtttcactgtgttattcaggatggtcttgatctcctgacctcgtgatctgcctgcctcagcctgcctaagtgctgggattacaggtgtgagctaccgcgcccggcctgtattacttctttgataaggacacctagtctcaacccacttgtgtattaattagttgtattccccgggagggttcctcagctgcttgccgcttcactgtgtcatggtgacccttaggtgttagctcaacaaatttaattaaagactgtatcgttgttctctgctgtgcaactctgattaggtgaagcatgttactgctttataaaatatagaatgttgtcgtaacttatctctgtgtatctttccattgcgtggattagagaaaacaaggtcctgtagtttcttttcctttcctttctccagcattcctctctccctaggtcatggaagtgccactgcgatgtggcttcctttgttctggtgaaggggagatgattggagcctctcatgattattctggatgctgttggagggaaatgccagagctcccacatccccacagtacaggcaccatctcctttccaacacacctcatactgtgtacctgtggagggcaagacagttagtgtggctaggtgagaggcagtgtcc

SEQ ID NO: 2280 - DNA, 1046 bp, Homo sapiens
ctccccaaaaatactagtttatttctctaccaactgaatgtgtaagagagtgccttttctccccagatctttgcataaacctgggagttttattttggtcaaacattaaaattttttttttgccagtctggtgaaattatcatcttttttataaacatttctctttgagctacactgagtgtcttccattcagccatctgtgtttctcttgctttgaactgcctgttcttatcgtttggccatttttatattaggttgttgatcttcaacaattgatttgcctgagttaagttagccttttatccatcatgtgttggaaatattttaaagatttgtcatctacagtgcgatttttaggcctcttgactttttgttgagccctaggcttttgtgactgcctgtgacagctctggagagggggccgacaggcacagtggcccgcagtcgagccaggccccatcttctgggcagtgacgcgtggttgttttaaggcttttggtactgggattccccgttgtaagttttagctttgttttgggtagggacttttccccatcatattaatgaacattaataacaaatagagacttgcttttgcctcccaaccaaatgtttgggaatgtgtgcacccacgtgaagggtctgtgtgatatctttatctcatcaaccttctaaggcttttaaaacctgttgttagatttatgtttagatcatggttctaggggagaaccatcgtcactcctcattgagctttgcagaggctctgaaaggaggacatactctcttccccaatcaatgtagaggaacgtcagtagttcagccaagattgctctatctgccacctcttatgcttccaagctgggctaattgagaagtgtgacatcttgctccagcctataagcagctgtctgtaattttgagagatgagaaggattctcccttaaaccattgctgcttttgtggcagcatcttatttctttcctttgcagcacaaatcacagtgtataattaaaactattttctttgagcttgtttttggtgtacct

SEQ ID NO: 2281 - DNA, 1027 bp, Homo sapiens
ccatgggccaccgcccagctcatgtaggtgagcctgggcagcttctgttggcagagcttttgcatttcctgtgtttgtcctgggttctggggcatcagccagctaccccttgtgggcaaaggcagggccacttttgaagtcttccctcagatttccattgtgtggcctggtgggtcagggggagtctttgcaccaaagatgtcctgactttgcccccttgcccatcagccatttgccatcaccccaaacaactcagcttcggggccggtgaggggaggggcctcccccagcacagatgaggagcagctggggtaggctgtctgtgccatggccccccactcccccttcccttggagggagaggtggcaggaatacttcacctttcctctccctcaggggcaggtggtggaggggcgcccagggtcgtctttgtgtatgggggaaggcgctgggtgcctgcagcgcctcccttgtctcagatggtgtgtccagcactcgattgttgtaaactgttgttttgtatgagcgaaattgtctttactaaacagatttaatagttgagagtttttctttctctttcttcctggggctcaggccttaccccccaccgcctctatgtgcagaggggttttgttgggtggtgagggtgtgggttgggggtcctgggagaggagcggagggcctcctgggcgagcaggagccagcacctcattggtgaggacctgggcaggatgtgtgtagggcatccttaaagcaggacagggaggctgcaagggctcaagcccatcttcttttgccaaatgcagaatcaggagccaagctctttttggcatatgattctttgacctacatagccaccaccaggtgctggcacctttagcctgcgaaagccagctggtatagggtccagggaagagggggtgctggtgaatttggttgaaatcctggtaaagataccaggggagcaggttagtgtagtaccggcactctccaggaggcggtgataggggtcaggcagaaaccaaag

SEQ ID NO: 2282 - DNA, 1206 bp, Homo sapiens
ttgtttccaaagaagttggagttaaggacacaatatatttgtacccctagactgaatgggtgagtattccatatgaggatctgggtaatcctctttgcaacccacatttggtcttcagagacactggcattttgaagaaacatatgatatagctgtttggaaataaattcatctatgttactttttttttcttttttttttttttttatgagcaggagatcttaattgacagaaactcattggtggttggagtggccaatgggcacgggaaaaagtatccagtaatcagaagaattgtatctgggttatgtaatcttatgcacattccattgtctttgccaagcccagaagccatgttgtgttcattgttaagaaatttgatagatttacccagcttttctatgtattttgacttattgaaaatatgtaacaactgagtcgggttgcagcactggtggggtagaatcgactttccctgaaggtgacacagatgtcagaattgtgtccagggatttaatttagacccatactgtccaggagactgtctctagttggatctctgtgctgactgactgacagacagactttagtgtctgtgtgctgactgacagactctagtagtgtctatatgttgaccaactggtagaccaggaggatctgtgtgctgattgactctagtaggatctgtttgtcactgacagactgtagtagtgtctgtgtgctgactgatagatagactatagtaaaatttgggtgttgcctgactaacggtctagggtctgtaagctgacagtctgcctgctttctgattgtatccattgaagtgtatgtacattatggtaattctctgtctattaaatgtgtctaacaaaggaaggaattaagcactccacgtgttttctttataggggagttctgtacactatgattttaaatagatatttcttatatagtagtggccaaattctcattattttgtacaagataaaggttatgcatcacttttatggtattttgtgaactcagctaagggaatgcctgttcagagcctggagttgttacctttacttgaagtcatctcatccagtcccctgctttagggcaggacttcagttccactgttcatttctgaagcttctgtgtccccagcttaccctgttctgaaatgttgtattccattggacagggctgctatttttagtcagc

SEQ ID NO: 2283 - DNA, 1011 bp, Homo sapiens
taaggctctcgccgctcaccagcatttggggctcctgctgtgtcggcccccagctgacttggctttaggggtcggcgtggagggttaaagaggccccggctgggtttgcggagcagccaagcctggcaaaatcgaaagggagggctcaaagagactgtatccttaacccccaaaaagctggtctaaaaggatgggaggccagaccgctgaccgttccccactctcgacagagtccagccgtgtggagcacacgatgctgcaaacttgcatgtcatctctttcaggtgtggcatttcaagggggcttgtgtcttgaaaacagcaactgtgaggacacttgatagtcatttccttcagttctgcttttgtctccctaggtgactgtggccttcccccagatgtacctaatgcccagccagctttggaaggccgtacaagttttcccgaggatactgtaataacgtacaaatgtgaagaaagctttgtgaaaattcctggcgagaaggactcagtgatctgccttaagggcagtcaatggtcagatattgaagagttctgcaatcgtaagttcttcatctttttagaaaagttctgggaatggaatgtatcttaaatttatttttatatacctttggagtgactagtaattgatagttctctagcgttactaaaccccagggtataccctgttggcacgtcacactccagctaattgaagacatttaccaccctgagtaggtcctgctgcttcattaagagtttttcttcctaacactgtacctcttgaacgaactagtagagaaaataaacaataggtattgtttagggagtaaacatataaaatatatttggcaattgccttgagacacatagcgtaaatgatatgttttcttaagtattttataaagtaggacttaccaaatacaactctgtggtggcatttttaaaagctctcaatatttacttcaaaatctgttatacttgtacatatttatagggtacatgtgatatt

SEQ ID NO: 2284 - DNA, 1033 bp, Homo sapiens
aggcatttataagcatctcttgttggtaatgctgaatttagaaaaatgatattttgatttctttaaaatataatctttaacatgttttgatcttatttgtaaaaatactttactagttttatttatttaaaagatgttggaattgttttttaagaaatttattgtccagcaccaccacaaattgacaatggaataattcaaggggaacgtgaccattatggatatagacagtctgtaacgtatgcatgtaataaaggattcaccatgattggagagcactctatttattgtactgtgaataatgatgaaggagagtggagtggcccaccacctgaatgcagaggtaatcactttggatagttatatttttgctttattcttaccctcaggtctatatgtgggttgcagacattcaatgaaccccctaagaaaaaaatgtaaaatgtttacatatacatatttgtatttttctgtgggacacaatttttctacagcttctcagaagggtctatggcttgtatacacacacacacacacatactcacacatattatgatgtgtatatataaaataggcctcatatttttggcaaatttgcttacatttgctgttttataccatgttgctttcagtaagttaatataggtactttgtttatacaaagagatataaagtggtttattggagggagaatcttagattgaaggctctagatagtgatcatacctgttgcaacaactgggaaactcttgccatctgttgacttcactgaattaacattcaattcttttctgcctccagaatttctattattatccattctccttcatccttctagacgtttttctttcaatgtctttttatacccagaaggtactctcagaatccttcgaactgctttttaaatatattttaaaagaaatatttagaagatcagtgaagctggactaaacattgcctagtatcaataggtggcgtttaagtagtggtgaataccaacatgactcaagcatttgagtatttacttttataa

SEQ ID NO: 2285 - DNA, 1558 bp, Homo sapiens
agtggcatgatcttggttcactgcaacctccgtctcctgggttcaagtgattctcttgcctcagcctcccaagtagctacgattacaggtgcacaccaccacacccagctaatttttgtatttctagtagagatgaggtttcaccatgttggccaagctagtctcaaactcctgacctcaagtgatccacctgcctcagccttgcaaagtgctgggattacaggcatgagccaccatgcccgcagtatggcccttttaaaaatatttattcttcctatgcatgagcatggaatatttttccatttgtttgtattgtctctgtcttctttgttttgtatttctctatagagatcattcacctccctggttagctgtattcataggtattttatccttttgtggctattgtgaataggattgcattcttgatttggctgtcagcttgacattgttggtgtatagaaatgcttctgatttttgtaccccgaagctttactgatgttgtttaacagttctaaaagcttttgggcagactatggagtattctaggtttaaactcatatcatctgtgaagagagatagtttacttcctctcttcctatatggatgccttttatttccttgcctgattgctgtggctaggatttccagtaccatgttgaataggaatgataataatggacatccttgtcttgtactggttttcaaggtgaatgcttccagcttttgctcattcagtatgatgttggctgtgggtttttcctggcggctcttattattttgtggtatgttcctttgatgcctagtttgttgatgacttttaacatgaagggatgttgaatgttgtcaaaagccttttctacaacaattgagatgatcatgtggtttttttgtttgtagttctgtttatgtgatgaatcacatttattgatttggatatgttgagccaaccttgcatcccaggaataaagcctacttgatcgtggtaagttaggtatttgatgtgctgctggatttgatctgctagtattttgttgaggatttttgcatttactttcatcagggatgttggcctgaagttttctttttttgtcctgtctctttgccagattttggtatcagtgtgatgctggccttatagaatgaggagtccctcctccttgatttttggcatagtttcagtatgattggtaccggctcttgtttgtatgtttggtggaatttgtctgtgaatccatctggtacagggctctttctggttggtaggttttttaaattactgattcaatttaagaacttgttattggtctgttcaggtatttaatttcttcctggttcaatcttaggaggttgtatttttccaagaatttaccatttcttctacgttttctagtttatgtacatagaggtgttcaaaatagtctctgagggtgttttgtatttctgtggggttggtggtaatgtcccctttgtcatctgagattgtgtttatttggatgttctctctctttattaatctagctagttgtctatcaatcttatttattctttcaaaaaa

SEQ ID NO: 2286 - DNA, 1050 bp, Homo sapiens
tttgccatgtactgtgttaataatgagaggtgatcaaatgagataataggtggcaaactgctttgcaatgttttcaacactgcaatacagttctacatgatggggaaccttactaaaatactccttttgtgggggagaaaacctttttctaacattatgttattttcccacctaagagctcttcagtttaatcttaggaacattggaatcataattattatttcattcattatttcatactttcatttttcccaagttgtataaatcttaatgttgattcacctttggttttctgtagataccaagtgaattttgagatcataaacagttgcctttgaacctgaaagttttgtttctaatttgggagataatatgctcttattaatttactgagaagatacgtagaattttgtttttcatatttctgtgttttgccttggttttctgttaaaccatcagcctctacactttcttctagaactatgtatatgtgttgagcattgttctgggaatagccttttacttctgtcatctggatgttctagatcactctgaattttctgtcttgatttagtattcaaataaaaaataagatattgaaagtggtggaattagtgggaactggtgacagaaagggggaaacccaaaattttttaggagctgtgatttatttcatggatagtctctctaagttaatgatacaattctaggggatcagttaaataaacttctaaagtaaaatactgtaaaaacttacctgtggtagaaatagctgttttttaaatcacaattttcacatggcagtgcaattgtacagtgtctctattttgctgatttggagccaaatacactcattagtcacgttagattcagttactattctagtgtcatctgtcatttcctttgtagtaaagaccaatagagttgagtccaaggacactgggcagggttggtgggggtggtggtgggaggggggctgttggtgaggaaagagagaatgaggatggtgagagaaaagggcaaatgggtgcatttgagaagaaagattgt

SEQ ID NO: 2287 - DNA, 1029 bp, Homo sapiens
ttgggacgctagtaaccatgggcttgctgacttagccaaagaagagttaagaagaaaatacacacaagtatacagactgttcctagtttcttagacttatctgcatattggataaaataaatgcaattgtgctcttcatttaggatgctttcattgtctttaagatgtgttaggaatgtcaacagagcaaggagaaaaaaggcagtcctggaatcacattcttagcacacctacacctcttgaaaatagaacaacttgcagaattgagagtgattcctttcctaaaagtgtaagaaagcatagagatttgttcgtatttagaatgggatcacgaggaaaagagaaggaaagtgatttttttccacaagatctgtaatgttatttccacttataaaggaaataaaaaatgaaaaacattatttggatatcaaaagcaaataaaaacccaattcagtctcttctaagcaaaattgctaaagagagatgaaccacattataaagtaatctttggctgtaaggcattttcatctttccttcgggttggcaaaatattttaaaggtaaaacatgctggtgaaccaggggtgttgatggtgataagggaggaatatagaatgaaagactgaatcttcctttgttgcacaaatagagtttggaaaaagcctgtgaaaggtgtcttctttgacttaatgtctttaaaagtatccagagatactacaatattaacataagaaaagattatatattatttctgaatcgagatgtccatagtcaaatttgtaaatcttattcttttgtaatatttatttatatttatttatgacagtgaacattctgattttacatgtaaaacaagaaaagttgaagaagatatgtgaagaaaaatgtatttttcctaaatagaaataaatgatcccattttttggtatcatgtagtatgtgaaatttattcttaaacgtgactactttatttctaaataagaaattccctacctgcttcctacaagcagttcagaatgccatgccttgg

SEQ ID NO: 2288 - DNA, 1022 bp, Homo sapiens
atgagagcagagctgtcacgaatgggattagcgtcctaataaaagaggcccagaagagctcctttgcccctcctgccatgggaagaaatgctgaatctgccagagaggttggtcctgaactccttagcctccacaactatgagaaataaatttttgttgtgtatgagctaaccagtttatagtattttgttataacagcccaaatagactaagacattgggcaaccagcaccgccaattaattccggaacactttcatcatcccattcctgttttagagattagactgtaattttctttcttgtaatgtcctcataagattttgatatcaaacttatgacagtcttataaagccagctggtagtgtttcatatatttgcttccttgtaagagtttatataaaattggtattatttcttctttaaatgtttaaaagaattcactggaaaagccatatagcctggagtttactttgttgggaggtctttttttattccaacaattttcttgtaccatgtagactttttgctgaagtataacatatatatgtagtaaagtgcacacatcttaattatgcagttcagtagatatttacaaattaaatgcacccatgtaagtggcactcagattaagatatagaacattatcagcaccccagaagccttcctgatgccctttcccagttatcttcccaaagtaaccgctattctgatttataacactaatagttttgctgcttcctaaattttataaaggaatcaaaaaataggtactcttctgtgtccggcttctgctcagtgttatatttggaagtcacttttgttgctgcatgaaggatggtcagtttttttattattatattgtatttcactgatgatcttgagtaccttttcatatgtttgtgaagggcctattccaaacttttgtctgttatttactggtttgtctatgattttattgttttgtagaagttgtttaaatattctcttgttttctaataaatgtaacacaaatgttgtcttt

SEQ ID NO: 2289 - DNA, 1033 bp, Homo sapiens
ttgaaaaaatattggccaaaaattatccaaattagatccaaaacaacctcagatccaggagattcagtgaaccttcagcaggatgaataaattattaaaatttaccaccaccaccacccccctgcagtagtttggtaaaaactaccaaacaaaattttaaaaagcagccagtgagtggggaaaacaacaaaaacccgtattacatttaggagggcagggacaagtaagaatgacagccagccaagttttcttaagaaaatgtggttacaatatggttatctctgttagtgctgaaagaaaaataaaacaccctagaattctgtatgaaggagaatatattagttaacatttaaagtcttttaaaaaatgtttttaacatcttgcattccattccttgtctctgttcacactggaaattactactttgtactactttttctgctaaagcagatatccattaattctgaggtttctctaattttccagtggtcaaatgtcgatttccagtagtcgaaaatggaaaacagatatcaggatttggaaaaaaattttactacaaagcaacagttatgtttgaatgcgataagggtttttacctcgatggcagcgacacaattgtctgtgacagtaacagtacttgggatcccccagttccaaagtgtcttaaaggtacaaaggttatcttttttctgtcttggtttgttattgttgttgctgttcattttagactttatttctttgatattaactatcagtcatacaaaataactgaaaagaaacaattttagtatttaactctgtcttgtattcatttctatgccagatgaatgacacgaaattcacataaaattctgctgttgtgattttttgtgcttttccagggttcttagcacgttatgtacattgcatgggtatatgcttttaatatttttatgtataaaaagtgaattacaacaactttttggaattgaaacatgggcatttttatctaagtaagtcaacaatggcataattcatataaatgaaatgagag

SEQ ID NO: 2290 - DNA, 1101 bp, Homo sapiens
gggcagtatagccattttaatgatattgattcttccatccatgagcatgggatgtttttccatttgtttgtgtcttctctgatttctttgagctgtgttttataattctcattgcagagatgtttcacctccctggttagctgtattcctaggtattttattctttttgtagtaattttgactgggattgcctctctgatttgactctcagtttggctgttgttggtgtataggaatgctagtgatttttgtatattgattttgtatcctgcaactttggtgaagttgtttatcatctggagcagcttttaggccaagactgtggggttttctaaatatagaatcatgttgtctgtggacagagatagtttgacttcctctcttcctatttggatgccctctgtttctttctcttatctgattgctttgcctaggaccatcaacatacttttatgtgtaattatacatgtagtttggtgttttctcttttcttaaaaatgatattatgctgtacatatttttctgcaactttttccacttacactcttagattgtagttgtgtttagatttattctcatactttctaatgatgacttaagtatataccataccttatttaactattctcctatcagaggtcatttatatgttcagacgttttatattaataggtagttggatgtattgatcttttccctaatggctatgactttggtgtctttcttactaaaactttaggtcttctgtatgctgaaattgtatgaagatttcaaccatgtgttctgactttggtctttgcacttaaatcattagtaaatctgaaatttattctggtgtatataatgagatatatggttccacctcgccccaccccagcaaccaccatccaatagctaaatagcaccattttttgaataagttgtcttctccccaactgatttgaaatgtcaatttgtatcatacattgcattcataggtgttccatcctcttttctcctttgaactttgtccattcttctattcttgtagcaaaagcaagtctttttttttttttttttttactgtagtactatatgttttaataactgccgggaacactt

SEQ ID NO: 2291 - DNA, 1040 bp, Homo sapiens
actagatatgcatttccctaaaaattagaaatgtgttgagaatcttttcatgtgcttattggtcatttgtatatcttctttagagaaacatctttttaagtcttttgcccattttcaagttgggttgacatttgttactgagttttaagagttatttatatgttctggatattacttccttatcaaatatatgatttacaaatatttcctctcattctgtgggttgccttttcactctgttgatagtgtcatttgatgcacaaaatttgcttttaattgatgaaatataatttttttcttgtcttgcctgggcttttagagtcacatccaataaatcatagccagatcaaatgtcaagaagcatttcctctgttttcttctgagagttttatagttttacctcttatgtttaggtctctgatctattttgagtttgtgtttgtatatgataagggtccagcttcactttttttgcatgtggatatccagttttaccagcaccatttgtagaagagactccctttccccatttgactgttccttgtcacgcttgttgaaaaccgtttgaccatatatgcaggggtttatttccgaggtctctgttctattccattggtctgtatgtctgcctttttgtcattaccattgttttgattattatagttttggaatcagaaagtgtgagccttctcaactttgctctttgtttctaggattgttttggctatttgtggtcccttgagatttcatatgtattttggaatggatttttctatttcagaaaaaaaaaaccaaaaaataccatcatcaggattttcataggggttgcactaaatctgaagattgctttgtatagtattgacagtttaaaaatactaaatttttccaatccataaacacaagtgtctttccatttattttatatctttaattttttttagcagttttgtagttttcagtgtacaagtctttcacctccttagtttattcctaagtattttattctttttgatgctattacaaatgatattgttttctta

SEQ ID NO: 2292 - DNA, 1066 bp, Homo sapiens
taaaaccatcagatctcgtgagaacttactatcatgagaatagcatgggggaaactgcctccatgattcaattacctctcatggggtccctcccacaacacgtggggattatgggaattgcgattcaagatgagatttgggtggggacacagccaaaccatatcaagtgtttagatgatctgattgaaataaatgctatctggagatccatgtgttcaacatcttggaactgttttctttctcagatgtttgggtcattgctgtgattgttattgccataggtaagtatcacaaattttgacaccacttaagtcaaaaaattattgtgaagacatgcattttaaaaatagtttttcagtttctatagttttttcagcttgtaaattggttaaaccgatttaggaaaacctgactttttatttgatatacttaactacctaccttgtgttagtgattttatactctgttatattctgtatatctacttagtaacaaagcctaagtaatacatattttctcaagatgatcagtaatattagttggcttcccaaatgtgcttttgatagttttctaaattaagcaaggacttttctctgacttactatggactgtgtaagtgattatggggagttggatttagatagcaaagagtctggatggaatataaatgtgtaggtgcttaaataacatttgaccactgaaatgtaaccaacatttatttcttctgctagatgttgaatcttggtgattagttttcagaattatatgtcatttgtttcctggtttcttatagttgttggagttgcagtaatttgtgttgtcccgtacagatatcttcaaaggaggaagaagaaagggtaaattaaagcatgtttcttttaacttcttggtccttcttatacttaacatgcttttgtgcagcttcagtttgtaatctgtattgcatgctatcttttttttttttttaaaaaaatgcctgcattagtttgtcctaccaattgcatttctttgctaaaaatattttcagctacttctaacatcactgcaacataaaaacatctgtgca

SEQ ID NO: 2293 - DNA, 1028 bp, Homo sapiens
ttaaaacatcaaactcaaattttagttaaagagcttacagtttaacaaaagacttagaatgaatcctggaacacagactaagattaggtgctttgaaatttctgaaagataatatacattcatttttactgatttttaaaaactgttttcccctatagttttagaaatagctttgaaatcaaacctaataattttaagacttttggtactcatggttttatgatatatattccttttatactgatcatcaggtttgggctaagtcataaaagtacaagctttactcataaggaactcaaacttttttcatattacttggttatcttttgaaatacccataatcccttcacttgaatcttaaatcttgtattaatggaacacgatatgcatatttgatttatctatcagttgtatattctaaaagttacatatctacaacgtgagtacaaaatattatcaatggaatatttttacaaatccataaggtttgcgtagaaacaagttctaaagaaaacaaaacaaagtcgcattctgcttattttccttctttgtttaaaatatcactgcatcagaatttttaaaggttcattaacaagtattaatcaaactctctctagctagcagttaatggtttttctgttgttgttttttgcttttttgtgatggagtcttgctctgtcacccaggctggagtgcaatggcgcaatcttggctcgctgcaaccttggcctcctgggttcaagggattctctgcctcagcctcacgagtagctgggattacagtcgtgcaccaccaccaccggctaatttgttgtacctgtactagagatggggtttcaccatgttggtcaggctggtcttgaactcctgacctcaggtaatccgcccacctcggcctcccaaggtgctaggattacaggcatgagccaccgcgcccggccttaatgggtcttttaaagctcaacagttatctgactgttacactcccaaatgaaaggttcaatagcagtagtgaactgagattccaa

SEQ ID NO: 2294 - DNA, 1048 bp, Homo sapiens
agcatgcgtttgtctccagtctttcccattggccctacatcaaaatgaggacatagttactaagtactttgtgtgctactgctctatttcttgttttggaggggatcaaaaatataagacagggataaaggaaggttttttttacagtgagaccagttgaacatttgaaattattttaaaagaataatttatttcccaggttggtggctcattactatatttttttaattgttcattttctgaataggcttctggaatttaatttctgtacttaattatatttatctttgacatgatctttataccttggtttgcaggaaagcagatggtggagctgaatatgccacttaccagactaaatcaaccactccagcagagcagagaggctgaatagattccacaacctggtttgccagttcatcttttgactctattaaaatcttcaatagttgttattctgtagtttcactctcatgagtgcaactgtggcttagctaatattgcaatgtggcttgaatgtaggtagcatcctttgatgcttctttgaaacttgtatgaatttgggtatgaacagattgcctgctttcccttaaataacacttagatttattggaccagtcagcacagcatgcctggttgtattaaagcagggatatgctgtattttataaaattggcaaaattagagaaatatagttcacaatgaaattatattttctttgtaaagaaagtggcttgaaatcttttttgttcaaagattaatgccaactcttaagattattctttcaccaactatagaatgtattttatatatcgttcattgtaaaaagcccttaaaaatatgtgtatactactttggctcttgtgcataaaaacaagaacactgaaaattgggaatatgcacaaacttggcttctttaaccaagaatattattggaaaattctctaaaagttaatagggtaaattctctattttttgtaatgtgttcggtgatttcagaaagctagaaagtgtatgtgtggcatttgttttcactttttaaaacatc

SEQ ID NO: 2295 - DNA, 1491 bp, Homo sapiens
tctctccctccttaaataaagagaggggttaaacatgccctctaaaagtaggtggttttgaagagaataaattcatcagataacctcaagtcacatgagaatcttagtccatttacattgccttggctagtaaaagccatctatgtatatgtcttacctcatctcctaaaaggcagagtacaaagtaagccatgtatctcaggaaggtaacttcattttgtctatttgctgttgattgtaccaagggatggaagaagtaaatatagctcaggtagcactttatactcaggcagatctcagccctctactgagtcccttagccaagcagtttctttcaaagaagccagcaggcgaaaagcagggactgccactgcatttcatatcacactgttaaaagttgtgttttgaaattttatgtttagttgcacaaattgggccaaagaaacattgccttgaggaagatatgattggaaaatcaagagtgtagaagaataaatactgttttactgtccaaagacatgtttatagtgctctgtaaatgttcctttcctttgtagtctctggcaagatgctttaggaagataaaagtttgaggagaacaaacaggaattctgaattaagcacagagttgaagtttatacccgtttcacatgcttttcaagaatgtcgcaattactaagaagcagataatggtgttttttagaaacctaattgaagtatattcaaccaaatactttaatgtataaaataaatattatacaatatacttgtatagcagtttctgcttcacatttgattttttcaaatttaatatttatattagagatctatatatgtataaatatgtattttgtcaaatttgttacttaaatatatagagaccagttttctctggaagtttgtttaaatgacagaagcgtatatgaattcaagaaaatttaagctgcaaaaatgtatttgctataaaatgagaagtctcactgatagaggttctttattgctcattttttaaaaaatggactcttgaaatctgttaaaataaaattgtacatttggagatgtttcatgatgatgtgtttatttctagtgggttttgtctcaaattgaagtatgtttctaattgggcccatcttctaaccattccactcccacagccattcctcctgtccctcctagctcagacccttaagtatccccaggcttctccactcccaacccatcacatagatactgcacagatatccagtgacatcacattacctactggatgaagtccacatttcttagcctgatacttgaagaccttttacaattaaatcccaactttcttccccaagcattttctattgcacttcttcaaataacctactctcagtcaagcctgaccatttcccctgtgctttctgctgtattcctagttcattgttgcttgaaacacctactgtcctgttgagatcctatgcatcttccaaggcccagctcagatattac

SEQ ID NO: 2296 - DNA, 1049 bp, Homo sapiens
tcagccttcccagtagccgagactacaggtgcacaacacaactccgggctaatttttcttatttttttgtagagacagggtctccgtatgttacccaggttggtctcaaactcctgggctcaagtgattctcccaccttggcctcctaaagtgctgggattccagatatgagccaccgctcccagcttagagggacattctaattaagaaatttgctagaaaaacatgaaccccgaaatcttttatttagccaagttgtatccttcttttggatgagagccttgtgtgactctagggtttgtcatgtgacctccttaaacttttcatttgtcagttattaaccatattcttgccagccctgcccaagtgcatgtgtaatttttgcatgactatatctaaaatgtatttataatgttatattctgcctttttcatttaacatctcatttgaccttttcctaatttctacatactagtagttagaatgtaacattgcctgtttctttttagggtttccagaaaggaagcaaagccacagatttgtcaactggtaatgctttctaccttctttttaatagttggttttgggttgttcccactaagattatatctaataataaagcttgattacatttctattccttttgatttcagatgcaagctattattttggcagtatcacttaattttaaatgcagatgtctataaaaatgccattgtgatatctaatacagaagccacagtttgaaattgtcccaggagactagcctattaggccctgttacagaggcttatcagagggctcttagtgaatcctaagagggaatatcttttttggttagcataaaggagtcacaaatacagtgcaaaatgaacaaagggcctatcatattacaacaaactaaaaaaaaaaaaaaagaaacctgttttcttttgttgttttgtaattatcctgttgttctattaaacctgtggcctaatgcctgggacataaattaaatctcataacctgaagttttatgttttaaaagtggggcagtagcagtttgg

SEQ ID NO: 2297 - DNA, 1050 bp, Homo sapiens
atgccaagtctctgtcgcccaggttggagtgcagtggtgcgatctcggctcactgcaagctctgcctcccaggttcaggccattctcctgccttggcctcccgagtagctgggactacaggcgcccgccaccacgcccggctaatttttttttttttgtatttttagtagagacggggtttcaccgtgttagccaggatggtctcaatctcctgacctcgtgatcctcccgcctcggcctcccaaagtgctgcgattacttacaggcgtgagccaccgcgcgcggccaccaccaagtgacattctgaaggagaattcaagcaacctgaaaagcataacgtctcatatgtcaggatcatttaaggcatatttttcactcctttgctgccccgtttatccttggtccattgaggtttgcccagagagattaaattcttagtgtcagtacaaataaaaattaatttttttttcttgaaacacacgcatgcacagagaagcagcataagaatgcgtgagtactgaagccaagctgcctaggttcaaatctttgctttaatattttctagctgcgtaacttttggcaaattccttaaactctctgtacctcagttgctatctgtaaaatggggatggtcatcataatacctgtcttcagagttacaataactaagttacttaatccatgcagggcacttagaacaagaccagaccttcttttccacgttacaaagattagtaaaattttagaaaattaactgttattttgtattattcttacttatatgcctcatactcttcaaaggaaagaaaagagattttgagagagaatggttcagaaaaacagctgtagggatcttttttacttagcaaattccaactcttaggggtgagggcgcttatgcgttaggaacaccaggtggcgctgtaaacaagtacagtaaggagatctgcacctcccctcgggtgccggccttgggctgtggggcttgtgcctggcagctctcagagctggagaagacagagacctaggcctcttttttttattttattt

SEQ ID NO: 2298 - DNA, 1025 bp, Homo sapiens
taggagtacaagaatctagagtaatccaaataaaaatggagagcaaatgggtgatgaagactatgagagcccatcctgtacctcactaagttctcctttactctgaaaaagccatctaaaagtgtcattttcttcttcccttatttcttcctctaatggctgtatgagttggagttttgcaagtgtaaaactaaggtgtttacagaatgatgtctgtggaccaacttcagaaatttaaagcctgtttgtttttcctaacccttctgcattattcagttgagttatggacttaataaatcacattgaaatggaacagaagttcatttattgctaccggaacagaaagactagaatgttgtttatctgcctggcccttggttcaagggaggtgatctaggcattcttttactctgaatagacattatagttcagatgcccagggtgtgtgtaaaaaagaaaatctttttttattcttgagagaagaggaatagagatggattgctgagatggtcctgacagaattggtgtcatacataccatccactatagtttctttggtaagggtccaggtattatacaaaatgtcccattgccaatttagtttagatttctctctcctaaggtcttttccattggaaggagggtagggaagagggaaattttcttgttttatcaacctatttcattctaagacttaggcagaggaatgggatatatactaagtaattttggcttatgtatttgttttacctaaatgaattatatatgtaaaaatatgtatggctgggatcttttgatcaataaaattaattttctggttatttattctggcctgtcattttcatgaggagaaaaaatatctacagaggacagttttcatacatcaactgaaatatgactcatcttttctacatttcaaccccagaagttaggtaaacacaaacaaacctttaagaaatatatctacaaaatgagagtgatgaatctgatgaaatgacagatttggtgatgatttcctcaaagaa

SEQ ID NO: 2299 - DNA, 1096 bp, Homo sapiens
ttctagttttatttgcatagagatattcgtagtagtctctgaggatctttcatatttctatataattggttgtaatgtctggatcatctcactgtttttcttttttaatctagtggcctatcaatgttgtttatcgtttcaaagaaccaacttttggtttcattgattcttcgtatggatttggggtctcagtttccttcagttctactctgatttttagttatttctttttttctgctgcctttcaggttagtttgttcttgtttttctcgttcttctaggtgtgatgttagatcatgaagattttttctatttaggtaggtgtatagcactatgaactttcctcttaatactgcttttgctgcatcccaaagatttttgtatgttgtgtctctgttttcatttattttaaagattttttaaatttctgccttagttttattgtttaccccaaagtcactcagtagcaagttgcttaatttccatgaaattgtgtggttttgagagatcttcttggtattgatttctgtttttatttcactgtgatctgaacgtatggttggaatgatttcagtttttttgaatttattgagacttgacttatggctgagcatgtggcctatcttagagtgtgttctgtgtgcaaacaagaagaatgtatattctgtggttgatgggtacaatattctgtagatggttattaggttcagttggtcaagtatcaaacttaagtccagaaattctttgttggttttctgccacgatgatgtgtctcatgctgtcagtggggtatcgaagtccctcactattattgtgtgtctaagtcttttcataggtctagaagaatttgttttatgaatctgagtgcctcagtgttgggtgtgtatgtatttaggatagttaagtcttgtttaattggacactttatcattatgtaatgcatttctctgtccttttttattgttgttggtttaaagtatgtttcatctgatataagaatagcgactccagctcttttttttttctgtttgtgtgatagatctttcatttcattttattttattttttattatactttaagttttagggtacatgt

SEQ ID NO: 2300 - DNA, 1033 bp, Homo sapiens
ttcgatcattcctctggttcttcaaacccatggaatatatcatcataattgttagtgtccctgtctcctaattttatcaattttctgagtcagtttcgattgattaatttttctgctaggtttttttcattttgcttctttgcatacctgataatttctttattggatgccaaacattgtgaagtttcccttgttgagtgttagatctaatcgtgattagttcttgagctttattctgagataggttaaattacctgagactttcctttcagtcttgcttttcacctttgttaggaggggcaaaacctgcatttagtgtaagattaattttctgaagcaaaatccttcatatgtcagtctaatcagtggctcataaggtttgagattttaaaattctggatcttcagaatagtccccatttcatgctctgtgtaagatttggcatgtcttccctctaatcctcttaggcagtttttttcccagcctctgattgtttccttacatgtatgtgctaagaagtactgaactgtatcttaggagtgactcagtgcaggtgtctggagttctctgtctacacagctttttattccgggactcagccacatgaacttgagcacacttggcttcttcatactcccaggtttatctcctcaacactcacctgactgtacagtgaccgcactgtcccctttctccaggtagtaagcttggaaaatcatagtcatacagatgatctcattttttttcttcctctgaatgatcactcctttattgcccatcttcagtgtcttgagtgccattgtttcatacgctctgtcttgttttagtgttttcaggtggtgggagaaatctgtccatgttattttatcttaactggaagtagaaaatgtgattattagaatggggtcatttttggtatttaaatagactatataaaaatctgcagcagcgatttcaggagagactgggaaattacacaggaactgagagtcctggattagagaacaagatatggtgaaatttaagaggagac

SEQ ID NO: 2301 - DNA, 1063 bp, Homo sapiens
ggcaagggaaaaataaaaggcatccagatagggaaaaaaagaaaaaaaaaagtcaaatggcttctttttgctgacgatatgattctacacgtagaaaatcctaaagactccaccaaaaggctgcaagaactgatgaacaattttagcaaggtttcaggatatgaaatcagtgtacaaaaatcagtagcatttctatacaccaataatgcctagactgagaatcaaatgaagaacacaatctcattcataatagccacacaaaaaatgaaatacctgggaatacatctaaccaaggaggtgaaagatctctataaggaatattaaaaaacactactgaaagaaattggagatgatacaaatagaaaacactctattctcatgaattggaagaattaatatcgttaaaatggccacactgcccagtgcaatctacaggttcaatgctatcactattaaactaccaatgtaattcttcacagaattaaaaaaaggctattctaaatttcgtatggaacgttggatactcagggacataaatatgagaacagtggacactgcagactactacagagggcatgggggcatgggttacaaaactacctattgggtactgtgctcactacctgggtgcaatataaataaccatgtaacaggcctgtatatgtacccccctgtatctaaaataaaagttgaaagtaaaaatttattatttaaaattgctttattactctgaagttggatattttttcaattttaacggtgatttaacatttaagaattcaacattcttctttggtgactactccatggaaattattcttgaagatttataatgttctttatttaaaaagttaaaggcttttttgagtaattttttaaaaccatatgttaaattttgccgtcttttttgtttaactttgaattttgattgcgtgtttttaagacagagttttcatatttgtacacaggaaaaaagtattaatcatttttatttctagggtttttttgtttaattttatgtagtatttctatacaccaataatgagtagctgaaaaaggccaa

SEQ ID NO: 2302 - DNA, 1047 bp, Homo sapiens
ttatttccacatttaaataaattattcacttgcttaatagaatgtatggctactcatcatgattattatctttatacccagatatgagggacagaataatatatcctagatatcatttttatcattatacataaacacaagctatccttgattttgtagctgtgacttaatgttttagggcctattactattgatgacttaaagttttatcccagcatgtacagttgtcaaagggggtaaatcacctattgctgtatttggcttcatgccaactaaagattagtgcacctcaattcttatgtctgctagtacacagatataataataaattaatcaaatactgaatgattactatatggtcattatgagattcaagggaagaagtaaaaaatatctgacaggtactctaccctcaaaaatacattttagtactagggaaaataagacatgtgcttactaagttaattaaataatacaaagcagtaaaaccagtccccaagttatgtacacccctggtacatgaatagtagagcaggaagagaatgtgttttgagatctggtccttgttaacattctggccatatctcttaatatattagctgtgaaacctttggcaatatagttcattgtttttagatttctttcattgtctgtaaaatatgaataaaactgaactggcagggttgccatgaaaattaaatgatatatgtggtacagtttttagcatagtgtccgatagctaataggtaagtgatcagtaaatgtagccaattataatggtagtgaaaagagtgacggtcatgagcaagccctgagtgtgcattccctttttgcaggtacgtttcggatttattttctattcatttctctttcctctcaccccaactcccctctgctgtcttgagcacttctcggtagttctgttagtctagcctgactttatagcctatggaaagagcagtgaggagagaggtacacaatctaggtgcttctactattcttgccctaacctctgcaagtggtccaagtgccccagaatcaccttct

SEQ ID NO: 2303 - DNA, 1029 bp, Homo sapiens
ccaggctggagtacaatggcatgatgtcggctcactgcaacctccacctcgcaggttcaagcaattttcatgcctctgcctcccgagtagctgggattacaggcgcctgccaccacacctggctaatttttgtatttttagtagaggcagtgtttcaccatgttggccaggctggtctcaatctcgtggcctcaagtgatctgcctgccttggcctcccaaagtgctgggattacaggcatgagccactgcacacggcggatcatagcagggatttttatgaccatttccacatgatgctatggtcaaacgctgataaaatattttgttattatggttatttatgtgaatgttctatgattcatttttcttctatcttaaatcttagatatgttaatttttagtgttaatatgtagtgcttaggaaagaaaaagtgatcattttctacttctattgtagctcttcctttcctaacctgaatgtcagagctgtgctccatgagtgtggtaatatcgtgattctgtttcattgaaccatcttttcatcttccttggctcctgcaaggctaataactgcacagcaagagcctgtggagggtacttacaattggagcaacagcaacatcacctgctccccagtaatgtggataacagtctcactgaagaccaagggggagaaagcagggacagacaactcagttgaatgggctctgtagttgacgtctgttttttctgcctagcattcatatctttcttatgcacacagtacccagattttggttgggagactaacctgcccctgtattatgctgaagcggactttattgcaaagccctagaattaaatctcatgggctctaagcagcaagttccaggatttgggtttgagcaagtaggatgctgtcttcctctttcccatgacactcagagctgccggcaactaggagggaaaagtctgccaaagaatgaagccaaatttgggaaacaaacctgagaaatggataaaggagaactggttcctagtaacatgg

SEQ ID NO: 2304 - DNA, 1038 bp, Homo sapiens
aaataatgttgtcattgaattaagctgttttgtgactgctgatgtatcactgtgtttgatttggtgacagcttgaggtctggttaatataatcttaaggtaatcagcttgatagactggaattactagtttattatcaaaaaatgaatgtaaaaatattgctcttttctctccctgtttagactagtatgtgcctttttaaaaatactccctttcttcttccctgccttttttccccactcttattcatatacactcaaactagataccagagttagttcatcaaagctgaataatacctatcaaaaagtgataccctgacttttttctcttaatcacctgtactggaccatagggaggaccaaataggctttcttggggactacagaaagagcaaagcgtaatactctttaatcatagcatgtttgttgttgctgtttcggtggtggtggtggtggtggtggtggttgtgtacttaccttgaatagtgtgaagtatcctaaaattatgttgtgtgggctgggagcaggaaggaaactgattattcgtctaacaaaggtttggcataattttattgtaaaatttcaactgtttatgacatgaaaatttctaattaattataagaacaaagtcactgtggtggcaatagttgtacaagatgtttgacattatttctatgtcagtttgatagtctgtgttataaattgtcttattaggacccttcttcaccctcttctttattattctgattatcagtaaatccagtttgtactgttagacatttgagtttgtcttttaaatattgaagactattttaaaaagaaaaaccataacatctttctgtttattacattaacatgtgatctctcacctgacgatgtgtttaaaatgaattaatagataaaatataatactccgttatatactgaaaaaaattttcaaactttgtctatatattcagatattgctagcagttcatattaaatatgactattttgtttaatgagaaaataggaatttttccttatctctgagactt

SEQ ID NO: 2305 - DNA, 2049 bp, Homo sapiens
cagttataacagctacagattattgctagtagcattccatacaattccatattaatgttcttaggagctaatatttgataaaggggaaagctagttaaaaactaattaatttgtcaaatgtagcattcttattatgagtgtaatatctcatggagatttaaatatgaacgaaaggacttatccttctgctttttaaaagccccagcattactagatagtgtttttcttgaaggccaaagctgtaaaatgacaaagttggtgattttcagcagcactcacctgagctgtgagcgcctgcacctgttcggtagaacccactagaatcacttctctgtaggataagtgatgcctttgaatccagcagcataaaaatctgttctttttagtcatcaagtttttgtttccaggatatttctagcattgcaaaaaaaaatttcttcaccaaacactaattcctaaacacccatccaaaccacaaaaattctcttgttagtaggcgagagtgctaggacttcctgtgttcacctcccatgcacccagcattgtcttttatgcatgagatattccattagattttcctagagtggccaggacacccttcatagtaagttatatctcttaactggattctatagttttatctcgagcaacttggaaaagctaagacatcctccacccacactggtatctacgcgcctggaagctgcaccttctctcattgctgtgctctgctttaaggaaaacctgatatgacagaatcaagactattaaaagataaatgaggggaaatcttcatttaagaaagttgccttgctccccaagagtgcctttaattgctattcccctaggcatctgggtgcatatcattaatgaaatcattaacctttgtctctggtccttcctttctaaaaacagcagattatagaaggtggtctggcaaagggattttcaaagggcaaaagtctcatcatcatctttccactcaaaatcctattattctacatttcactttgcaggggtcctagggacaggattgcagggacaggggacatgggaggaagacagaaaaattcaaaaccagcagatgccactacctggcaatgaattgaaaattaggggaaagcatctttggcgtgaccttttattaagacaacagaaatttagaacattttacatgcttctttgttaaatggtgaagcaagggaatgaaagtatttatttttagagctcatagttaactccatcaagacatggctacccacccctccagttatgaacttgtattacagctccacttggtgacttcctttctgtgtatcaggagcagagcagaggacaacttgtagaagacatgaccattaagagacatcaacttcgcaacaaatataagacaaggatacaaggattcctatgtgatgcagctaggtttttatatccttctaacaaatggtgagcaggagacttttttggaaataattagttgtgaaattccatttttctgacagccccttaaatttgaagttatttcatttgtagttaaggttatcacatccctgccaattttactagattttttcagagacaagcattcagcatggcattagtaatgatggtttaaactaggtgcagaactgtcccatgaagagaagaatgatatcagtatttaaataataaaagaagagacaatgtatggtttatagtgattcattttaagattgctgtattttgattttgtggtttaaaataaatgcattaaggatcttttaagttactacaagatgcctctctgttgctttcttagctatagtgcctaagcaaggtatattatcttgacatggctaaaatgtctcaattctatgtgatatagctacacgacctggggtgaaagagttactagtttggagattatttcccagccttgggtacctgccatatttgagctgggagaactcacttaggaaaagcacttgcaaagatgtaagttatgaacacttgaatctcgcatcctgccataaagtgcatcagcaagtgactttaataaaacatgct

SEQ ID NO: 2306 - DNA, 1068 bp, Homo sapiens
ggtaatcattcaaagacttgaatagttgtgcagctgtggtgttggttagcaacaaaagtgcaagtgacatatcctcgtgcacctaacatcttcatgtatatcctcctgaaaactgtatcacaaaaaaacaagcattgttgccttgtcaacactggtagactagtcaacccagattgcgtaccgcagtgactcattaatcctctctaccaattgtgcctcaatatccgctgctatttcaattcgcctagtttactcttcaccaatagtaaagggcttcttagctttagcaatacggttagccactaagaatgatactctcattgcagacacatttgatgaaatggtagccttcaataattgcttctgttctttgtgcttatgttttttcttttgaaaaactccgaagccttgtcttttaatgcagggtgcttggtctccatgtggtgaagcagttttgaaggtttcatggcttcattggatagccagtggccacatattacacaaagtgggcttggagaatgtgagtcacctgttgcaatgaacctgtaatttgagtatgactcctggtattttcttttaaatgcagcttgctttttgttggcaatcttacagtcttctgtctcatcattgggtcttcccccttttcaaagaagcttaccagtgatgtttgttttttactcatttcggctagggttagcttgtgggcttaccaaaactgtgactgagacaaatgtgcagtgcaggaaacaggcacacctggaagtggtaaataatgggcgggccatgagtggactaaaataagtgtcggattctgactgaaagcctgcccacagatgcagctgtacgatggaagtacatcaactcacttgccactataaagcctgccaccaggcagcattaagctacttgttacttgacactcactgataggattttgatatgagtctgcaagcaattgatttattatggtctctgtgtagtcaaacctccctcttaatgctaatttgtatttgcagccactccccagtgctagcatcacttgtagtcccaactacttgggaggctgag

SEQ ID NO: 2307 - DNA, 1029 bp, Homo sapiens
tcacattgcagatgctatttttttttttttttttttttggagacggagtctcactctgtcacccaggctggagtgcagtgacatgatcttggctcactgcaacctccgcctcccgggttcaagcgattctcttgcctcagcctcccgagtagctgggactacaggcatgtgccaccatgcccagctaagtttttgtatttgtagtagagacggggtttcaccgcattagttaggatggtcttgatctcctgacctcgtgatccaccagccttggcctcccaaagtgctgggattacaggcatgaaccaccacacctggctgcagatcctatttttacgttaggcagagagctacaattcctattcctgttctcaccaggaaatcactaacatcttacatttttcctacctgtccgcaaatttacatgtcaggaagaaaatctagcatggatgagactagacaaaaggtcatgtactgatgggtaaagagccggcattctttgtgttcacaagaaggaagcaaacctgaccttccatcaccaatcatgggtttcttttttttcttatttatttttttgagacagagtctcactctattgcctgtgttagagtgcagtggcacaaccatggttcactgtaacctctgcctcccaagttcaagcgattctcgtgcctcagcctcccaagcagggcctacaggcatgtgccatcatacttggctaactttttgtatttttagtagagacaggttttcaacatgctggctaggctggcctcaaactcctgtcctcaagtgatccacctgccttggcctcccaaagtgctgggattacaggtgtgagccaccctgcctggcctaatccatgggtttcttgcccctgacattttggagactcttcaacccacattctttggaggggctggcatggaacacaggaatctgtctctgctaagcaagcctctctgggaaggggaaaaactgtataaaatccagttttctggtaagacaggctgaacattcacgcacaca

SEQ ID NO: 2308 - DNA, 1064 bp, Homo sapiens
aggtatgtgcatgggagggatcgtggttgggcagctgtgccctaagggctacctctataatggggactgccctgccatgatgccagttggattgcaagacatgggaggctgattctgctctagcaggattttatttacttgtttgtttgttacttattttgagatggaattttactcttgtctcccaggctggagcgcaatggcgcgatcttggctcactgtaacctctgcctcccaggttcaagcgattctcctcttgcagtattttaatggtgttttggggataggattcattccaatagcatttttatagacaaagtatgaaaatcaacattttagtgggattctaatatatacaacagtttcgtgtaggtgattctttttgcattattcacatcttttcattgcctgtgcatcatgaatgtatatagtagagttgcttgtacttggggagaatcaatgggtaatattaagatgggtagagaacatgaggctcatgtgagagcgtgtcctgtgatgtcttagaacagtattaagtgtcgtctgcctgtactgtttggcagtagggaaacagtgggggatgaatatgggacaaatttttctgccccaaggtggctttggagaccactgttaaattcatcatagtctctcaagtaaatggggtttacacagcactatcaagtatttcctgaagcttctttcagcattttccaagttgaagcagcttcagtctgtggtaagttcccaaacgaatcccagcaaacaggctttttccaaagggatcaaatagcacttaataaaaacataactgtgtctatgtatgtagccacacatgcacaaaaaagaattccattggtaaatgctgtaggtcatgttggaaaagaagcccctttttttcatttgttaaaactacctcttaaaatagtctttggccatgtattccttataattggactctgcccagaggtgagggtttgaagcaaatttatgtggctgttttctgtgggtagtaggatggaaaaatagtaaaaatgaacttcacatttctctggttttcttggaac

SEQ ID NO: 2309 - DNA, 1020 bp, Homo sapiens
gtacctggagcttccagactctcactgttgattagtagctggattttcactgccttgagctccaaagcatcaagacagccaaatctaggttccctagtttttcctgagtgtctgatgctgacgggtactgagtatcagtttcttgaacctatcagtttcttctttggaagtaggagaaaccaactttggatgatttatgcagaaaataagattcattaaaaggaaaatgagtagctcatagaatcacagggctctgaactcagaggactgaatccaggctatgcagccaggactcaaaccccacaatatgccacagtttgtgaggatgccaccccctcctagtgtaacttgaactagccactgcgtgctgccactaatgtcactgccactagagtgtgcttgtccagtggacagggcctattcaaagtgcagaggaacctgcagggactgtgtgatgtggatggagggtaaggaatgaggaacaggagagggactgtggtcaagtttcacaaatgcccatgttgattttagacagcagcagcttgttgaatggcttgagaatctgagttgcaaatgaggcctcatgggagttacataggaaatctgaagcctgctgggcccagagggacagaaaactcagtaattttttttatagaggtgctggtctgaatgtcaagtgtctttgccaaaagagaccttgctcgcttttccaatcaatctttctctgcaccctctggctgtcaagtagttacctaagtgagttttttggtggttattctacaaatatgataatttttcaaattatttgcattttaatgtcagtgaaagtcaagcttgtctttagattttgacaaggatagccctatggctcaccaaagatattagttcaaattgttctttttaatagtatagtgataatagtaatatattttcgtcaccatgaaagtggaaatgattggtagttggaaaaagtatttgttcattgacatcttctccaatttgtaattaagagcaacaaat

SEQ ID NO: 2310 - DNA, 1050 bp, Homo sapiens
tgttttgaagattaaataacctaatgcatgtagagcaggtggtatataatagatgtttacaaatgttagctttaacacttgtgttattcctatgctctgtggacatgatagatacttttttctgaaattttctttcttttctagattttgacccatagtcttatggttggtgtggagtctcttttccttagtccccctgccatttcagattgttgttttctacgtgatggacttgttgctgtgttcctcttatcgcttccagagtgtaacaagtgacaggattgagtttgcaattgaaaacctaatggaagaacctcagggtcagcactggcacaaccataggagtcggtgccttattcatgtggctcattcctttttattttttaatttttgagacaagttctcactatgtttcccaggctagtctcaaactctgggctagatccttccgcctcagccccccagtagttgggatcacaggcttattcattcttaaatttcatctctataggcaaaaaaaccaagacacaggtaggggaagagctcaataaatactgccatatctaatgttgccattcaaaaggaggtagttagcactcaacatcctgatttttcatagtaacttattacagatgctgaatttatcaaagcctctctaaatacattttatttttggtctagtttgcttcttggagtaagaaatttcatatggttattgcaaggaattgcaaggaatgaattgcaaggaattgcaaggaatgaattgcaaggaattgcaaggaatgaattgcaaggaattgcaaggaatgaattgcaaggaattgcaaggaatgaattgcaaggaattgcaaggaatgaattgcaaggaattgcaaggaatgaattgcaaggaattgcaaggaatgaattgcaaggaattgcaaggaatgaattgcaaggaattgcaaggaatgaattgcaaggaattgcaaggaatcgcaaggaatcgcaaggaatgaattgcaaggaatcgcaaggaattgcaaggaattgcaattgcaaggaattgca

SEQ ID NO: 2311 - DNA, 1057 bp, Homo sapiens
ataaaatgctgtcttttgccatagtctgtatttcctatgttgacctgagacttcctgggcccatcctccagcggcatgcattccaggttctgtgtttctttaaaatgtaaatgttgccatttttgtgtgtattgaaagactcagcattagaatccaagaaggaggttgtgtttctttattgagtctagtggataagagtgagtctgacgaggagggaaatgtggtgaacttgcctggttggagtccacacttcttttcttcctaacttggcctcacctcaggtgtttttttttttttccgttttttttgtttgtttgtttgtttgtttttgagacagggtcttgctctgtcactaaggttggagtgcagtggctcaatcagggattactgcagcctcaacttcccaggctcaagtgatcatcctgcctcagtcccccaagtagttgggactacaggtgtgggccaccacaactagctattttttttgtttttttttaattttagtagagatgaggtctcgctatgctgcccacactggtctcgaactcctgagtgcaagcgatccacctgccttagcctcccaaagtgttgggattacaggtgtgagccactgtgccgagctcaccccagttcttattaactaggcagacccttttgagtcctggccaggccctggcaaggctgtgtactttgtgttaggcttaccttgccatccatcatgctgtaccttatcctggttttctggccttcatccctctacctttaatgcaggaacttctggatctcttcttgcacaggggttgctgaggaagacttagcagtgccagccaagcctcctccttcactctgcctaactacatttattgtgatatgatcaccctgtgtttttgtgggatgcatcttgcaagagtggtttatcagagtcctaaccaggaagtaaagccagagcctctctgattgggtttttacctccacctacatgacagacttccctttcaggatgccatggggtgacctgagggcaggggaagctagaacatgggactgaataatttca

SEQ ID NO: 2312 - DNA, 1054 bp, Homo sapiens
tgaaatttgagctgctacagagggcagaacccggggcccactgtgttctttgagcacagagcccagcgtgtgagcacctggagacatcaaggtgcccggccattgtaaactgctcccagccaagcaggcagtcccaggcctggccctgcctatggaggctcccgcaactcagtgcccttgcctgtgccctccaagggggctgcagaacacccttcaggctggtgcagtattaactgcctcactcgtgtagatctataagaaaaaggcagcagcctgtaagaagaatggggaaagggtacagagagttctcagaaaaaggaaatgcaaatgtctctgaagcaaatgagaagacactcaacctcactctgcaaaagagaaatgcaaattgaaagtaggacaaggtactacaccaggttggcatagatcaaaaattttacctcatagattcctgtagaagtataaagtgccagctcctctagagagagcagtttggcagtatctctcaaaagtgacccggcagttccacttctaggactttgacatccagacataatttcacacatgtgaaatgaaatatacaaggatatccattgtaatagcaaaagattggaatagacataaatgtccactggaggccaccaggtgaatcacttacggcatatccattctgcagaattctactaagccattagaaagatcaaaacagctttatacatacatacatacatacatacatgggacaattcccaagatatagaaccttaaaaaataggaaggaacagtgtgtgtagtacttaggttcaaaaacaatacatattttagaatgaaaagtcaactaccagctgggtgcagtggctcacacctgtaatcccagcactttgggaggctgaggccggcagatagcttgagcccaggagtttgagaccagccttggcaaaaaatcatacaaaagttatctggatgtgatggtgcatccctgtgctcccagctacttgggggagaggggtgctgaggtgggagaattgcttgagcctaagaagttgaggctgtagtg

SEQ ID NO: 2313 - DNA, 1031 bp, Homo sapiens
accttttgtattttatattatgcattatctggtcaaaaagagattaaattttttgaaaaaaatcttagtcatgctggaggccagagcagctgaggtgctggggcaggagctggagggcagaccttctgcttgttgagggagggtcttcatggaggatggaaaccaccagaaggtgtgcctgtgacagtggaatagtgtgacgggaatagtgtgacagtggaatactgtgatgggaatagtgtgacagtggaatagtgtgacgggaatagtgtgatgggaatagtgtgacgggaatagtgtgatgggaatagtgtgacagcagaatagtgtgacgggaatagtgtgatggaatagtgtgacggtggaatagtgtgacgggagtagtgtgacaggaatagtgtgacagcagaatagtgtgacagcagaatagtgtgatgggaatagtgtgacagtggaatagtgtgacagcagaatagtgtgatggcggaatagtgtgatgggagtagtgtgacagtggaataatagtgagccatggttggcctttcccttcatgcactggcgaccaatagaatcaaggcagtccccatttctacacgtccttagccctgtctgttcctgtgtcctctccaccggctctcagtgttctagaacccacaccatgaatgcctgggtccctccctccactaaactgtagctctccaagggcagaagccagttctgtcatcccatgtgccctggctcttggcatagtgcccagcacacagaaaaggcataataaatgttgaatgaatcattcattaacatcaggaaacaccctggggttctgatttattgttttacatcagattcttttctccctaccccaactgaaaggcagccttttaatcgctggtatcccagcacttagcctactgctctgtatatagtaggagctcaataagtgttgaatgatgagagtcgcatgatggttagtttatcttcagatcagattgttcccagccaaatggcaagaacagagccatatcttcccc

SEQ ID NO: 2314 - DNA, 1026 bp, Homo sapiens
aatgcctacatttcacagtcattcgtttcttttaacacacacaattggattgacaaaggtaatgacttcctagctagccatattcaaaagaaatgtcaaaaatttaaatttataaagctctctgtgaaatgttgtgatgccccaatcaaatgaccctcctgatcttgcccggcaccctttccctcttggctgctggcgccttcctgtctcattgccaaggacaagccacgtctgcatgtctctatcccacccctcaccacttagaattcttgaaacctctggggaggctgaccaagaaggacagaggaccctatatttgggcttctggaacctaagtgccccagggctcagagctcctattagtgttatttcacatttactacaagtttaaaaaaaaaaacacacaacggtgatgatgacggtgatttttgtgtcttgtccatgaatcacacaatattattctagggggaaacgtaccctgatttcaaacaactcatctaaaagtacagattttggaacatgacctacatgtttacagtgccacatgagactacactcagactcatggacttttttcctttttcaattactaactgctttagtcctctaaacgtggattcttctttttttttttttttaaaccaatactgggtctaactctgtggcccaagctggagtgcagtggcacactcatagctcactgtaacctctaactcctgatctcaagtgatccttcctccttggcctctcaagtagctaggactacagaaacatgccaccatgcctggcttatttattatttatttatttatttatttatttatttatttatttatttatttatttatggtagagatgaggtttcactatgtttcccaggctggtctccaactcttggactcaagtgatcctcccacctcagccttccaaagtgccgggattacaggtgcctggctctaaacatggattcgttaaaagcttgccctatttctttttttttttttttttttatactttaagttttag

SEQ ID NO: 2315 - DNA, 1027 bp, Homo sapiens
caggttagttacatatgtatacatgtgccatgctggtgtgctgcacccattaactcgtcatttagcattaggtatatctcctaatgttatccctcccccctgcccccaccccacaacagtccccagagtgtgatgttccccttcctgtgtccgtgtgttctcattgttcagttcccatctatgagtgagaacatgcggtgtttggttttttgtccttgcgatagtttactgagaatgatgatttccaatttcatccacgtccctacaaaggacatgaactcatcattttttatggctgcatagtattccatggtgtatatgtgccacattttcttaatccagtctatcattgttggacatttgggttggttccaagtcttagctattgttaaccaacttaattgacgataatattttgcctattttgaaacctaaatagaatatttgaggaggaaaaaaatcactgaaatgttactttttttaaagtcattgaagtcatattttcaatttatttactcagactaattgaattttattattagaataaggataaacatcactttctgtaagttcacttactcattttctgcttaatagtcttctacagaagcatgctaaacctaaggacacaattaaaactagctaccatttaaacttaggagggcttttcttatctggtaaaagctaatcttatcaatcaaatgtagattattagttattgggcattttttacagggaaatactgggcctctgtcattcaacattatactgctgatctattttattcttatttataagtgttgtgctgttgtgtgaagtttttcacatcagtataattaggtgagaatataaacattaccttgggaaaaataatagatgaaaagttttttttgttttgttttttttttgttttttttaggcagagtcttgctctgtcccccaggctggagtgcagtggtgcgatcttggctcactgcaacctccacctcctgggttcaagcaattctgcctcagcctcccaagtagc

SEQ ID NO: 2316 - DNA, 1032 bp, Homo sapiens
aaaagtatgttcaagtcttccatttaaaagcgtttctctggccgggctcagtggctcacgcctgtaatcctggcacttcgggaggccaaggcaggcagatcacctgaggtcaggagttcaagaccagcctgaccaacatggagaaaccccgtctctactaaaaatacaaaattagccggggcgtggtggcacatgcctgtaatcccagctactcgggaggtcgaggcaggagaattgcttgaacccaggaggcggaggttgcagtgagctgagattccaacattgcactccagcctgggtaacaagagcgaaactccatctcaaaaaaaaaaaaaaaaaggcatatgtcttaaccactctagaaaacaaatcatccttcttagcactacgtcacttttgagtttgctttagtcaggcagcttctgtcccaccacttcactgaaactgctgacaggttaccagtaatttcctaaatgccacatccagtgatcagttgtattctgcttgtgctttctgtatcaaattactgactgctcccttcctgaaaagctgtctttgactttcgtaatgccattctgattcccatctacctttttaaccattgtgtctcaattttagtggcatctttttcttactctattccttttatcattattctttttaattctgtctctcaaaaaactgtgagatttgatctctctgttcttctctgtgtgactgccttcttcttaggttctcgtctcctctgaattatcctaacagttttctctccgattatctccgtgcctccctttccaggttctccacaccaccctttccagtccattgactgccctgttgccaaagcaatcctttgtaaagttgctgattcactgcttgcaatccttacatggtgtcgtctgtaggataaaacacaaactctccagttaggcattccttacccttccccatttatttcagattactaacagtgttttagatatgtcgtttagttccctggcttttgtcctatgattatgttggtcccttttt

SEQ ID NO: 2317 - DNA, 1094 bp, Homo sapiens
gaacatatgtttacctaatttttcctatctcctttttcttttttaacttttttagatttgttgtgctcttttattactgtttctttatgtctctcatagtttttgtcctattctcccctttctcttttcctttttactgtttttcctttgccttatcaccaggttcctaaccttgaggcgtatccactgtctactaccttgcctgccctgctgtccctttttaatctcctcatctggaatacagtggttcgttttaggtttttctctccttaattctaactccgtttttttactttttcatttctcctctaacaaattttttttaactttgggtttttgtttcattcttcattctgagtacttgcacctccttacttttggtgagaaagctggtgttacctagaacctctgtgtgctatagaaactcttattgctaagaccataagtgaggtaagacctaaacgccccttctcaaaggaagccctctttctgttttgcccaacatgcctcggtattacaccaagccactttatcttggcagttccttctgcaaacccctgcatgctggtgtagttatttctgtccatctactgtcaaaggtccttgatttaccactcagtgggtatacactaatgaagtctgattagatatttgctgttgtaatattaccatactgaaaatcctaaatttaggatttttgtggggagaaatattgggggtgtctggagaaaaaaatattcttaccaggatcactttctgcttcagaaattttaagaaatattttggctgggcgcggtggctcacgcctgtaatcccagcactttgggaggccgagacaggcagatcacaaggtcaggagatggagaccatcctggctaacacagtgaaaccccgttgggaaatgggaaactaatagactttctcatgttttgatatctctaattagagcataaatgcgaatgttgttccttcttgcaaattggtacatttccctttcattatctttctgcatgggtaaaaggtaactcagaatatatatttttaatctttctaaaaatggaatcttcatgaatcagagttgtagtaatctcatg

SEQ ID NO: 2318 - DNA, 1020 bp, Homo sapiens
aattatagtacaaaacacctttttaaagtgtgtagaggctagaagcatggtatacagtatttgcattttaattataagccacctcttaaatatattcatttcctagtcattactgcttaaaaaaaaatgcttcccaactaaaatttatgctactttaggataaacaaaattttttccgattgtataaagatgtcaactttagttattttttatataattattttttatatttagttattttttataattactaccttttaatataaaacagaaaatgacagaactatgttcaggtggcttatgcttatagtaaaagttaccttttcttgtagttcattcacctttttaagataaatgaagttgcaagtctagaaattgtcttctctcttgtactaacaaaaagatagaagggtttgtaaaggagaaaaagtagatttggcagttgattaaaaataaaaggatggtaacatagtacatgaatgatcaaaaggaagtggaacaaggagatgcatatcttttcatctgaaaagcacccttttgctttagggattatttttctattataacagacaccataagaacggaggttcaaaagtataattgtcagccctctgatacacttacattaaataattaatgattcaaaatttccagcatttttgtaatggaatgtaacttataatgtgattttgacttttagccccttccatgtatacatcagtcactgttctgctgctattgctaccttttctacctcttaatatggaattcttgaagagatttacaggaagtggaaagaaatacacgctcccaaatggcttgagtttaaaacatatgtcttaatgatagaaaagaatcatatccctggagtttctagatgttattgtattcctattatttcaaaaatatatttttgaaaaattaatgtttcccagttaaactaagtacatgttcactttaagaaattttgctgtgaaagccagaaaaaaaatcctctgaaatttcactacccataagcag

SEQ ID NO: 2319 - DNA, 1614 bp, Homo sapiens
cacagagaaaattatgaaatttgtcacaacacactagggcaagcagatgaagctgctcttgtccaaatgagactgccaaggagctctagctattccagaccctgtccagccatccttcaggatgaggggattagaacaaatgtggatgagaacaggatgagaacaaatgtgcctagatatttgttggaatatctaggttggaatatctgaggttggaatcctcagccaaactacagaagtctacagtgtggtctgagctttaagagtttagactggcatacatgagttaattataagcatattatagttaattataagcatacctgggtgagttagaaaaagttgttgacattgaacatctctagaaacactaaagctcttacaggaagtagttttgagtttaaggtgtataattttacaaatgtaacaatattgatgacaaggtaaagtccattgaacaagggaaaattaagaagtggaagatcaaaaggagtatagtcagaagaaggggcacttatttaatggaatcagacttggggacaacttagagttttggaatatattttgcaaaataagtgttctgaggtttataatatctttagacttggagtcagagttagttttaatgtgacttcttcctaggaatacagtctaatcctagacttatttaaggttttcacttctaaactcgtgtattcagtaggtttggccattgctagaatgtaaattaagcgtcccttatgaaaattagtaactgatagaacactatatttggtttctaattagtagttattcttcactgcagcaaactcaaatttagaatttagaaatggcacagagactcacccttataagagttgctattttctaaaatgtaaaagtagtagagaagtacttgaatatataacagtaactcctgtgaaataaccttggatttttattaccaaataaactctcagtggaatctagtcactattagaatttatacttaactgtgaagttcaaactggaaatcaacctcatgggtttaaagggagtataaattcatttatgctgataaaacattataaacgatgtctatcattgttactttattgtcatgtacatgtattttcctttgagaacacagcaaatgagcatagcttacaaacccaaaactctaccttaaaaatgggatataattagaggataataatgtcagacctcctgtccagaatgctcttaaaggaattccccttagagtcaagcccagctagtttaatgtagtcagaaatgcttatttccaaattctcaatttaaaataaagcagaatttaaaagtgggattgttacatcatgatagtgctttagggtaattgagtatttcatattaattggtattggtaagaatagcatttctgctgggtattaacatatccatatattattctctcatctgtgatcatatacatgttattaatttaagcccccatatttttgtctcctttctcatctctttcattagtgagttactgttttctggtatttttaaaagcagttatcaaattataaaaattttcagcaacttttctattttgagctaagtgcatctccttctagaatgagtctgtgaact

SEQ ID NO: 2320 - DNA, 1060 bp, Homo sapiens
tactgtatataaatttcagtaaattttactgaaaaattttttaagaaaaaaaccaatagtctagaatctcattttaaaaactcaccccgacctcagtaattcctccaaccactatgccatttttctgctttcatggtaaaatatagtttattgtcttttatttcctcacttcccaattcactctttttaaaaaacttttaaaaacatttagcaacataatatgtgcacatgattaaaagatcaaattgcatgtaagagttgataatgaaaagcaatagtctccatcccacctgctttctcctctttctggatccacatccctagagacaaacaccgtaaacattttttatgtttagttattttggtgattgtttctgcatttctaaatagtatgcccatactgttttttctcagtcaaatttatttattgtcctctgagtttctgctgtgatagatgagggctcatctcaattttaacagcctctgctcctgctggctgctttctccacagatttcataaagtgtttttattttctcttttgtttactcttgtagacttaagcaattaatatatataagcacatatttcttgttctatcactatcacaagttttatcactctctcttgatttcataggatattagcattcctttcccgctaccttttctttttcttctccacctttcgtgtcctgacagctctgcctttacatttatagcattataattggataagttaacttttgttctataactgttatgaacacttcagtgttttcctctgtaaattggattcacatgttaaaaaccaatgaaaatagttaggctcagtggctcacatctgtaatctgaacactttgggagacttaggaaggaggatcgcttgagccctggagtttggagctgtcataagctatgattgcaccactgcatttcagcttgggcagcaaagcaacaccctgcctaaataaataaataaggtaaaaataaataaaatgaaaaaataaaaactcaaaataacattttattgtgactttataaatattattcattgcaagtc

SEQ ID NO: 2321 - DNA, 1037 bp, Homo sapiens
gcagtagcatgatcttggctcgctgcagccttgacctgctgggctcaagtgatcctctcacctcagcctgctgagtagctgggactacaggtgcactccaccatgcctggctcatttttgtacttttggtaggggcatggttttgcgatgttgcccaggctggtgtcaaactcctgagctcaagtgatctgcctgcttcggcctcccaaaatgctggaattacagatgtgcaccaccatgcctggcaaattaaacagttttatctgctatttgtatcttgtaagattcttccaacaagcataataaagttgattaaaatatcaattattttaatccttcaaattctttaatcagtaaaataatttttaatgttagagctgaaacttccaaatctttttaaacttttagatgctgccaagggaaaaattaagaagaagagaagagagaaaacaaataaatgggaaaaaagaaaggttagtaattgtgagtaatataagaataagatttggctattagaggatattgtacgtattaattaagaaacagaatctataaggaatttgaagagataaaagtcaaagattggttaacatggtagttaacatggtgctaagcttatagtgtcctttgctgcttttcaaatacttctcagaaaactatgcagacgggtaaaaccttataattacaattctttagattctttttaattttggtgttaacatagttataaaatagcctatgtgctttgaaataaatgcaagtaatagagacataaattaaatgaaaggtaaaatagctacactcttttctctttatttaatttccctatgggtatcactcaagtatttgctgtacaaccttagatttttcctctgtgcacatggaaataaataaaataaatataaataaatatgtatagttttatgtactatataatacacatataattttatgctaacaaaaatagtctatcaatttgcttctctaaatttatttcatataatagtttatgaactatgtgtaacatatataaaaca

SEQ ID NO: 2322 - DNA, 1035 bp, Homo sapiens
atggatcctaacaacgtgtgatgtctcccccggacgcccagctttaaaatttctcttttgtactctgtccctttatttctcaagccagccgacgcttaggaaaatagaaaagaacctacatgattatcggggcaggtcccccgatatctggcgcccacgtggtctttcttttttcctaagtgcatgagggaacccgattccctttggtaggtgcggtgaaacatcaatcggcttggtccacagataagcgtgttcaactccccgacgagtggtgagtaatctgtgtaaggtctgggttaactatgggtcatttgtaatctaagaaactcctgttaaaacaggtaaccatgaaaaatatgatcactctattcaggacagtagaaaaatactgttcttggtttcctgaaaaaggaaccgtgtatataaaattgtgtcattttgttatcactctattcagggcagtacaaaaatactgtccttggtttcctgaaaaaggaaccgtgtatataaaattgtgtgattgtgttcgtaaagcattccgaaaactggtctcggcagggtattatgttcccatcactgtttggggtgcttgggccttggtgcatgccatcttagtggcttgccaatctcgtgaccccctgcagttgccgcagttttctgccttttcctcagtttctctgcctttttctcaaccttcctctaccacatggccttcgttcagactctcccttcagctactcctcccctacctaatgattctgaaaattcgatgtctaactctggtaactttggcttaaagttaccccctacttttcttacttcttctcacgaaaagccagtacttcaaactcctgcggctgcgactcacacagcccggtgccatagatatgctaattcttctctcttcaaacctccagcatcaactaatggctctgggaccaaactacaatttacctatcattctccaggccctcccccatccactacagcccctcaccctcctgtcgtttcagttcctcaaccggtctgcatcga

SEQ ID NO: 2323 - DNA, 1045 bp, Homo sapiens
cgctgggagctgtagactggagctgttcctattccaataaaattgttctttaatcaacacaattgataaacctttagctattctgagcaagggaaaaatatagagaaaagacacaaataccaaagttaagagtaaaagataggacatcactaccgactctatggaagttaaaagtattataagggaatattatgaatgactttatgtcaacaaattagacaacttaaatggccaaattactagaaagatgcaaattaacgaaactgattcaagaagaaggggaaaatatcaataggacaataataaatgaagaaaagtaatgtgactaaaatgaattggtaattagaaatcttttcaaaagggaaaacccaggcctggatggcttcttttaaggaagaaagattaccaatcctacagtatttttgggcggaaataaaaaggaaacaatttgtaacacattttatgagaccaatattactcagatatcaaaaccaggcgaacacatcacaaggaaggaaaattgcagacaagtattcttcatgaacatgtatacagaattccttaatgaaatattaggtaacagaatccagcaacatttgagaaggattaggcaacagaatgagaccatgccaataaaaaaataaagagaagaagtctgggcatggtagctcactcctgtaatcctagcactttgggaggccgaggcaggcagattgcttgagaccaggaattcgagaccagcctgagcaacatggtaaaaccccatctctactaaaaatacaaaaattagctgggtgtggttgtgcatgcctgtaatcccagcttcttgggaggcagaggcactagaattgcttaaacctgggaggcggaagttgcagtgagccaagatctcgtgttgctgcactccagcctgggcaacagagtaagactctgcctcaaaaaaaaagaaaaaagaaaatgattatataccatattccaggagtacgaggatggtttagtactccaaaatcaattaatgtaatatgccactttaataacggaaaac

SEQ ID NO: 2324 - DNA, 1058 bp, Homo sapiens
gacaatgaagatgaatattgttaacactgtagaaaaagtacctaaagacaacatgattgtctaggcctgtttgtgttgctataaaggagtgcctgaggctggttaatttataaagaaaagaagtttactttggcctggcgcagtggctcacacctgtaatcccagtacttcaggaggctgaggcagaaggattgcttgagcccaggagtttgagaatggcttgggcaatgtagcaagaaccgcgtctctacaaaaattttaataattagccaggcctggtggcacatgcctatagtctcagctactcaggaggctgaagcaggaggatctcttgtggtcagaagttcaaggctgtagtgagctatgattgtgccactgcactcagcctgggcaacagagtgagaccctgtctctaaaaaaaaaagaaaagaggtttatttggtttatggttctgcaggctgcacaagaatggcgccagtatctgcttctggcaagagactgaggctgcttccactcatggcagaaggtgaaggggcgcctgcaactgcagatctcatggtgagagagaaggcaagagagagaggaagaggtaccaggctctttcaacaaccagttctaggtgaactgttgtgggaactaatagagttagaactcactcattactgagagaatggcaccaagacattcatgaaggatctgcccccatgatccaaacaccccattaggccccacttccaacattggggatcagatttcaacatgaggtttggagagtcaaatatccaaacgatagcaatggtgaaaatgtgtgctgggcttattgaaggaatagaacagtgtacatttataaaagaacaagaaatcatcacagtttataatgtctaagagagagttctaaatcaaaagcattgttaatgaggcagatgactctggaggaaacattttaaaaagccatccagcagaaagccttcttatccttagaagacccacttcttggtctctcacctgcttctgataacttagaaaaatggtgtatagtaaccttttaatcaaaacac

SEQ ID NO: 2325 - DNA, 1047 bp, Homo sapiens
cgaccctgatgctcttcaattcggtgctccgccagccccagcttggcgtcctgagaaatggtgagtaacggtcccaaccgctgctcggagctggcggaattcatttcccccgaaacacacgccacctccgaccagggccgactccaattctgaactcagcttctgagttctcccatggcaagggtaaattagtgttagcagggactactaaagaaagctgtactttcatcccctcgggacacttgtaatcgtaatcgggcttttaaaatcgtaacgtaggcagggacgtcgaaataactgccttccaaggccccttacagcttacatctccattgcgcgttaacgggaaaatgcatgcatttgtgtgtatatgtttccttcaacggttatttgagatgctcaaaactcctaatcattgattaattcattcgtttgttgtagaatcttagtgagcccagctatgtgctataggtatataccagtgaatatgacccgctgttaaggaactcagtcaagcagagaagacaggatatctgcttctaacaggaacaaaatcttattttccccgtttactacacggtcataaaaatttaaattatagagtgaaagatgcctgtaaccacatccgccagagatgacccctgttaatagattgaagtatattattccagatgttttcgacgctagaggtaatacctattattttcagaaatcggatcaaaacgtccagttttttcactttaatggtataagttgaacgtattcccatgttaatacgtagaaatctaacttattttcttacgctaaaacattggcaataagagatttgaggttagatttggatgtcatcaacttaaactttttggtaagtttcagataagggagctaactacccagattaaccttggacagaaataaaatctcactcatgtgaaggtcgactatagccagaggttctttttccccttgaaactatgtggaaaacgaacctgagaagggaatttttatattcagcgatgagtctaggaaaataatattgagaaagag

SEQ ID NO: 2326 - DNA, 1115 bp, Homo sapiens
attatctctagcttgtccctgaaagtcaagagtctttgataagtttttctgtaatcttgcacataaggtaaagatttataaacagctacaataccattgttcaaccttgattgttcattgaagttaaaaccttgtactgggcactcattaactatttgtaaaacagagttactttaactctgcttgtaaaatctaaatgagctataaggctgataaacaacataatttttttctacctaaaaatttatcatgtatttggtttaaatggcctgttttttgttttttgtttgtttgtttgttttttgagacggagtctctgtcacccaggctggagtgcagaggctcgatctcagctcactgcagcctccatcccccgggttcaagcaatcctctccctcagcgtcccaagtacctgggagggattacaggagcctgccaccacgcccagctaatttttgtgtttttagtagatctggggtttcaccatcttggcgaggctgatcttgaactcctgacctcgtgatccacctgcctcggcctcctaaagtgctgggattacaggcatgagccaccacacccggccaaatggcccaattttctattatgttttcaactattacttaaaattgattttcctatgtttatattgttataatggacaaggaagatttaagagttatataacacagcacagtactgtagcagctagggaaaaacttatcagtggtgtctgaataagctcttcatttctgtttttgtttgtttgttttctccttccatttgtttctcactaaataattttttttaaatggaccaacaaacatttctctcaaaggagtctctgaagtaatctgactttaatctctgaataatagtgacagacattacaatctcctttatcactaaaaaaaaaaaaagtactctgttttaaaaatcaaatgttttcatttattcacctgagccatttaggaggttaagctggtttggactggttttttgtttgtttgtttgtttgtttgtttgtttgttttttgagacaaagtctcactctgttgcccaggctggaatgcagtggcgtgatcttggctcactgcaacctccacctcccaggttca

SEQ ID NO: 2327 - DNA, 1026 bp, Homo sapiens
ttcaacatatcaaaaagtgaacccacaattcctccctgaactcatgatttctccctggcaatgccatctttttcctctcctctgatatcatttccttgaacaacgtatttaacttttcttatagtgtgagtctgatggtaataatttaccttagtttttctttacctgaaaatgtccttatttcatcatcattctcgaaggacatttttgttggatatgaaattcttttttttttttttttttttttttttttttttttttttttttttagcccagaggtcctttattttttttttttaacacctattatgccatgaattcatagggaataggttccagcagctcaggctccttcccattggttctcacaaagtgtgcttctctgggtggagcaggctggcgctttagttgaacccaggtacctttctctttggcttctttctttttctgatcattttccttcacacgtttcaggaagctatctcggctcttagaatgcttaatgtgctcaatacgcacattaattctcttggcaagaatcttgcccttaacttgtttgtttacaacaatgccaacagcatgctgggtaacattgtagactcttccagttttgccatggtaacacttgtggggcattcctttttgaacagtacccgttcccttgatgtctacaatatcacctttcttatagattcgcatatatgtggccaaaggaacaactccatgttttctaaaaggcctagagaacatatatcgggtgcctctcctctttccctttgtgtttgtcattttggcgaattactggaagatggcggttccggccgaaaagaagctggatatgaaattctgggtcaacagcttttttttcctttcattgctaaagttgttccactatcatctctgctttcattgagaactctgtggttgttaaaatcatttccctgtatataatatgctgtttttcctgactattttcaggattttttgtctttggtttctagcagtttgactgtggtatgtctagtc

SEQ ID NO: 2328 - DNA, 1030 bp, Homo sapiens
ccccactctgcatgtcagtactgcagcatagctgctgctgccccttacctgagcattccactggaagcctggggatcaccccacccctgccttccatagccagcacctgcatgcaccaccagggtcactgagggcagttccacctagcctggcttcatacacgccactacccaagcacaccctctgggaggcctgaggattgcccagttcagttcatcaccagtggtgcctgagcactcctcctagagtctaaacttgggcctactcaatctgctgctaccaccatagctggcaccaacctgtacatgcaacctgcaagtctagggactggcctgcccaacctgtcacagccaccgccaacactagtacggaacacttgggttccaggggattttttcatcactgctactgtcatcatccacaccactccacacctcctgcccaggggctcaagaatttgcccacccacctggcccactgctgccatttccaatacctgagtaagtcatctgaaggcccaagaatctacctgcctggatccattaacaccagtgccagcgtatgctgccttggggccaaaggacacacaggctcagaccactgctgccaccactggggcctgaagactggcccacctggtatttcaatttctggcaaaacttaaccagtctgcactaaaaaccacactctaatctaccaacgaaaccagataccaatgactctatggccaaaagaaatgatagagactatgctactgcttgcatccagaaccaaagccaagtgtcctctccaaccatcaccatagatacatcttcaggaaaatgttctccactacaaaccaaattcaaaaaattggaaaaagcaactgttacaccaggtgcacaaatatcaacataaaaacacagagaaatcaaaaagcaaggatatgtgacacatccaaaggaacacagtaattcttcagcaacaaatcccaatcaaaaaggaattctcaaaatcctggaaaaatgatccaacatactgatactaagga

SEQ ID NO: 2329 - DNA, 1770 bp, Homo sapiens
aaggatgggaattctccctaactcattctacaaggccagcattattctgataccaaaaccagacaagcacaaggacacacacaaaaaaactacagaacatacggacatagatgcaaaaatcctcaacagaatactagcaaactgaattcaacagcacattaaaaaaaaaaaatacaccatgatcaagtgggatttatcccaggaatgcaagaatagctcaatatagacaaatcaataaacatgatacatacgtcatcaacagaatgaaggacaaaaaccatatgatcattttagtagatagagaaaaataattcgataaaattcagcatctcctccgaattaaaaaactcaaccaactaggcatggaaggaacatatctcaacataaaaaggctgtatatgacagactcacagttaacaccacactgaatcgaaaaaagctggaagcctttcccttgagaactggaacaagacaaggacgcacgcttttcaccactcctattcaacatggtactggaagttctacccagagcaatcaggccagagaaagaagtaaaaagtatccaaactggaaaagaagttgtattttccttggctgatgttatgatcttatatctagaaaaacttaaagactctacaaaaaaaaaaaaaaaaaaaaaaaacctcagatctgataaattcattaaaagttgcagaatacaaaatcaacatacaaaaaaaatagcatttctatacatcaataatgaattagctgagagagaaatcaggaaggcaatcccatttacaatagctacaaaaaaataaaacacttaggaataaatttagccaaagaggtgaaagacctctataaggaaaagtatgaaaccgatcaaagaaattgaagaggagacaaatggaaagagacctcatgctcatggatgggaaaaaattattatttttaaaatggccatactaccccaagcaatctacagattcagtgcaatccccatcaaaataccaacatcatttttcacagaagtagaaagaacaatcttaaaatttatgtggagccaaaaagaacccaaatgccaaagcaatcctaagcaaaaagaatatagctaatataataactaaaacagcatggcataaaaacagacacagagaccaatggaacagaatagagaattcagaaataaatccatatatttacagccaattgattttcaataaaggtgccaagaacctacaataaacggtgctgggaaaactgggtatccacatgcagaagaatgaaactgtacctctatctcactatattaaagaaaatcaagataggccagacatggggctcatgcctgtaatcctagcactttgggaggccaaggcaggtggattgcctgagctcaggagttcaagaccagcctgggcaacatggcaaaaccccacctctactaaaatacaaaaaattagcttgacgtggtaggcgcgcctgtagtcccagctgcttggaaggctgaggcatgagaatcgcttgagcacaggaggcagaaattgcaatgagccaagatagcaccactgcactccaccctggttgacacagtgagactcagtctcaaaaaaaaaaaaaaaaaatcaagatggagtataaagacttaaatgtaagacctgaaacaatagaactactagaagaaaacatagggaaaacacttcaggatattggtttaggcaaagattttatggctggccaagaactcaaaagcacagacaacaagaacaaatagataaactagac

SEQ ID NO: 2330 - DNA, 1030 bp, Homo sapiens
cctctgtgctccagttattcatccctacctccctctaagccctggcaaccactgatcttattacttcccccagtcacatttcctccatgtcattttatggctttatcaagctcatttctttccagtgctgaataatattccattgtctggatgaaccaaagtttatccattcacctactgaaggacatcttggttgtttccaagttttggcaattattaaagctgttataaacatctctccctttttatacattatagtctcaccacaggagatgtagtgcagctggctctgctggcttctaatttcaccaacttggtcaaaaattacttaatattgaagttttatttacacatgttatattcagcatgtaagaatcctgaaacctaaatttccttggaatatctttcagatgggttttataggcaagtgaatcaaatcagtggagctcacaatacctcagacaagcaaaccccttcaaaacccaagaagaaacagaattcaaaaggacttgctccttctgtggtaaggttttacagatgtatacatgtgtgcagatcttatctgtaggatagaataaatgggaggctattgattaagtgaatgagaatcttcatgattctcatttgatatcagtggtttattgcttattcagtacctacatttgtggttctcaaattttaatttttggttcttctgaattataatgccatttacctatattattgatggaattaaaatatatgtagcctcgttgataaatatctttaaatttattttggttttaaagaattagattgaattaaacataagatgttgtctcatgccattaagcagaaagtggtttttttttttacaatttcaatatctacattttaaaaaattgataacataattttacatattttggggggtacactatgtataatgatcaaatcagggtaattgagatagccatcacttcaaatactgtgtgcatcagagttgcctgaggcacatgttgaaaattcaccttactcatccctaaaaatc

SEQ ID NO: 2331 - DNA, 1028 bp, Homo sapiens
ttacatggtgactttattttaatagagagtatctcctgaaattatgccctttggcctatatttagaattctctcaattttttatttaataagctgtggagtagataaagtgcttctgctcagcttttttcctctttaggggctgctggttaaaattagggggctgaaattttcatacccccaaaatagtttcagcctatctcagccttctccttaatgttagaggcccttttatttctagatgttttccccagcctcaccttttttttttcctcaaaactttaaaaatagaatctgatacttaaaactaataaataaatgatagttttaaaaagaaaacccaagtttctcaagcatgctttcctcttttttttaatcctctcccctccctcttccaaatcaccagcctcaggcatgctttaagagagttatttgggttacattatttttaagaacatcaatttcttaagcaacatcttagtagcctggttattcctcatctatagatctttcaaaaacactttgaattccataaccaatcctcagagttacccagtttccactaaagtaaaaagtgctgataaacaagaaatctcaagtacagaacttgttttattttatttatagatagatgtagatatagatataaatttttttttttttttgagacggagtttcactctgttgcccaggctggagtgcagtggttcgatctcggctcactgcaccctccgcctcctgggttcaagcaattctcctgcctcagcctcccaagtagctgggattacaggcgcccgccaccatgcctggctaatttttgtatttttagtaaaggcagggtttcaccttgttggtcaggctggtctcgaactcctgacctcatgatccacccacctcagcctcccaaagtgctgggattacaggcgtgagccaccatgcccggcccagaacttgtcattttagctgagatcttacagaattttccaaagatcaccccaagcaatcttattaggactttagtatcggtgg

SEQ ID NO: 2332 - DNA, 1031 bp, Homo sapiens
ctttcaaggagttttgttataaaggaaagaagagaagtgaagtggtagctggagaaagaagcagggttgaagtttgctggggtttttttaaataggaatataacatttcacagtgattggcaggatcgtatagagagggggagattgatgcaggggaatttgctggagcaatgttaagcatgaggggatactatctgatacacagtaggagggtaggcctttgccaggaacatggatagttgacccatagtaattggagaaaaggtggaatatataagcatggtgcaggtaggctactgagagatggtggggagagaggtggagagatgagatggccataacttacagaagcttccttctgttctgatgttaaaacatgaatcagggttattaactgcgaatgaggataagggagaaagggagtagagattttagaagagataagaaagtctgaaattgtcactgagagaatagaggaataaatggacaggaaaatatgattgttgggcttcaagagtcaacttgaggctagcaataattaattgaaagtgagcactccacatggttgtgtgtttgctatgcaagtacaagtatactataggtagagagctagatttaaccagggatgtggtttagcaatgcaagtgaagaaggaagttgacagtggatgcaaagaggatgattatgactataagatataaccttggtaaggaggcatattagtccattttcacactgctgataaagacatgtacaagacttggcaatttacaaaagaaagaggtttaatgacttacagttccacatgactggaaaggcctcacaatcatggcagaaggcaaggaggagcaagtcacattttacatggatggcggcaggcaaagagagagattgggcagagaaactcccccttataatattgtcagatctcatgagacttatttgctgtcacgagaacagcatgggaaagacctgcccccattattcaattacctcccaccaggtccctcccacaacacatgggaattcaa

SEQ ID NO: 2333 - DNA, 1026 bp, Homo sapiens
ccctttggagttgacttccaattttattccactatggtctgagagagtacttgatataattttgattttcttaaatttattgagacttgttttgtggcctatcatatggtctctatcttggagaatgttccatgaatgttctgatgaatagaatgtatattctgcagttgttgggtagaatgttctgtaaatacctgttaagtccatttgttctagggtataagtccattgtttctatgttgacttactgtattgaagtcccccactatgagatgagattctatttttgtgtatttcaaggttttgctctaagatttagaactccttttagcagtttttgtaaactatgctggcttggtagtggcaaattctctcagcgtttgaaaaagactttcatcttttcttcatttatgaagcttagtttcactggatacaaaattcttggctgataattattttgtcagctaataattatttaataaggctaaagataagacctttatcccctctagcttgtagagtatctgctgttaatctgataggtttttcctttacaggttacctgatgcttttgcctcccagctcttaagattttttccttcatcttgactttagatagcctgatgactgtgtgtctaggtgatgatctttttgtgatgaatttcctgggtgttctttgagcttcttgtatttggatgtctagatctcgagcaaggccagagaagtttttattcttttgcctttgtctttgttgaattgggttaattcaagagccttgtctttgagctccaaaattctttcttctacttgtttggttctattgttaaaactttccagtgtattttgcatttctctaaatgtgtctttcatttccagaagtcatgattgttttttatttatgatatctatttctctggagatttttttcgtctacatcctgttttgttttatttttaaatttaagttggttttcatctttctctggtgcttccttgagtagcttaataattgaccttctaaattctt

SEQ ID NO: 2334 - DNA, 1061 bp, Homo sapiens
tggtcttgtaatttatttgaagctaacatttcttaaaaattttttacctttatatgatgataatgtcaaccttcagaagagagtaacatcttccatttgaatacctatcttgtttataaattgggggggctgatttattcatttatttcaaaaaggatagtaattgtaacttatttgtttcttattaggagacttagctagtaaatgttttctattcacataagaagtctatgccttctttccctacatatcatctgttaagtttttactatagtcagtacaaatcagccaaaagagacattgccattgaaagtatttggagctgaaagcaggctaaacaatgaaatttctggcagcctaatttaaggtatgccttagtaataacttagtaacagttgaacttcaaggaaatctctgaaatctaaactttcttcttctaggtcaccatcacgcccagctccatgaggaaaatctgcacatacttccatagaaagtcccaggaggacttctgtggtcctgaacactcaacagaattatagattctaatctgagtgagttactgagctttggtccactaaaacaagctgagctttggtccactaaaacaagatgaaaaatacaagagtgactctataactctggtctttaagaaagctgccttttcatttttagacaaaatcttttcaacgctgaaatgtacctaatctggttctactaccataatgtatatgcagcttcccgaggatgaatgctgtgtttaaatttcataaagtaaatttgtcactctagcattttgaatgaatagtcttcactttttaaattattcatcttctctataataatgacatcccagttcatggaggcaaaaaacaagtttcttgttatcctgaaactttctatgctcagtggaaagtatctgccagccacagcatgaggcctgtgaaggctgactgagaaatcctctgctgaagacccctggttctgttctgcctccaacatgtataattttatttgaaatacataatcttttcactatgcttttgtggggttttttttaagta

SEQ ID NO: 2335 - DNA, 1080 bp, Homo sapiens
aatgacaggttgggcagatgttatttgtaggttttagaaaacaatagtgaagctaagataccagaaaagtaaaaaaacaggtgacagaagaggaagttgtcatgaaagctacaaggcaggtgttaagccactgaggagggcaagagaatgtgctggacaccagcgaacagttgagtggactgagccagcagtaaaacaggatgatgtgcccaagaagggtggggaagccggggtctggagaagctggggtcaggaggttggagaatgtcagcctgttctgaccctgaggaagagagatggggcctggtggcaggccaggttttcatttaggatgagaagggggaaggagtgtgtgtgaaaagaatggaggaggtaaggaaagggtgttcaccagatagctggtgctgtacagcccaggggcacagagacacctgcaaaagcccagggatagttagcagcaaaacgctgtcctggattactgccctgccaggaagtgagagtgagaggccaggttatgtccccacatagccctgccagggccctccactgcagtgcaagagacaggcttgcaggactcagcccgagaaagaatctgggctcctgagtcaaagcagcatcctatttctgctacattcagcctgctgagtaatggctccaaaggcaatgccagcagctcacagggcacaaggggaaagtgagaagcagggcctggcaccttatttttggagctgctgtcaaaggcccagccctctggttctgtgtgcctgacactcagcgacagctctcagtgtgagcttggataaccagccctgcaggcactggctgaggtgcccagagaggcaggccctgtgagaaagacgagttatgtgacttcaccgaagacagggagaatggagtctttacttcttaaaggagttcttacttcttgaaggagtcaatctcattggtcatcccagctgggctagtgcctcagcctgaagtcccttaggagtgagccttgtattctttcgctgctcacttgttctttgaaaattacctaaaatgatggtgacatgcggaacacacacaaacttgaggtgt

SEQ ID NO: 2336 - DNA, 1081 bp, Homo sapiens
gctctgtcatccaggctggagtgcagtggcgcgacctcaactcactgcaacctccacctcccaggttcaagcaattctcttgactcagcctgctaagtagctgtgattacaggcgtgcaccaccacacctggctgatttttgtatttttagtagagacggaggtttcaccatgttggccaggctggtcttgaactcctgacatcaagtgatccacctgcctcggcctcccaaagtgctgggattacaggcatgagccaccatgcctggcctaaggcaacgaaatactaccagagaaagtcaccataaggcagatgggtttctctataattcagaatctccaattccacatgggaccaaaggatgctcgaaaatatgactactgtgctctgaaaatctagtactatagctcactattcctactataatcaactatttcaaaccttctgcactctcccgatacctctgacactcccccaccccccactctccaccgatgtcataatctttgagttcttccttgtgttaccaaatgcttaaacccacccacacctgcacccctccttcttgcctcctgttgcaattgaagagtttctcttctgactgtctaatcaagagcagctccaccacttgtgttttacatcccattttctcccaccttttcatcaaccttctctctaaattacccagttcctctcttgtgcatttcatcattccctctctgttggatccatctcatggttatttaaaggagctgatatccctgtaaaaaaaaaaaaaaaatcctctgcctctacacactctaattcctcaaaatagttctacactctctagttccatttctcacctcccgttcacccctcaacccgctccaatctgacttttgctctcattattctactggaacagctcttgcaacagtcatcagtgacattcgtgttgtttcatacagtggtcacctttcaggcctcatcttggctcttcatcatttgacactgttgaatgattgaccatttggtctttcttatttaaagaaaaaaaaaactttccttgtcttctatgatgaaacactcttcctgctta

SEQ ID NO: 2337 - DNA, 1026 bp, Homo sapiens
atttacttagtcctccattgttggttatttaggtagtttctaatatttttacctttataaatagcactgcaataaacgtcctcatttggttctttttacatatgatttgacaggatgaataatgctaacattaattactactatccagtcagtaataaattactatagggaaactggggatgtttggaatgtacacttaatcttttgaggtcaataacatggagtgcaactactaagcaaccacaccagaacattgtccaggacggaatctgaggcaaaaaagaaaactacttgctctgtctagggtgatatatctgccttttcctgttctttggagctctcaatgtgagaggcatcaccacggactggcaagggcttccggccaaggctctgctcactctggaagtcacaggccttttgccttattcccaggctatactttggcggaaaaccagtcctgatggagtccatttccaaggcccggaaccagccctggaactgatcggtcaggcctggagctggatggccacagaacaaagcaggtcagcagaagtcagtgccagaaaggtggcaagagaaggctgaccgagcagacagggtgggtagagtcatgggtgtaagagacaatgggttgggagagttggcacaaacagctcaagagttcctcttcatctctccaaataacttaatattagagtgcccagggctcagtgcttggctttatcttttctatcttttttctctacactcactttcttattgagctcatcaagactcagcctcaaataccagccgtacacagacaattcccgattttatgtttctagcctggccttcagcctgaatgcctggcctgtatatccaactgcaaagctgacatctccactgggatgtttaacacgcatctcaaatttaacatgtttaaaactgagttcctaattttacccacccttacaaccccaaatgtgatctaacctcaggtaatagccatgcctctctcccagtttcaggccaaaagcttgaagt

SEQ ID NO: 2338 - DNA, 1033 bp, Homo sapiens
cagccatgccataggtgtgaggttggaccaagagaacctttaagatatcttccaagctctaactctacgactctgtaatcattatcaccataaactgggcaccttttccacaaggggcttgtgtaaaatgtggaacaatcaacttggaaaaggcctattcaagaatcagaacttcttgtgttctgagggatattcctacaaatctccgaggacataataacttaccaatatatagtctaggaatatttctgaatgtttcagtcactgagagtccaggaagcctctcttctggacagtgtctgctaattagctcccttgttgaaatagtctgtatccaccaccaaacaccctgagagtgctatcctttcctgatggatacattatagtttatttctgaaatagtttatctctcaaatctctctctaactcacacctctcccctgcttagattgttccaatcagttggacattttatttgtatttcaaactacctacacttgaatatctgttagacattttaaactgaaaataccccaaactcgtcttctgccaccaaacttgctcctcccaccaaacttgctcctcccacagtcttgcctgtttcaattaatggcaactctatcctttcaatatgctgggacaaaaaccttggagtcatttgcgacttattttacaccttatagccagtctttcagaaaaacctgttgttcctactttcaaaatatattcagattatgaccacttctcatcacctgcactgctgccacctggtctaaggccatggttctctctcaccgagattaccacagtaacgttttcaactcatctctctgcttccatctttcagtctttctcagcacaggatccagagtagggtgatggaaatgtactatatggctattgtggtggtggttacatgactccatacatttgtgaaaactcatcaaatggtactcttaaaattgacaaattttattatatacaaattatattgcaaggccagccatggtagctcatgcctataatcccagca

SEQ ID NO: 2339 - DNA, 1047 bp, Homo sapiens
tagtggtgacggggtttcaccatgttggccaggctggtctcaaactcctgacctcaggtgatccacctgccttggcctcccaaagtgctaggattacaggcgtgagccgcctcgcccagcctgaagcctcttttataaggacattagtgtcattcgcaagggcagagccctcataactcaatcacttcccgaaaggccccacctcttaatactcttgcattgaggattaagtttcaacatggattttggagagacacaaacattccaaccattgcaggggcttgtgtggaggtttaaagagctgttactttggagccaagcaggcttgccatggaacccttaattgacctgtagccaatcagagcattttccttcacacttgactagagcagtggcaataaagtctggtcttcagatgcaggagcgatgctccagtttcaacattatgaacctaattgtctaggtattcatgccaataacaggaaaaatgttccaaccttgtgttggtaccctgttaaatcattaagacttggaactgcagaattgcagcctggctagacatggtagcaagtggtaatctaggtgggttcatgaaaacataaaagtactccacaaagagtcccctaagtatttggtagaaaagactctgaaaataactttgatttcctgcatggatcttgacttcttttagttaagccagtgagactcaagagtttgtgagagctgggtattgacgctaatgggatcaccactatacacactgatgaaggccaaaaccagcagcttccattctcactgtgaacataatggaccttgctcacctctccagccttatctcctgcaattttctctgttctgaatatgttgagccagtaataaattcctccagccagtaatacattttttgtctactgtaactttgcgtatgctattctgtcttcccgaaacactcaatctctcagctgcattatttattggctaactcttttgagtcactgcctaattcaggaagtcctccttgattcctccagttggggcttcaggtct

SEQ ID NO: 2340 - DNA, 1044 bp, Homo sapiens
tttggaactgagtaacaggcagagaatagaagacactggagggctcagaaaaagataagaagattagggaaagtttggaacttcttagagacttgttaaatggttgtgaccaaaatgctgacagtggtatggacaaaggccatgctgatgaggtctcatttggagatgaggaacttactgggaactggagaaaagatcacccttgttatgctttagcaaagaatttggctgtatcatgtccatgccctagagatccatggaagtttgaagttgagggtgatgagctagaatacctgatggaagaaacttctaagcagccaagtgtttgagatatagcctggcttcttctaacaacctatgctcagatgtgggagcaaaggaatgacttaaagttggaacttatatttaaaagggaagcagagcacaaaagtttggaaattttgcagcctggctatgtggcagataaagaaaaaacttttttgggagaggatttcaaacagactatggagcaaccacttgctagagatatttgcataaataaaacagagcaaattgatcatgtccaaaacaatggggggaaaggccttgaaggaatttcagagacctttgtagcagcccctcccattacaggtccagaggcctaggaaggaagaatggtttcatggacagggcccagggccccactgccctgcatggccttgggacaccactctccacattctggccactccagctcctgccgtggctcaaaggagcccaggtatagcttgggctgctgctctggagaatacaagccctaaacgttggcagcttccatgtagtgctaagcctgcagatgcagagtgcaagagtggtggattcttggcagcctccacctaaatttcagagaatgtatggaaaagcctggctgtcaagacagaagcctgcttatgggggcagggccctcacagagaacctctactagggcagtgcagaggggaaatgtggggttggaggcccccagcagagttcccactgggcactgcctagtggagctgtgagaag

SEQ ID NO: 2341 - DNA, 1030 bp, Homo sapiens
tgtaagaagtatttgtgcaaaataatttagtaagtgggttgtgggattttaatggcaaaaatgttcagaataaattgttttataattgaaagtatttaataaacaacaagccttgttaaaaggcttttcagtctaacctattttgtttaagattctggaaggcttggtttggtaaagtagttgatgccttacatttatataacattttagcattttaaaattattttaccttaaaaattttcttaaattataaaacagtattgttcataccaagtgaaacaatccaaagatatgtaacccttaatccctgtgtatctcctgctttttcacacctagtaagtaagggtaatactgttgtttgataatccatggctcattgtatttttacaaacatcctattcattgggtcatccctgaactttttgcaaggtcagtattcccattttattgatgagaaagttgaggcctaaaaagaatagtttctggcctgtgattacttatctggatgatgttgcagctgacactgggacctaggtcaaatgatttcagtatttgtgctgttaactgttttatgtaaatttgaagcagtgtgatagagttgggtctctggggttagtcctgggtcaaaggtaaatttttaatctttctaagtcgttttccttatctgtaaaatggggataatacaaatctccccaggcctgtggggattaaggggaataatttaagtgcctaaaaataggcaaagaatgttagttcccattctcttaaatatttgaaaatccagattaaaaatatttttaaatgaaggattattaataggattacttacttaaatggtaaactttcctagtgtatttaaagtgattttatttataatcagttttcagatatgatttatgtgatctgaagtgcagctgcaacatctttcagcacgagtgtagaaatggaaataggattaagtcagactctttaaaacattaaaagctgtgataagatttttttaccaagcgaagaaatcaacctaaccagt

SEQ ID NO: 2342 - DNA, 1113 bp, Homo sapiens
catgggctaagaatccaaaatggtaggaatcatagcctaatgcactaactttatagccacaaaaataaaaaggaatatcttttatataaggttgagaaatactttcattgctttggcctttttcattgtgaatagttattatctttttagttcttatggataaaagagcagagggaaaaaacctaggctccctgtatttaaactattcaaggtttatgcacaatctgtgttttcacaaggattacagagaaaaacagattcttaaaaaactaagattttgttaatgtttacctcatcccaggcaatgttctttttgggtgcttaatatataatatctcatatagttgactatgcattaatttttatatgaattcttttatatattaaatcaattaaaaaccttatttacgtttcctcttaatagaggttggaaaacattggtcacctgtattacttgaaagcagcctcttaggtacttgtaggtctttaaagtttgcttctgagtctttgcctctctgacccaaacatttctattcctttagctttttgtataggtcttatttttcagatactttaatcatctatgctgttttctgttggaacttctcccaagtctttttaatggtgaagaccagaattctatgttttatgttaactcccttaggaaagacatggtcagaactcagtagaatagtaagattacactcctcaattccctatactttttagttatctttcactttttagggtatttttggtgtacagaagtagaaggactagccatacattgaacatagttgaagtttgtcattttattagtgaactgaattcactggtgaagtgcctgtttttctttgcaacactgtttcttagattcttggagcaagttatttgtatagaagaccatagaaggctgggcgcagtggctcacgcccacttgtaatcccagcaatcccagtaatcccagcactttgggaggctgaggcaggtggatcatgaggtcagaaggatcatgaggtcaggagttcgagaccagcctgaacaacatggtgaaaccccgtctctactaagaatacaaaaattagccaggcatggtggcacacgcctctaatc

SEQ ID NO: 2343 - DNA, 1045 bp, Homo sapiens
taaaaacttaaattgctatcaagttttatttcttgttatatccttaatttatgataaacacaaaatgttaggtaacattagaccagataagcatcactccttttccacagttgggcagagatacatcaagcaaaattgtatttgctcagatccccaaacttttgttagctgtagactgttactgaactcacagtagtaaaaatgtgttgttacttggtgaatgataaggcctagatctggtagtgcttttgtttgctctaaggtctattaatttaatgtagcaatctttcttttccctttttcttttctaacttctacatcaacctaactggctacctaaatgttcattgaatgactgtttttgctttgggatagaatcctccttttttatttttagggtgttaaattgatatagtattgtttaatagctaataagatacattttgggctaagtttctgctttttatacctattaggttacaataaaaaaaaactttagtcatatttgcctttctccttgaaagcaggtatgatagtgacaagctgaaccaaatatttaattctgatttgtggtagcaagtgaacatttgctattacttgtaggttgcttggcacttttatagaaggcctgctatgacttctagtttatttgctgtggttggtacacagacatttcttccctagccctgtacttacgtaatttggttcattatttctcaagtgtggataggatatgcctggttttgatttaattagttttcccactgtagttttatagaaagaccagaagtttttcttttcctttctttttaaaaattaatgatacactgcctgttttatctggaggttgttgactctgcatttaagaaactctgtagtgattaaattgaggtaggtagtagtccactgggaaggaacatcttcctagtgagtatggattacaaaataggaatatatttaattaagaaatatttaattttataggcattgtccttattttctagctcctgtaatttaacgttttgcatcaagttatgtaaagcaa

SEQ ID NO: 2344 - DNA, 1044 bp, Homo sapiens
attcagactatacttttaatgtccatagctcagtttgaggagaaaaatactgactcctccctataataaagtgattctgaaagaaagctgtttttcaaaaaagctctgcacaaataagataggcaatatttaattttgtggcctaatccaacaataagtgaccttgctttgagatgaatttccctaaaactatacccagtccataagaaggtgagctcctcttgttcccatctcatagttaccatagtttcaagtgtttcctcatttctagtccaatggctgtctttcctcccaaactcagaggaggattcctgcctccagtcctctgctcttttccccatctacgatgctttcctcctgtctaggtttactcatccttcaaagtctcagagctttccctgaccactaagctaaaaccctttctggacttcagcagagctatttatcctatgaatgcccttcacagttccttatggtctggaatcaataatttaaaacaataggattgttctctcactaactcttgaaggcagagttgtaactctttaaggcagagttcttatcttggatttctgacttccacaacctggtaagaatactttttttttttttttttttttgagatggagtctcactgtcgccaggctggagtgcagtggcgcgatctcagttcactgcaacctccgcctcccgggttcaatctattctcctgcctcagcctcccgagtagctgagactacaggcacatgccaccacggccggctaattttttgtatttttagtagagacggggtttcaccatgttggccaggatggtctcgatcttatgacctcgtgatccgcctgcctcagcctcccaaataaaatacttctaagctcaatttagcagggtgaccttagtatgcatttcattgttcacatatgaaaatggtgataccaccacttgactgctgtgaagctgagtaaagcatgcctcgggtactgggctccacttggcccataataggtacctcatactgaatatagtaggttaaaaaatgtttt

SEQ ID NO: 2345 - DNA, 1035 bp, Homo sapiens
ttcatttccagggagcacagaagccagagtgagcagcacttggaggtgtgaggaaagggagggaacattaggcaagtccttttcattccattttattttattttattttttgagacggagtttcactctgtcacccaggctggagtgcggtggcacgatcttggctcactgcaacctctgccttctgggttcaagcaattctctgcctcagcctcccgagtagctgggattacaggcaccaccaccaccgctggctaatttttttgtatttttagtagagacggggtttcaccatcttggcaaggctggtcttgaacttctgaccttgtgatccacccgcttcggcctcccaaagtgctagtattacaggtgtgagccaccacacctggccttccttccattttaaatgagcagattgagttaatctttgtcagtgttttacttcagcaggggcttttttcccctgataatgacatgcttctactcaaaagcctttcatgactttccattgcctgtagaattaaattcaaacttaatgatttaccctagttgaagcaatgagagaagtgttctttagtaaagagttggcattatagaacattacagaacattttagtgccatttaatgtaactactaatgatatcttggagatagttttgtattggtttatctattatttgataacaaacactgctgaatgggaatagatttggcttccaccaacatttaagaagagggaacatttttcttgtttgcatctttaattttttttttggagacagtctcgctctgtcgcccaggttagagtgcagtgatgcgaccttctccagctgccaggttcaaacgattctcctgcctcagcctcctgagtaactggaattacaggtgcacgccaccatgcccagatttttgtatttttagtagagatggggtttcaccatgttaaccaggctgatcttgaactcctgacctcaaatgatctgcccatcttggcttctcagagtgctgggattacaggcgtgagtcaccgcacc

SEQ ID NO: 2346 - DNA, 1028 bp, Homo sapiens
gccttgtagctggtagcagaaatgccagttgcagaatgaggaggtggcaaagcagttaacacaatggatgtgacggtggatgtataaaaacaggtgtgtgaattcgtctgatgcctgactcccagcagcctcggccggttcatacatgtccatcagcttccaggctgcaggacatgccagcccagttaaagaggcttcacttgactgttttcctgagaaaaggaagctgccagctctcatttggctcactatgaaaagcctttaattaatctcttcaaacaagttatttccttaatccacaagcagtggttacacttgctttgcattcttgtctggttcctaactctagagcccttctccctggcttagccagtaagctgagcccctggctgcgttcagccggcccgcctgagagacactaggggaaatagcttttgtgggcaagcagggtggccggtggtgctcagcagtctttccagtggctgtgtccctcctccaaatgtggacaggccatgacagagtcttagcccaagtcccacagatccccaaaagttctgttgattgcttcaggggatcagtgaaaattagggaattttgtgtgttgctatatacattttttctggggagatgagcttctcattgagatctgtgactcagaatcgactaagccaccataagtctggatttctccccagctcccaaggcccttttgggtccagaagacctgcatatgggctgttgactcatgcaaatgaggtatctgaactgcagcttcagtattagcagagccacaggccgcctctgtggcatcaccagggtttctctgaagaagagggtctgcattttcctaaacccagtgctgctctcccatctcccatcttcctctcgcagcttgatgagccccggtgtgtcccaggtacacccctgcatccaggcagcagcccaggccaccccctcctcactggcccttggctcctttcttgatgcctctgttgcttgtcccccaggagtcggagaagctggaaagt

SEQ ID NO: 2347 - DNA, 1608 bp, Homo sapiens
ggcgcgggggaggagaccttcatctgttcacgcggtagcgcggattgcggttcgcggcgcgcgccaccggggaaggagcggtgggccgaggggttggaggtggggccccaggaggacctcgggctgtgggccgggagagcggagtcggggagtggggcgggggagcgaggtggcgccggggagcctgggatatggcgcggccagacgatgaggagggggcggcggtggcgcccggacacccgctcgcgaaaggatacctcccgttgccgaggggcgcgcccgttgggaaggagagcgtggagctgcagaacgggcccaaagcgggcaccttcccggtgaatggggccccccgggacagcctcgctgccgcctcgggagttctgggcgggcctcagactccactggccccagaagaggagacccaggcccggctgctgcctgcgggcgcgggagctgagaccccgggggccgagagcagcccgctgccccttacggcgctctccccgcggcgcttcgtggtgctcctgatcttcagcctgtactcgctggtcaacgcctttcagtggatccagtacagcatcattagcaacgtcttcgagggcttctacggtgtcaccttgctgcacatcgactggctgtccatggtgtacatgctggcctacgtgcccctcatcttcccggccacctggctgctggacaccagaggcctgcggctcaccgccctgctgggctccggcctcaactgcctgggtgcctggatcaagtgcggcagtgtgcagcagcatctcttctgggtcaccatgttgggccagtgcttgtgctcggtggcccaggtgttcatcctgggcttgccctcccgcatcgcctcagtgtggtttgggcccaaagaggtgtccacagcttgtgccaccgccgtgctgggcaatcaggtaagtactggagtggtaggtgaaagtcagatccttaaaagaccggaaaaagtcataggccgtgagaactatggcctgtatggatgaactgccccaggaggtatttgtctataaaagaggagatgaagccgttgaataggaggccgtcttggattgaagtgggctataaatttctttgtaaggacaaaattttccaaacgaccttgtcatcttgctttgaaaattacctataaaataattaactgggccgggcgcggtggcacacacctgtaatcccagcactttgggaggccgaggtgggtggatcacttcaagtcaggagttccagaccagcctgggcaacatggggaaaccccgtctctgttaaaaatacagaaattagccaggcctgcttgcgggtatctgtagtcccagcaactcaggaggctgaggcaggagaatctcttgaacccgggaggtggaggttgcagtgagcggagattgcacctttgcactccagcttgggtgacagagtgagactctgtctcaaataataataataaactgtaaccataataataataataataattaactgtattggcttgtgtatgcctaacatggaaaatttgtcaatgcagtaacgaacaagacttggggtattatttttgtcaccagtgtatttgtgaaaggaaggtat

SEQ ID NO: 2348 - DNA, 1041 bp, Homo sapiens
gtcatttcccttatctaaaagtacagaagatggagtaggttgaactatagttgtttgtccaaaataatttatgactgatacttgagttggttgcatctgcaggtttggacagaagctattataaagttttttgtgtgtgtggttttttttttttttttttgtagaaatggggtttctccatgttgctcatgcttgtctcgaactgctgagctcaagctctctgcccacctctgcctcccgaagtgctgggattacaggtgtgaaccaccacgcccggccatgattacattttctttgtcacacatctctcagtttaaattcatttttaaatattcagtagcatttcttgatcccatttagagttgcccagtcactctctttacattattttactttaattctccttatagcactcatccctgtctcatatgttattgtttacatgttcatatgttacttacctattacttttctcttatccccaccattagattgtaagtttcatgaaaataggaatgtggtctgaatgtacacagctgtatcaccagcatttattactctccataaaaccatgttgaataaataaaggagcttcagactcatacagatactggccagctggatagtctacttggatatctcatgggaacacaccactcaaaattgctttctccttgctcatttccctttatctctaatgccactgtcttggtttgggccacccacagctctcacctagagcttgctaactgtcctccctatctgtagcccttgctgtcttccctctgttctcgcattcatccagcgtggtcttttacaatgtgcaaatctgttccgggcacatccttaccccctgcagtggcttccattgtccttaggataaaattcaaacactctagtgtgacatatgggaccctccagatctgcctcctgccagcccttccactttatctgtatgcacaacccctgtccccacagacatatgctttctctgctctgtgcagaactatgcctacttatagtttctcacaaggtcgtgcc

SEQ ID NO: 2349 - DNA, 1069 bp, Homo sapiens
tatgtaattatttgtttgaatttctgttttcagttttggggacatatacctaggagtagaattgctaggtcatatggtaattctatgttaaacttattaaggaactgccaaacttgtctgcagtggctgcaccattttatagtcccaccagccgtattcaagggttccaatttttccacattcttgccaacacttttatattgctattattgttattatagtagccatgctacctggtgtggagtggtatcttatggttttgattcgggcatgttttcaaatgcttattgaccatttgtatatcttctttggagaaatgtctattcaagtcttttgcccattttaaaattgggatattgcttttttgttgttgagctgtaatagttctttatatattctggaagctataccctgatcagatatataatttacaaatttttctgattctgtaggtcatcttttgtcagccttattttgcatattcttattccccttttgtaagcatctgcagggcaaggactgtatattacacagctttataatagcagcatcactcagatggtaggaactcagtaaatgttttttggataggagagatattggtgagcaatttccctttaacaatacaatagtaaaaaagacattagagcatagtagtttaggctgggtgcagtggctcacgcctgtaatcccagcactttgggaggccgaggcgggcggatcatgaggtcaggagttcgacaccagcctgaccaacatggtgaaaccccgtctgtactaaaatacaaaaattagctgggcgttgtggcgcgcgcctgtaatcccagctactcaggaggctgaggcaggagaattgcttgaacctgggagggagaggttgcagtgagccaagattgcgtcactgcactccagcctgggagacagactttgtctcaaaaaaaaaaaaaagaacataatagtttaattttcaaagcacctttataaacactagctgtcctctttatgttctgttaattgccagcatttacttttttctctaatgataatagctgttaacaggactatgtgt

SEQ ID NO: 2350 - DNA, 1092 bp, Homo sapiens
ctgtaaaggtgagagacaggagtttacttcctcaaagtcatacagtgagctgaggcagagccaggattcaaacatttatttgtcttataataacctaatatatgtaatatatgcctgaatcacacagggacaaataacgaaattttaaaaatgttaaaatacggttttaaaatgtaaaagtagccctaaacagcaatagatttgcaacgtattcatcacaggaggaaaagtttgaatgtggtgctcgagaatattttggctactttataagactaacaccagaagtggagaataactgcttcaaataatcagttgttttattggtgcaaatttttggttgggagaagacaatagaaagctattatttttctgtttcaaaggagaaagaagaagccatatttcatcctttgaaagtagcagttaggtgtaaacaaggccatagatccatggctttttgtttctctttcttcaagtagacttaagttcgactttcctacaacatgtagctggtaaatacaggcttgatttttgccaaaagatagtttgacttcctgaaactaacagataactcttgtattcaaaaaataaatgtaatggatttaaagactggtaagaagtattttcttttcttttcatttttgagacacagtttcactctgtcgcccaggctggagtgcggtggtgcgaccttggctcacagcaacctccgcctcctgggttcaagtgattctcctgcctcagcctcctagctgggattaaggtgcccaccacccctggctaatttttgtgtttttagtagagacaagtttttgccatgttggccaggctggtctccaactcttgacctcaggtgagttgcccgcctcaggcctcccaaagtgttgggattagaggcgtgagcctctgcgcccagccagaagtcagaaatattttcatttttgcatttcagttcagatttgggccatttagatttattttgccatggtaaataaaaaagtaagagacttaagattcattaaatacccatgactaccttgtaagcatagtttttattttctgaaactttgttttataactatgtgagttctgcat

SEQ ID NO: 2351 - DNA, 1086 bp, Homo sapiens
tacattatacatataggaaaacttgaggttttgcagaagaggaactgtttggtaaattgtcccaggataattgattgtccatatgggaaaaataaactaaaattagaactctacatcataccatgcataaaaatgaattatagtagagaccaaagagtaaaaataagaactttaaagttttaggaacaaatataggagaccatctttagtattcccaaagaatttctttgtcttttttttttttttttttgagacagagtctcactctgtcgaatttctttttttttgagacagagtctcgctctgtcacccaggctggagtgcagtggcacaatctcggctcactgcaacctccacctcccggattcaagcaattctcctgcctcaacctccccagtagctgggactacaggcgcacaccactgcgcctggctaatttttgtatttttagtagagacggggtttcaccatgttggccagactggtcacgaactccttggccagactggtgtcgaactcctgacctcgtgatccacctgcctcagcctcccaaagtgttgggattacacgcgtgagccactgcgcccagccaagaatttcttaatgcaaaaaacataaaccctaaagaagtatattgataaatatgattatattaaaataatcttttctaggaagacattattgaaaaagggaaaagacaggacttagactatgagaaaattgtctgcaatgcatataaccaacaaaggattagtattagttaaaaataactcctacaaatcagaaagagcaaacaatccaaggacaccagaagacatttgtgtgtctgtgtctgtgtgtattgttcttatgtgatattcagccttaacagtaatcaaggaaatacaaatcaaagccagagtaagatgtaatatcacacacattcacattggcaaaataatttaaaatctggtgaaaacaaatttggcaaggatgtggagcagtaggaactctgctggtagtatgaacggataacaactactttgaagagcaaattgcttatatctagaaagtagaaggtctactctagatatatacttagagaag

SEQ ID NO: 2352 - DNA, 2082 bp, Homo sapiens
caaacctgtataacatgttatgctactgaatgttgtaggcagttgtaatacaatggtaagtattgtgtatctaaatatatctaaacagagaaggtagaataaaaatacagtattataatcttacaggatcatactgtatatatgattcagagttgacctaaatgtaattatggagcacatgactatctatacttaagaatcctaacaaaaatcattgtacttctaaccatagaggattaaggaaaatttaccttttttatttcttctattattttaggctttttttctggttttaaaatataatgcttttatatattctttacctgccctcccctcccacactgacacatgtactaaatcttcctactgtgtgcttagttttatctaattattttcattgactatgaaaaggtgtgggaatgtgaagagtctgaattagttaatccatttatttgatcaacttcttacgcaaatttttttcagggagaagaagtcaatgctggaaggattgggctaacgctagtagtagctggaatggtgggctctattctttgtggcttatggctggattatactaaaacatacaagtaagtgaaagtaaatacatgtatggtgtataaccaaaggtattttgattttaaaggacaatttgctttttatttcaagaaatttaaaacatgttattacttaaagatacggattctaaacactagtaggttctcttcacttaacaagtgtttcttttttttttttttttttgagacggagtctcgttctgtcgcccaggctagagtgcagtggcgcaatctcggctcactgcaacctctgtctcccggcttcacgccattttcctgcctcagcctcccgagtagctgggactacaggcacccgccaccatgtccggctaatttttttatatttttagtagagacggggtttcaccttgttagccaggatggtctcgatctcctgaccttgtgatccacccgcctcgacctcccaaagtgctgggattacaggcgtgagccaccgcgcccagcaacaagtgtttcaatactctatgtattgtattattttattggtcacatttatttcaattctgagaacttggataccttatgagccccttctttctaacagtactcatacctaccacttccgaaggaattatttctattctaaaaagagccatttctgagaaatatttgacttttgatagactttatcttgttcttttttttttttttttttaggtggggtctcactctgtcacccaggctggagtgcagtggcaccatcttggctcactgcaacttctgctttccaggctcaagtgattctcccacctcagcctcctgagtagctgtgaccacaggtgtgcgccaccacacccggctaattttttgactttttgatagagacagtgtttcaccatgttgcccaggctgattttgaactcctgaggtcaggcaatctgcccacctcagcctcccaaagtgctgggattacaggcatgagccactgcacctggcctatgttgttctttttttatgttgtgggcttaaatacaaaaacaaaaaagtagttctttccaatcaaaaaattattgttgagcataaggctttattttggtaagaactttttggctaaagtacgcccagactacagtaccacttaactgtaatataatgcataatgtgaaaatgctggtttgacacaatgtcttatgcctgtaatcccagcattttgggaggccaaggcgggtagattgcttgaggccaggagttcgagaccagcttgggcaacatggtgaaacgccatctctactgaaaatacaaaaaatagtcaagtgtggtggtgggcacctgtaatcccagctactcaggaggctaaggaaggagaattgcttgaacccaggaggcagaggttgcagcgagctgagatagcgtgccactggtctccagcctgggtgacagagcaagacgctgtctaaaaaaataaaaaaaaaagaatatactctgttaattgtacattatatggaaccaccaaaaggctaataccaaagaaaatgaatgataccaa

SEQ ID NO: 2353 - DNA, 1026 bp, Homo sapiens
ttctgaagtattattactctggtctttaattttttcagttcatccaaagtttcttcaatattttaaactttaaaggattcattctatgcatataaacatgtaattcttaagaactattaaaaattatttaaaattggtttttggtataccataggtaaaaaatggatgagccttacttaatctgtgtaactttatttggttacaatcaacttataaaactagaagtaaatttttctcagaaaaaaatgtgtatttgttgcttccagttctgtaaccttgagctgattggtcaatgataatagttccttactttgacatagcaacttcaaaatattcacttatttggtcattagaataagcccgagaggcagaatgattgcatcagtatgtgattgtgactttctggtagttctttctgtaattctggatttattttcctagcttcttcatgactggttacctccctttgggttttgaatttgctgttgaaatcacttaccctgaatctgaaggtacttcatctggtcttcttaatgcttctgcacaggtaaacctctgatttctctaaacctgagatgattattataccagatattctagtgagtaatgagtttgaccatggttttatttgttgttgttgttgttttgttttttggagacagagtcttgctcagccatccaagctggagtgcagtagtgcagtcatggctaactatagcctcaaactcctaggctcaagcaatcctcccccctctgcctccagagtttttgggactgcaggtgcacaccagcatgcccagctaaattttttttgttattttttgtagagatggtgttttgccatgttgtccaggctggtctcggactcctgggctcaagcaattcgcctacctcaactcccaaagtgctaggattacagtgggtgtgagccactgcacccagcctgaccgtggtttttgttttaacaattcaacttttcaatgaatgtttctagaaaccaaatcatataaccaaaataagaaaagt

SEQ ID NO: 2354 - DNA, 1027 bp, Homo sapiens
ttgtgagtttgtgttaggccacattcaaaactgtcctgggccacatatgggctgcagaccacaggttgaacaagcttatactacaccatttcatataaaggccttgagcattcgtggattttggtatctgaggtggggtcttggaatcaatcccccgcagataccaagggaggttgtgcttcgttgatctggttataacttagttggaggatctggttataacttagttggagaatctatcagaaggatgtgaatcagaatttcttctactgtttgtggaatacctgatcattctttgtgaaaccttcaatatgaaatctcaccagtgatagacattttggatatacacaactacctaaggtcgctcactcaattgtatgaatgataggaacctgagcattcattcacgaagctaaaagaaagtgaatgcactctgtttcctcaaagaaaaacatcttatcacagggagtttttccccctgtccagttagtaaaataaaacatacaaaactgtgaaatatgtaatacattaactgctttaactattgttctttcataagtaattccatgttggttcttaattcctaggcaagtactatatcttatctaagattattactattggctggacgtggtggctcatacttgtattcctagcactttgggaggctgatacaggtggatcatttgatgtcaggagttcaagaccagcctgaccaacatagtgaaaccgtgtctctactaaaaatacaaaaaactttagccagttttatgggcacacacctgtaatctcagctacttgggaggctgaggcagaagaattgcttgaatctgggaggctgaggcagaagaattgcttgaatccgggaggcggaggttgcagtgagtggtgaagatcacaccaccactccagcctgggtgacaaagtgagactccgtctcaaaaaaaaaaacagtattattgttataccaaagaagggagcagttttgtaatcctccttcaaattacttttacaagagattcatgaa

SEQ ID NO: 2355 - DNA, 1031 bp, Homo sapiens
ccatagctagagaggaggaatcaatgtctggcttcaaaggacaagctcattctcttgtgaggggttgatgcagctggtgacttcacattgaaactaatgcttgttgaccattctgaaaatcctagggcccttaagaattaggccaaattttctctgcctaagctctaacaatggaacaatgaacctgaaccccgtagttgatagtacatctgttagtagcatggtttgctgaatattttaaacccattgttgaagcctgctactgagaaaaacattcctttcaaaatactactgctcattgaccaattcacctgtttacccaagagctctgatgaagatgtacgaggagatcaatgttgctttcatgtctggaaacacagcatcccttctgcagcccgtggatcaaggagtaatttcaactttcaagtcttattctttaagaaatacacttcaaaaggctgtagctgccagaaataattattcctctcttggatctgagcaaagtaaattgagaactttctggaaaggatgcaccatcctagatgccattaagaacattcttgattcatgggaggaggtcaaactatcaacattaacaggagtttggaggaagttaattcccattctcatggatgattttgaggtgttcaagacttcagtggaggaaatagctgcagatgtggtgggaataacaagagaactggaattagaagtggaatatgaagaggtaactgaattgctgcatcttatggtaaaacctgaagaaatgaagggttgcttctttttttttgggggggggtgccggaatgttgctgtgttgcccaggctggagtgcagtggcgtgatctcggctcacagcaagctctgcctcccgggttcaggccattctcctgcctcagcctcctgagtagctgggactacaggtgcccgccaccacgcccggctaattttttgtattttttgtagagacggggtttcaccatgttagccaggatggttttgatttcctgaccttgtgatctgcctgcctc

SEQ ID NO: 2356 - DNA, 2354 bp, Homo sapiens
tagtaattggggacaatgtgatcatccttggagagagatgtgagcaccaaggctgggtttgtatgtggtgggggaataaacacacttacttgaaaattaccatatgaactctaaatgcataattattattttgcttaattgttaaattaagggaaattttcttaaaattcttctgtttacatcatgttaacactactgtttatctaattagtatccggtttttagtctcatattgtatctgaaagtaagcttcttgacgtttactttttaaaagtcgatgtttttcttttttgtagaaaatggaagcttagaatactttttaaagtgataatatggggtgttcagtccccataagatataatagttcatgcagtttatatattaaagtatccagtggaactaaatgtacaatatattcctaattggctgcctttttcactgtgctgaccagctgttcaagccacttcagtttgagtacaacataccaacatgacactactcacccacaaaggacagcattgggatcaggctttcagatgacctctaagatttttcccatttattgtactcttgttacaaagtactttttaacacatgcagtcaatggctataaaaactattctgtgtacagattctacccagactttggtcttagaattatgttctaattaaggagcctggttacaggttcattctgtcttgagttcttttctgtgctgcctttctatcatggataaatgctaacgctgtattttttcactccaacttgagatagagtagttttgtacccattgccttttttttcttttaaactctctttttttttttttcctgatgtgtaactttctagtaagataatttcatcatgtatgttactggctatttcatgatttcatgtatcacatcgtatattttgccttgaagattcctgaaataaggaaatctataataacttcagatagcctacatgtccccatttagtggagacctcttgaatgctatttgaattctgcagtatcatttttatgaccattctcctttgaggaatactatgcccaggtacatgctctatcagtgtgccgggagagtggattcttttcttcactgcagagtcatcacactgttagaatagtctgctcttttacatgctcaggtagggaaaataggaccaaatatatttccacagtgcctaccactgtgtcatgtttacagtgagagtttaaatattgttgatgtcctgactctgtgagctcatagggagtatcttcatagtaatgacatttgatcagccataaaatttacattatgttcatatgcacccaaaaaagctagtcaggtaatgaatacccttgaagtgaatagcaattttgatttaggcagtgtgttaggccatccttgcattgctataaagaaatatttaggctgggcgtggtggctcacgcctgtaatcccagcactttgggaggctgaagcgtgtggatcacctgaggtcaggagttcaagaccagcctggccaacatggtaaaaccccatctctactaaaaaaaaaaaaaaaaaaaaaaaaaaaaaaaaaggccaggcgcagtgctgtggctcatgcctgtaatctcagcactttgggaggccaaggcaggtggatcacaaagtcaggagttcaaaaccagcctggccaagatggtgaaaccccatctctactaaaaatacaaaaattagcgcagtggcaggcgcctgtaatcccagctactcaggaggctgaggcaggagaatcgcttgaatgcgaatggcagaggttgcagtgagcgaaaatcacactactgcactccagcctgggagataaagtgagactgtctcaaataaataaataaataaataaataaataaataaataaataaataaaacctgaggttgagcacgatggctcacacctatagtcccagcactttgggaggctgaggtgggtggatcatttgaggccaggagttgaagaccagtctggccaacatggcaaaaccccatctctactaaaaatacatacacacacacacacacacacaaattagccgggcatggtggcacacgcctgtagtcccagcttcttgggaagctgaggcatgagaattgcctgaacctggaaggcggaggctacagtgagctgagattgcgccactgcactccagcctgggtgacagagcgagactctgtttcaggaaaaaaagaacagaaatacctgagactgggtaatttataaataaaagaggtttaagtggctcacagttctgcaggctgtgtaagcatggcaccagtgtctgctcggcttctggggagccctcagggagctttactcatggtgaaa

SEQ ID NO: 2357 - DNA, 1371 bp, Homo sapiens
ggccaaaaatatattttaaggtctctccccaaatgtttttatttttaaactatcaatgttgtttaaaataatcatgtacttgttgagttcctgaggtttggaacaaattacacataaaatttagaatactttatttctgaaaagcatatacatatatgttatgtttatttttccttgttgattagaaaggtgatggaatatgtgacaatgcaaaatgaattgataatttttctgtattttgagtgaaagttgtctgtaatatgtcaagcaagaatgttataattctacagtaatgtgtgacttcatgacagagctacattctgagaaatttgtcattaggtgatttcatcattgtgtgaacatcatgaagtgtacttacacaaacctaggtggtagagcctactgcacacctgggctagatggcaaagtctgtcgcttctgggctacagacctgtacagcatggtactgtattgaatactgtaggcaactgtaacacaatggtatctgtgtaatctaaacatagaacagataatacattgtgctacaatgtaacaatggctgtggcatcactaggtgataggaatttttcagttccattataatcttataggatctctgtcatatgtggtcaattgttgatcgaaacatgactgtatgtcgtattttcagaaaatggaataggtaatcatcacttgtgtgaattttaatcaaatgacttaggaaagaaactggatgtttcaaaagctgttgcatttattacaaatgtcacaaatacagctcttgccttttgagaatgttggagagatgtctttaaaaaatatgtttgtgtgtaaaaatgtgtctgtatgcaatagctagaaaaatgcctgtgtcttaagtcattactcatgttctaatttttgttctttgtactatttatctgtatgcttgttcttcagtatttcagactcaaaataaatttatttttttatgttaattttctgtgactttttgaaaaattctgatgcttaggtacacatggggagtttaaagggattataaaatttcagaatgggcaaagagggaatgaggtagtgcatggaacataaaatgaggaaacaaagtctaccagggtcagggctaaaatagatactaaaatattttattcctttaaaagtaactttagagagtgatgttagcaagatggcagaataggagctttatatcatcattcttccacagaagcattgatttttaccagtactttcagatggtagttcttttgtaggaatccagaagtcctacgtggaagttccagcacaccattggagcagaaatatctgagaataaatgcattaaagaaaaggaagaagaagattttcactttatct

SEQ ID NO: 2358 - DNA, 1051 bp, Homo sapiens
taggtgttgtactaaataaataatgaggatgataataataaataacataaaaataaaaaattgagtggctagatgtctttgggaaatactatgtatcttccttttggggatttactaggcatattaatgtattaaagggtttgaagaattctgctgtaaacaacattccttcttaaaaagaggtaaattgaattgattattaagcccttcctgtgagatcactgattttaaagaatactggtattccatgtaacatgttttgtgaagcactgctgtagggtaatacttttttttttgtatttttagtagagtgtaaggtaatactttttaagatgagttggtgataaatttctaaaaagcaagaagcatttcaagatatataggtagtactaactgaatcagtggcagttaatgcttgcagtggaaatttctgaactttatttttatttttatttattttttttgagacggagtttcacttggtcacccaggctggagtgcaatggcgtgatcttggctctctgcaacctccgcctctctggttcgaactgttttagtgcctcagcctcctgagtagttgggactacaggcacatgccaccacacccggctcatttttgtatttttggtagaggcggggtttcaccatgttggccaggttagtcttgaacttgtgacctcaggtgatccacctgccttggcctcccaaagtgttgggattataggcgtgagccactgggcccggccaaatttgtgaacttttttttttttttttgaggggttgtttcactcttgttgcccaggctggagtacaatggcgcaatctcagctcactgtaacctccacctcccgggttcaagcgattctcctgcctcagtctccctagtagctgggattataggtggatgccacaaagcctagctaatttttgtatttttagtagagatggggtttcaccatgttggtcaggctgttcttgaattcctgacctcaggtgatcctcctgcctgggcctcccaaagtgctgagattacaggtgtgagccactgcgc

SEQ ID NO: 2359 - DNA, 1035 bp, Homo sapiens
ttgtaagaagagataatccagcaaattttaaatattaaaactatgtgagcgtgaaaaggacaaagttaattcaattggtggttctgtaaaatacaggaatctaaaaagtttttggtgttattaagtgtaattatctgaaaaggaaacatttatgtagaaaatatttaagggaatgtttttaaaattaagcttttatttgtatgttttatatggttgtcactgaattaatatttcattgagacattttcttcagagtgactttaataaataagaaacttatggagacttggttcaataaagaaagaggttgttatagacctattttttcaatgggaaagtattgaacattaattagagaaaataatttctaaatgtgtctctgaggactttgtgtagtccagatatgaacatcagtacttgctgttgtagtggaagtatatctttgttcacttttgtattttgaagatttctggaaacctcagaacttagaaggagtaagaagaaaaggaggcagtggatgtgacattttgcgatgctgttaggtattttggttctgcagccctagagttgagaagaaggaatataggattgaataaattagggcatggtgaagaaacacagattctcacctggggggttctaattcttgctctgacagactatctactggttcatataccatggtattttaataattattatgattaaattgttaaattttgctccttaagtttgtcttgcagtatttaaaaatgacttaactagaataaattttttttttttttttttttttttttttttacggagtctcgctctgtcacccaggctggagtgcagtggcatgatctcagctcactgcaaactccgcctcccgggttcatgccgttctcctgcctcagcctccctagtgctgggacttcaggcacccaccaccacgtccagctaattttttgtattttttgtagagatggggtttcattgtgttagccaggatggtctcaatctcctgacctcatgatccgcccgccttggcct

SEQ ID NO: 2360 - DNA, 1055 bp, Homo sapiens
cctatgcagatctttaggataaaggccaaatcaaattgatagagtatttagctctttgctgttctttgttaataattgtttctatgtgtcagggagtctgttttttatggaaaaaggctttattattaaacaagaatattgctttatagaaattgtgaaaagctgtcatgcaaattaccacctgccatatggctaaaaaaaattagggattatggaagtcctattaaatactttaaacaatttaagtaaaagttagctgttcattgtatttcttctggatatgggaattcctgattgtaattgttgctggaagtcactgggaaatgagactgtcattttcagagtttgtgaaagattggacagtttaagagaagtcaaactaatcttggaaagtatcttagaactatctttaacagcgtgctaggcgggaacaggatactgatttgggaatatcagagcagtggtattcagtcattatctctatttaaatagagataatcaagcaagaaaaaaaaactcattccattagcttgaacaaaaaaaaaggtatttatttttcatatgacaagaagtatgaatgaggaaggtagtccaggactggtatggagctcagtaatgtcatcagtgacataggtttctgggtttaggtgtgaaagggaaaaggccaaaagaaacatggcagtttttaaaagctttcccagaaacatgatctagagatagtccttcttacatctcattggccagaacagggtcacatgcccatccttaatttgaaggagtctcggaaggtgactcttagctttctagttctgatcatggatgaaggctgtggggaaggttttggggtagctaattcacagggtgtgctatagtatcatagtttatttttctctttagagacattgatgatgccacatgcaaatgaccatatagccacttgcttacattgactttaaaaaaccacatacataagagtagaatgaatagtataatgaacttctatgacccatggcctggtttcagaaattatcagtatattgccaaacttgttttat

SEQ ID NO: 2361 - DNA, 1092 bp, Homo sapiens
taaaacttgttttgtgacctgacatatggtctgtccttggaaatgatcaatgtagtgaggcaaagaatgtggattttgcagcccttggatgaaatgtcctgtaaatatctattagatccatttggtctgtagtgtagattaagcctgatgtttctttgttgctttttctgtctggaagatctgtccaatgcagaaagtggggtgaagtctccagctattattagattggggcctatctctcttgttagcactaataatatttgccttataatatatgggtaccccagggttaggtgcaaatatatttaaaattgttatatcctctcactgaattgacccctttatcattatatagtgaccttgtttgtctcttcttatagtttctgttttgaaatctattttgtctgatacaaatatatcagaaaaaatattttttagtttccattggtgtggaatatctttttctatccctttattttcagtctgtttgtgtctttataggtgaagtgtgtttcttgtaggcaacagactaatgggtcttgttttttcatccattcagccagtctatgtcttgattgtagtttagtccatttgcattcaatgttattatttataagtaaggacttacaccattttgttattttttttctggtggtttagtggtctttcttctttctttccttcctgtcttcctctagtgaaggtgataggatttagtttcttgctttttatttttttgtatgtacattatatgttatttatttatttatttatttatttatttattttttattgataattcttgggtgtttctcacagagggggatttggcagggtcataggacaatagtggagggaaggtcagcagataaacaagtgaacaaaggtctctggttttcctaggcagaggaccctgcggccttccgcagtgtttgtgtccctgggtacttgagattagggagtggtgatgactcttaacgagcacgctgccttcaagcatctgtttaacaaagcacatcttgcaccgcccttaatccattcaaccctgagtggacacagcacatgtttcagagagcacagggttggaggtaa

SEQ ID NO: 2362 - DNA, 1027 bp, Homo sapiens
gtgctgggattacagacgtgagccaccatgcccggcctttaattgttgatttctagttaattgttatggttggtgaatatagtttgcatgatttaaattattttacatttattgagacttgttttgtggccaagtacgtggtctgtcctggagaatgttctgtgtgtgcttataagaagcatatattctgctgtttttgtatggagtattctgtagattcagaattcaggttggttgataatactgctcaagttttctatattattactgattttctgtctctttgttctagcgattattgagacatatctgatgaatattgttgaattgtctgtttccttatttctgtcattttttgcttcatctgttttggagatctgttagtagatgcaggcatgtttatagttatagtttcctgattaatataaccttttaatgttataaaatgtctattattgtctgtggtaacttttctttcttagaatagattttgtcagatattggtatagctgttctctcttatgattactttttgcacggtatgtttccatttttttatttacaacctggttgcttctttgaatcaatgtatatcttctatagacaggatatagttagatcctgtatagtttttttttaatccagtcttagaaataatctctgcttttgattaacatgtttatgtacacttaatgtttgacaatgtatagaattcagccatttgaaatggcactagttaaatacatttgtagctgtgtaagccaggtaaatcagtactgtgacttcttgctactctcaccctgtgtttggttactagccttaacaggtaagatctatcttgttctcttgccttgtcttggcaatgtgcttgctattccagcacccttgaaactagggctctgttcagttttgatcagacccacctacagcttcctcaaaataaccatttgacctaaaactcaggcttggcagctgggaaactctcatttaagttgttataatactttcccgatctttgtgggaacaa

SEQ ID NO: 2363 - DNA, 1047 bp, Homo sapiens
gatggggtcccactatgttgtcccagctggtctcaaactcctgggctcaagccatcttcctgcctcagcctctcacagtgctgagattacaggcgtgagtcaccatacttggccagcaatgttattttgaagggagtaaataagtctttggattctctctttaaaattgcataacaaggaaaaataggttagggagcagaaagaaattgttgaatctaagaacactgtctctgtaggtatttaacactctatgatataatgatgtataatatttgttttcagttagtgttactgatagcagaaaaactgctagacattattgaaaacaatcataattgaggcattgcctgggcatcaatattatgacttttactattctttggtgactctctgaatttctagggtcacatgaaattggttttgaaaaaacattaatagggggttgactaaatgcaaatggaaatcagattccctgactggttcatgttatacatggaaagactgatggcttcagagttgtggtagatgtgtagaactataaattactgttcttctcaaggttgccttttgttgtcagaacacttagcataaggcagaaatggtaggctgtacctgaaaagaacaaaacaccattaaacataataaatcagcacttaaaaaaaactaactgtaactaccaaggccatctcaagtgtgagttttcttttatgtgactaaagttgttaacaacaacaacaaaaaagaaggcaaaaaagcagcaacaaacaaaaactcaaaccgagtttgatttggatgttctttctattgtgataaatctgaatgaaatcaagcatgcttgactaagcacagggcccattgggagagtatttgtggtgtagagaaataaagataagaatataataaaatgtgactaagtagagtcttatgtggggattaacttctgtgcatgtggcagaaatcaaatagagtcaaaatactcttaatagccccttaaaatttcccacgaaacacagatatagacatactgtctttcaagatgtttaaatt

SEQ ID NO: 2364 - DNA, 1686 bp, Homo sapiens
agacttagattttttcctatagagatgtttgagctccttatatattctggttattcatcccctatgagatgggtaggttgccaatattttctttcattctgtggattgtcccttcacttttttgattgttttctttgctgtgcaaaagctttttgcttgatatgatcctatttgtccatttttgctttggttgcctgcgcttgtagcgtattactcaataaatttttgcccattccaatgtcctggagagtttcgccagtgttttcttttagtttcatagcttgagggattaaagtctttaataatcaattttgatttgatttttgtgtatggtgagagatagggattcagtttcactcttttgcatatggatattcggttttcccagcactgtgtattgaagaggttgtcctttccccagtgtattttcttggcaccttttgtcaaaaataagttcactgtagatatatgactttatctgtgggttctctattctgttccatgatctttgtgtctgtgtttatgccagtaccatgccattttggttactatagctctttagtataatttaaagtaatgtaatgtgtttcttccagttttgttgtttttgcttaggattgcattggctattctgggtctttgtggttatatataaattttaggattgccttttctatttctgtgaggaatgccattagtattttgataaagattgcattaaatctgtagattcctttagtgtagttattttaacaatattgattcttttaattcatgaacatggaatatctttccctttttttgtgtgtcttcaattttcttgcatcagtgttttatagttttcatcgtagagatctttcacttctttggttaattcctaggtatttaattttatttgtagctattgtaaatgggattactttcttgatttctttttcagattgtttgctgttggcgtatagacatgctactaatttttgtatgttgattttgtatcctgcaattgtactgaatttgtttgtcagttgtaatagttttttaggggagtctttagatttttttcaaatgtaaaatcatatcctctgtaaacaaggataatttgagttcttccttttcaatttagatgctctttatttctttctcttgtctgattgctctagcaaagacttctggtactgtattgaataacagtggtgaaaatgggcatccttgttatattctcgatcttagaggaaaggctttcagtttttcccccattcagtgtgatactagatatgggtctgtcgtatatggtttttattatgttgaggtaagttttttcttcttttttttgagatggagtcttgctctgtcgctcggctggagtgcagtggcatgatctcggctcactgcaacctccgcctcccatgttcgagcgattctcctgagtcagcctcccaagtagctgggactacaggcacgtgtcaccatgcccagcttatttttgtatttttgtagatctgcccgattcagcctcccaaagtgctgggattacaggtgtgagccactgcacccagctgaggtaagtttcttctatccccagttttttgagggtttttatcatgaagggatgttgaattttgtaaaatgcattttcagcatcagttgaaatgatatgggttttgtctttcattctgttggtatgat

SEQ ID NO: 2365 - DNA, 1047 bp, Homo sapiens
tttctgcctataatagtatactgtagatacatacaatgtagcccttagagaaaacttaatggaaggtacgtgggaattttctgtacaatgtttgcaactttctagtgactctacaattatttctgaaataaaaagttttaaaaattcgtaacgtgtttattggtctgtcttttaaaattatttcaatagtttttggagaacaggtcgtgtttggttccatgaataagttctttagtggtgatttctgagattttggtgcatctatcacctgagcattgtatactgtacccattgtatagtcttttctccctcactgcccttccagcctttctcctgagtcctcagaggtcattatatcatacttatactgttgcgtcttcataacttagctcctacttataagtgagaacgtatgatgtttggttttctattcctgagttacttcacttagaataatggtctccaactccatccaggttgctgtgaatgccattattttattatttttatggctgagtagtattccatggtgtgtgtgtgtgtgtgtgtgtgtgtatatatataccatattttctttatctacttgttggtaatgggcacgtaggctggcttcatatttttgcaattgcaaattgtgctgttataaatgtgtgtgcaagtgtcgttttcatataatgacttcttttcctctgggtagatacccagtactcaggttgctggatcaaatgttagttctactgttagttctttaaagaatctccatgctgttttcgataatggttatactagtttacatttccactagcagtgtagaagtgttcccttttcaccacatccacaccaaaaaattatttttttttgattttttaattatggttattctttcaggagtaaggtggtattgcattgtggttttcatttgcatttccctgataatttgtgatgttgaccattttttcatatgtttgttggctatttgaatatcttcttttgagaattgtctattcatgtccttagcccactttttgatgggattatttgtttttt

SEQ ID NO: 2366 - DNA, 1019 bp, Homo sapiens
ctagcattcctatacaccaacaacagtcaagccacgagccaaatccagaatgtaatcccattcataattcccacaaaaagaataaaatacctagggataaagctaactagggaggtgaaagatctctacaaggagaactgtaagccattgctcaaataaatcagaggtgatgcaaacaaatgggaaaacattccatgctcatggataggaagaatcaatattgttaaaatggccatactgcccaaagcagtttatagataatgctatttctattaaactaccattgagattcttcacagaactagaaaaaactattttaaaattcatatggaaccaaaaaggaacctgaatagctaaggtaatcctaagcaaaaagaacaaagctgtaggcatcatgctacatgacttcaaagtatactacaaggctacagtaaccaaaacagcatgatactggcataaaaacagatacatagaccaatggaacagaatagagaacccagaaataagactgcatacccacaactatctgatctttgacagacctgacaaaaacaagcaatggggaaaggattccctattcagtaaatggtgctgggataactggctagccacatgcagaagacagaaactagactccttccttacaccattttcaaaaattaactcaagatgaattaaagactaaaatgtaaaatacaaaactataaaaacccttgaagacaacctaggtaataccattaaggacataggcactggcaatgattttatgtcaaagatgccaaaagcaatggcaaaaaacaaaaattgacaaatgggatctatttaaactaaagagcaaactttaaactgcacagcaaaagaaactatcaacaaacagaatgggagaaaattttggaaactatgcatccaacgaaggtctaatatccagcatctataaggaacttaaatttacaagaagaaaaaaacagccccattgaaaagtgggcaaaggacatgaacagacactttttaaaagaaga

SEQ ID NO: 2367 - DNA, 2207 bp, Homo sapiens
caccagcctgatgtttttgggtctaattatattatcaccagccctgtacggctcagttgaagaggtatatccagaggccaatttataatcatttagccaacacctgtttgggagaaattgacagtcaaagggcacatttttaaaaaatcacatatgttcttgtgtttattgcctcaatgtgaacgttgtctagttgcacacaaactttgtaggagaagaaagtaaatataaacaaagcagcatttcccagccatgtttatccatcttaatttgcttttttttttggagatggagtctcactcttgctcaggctggagtgtggagtggcgcgatctcaattcactgcaacctccgcctcctgattcaagtgattctcatgcctcaccctcccgagtagctgggattataggtgtccaccaccatgcccggctaatttttgtatttttagtagagacgaggtttcaccacgttggccaggctggtcttaaactcctgacctcaggtgatccacccaccttggtctcccaaaatgctgggattacaggtgtgagccactgcgcccagccggtttggcctttttatctgatctgcttcatgcttcatgactaagtgagatcagtaaggaggtatcactcctgatttgtgcaggtatattttgttgagtcaattaaggggcttttaatagggagaagttctttcctttggttatacagcttccatgccttttacctagtgagatgtgttctactttatatagatatgtcttgttcaaatagaattggctttctggtaagtgacttaaaagtcacacctcatgtaagctgggtgtggtggctcatgcctgtaatcccagcactttgggatgccgaggcgggcggatcacgaggtcgggagattgagactatcctggctaacacggtgaaaccctgtctctactaaaaatacaaaaaattagctgggtgtggtggcgggcgcctgtagtcccagctactccggaggctgaggcaggagaatggcgtgaacccgggaggcagagcttgaagtgagcggagatcgcaccactgcactccagcctgggcaacaaagcaagactctgtctcaaaaaaaaaaaaaaagtcacacctcatgtaaaaacaaatgagacttaaggaacactaaatgtcttcacagattcaacagatgttcaacagatatttattgagctctcctttgcagaaggaaggccatggtgcctccttttacattcttgatatgttgatttaactcttaaagttcacaaatgtgttttcatgttttggaggctcaagatttgtgttcattgtaactcaaagggcagctatggagagaataagtctatcctatctgaaaaataataaaagtcaaaccctttgtttcaactgatgataccactatttcattttagtgtttttccttcttctgacagactttactattgaaaggcttatatatgtcacctctattttcttatcactcattatgaactctgtgcaatctgcttttatcctcagttcattgtacagtgaactgtacaatgctgtattgaaagttacacatgacttcctaactgccctaaccagtgatggtttctcagtccttattcttcatggcttctctctgttgtttagcatagattacactcatcttaagcattctctttctctgtcacctgaaccactatgttttctctttgtacttttctcattacacttttggttattgtcttatttactcacaatatttcaactatgtatattttcaaaattcagaaataaatagtatcgcttagcaattaaagaggaagaaacctggagccagactaccctctaccacttattatctttgtgagtatggacaaagtcctgaggttaaagaagttccagtgtttcagagtgcactccagagagtacaatcagttttatgcttatttccttatctgtaaacttgattaataaaagatacctacctctttggattgttgagagaattacatgatttaattccttaaagcccagcacagtgcctgatataaaggaagtgtcccagtgggattcattcttgtgtctttagtttttatctttatggagaatgctcaaatataaatcattagtaccgacttattttctaagctctattcccatgtcgtcatctaccttacaaacttttagagttgaattcactaaccgtat

SEQ ID NO: 2368 - DNA, 1066 bp, Homo sapiens
ggccccaaggagtaaaatgattcttttattaattagttttctaaaattataaaactaatttataaaataaattcaaacaaaatagaagtctataaagtaaaaataaaaattatccctccctattcactttgttgcccagacctattccccagaaataggtactcttttaacagtaattatatatcttccaataactttctatgtttataaacattcactccctatctgtctgtttttaaaaaacttaaatgggtgttacatattgccttgagcttgcattttttcccccatctcaaaagtgtaccttggacgcctttagtatatctttatgagtatatttaggtccatattaagagaggcatacactatagtgattaaaaataaggactgtggagccatgctatgtgaatgtaaatgctggctcaccattactagtgtgactttgggaaagttatttaacctttctgtgtctcaatttcctcatctgtaaaatagagataatattaattacctaccttatagggttgatgtgaggattaaatagttgtatatgtaaaatgcttagaatagtacctggtacatggtaagcactatgtatttgcaaatggctattattaattgatatttaaattgtttccagtactcatataaatacatgtataaacatgtatttatacatacatgtttttgttgtattttttgagaattatatgtaggacagatttttttcaagttgaattgcttggccaaaagatgattttgattactgtgatagcagtgttttatcgtacatatgaaatttaagtcctaattctgaccaagcaaattaacaaacttactttgcaatcttatagaaaaacaatagacttaaaatctgaggagagacaaagagttttaattaaacattatgaattctaatttttaaatcttaaaatggttcaatatctacaattttatgtgcttcaaaaagacttagaaaagtatcatttacagtcttagagtgttaaaaattagacaaattttatgtaccttagcaataacaggttttttttaaggttaatatatg

SEQ ID NO: 2369 - DNA, 1375 bp, Homo sapiens
gctggagtgcagtggtgtgatctgggctcactataacctccacctcctgggttcaagcagttctcctgtctcagtctcccaagtagctgggattacagatggccaccaccatgccctggctaattttttgtgtttttagtagagacggagttttgccatgttggccaggctggtcctgaactgacctcaggtcatccacctgcctggtcctctcaaagtgctgggattacaggcgtgagccaccgttcccagcccagctttcttttcttgatgtagcacacgccacctgtgccagagcaaactgtaccttccagaggcagtcattgtgctttgcatggggagcactggaaggtgtccattccaccacctgagtttaggctgccttcatctcttgcctggaatagtgcagtcagctgactggcttccactctcaccctctaatctttgtttcttcctgctgctgagtatgctttagataatgttttaaactctttagcctacaacttgtaaaagtgcaaaaggacttgatgtagatctgcatgctcaatggaacttaaagaaaacaaatgtgatgagggctttggaggtgctttgaatgccttgaatggacagtgctacaaaatacaagattgatatatttattcaacaaacatttattaaatgcctcctgtgtcccaggcactgtgcctaggagccagaaataaaagacataattggtataatattgacagttacttttgaagatttacatgaaaaggagtctacccaaacagaagaaatatacaattggttaactaggatgttaatagacctttataggtgaatagttgtatttatagaatggtagttttctgagcaaacaaaagacatgcttagctgtcccccttcccacagtttagttccatatattgttggatacaaaaaatgctttcttctgtgtttctttctctttgctctttagtcatcggctgcagtggaagactaatgctcagcccctgcatagaaaatctttatacacagcaagagctggtgagagaaattgactaggattttgtaattctagtccctttcaattagcaacagatgctgcagggaaagattgtctgtgtaggaacacagtactaatgtttctgtgccctagctgacatggaatgctcattgcaaaaagaaagatgttcttttccttggtcgaagttgtcaccaatgacagattagatttttttaacctttctctactcctaaatccattaatgaagtctgattcccttggaagaaagttaaattcttgaccaattgtaacaacatttctaattgaacacttaaagaatttatagaaagtttagacattccagctgcctttctgatagtataaagg

SEQ ID NO: 2370 - DNA, 1049 bp, Homo sapiens
agtaactttcaggaattttgaaagcccagtagtatttagtatatgctctctcagcattaaaaaggtcaccttgctaatacatgttaattttgaaagtttaattgacctttggaattttaatatcaaccttttttggtgtggttagaggttggagcaatcactgaagaaactgaagcctgtgattggtggagtttgggtgctgtcctctttgaacttctcactggcaaggtaagcagtggcctggacgtttaataaatttactcagatgctaccttgatttcaaattaagaacattagccttcacccttagtttttaaatcagggactaagcaagaaaaactttgatatcgaaagcaagtagagaaatgcaagtttatcaagagtccagattttttttaaaagttggattgcattacattgaataaattgatggtaaagttattttatgtcacaatatttcatagtgaaatatgactaaaacttttttcttttaattttccatgattcagctttaacagggtcaaatctgtaaggtttatgtaaggatgtattaaaattctctggatgttttaaacatattgtctgaaaccaggagagaattcttatttaagaaaattaacgtagatattaaagttaacattatctttttctcagtaccataaatttttcctatctgttctagcttaaggacagaaattatactctcagatgaatgacttttgaatatgatgtttgagttagtagactttaataaagtattgtgcagattgcctcctgggaagaaaatgaaggaaatgaaggaaatgaacagttacacttttgtaaatagtcatctacctacgtgtgtagataatactgacctaagattgctggggagtttacaaatcacctttacatacatttaaactgtaaagtgctatatatgtatgtaaagtattatgactaacaaattctaaactctgtagggtttttaaaacattaaaacattttaaaggtatcaaatctctttttagttttgcgtataatttaagcttttctataatattctg

SEQ ID NO: 2371 - DNA, 1029 bp, Homo sapiens
tgagatgaacgtaatgcagggttatcttcacacattctgatcttctctgtgacaggcatctccagcactgaggcacctctgactcacagttacttatggagcaccaaagcatttggataaagaccgttataggaaatgggggggaaatggctaaaagagaacaattcgtttacaattacaagatattagctaattgtgccaggggctgttatatacatatatacacaaccaaggtgtgatctgaatttaatccacatttggtgttgcagatgagttgtaaagccaactgaaagagttccttcaagaagttcctctgataggaagctagaagtgtagaatgaagttttacttgacagaaggacctttacatggcagctaacagtgctttttgctgaccaggattggtttatatgattaaattaatatttgcttaataatacactaaaagtatatgaacaatgtcatcaatgaaacttaaaagcgagaaaaaagaatatacacataatttctgacggaaaacctgtaccctgatgctgtataatgtatgttgaatgtggtcccagattatttctgtaagaagacactccatgttgtcagctttgtactctttgttgatactgcttatttagagaagggttcatataaacactcactctgtgtcttcaacagcatctttctttccccatctttctattttctgcaccctctgcttgttccctcatattctgttcttccgactcctgctaacacacatgcaacaaaaaagggaagggagtgcttatttccctttgtgtaaggactaagaaatcatgatatcaaataaacatggtgaaacattagatctcttcttcatttaataaccctcccccctttttttccttgaagaaatgcgtctgttcctttccttgtgaaatattatcagtttctaccattgcttctcatgcttgactttgttttactttttggcttggtatactaagaagcaaaggatctcatctaaatggaattgaatggcagtcctagtttgtt

SEQ ID NO: 2372 - DNA, 1074 bp, Homo sapiens
tctatgctcctattcttttcccccctctactattaatacattgcacttttaaccatttatctcattggtatattatttctcaggaagagtaagataggcaaacaaccttttctatagttcccacaattctgaaaccagtgaggatctgttggtttgtagagagattgggcccacttttctcctgtctctacctctgtatggcagtgtgttcttcccttgatttaactgttagtgtgtaggcaaaattctcaagcttttactttgaagaaatatctgggaatcacagtgagtgatgtcttacttcaattttagggatacggggccatatatgatccggttgtacagttattcctcgaaaagatcaatagaaatgggcagaaatgtaatgaaatggtacaactgtgattgctattattatgttttaatttttcgttcatggctttccaaactgttatatataatttaatttttcaggaaaaattatctcccactccaaaaggtaccatctgttttttgaacaaagtagctaagataagaactattaagaacaccagcttatcaggtcaacccattctacattcaccacattaaacatatatgttctgtaggatagaacacactacctcattatcccatctagtagaagggaaatagtgaatgtgtatgcaagttaaactgaatttcagtgcacctgctccaagggctcatgtcttggattttaaaaatatgttcagtatctttgcaaatgaatctgtttaatcaaatattaagttttattcaaattccaaaagaaacagtcagccaattgcttttcttcatgatgttccttgtcattcatcctctttgcatctcaagaaaaatagcctagtttaggccccaaacatttgcatgcacccagttaaagcacaagaggagtagtataagccgttaagacgtgcaggtgaagaaattgagcctgttctctgaaacagccggctttttctactcaacttttagggagaatgttagaaagacttgaagtttagaaaggaaaatggtttagtaatttgaaattaaaatccaaccaggaaccat

SEQ ID NO: 2373 - DNA, 1047 bp, Homo sapiens
tgagacttgcctagcgcagctgcctcttctctgcacccacatctggaggtgctggtgcagggcactgctcccgagtcaggcctgttctcaccatcatcccaaggagacaggttgaggttatgcagcggatactggggcaagatccctcccaggtccatccagggccatatccatagtagttaactcaggctagttttgagaagccactagtttgcttcttttcccacccactgcttccaagtttaattactaagtggtggtctcagaaaccctggttttcatcattactcacaccatccccttcttttgctttttcaaattacagccccagtttgcaaatggggaagctctgggaccagtgggttgaccgtggttatctaatctccccaccccaggtttggaaaaaagaaacaaaaattgctttttaatttgtagtaataatgaatattagccctggagagatttcctgcctgagagggttactaaacctaaaagtgggtgacagacggaagttgtggctttgtcctctgactcggactagacacttcagggctgaggtggcctagatgggatcactggagctctttttaaaggcactgatattatgcatttacagggtacgtccaacaccaagtgggccaagtgaatcagggtcgctgggcattagacccagaaatctgtgttctggaagcatcccaggtgtttctcaggagtttgagaagccctcagtctccttccacttccgagattagggtctgtgaaggttgtgtctggtctgaatgtccactgcccactccaccctctacttaccccactgtgccctgattagccagcagggggagcccaaaggaagccagctcttaaaatctgctcttggaaacagaatttgttaaattggggataaactcaaaccttccttttctcctagagtgtgtgaggaagtgcactggcctcatgcgcagttctctgtgtgagatctgtagggagagaggagcagacagacagcatcccagccctgtggttctcccagcagggccttgctctgct

SEQ ID NO: 2374 - DNA, 1005 bp, Homo sapiens
acaacgggaaagcagtggtggaggtggggcaggaggaggtcacacaagagcttccttggggactaagggactgggtagttcgggcatgaagagtgccctccacgtatttaagagataaagatacagcattttctggaaaggacaatagtcctgcaagtcctccatgcaggaaccttcatccagggcttttcttcactccccacctcgattccctgttcctcaaaagtaaacttctgggtttatttttttgttcttttgccccaatggcccaatacaggtggctgatagctgatcccttaatgggccaaaatctgctctaatcacagttagcttggtctacatctatattgttctctatcttagactttggaatggaaaagcattcagcttgccagtcttctttatgtttattcccctcattttctaatcatctttctaaattgctcctttttatattctgttggctatagcatcttgatgtaatgatttcagttgctggctgaattgtttagggcaattacagttgtgtgtctctgggtacagttctttgactcctgacaaactagattggaatggaggatattgagacagggtcagttgtcctttgttggttgagaggcatgtgactcctttcagtagttttgggataaatgggagtggaatacaagatgctgtgttccaagaactgagagctagaaaaaaaaacaaaactggtagcaaaacacagctttccagggctttgatatccaacttatatgttgtctaagacctttgcttctccctcttaattttttttattgttcttagtactttcatgaactgcttattgttttgataaaaagtttcattgataaaatcgattgaaaaaaaccattaaaatggccgttaactttatttagtaaaaaaacaaattctcaaactcttgcctaagtaactggaaaatgaatgatttttctttttgtttatgttctgaaggctaaaataaaggaaagttgctatattttc

SEQ ID NO: 2375 - DNA, 1052 bp, Homo sapiens
aatatacaagtgaaaaagtgtttttaaaaagtatgtaatagctaacatatatggaaagcttaccaggaaagcttactgtttctaaggccttaggaagtcaccatcattattatcctcattttacaaacaagggaaacaaggcatagagcagctaaataacttgcccaaggtcatacatccgtaagtgcctgagctagaagaatccgctttgtttttttttttttttaaattttaaatctttaatttctgttttcacgtattttcttcttgcttccaaaaggaaaggagtgcgtagctctgttgcctgtacatcgtccacagcccctgggttggagcggggtcccctgggccgcccgggggtccacatgcagcccctggggggccggcgcggggtgaggtccgggggctgccttattgctgaggtctggccggttggtgccgccgctaggcgagctggctggcagctcctgggagatgaagcgacgcaggccctccaggtactggctgtagagctcgatgtcgttgtgcctggtgccctccacccacagcggctccaccgccttggggcagcgctcgtagagcgccagcccgtgcgagaagtcgatcacctcgtcctccgtgccgtggatgatgagcacgggcgacgtgatcttggacaccttctcgatgttagggaaggcgtcgaagcagtaggtcttcttggtgtcggggaaggcgacgcgcatgcccgaggtgagcggcgaatgcagcaccaccgcggcacactcgtagcgcgaggccaggtccacggtgggcaccgtgccgatgctctgcccgtacaggatgatgctgtccgggctgatgccgtacctggaggcgccggagcagggtcagccgcggcctccgacgcgcgcgcacccttcccgccagcgggcgtccccgggcccagctccggatgcgaccctccagtctccccactcagccaagtcagtgggtcaggcccaggctccacaccagtcccgagggccacccccagccctcaacaccgcggcggtgggcgaagccagcggccc

SEQ ID NO: 2376 - DNA, 1734 bp, Homo sapiens
tttcaggtctagaaaatgaaaactaaacagtactttttaaaaattacctctctattagccaactaaatagtgatacagtcattgcttctaaaaggattttgcttgtgggagaattttctggtttctaacaataactggttttagcagccaaacttgaaaatgaattgttaagggagatttataggatttatttcctattttttaatttttgaaaggatagtaaagactccctttctaggatgggtgtgtctggccaaagatgatatactacatggcttcaaagaagtttcctatctattggcttcaaagtgtgatcatctaaaatttctgtgttcatatggcttattgcagctgtatctcaggaatttagtagtcaatgttagactcaggtttaccaataatacttggtaaattcacaaaataagggagttattgtcttctgaacaattctcattaggttgaaaatgaaaaaaccgagggtacaaacctgaaaagggagaatcaaagattgatggaaatatgtgaaagtctggagaaaactaagcagaagatttctcatgaacttcaagtcaaggagtcacaagtgaatttccaggaaggacaactgaattcaggcaaaaaacaaatagaaaaactggaacaggaacttaaaaggtaatattttgggatggtatttatagggatgatatttgtatgtattaatcagatgcgtttgtcttttcctttaacaatataattattatactttgcaattttttttcctggtagaataagtaatgattcggtctctgtaccgtaacttgaaagagtggaagattaaaaacaaacaaacagtgatttggttttatcattgcatagctcagtacgatataaatttatcaaatgtttgctgcattactcatgtattcattcagtatatgtttattaagctgtaccatgattcagacactattggtcactgagtaatacaataataaatagtactatcatactatcaaattgatagtatgataatactagttacatagcattatttgatagtatgatagtacttgttaaaataaaactatcgacagctgttaccgaaaagatggaaattagttgaagcatactgatggctcgtgttttctctgggtggaaaagctgctgtagagaatgagagggagaactagggaattataaaaggacggaatagcatggagggcccagttgagattggagacagaatataagcaggcccaatctgcaaggttgtgtgataatttaaaaaatgtttccttttggctgggctaggtggctcatgcctgtaatcccagcactttaggaggccgaggcaagtggattacctgaggtcaggagtttgagaccagcatggccaacatggtgaaaccccctctctactaaaaatacaaaaattagcgaggtgtagtggcgggcacctctaatctcagctactcaggaggctgaggcaggagaatcgcttgaacctgggaggtggaagttgcagtgagccgagttcgtgccatatccttatagcacatttggttttaaaatattcttcttatctagtagactacaaaaactactgaatatggttttaaaatttacactgctaacttccaaatgcattgcagaaacttattttttccatcagttgtcactgattaggtttctggaaggtctccaacaagtgaggttgaaccgtttggaatgtttgttaaaactgtggagatt

SEQ ID NO: 2377 - DNA, 1045 bp, Homo sapiens
ctcctgcctcagtctccccagtaactgggatttacaggcaagcgccaccacacccggctaatttttgtattttagtagagacggcgtttcaccatgttgcctcagcatttggaacattgtggaaagaagcattttaatatttaaaatttcccacaaaatccattatgcttgaaacagactatcatatgagggtaatgggcaccctctgatgattttacagcttttaaattacataggctaacaccattgcattttaacctctcatttccatgcaacaaaatgttagatgaatcgttagacatgccgatcttttttttcatggcacaaattaggaagtatttatttaagtgggctaatgctttacatccttgctaatagttcctaaacataaattgtgtgctaaaacaattatagcagtttttctaaaacacaaaatatttgttcatttatgtgagtaatatttattttgtcttgaacatttttattcattattagtatactgcattggaacaaaaactgaaaaaattgacggaagatttgagttgtcagcgacaaaatgcagaaagtgccagatgttctctggaacagaaaattaaggaaaaagaaaaggagtttcaagaggtaaggtaaatggattcatgaggtgtttgtctgaaaggctttttatgggcttttcatagtttgatcacttggaaaggggagttgttatcacaatttgggaaattctcttagaggagaaatgctttgtgagctaaaggtcatcttattttctttcacatcttcacttttgcgctttttttaaatctttcagtttttgattagagaagggaattagtattcagaattcatccatgttttctgatttgtttgagatttgatattcagtaggaaaggatcacttttcttcttttggacattttctctgctgtggaggaaattgtattacattttccagtaggcttttaaaatttttttttctttcactctatttcctttataactccagtatttttttttttgagacagagtctcgcagtgttaccca

SEQ ID NO: 2378 - DNA, 1071 bp, Homo sapiens
agattcagaacatataggcctccctagtagtagaatggaactacacatgtacctgtgttactttattgcatgctgttgcgtggatgtctcttcaatcagatgcccaaagaacctgttttcactgtgaaagctcagaagctagaattaattcttcctctgtgttccagccctctgatttcccatagcacactcaatgtctctttagtatttagcatatcctattgtgtattaaatgattagtatcacatcttcccccactggaggatgtctgccccaagggcagagactctgtcttatttatatttgcattttttgtaatgcacattccagcatcttgaatattgttggttttcttgataagcatttattgaaggtaatttttcccacagaatcattcctgtaacagcaaaccttaagatggttttgcaatgaaaagtaaacatatgtgctgagatttttttttttttttggtttattaacaaatcaaatgtttgcaaaggtatatttggccattcaggtgtgataggaacttggaggttttgtcttgaggatcttgtagataggattttccttttgagcttactctttaataggcgtatgaacaatgagaaagttcaatgaaacttcttgaaagaaaaaattatcttcagatttgggtttgatgctgttgtcttctgttcataacattatttaagtaagaatgtctgacttcattaggtactcaaacggggaaattgtgattctttccctagtgagatacacaaacagttctgctagggacctttattaaggcagaagtcataacttacttgagcattcgttttggctataaccaattaaaatgtgtgttttaggaaatgaagaaggaaaacaacctccttaagagtcactctgagcaaaaggccagagaagtctgccacctggaggcagaactcaagaacatcaaacagtgtttaaatcagagccagaattttgcagaagaaatgaaaggtaagtaaacttagtattttagagttacctttctaagctgctattcccgtgagaggggatggatggcattaacatattaga

SEQ ID NO: 2379 - DNA, 1625 bp, Homo sapiens
taagtctaatcctgtggatgttttagctaaaatggtggagtacttatttacttttctgagacatcagaattactctacaataaagtgggatgttcccatttcagtgctgttcttgtcccagttttctctcttggaataaatatttgaaaagatggtaaaaatatacacatatgtaaacacatacaaagaaaagaaacagtgcttaggaaaatcatcccttggtattttattcaataacatgttcttaagctgctagaaagaagatgaacaaatgtgttactctccttaagataaccatttttctcatttttatataagataattaccaagtgatccactttctaggaggtacccaggcaataatgccagtttttccagggcttgagtagttgttagtttgtttggattttgccagggggcggggggaggggttagcgtttctgtagaataaacatttattacaaacattgacgacttttatttatttttaaatagcgaagaatacctctcaggaaaccatgttaagagatcttcaagaaaaaataaatcagcaagaaaactccttgactttagaaaaactgaagcttgctgtggctgatctggaaaagcagcgagattgttctcaagaccttttgaagaaaagagaacatcacattgaacaacttaatgataagttaagcaagacagagaaagagtccaaagccttgctgagtgctttagagttaaaaaagaaagaatatgaagaattgaaagaagagaaaactctgttttcttgttggaaaagtgaaaacgaaaaacttttaactcagatggaatcagaaaaggaaaacttgcagagtaaaattaatcacttggaaacttgtctgaagacacagcaaataaaaagtcatgaatacaacgagagagtaagaacgctggagatggacagagaaaacctaagtgtcgagatcagaaaccttcacaacgtgttagacagtaagtcagtggaggtagagacccagaaactagcttatatggagctacagcagaaagctgagttctcagatcagaaacatcagaaggaaatagaaaatatgtgtttgaagacttctcagcttactgggcaagttgaagatctagaacacaagcttcagttactgtcaaatgaaataatggacaaagaccggtgttaccaagacttgcatgccgaatatgagagcctcagggatctgctaaaatccaaagatgcttctctggtgacaaatgaagatcatcagagaagtcttttggcttttgatcagcagcctgccatgcatcattcctttgcaaatataattggagaacaaggaagcatgccttcagagaggagtgaatgtcgtttagaagcagaccaaagtccgaaaaattctgccatcctacaaaatagagttgattcacttgaattttcattagagtctcaaaaacagatgaactcagacctgcaaaagcagtgtgaagagttggtgcaaatcaaaggagaaatagaagaaaatctcatgaaagcagaacagatgcatcaaagttttgtggctgaaacaagtcagcgcattagtaagttacaggaagacacttctgctcaccagaatgttgttgctgaaaccttaagt

SEQ ID NO: 2380 - DNA, 1960 bp, Homo sapiens
gaatgaacagctgatgaaggtaatgaagactaaacatgaatgtcaaaatctagaatcagaaccaattaggaactctgtgaaagaaagagagagtgagagaaatcaatgtaattttaaacctcagatggatcttgaagttaaagaaatttctctagatagttataatgcgcagttggtgcaattagaagctatgctaagaaataaggaattaaaacttcaggaaagtgagaaggagaaggagtgcctgcagcatgaattacagacaattagaggagatcttgaaaccagcaatttgcaagacatgcagtcacaagaaattagtggccttaaagactgtgaaatagatgcggaagaaaagtatatttcagggcctcatgagttgtcaacaagtcaaaacgacaatgcacaccttcagtgctctctgcaaacaacaatgaacaagctgaatgagctagagaaaatatgtgaaatactgcaggctgaaaagtatgaactcgtaactgagctgaatgattcaaggtcagaatgtatcacagcaactaggaaaatggcagaagaggtagggaaactactaaatgaagttaaaatattaaatgatgacagtggtcttctccatggtgagttagtggaagacataccaggaggtgaatttggtgaacaaccaaatgaacagcaccctgtgtctttggctccattggacgagagtaattcctacgagcacttgacattgtcagacaaagaagttcaaatgcactttgccgaattgcaagagaaattcttatctttacaaagtgaacacaaaattttacatgatcagcactgtcagatgagctctaaaatgtcagagctgcagacctatgttgactcattaaaggccgaaaatttggtcttgtcaacgaatctgagaaactttcaaggtgacttggtgaaggagatgcagctgggcttggaggaggggctcgttccatccctgtcatcctcttgtgtgcctgacagctctagtcttagcagtttgggagactcctccttttacagagctcttttagaacagacaggagatatgtctcttttgagtaatttagaaggggctgtttcagcaaaccagtgcagtgtagatgaagtattttgcagcagtctgcaggaggagaatctgaccaggaaagaaaccccttcggccccagcgaagggtgttgaagagcttgagtccctctgtgaggtgtaccggcagtccctcgagaagctagaagagaaaatggaaagtcaagggattatgaaaaataaggaaattcaagagctcgagcagttattaagttctgaaaggcaagagcttgactgccttaggaagcagtatttgtcagaaaatgaacagtggcaacagaagctgacaagcgtgactctggagatggagtccaagttggcggcagaaaagaaacagacggaacaactgtcacttgagctggaagtagcacgactccagctacaaggtctggacttaagttctcggtctttgcttggcatcgacacagaagatgtaagtacctgggatttaaatgccatttctcggtttacatgactagtggacactcagtaaatgtttgtctaattgaaatgtacattaaacctaagttaaaatatttttagggttcaaggaaataaaatacaccaaaatattttcaaaacaaaccagaacttgaggaaaatgagtaaacgttatttgaggaataaatttctatagggattagatttacatagcattatatagaatattactaaagatgtttttaaagtctggagaaaattatattatggagtcagaaagtctttagaatgtgtgtttccaccctttgtgcattaataaagtatactgaaataattaagaacttacaaatggtaatatgtaaatttttaatctctcccacttttcagactatttttgatgttatggcattatcgtcatgaa

SEQ ID NO: 2381 - DNA, 1052 bp, Homo sapiens
taagagatgtgtttagcagaggccacgcatcagtttctaaaaagtaataactaaatctattctattttgattctttttgaaaaataaaatgcatgcttgttatgtattataattacaggctattcaaggccgaaatgagagctgtgacatatcaaaagaacatacttcagaaactacagaaagaacaccaaagcatgatgttcatcagatttgtgataaagatgctcagcaggacctcaatctagacattgagaaaataactgagactggtgcagtgaaacccacaggagagtgctctggggaacagtccccagataccaattatgagcctccaggggaagataaaacccagggctcttcagaatgcatttctgaattgtcattttctggtcctaatgctttggtacctatggatttcctggggaatcaggaagatatccataatcttcaactgcgggtaaaagagacatcaaatgagaatttgagattacttcatgtgatagaggaccgtgacagaaaagttgaaagtttgctaaatgaaatgaaagaattagactcaaaactccatttacaggaggtacaactaatgaccaaaattgaagcatgcatagaattggaaaaaatagttggggaacttaagaaagaaaactcagatttaagtgaaaaattggaatatttttcttgtgatcaccaggagttactccagagagtagaaacttctgaaggcctcaattctgatttagaaatgcatgcagataaatcatcacgtgaagatattggagataatgtggccaaggtgaatgacagctggaaggagagatttcttgatgtggaaaatgagctgagtaggatcagatcggagaaagctagcattgagcatgaagccctctacctggaggctgacttagaggtagttcaaacagagaagctatgtttagaaaaagacaatgaaaataagcagaaggttattgtctgccttgaagaagaactctcagtggtcacaagtgagagaaaccagcttcgtggagaattagatactatgtcaaaaaaaa

SEQ ID NO: 2382 - DNA, 1033 bp, Homo sapiens
gcagatgtcagaagaaaaccaggagctagtgattcttgatgccgagaattccaaagcagaagtagagactctaaaaacacaaatagaagagatggccagaagcctgaaagtttttgaattagaccttgtcacgttaaggtctgaaaaagaaaatctgacaaaacaaatacaagaaaaacaaggtcagttgtcagaactagacaagttactctcttcatttaaaagtctgttagaagaaaaggagcaagcagagatacagatcaaagaagaatctaaaactgcagtggagatgcttcagaatcagttaaaggagctaaatgaggcagtagcagccttgtgtggtgaccaagaaattatgaaggccacagaacagagtctagacccaccaatagaggaagagcatcagctgagaaatagcattgaaaagctgagagcccgcctagaagctgatgaaaagaagcagctctgtgtcttacaacaactgaaggaaagtgagcatcatgcagatttacttaagggtagagtggagaaccttgaaagagagctagagatagccaggacaaaccaagagcatgcagctcttgaggcagagaattccaaaggagaggtagagaccctaaaagcaaaaatagaagggatgacccaaagtctgagaggtctggaattagatgttgttactataaggtcagaaaaagaaaatctgacaaatgaattacaaaaagagcaagagcgaatatctgaattagaaataataaattcatcatttgaaaatattttgcaagaaaaagagcaagagaaagtacagatgaaagaaaaatcaagcactgccatggagatgcttcaaacacaattaaaagagctcaatgagagagtggcagccctgcataatgaccaagaagcctgtaaggccaaagagcagaatcttagtagtcaagtagagtgtcttgaacttgagaaggctcagttgctacaaggccttgatgaggccaaaaataattatattgttttgcaatcttcagtgaatggcctcatt

SEQ ID NO: 2383 - DNA, 1977 bp, Homo sapiens
tttatgattgaaggctaaaataaatggcatgaatatgttgtatcagagtggtcgatctgatcaaaacagaccaccaaaaagcagattctaatgaaagatgaaatttcaggtaaacaaaatgactgcaaaggaaactgagctgcagagggaaatgcatgagatggcacagaaaacagcagagctgcaagaagaactcagtggagagaaaaataggctagctggagagttgcagttactgttggaagaaataaagagcagcaaagtaagtttctttgtgacaagtgttattatgatctgttaattcattgtgcacactctccttattggttcctgtaagaccttctgttgtttacctaacttatttttagctcttgaaaaaaataaccctgtgcttatgtcataatctgatttatagtaatctctaccatccagcactatcaggagcccacaaggagtcgtgagaagcctctgaacacatgaaagtatctgtctcagagcccaaatacattttcatggaagaggacccttggaccacattaacgcacaacagaagtagatctcatgccgctttcaacaagtttatctgcctccctagcttgccacagattacagggtggaatgttgctagaaacacattcattgatctgctaagaactaacaaagtaacagaactaaagtcatagttttaggcagggttaatgtggcacacctatagcacttgggctgccactgcccactgccatttccatagtagatattactaattcataccctccctttttcctgagtctcctaacactgtgtactgggtagctgctaccatgcagagagagctggcagatgaaatgaaacctgtttgtcatacctgattaaattataaacatccctatagctgtttagtcctcatgcaacttcatccctgagtagtatttaaagaacagcaaaataagatagtcatgattgcgaccctgaataatcacagaaatttgaaatgatacatgtaatattctgtataaagagttggagagatttgttcttttctttaaatatagtatttaatctatgaaaatggaaaggttttggcatcaaatctcaggaatggacttagaccatattctggccatactgcatggaaggagttcctctgaatgatatttgtgtattgcgtctgctgaaatctcttttggtgttgagtagcttgggagtgtcccaagtgcgtcattattgtattttatgtatgggcactactgagaggagtagtttggcctcagccccatacatatgagtgtgttagtttgcattggctttattcattcatttattcattctctaaataataagtgctagtaaggtcaggggatagactattgaaccatacctatcctgtgtttcctgcactcatgcagcttacagtctagacacataataaatcatgaaataggcaacatgtaacaaataagcggataaatactataaaggaaacaaataagattctttgctgtggaataattgggatgtggggatatcagggtaggaaacaacctaatttagatagggtggtcagcagatttagatagggtggtcagcagatgtcacttgcaagatgacgagtcagctatgcaacgaccaggcagtggtggggagccttctaggtctagagagcagtgtggtcaaagctctgggactagaaagatctttgtattttttttagaaattgaaaggaagccattgtggctggagccagatggaaaatgacatgcacaaagattggaggggtaggaagggtatggagggggtgggaaaggtttggggtgggaatattcacttggctagttcaacatatagggagtatttagaaattatgggaatggtagaaaatgatggagaagagaaggcggctcagggcctagcctggaggaactctagcacacaaggtgagatggaggaagaagagccagcaaagaagacagagagaag

SEQ ID NO: 2384 - DNA, 1026 bp, Homo sapiens
cagttcttcacagtgaagggatggggcaaaagattggagggcatttggaaggaaattcttatagtgacagaactggagtctaagctggtcaaggaagaaaatgcaagtccggaggggatttggtgtgaagatggtagtggttctgttgatgaggtcaggaattattgcaatggaagtactttaataaacaaggttggaagcataggaaggtgtggtcccagagtggtttaattgaattcaaggtttcagagtttctgtggtctctggatatgaccttgcgaggtggttgggctggagcagaggaaagtgttattggaggtgaagtcacaattaaaagtgaatacattgctaaggattatagcactattctgtacagattttatcttgcccataaatattttttttctacacagtacacattatttcctaaaaatatttccaggttcttaattatgaggaggtgctattatgattttattatttttctgtttaggatcaattgaaggagctcacactagaaaatagtgaattgaagaagagcctagattgcatgcacaaagaccaggtggaaaaggaagggaaagtgagagaggaaatagctgaatatcagctacggcttcatgaagctgaaaagaaacaccaggctttgcttttggacacaaacaaacaggtgaaatgtggggtttggttactgggggagctggagagtgtattttgatcatggtaaggcttttttttttttccaaaaaaaatcaatattctgggttattactatgctatataatcttttaaaaggtctcacattaacttcacgatcttttccccaggtccctctcttattttatcagttgattttttttttttttttttgagatggggtctctctctgtcgcactgcaagctccgtctcccaggtttgcaccattctcctacctcagcctcccgagtagctgggactacaggtgcccgccaccacgcccggctaattttttgtatttttagtagtgatggggtttcactgtgtta

SEQ ID NO: 2385 - DNA, 1047 bp, Homo sapiens
tgccttcagatgctttcagagtgtttttttggatttgcctggtcatctgttagaatcttgtctcccaaagccatacaacagaagcttcataatctttgctgacttctgttcatccacttatggtagacagaatggactggggaaaataaggatgtaaaaaaatgaatttatttgattggatataactgacgctgcaagaacgtttaatgagttggctgaaatatgagtttgagactttggtggattttatttaagctgtcccaatgagtgtcacaggactagaatatctgccttgatatgatatacctcccgaacaagagttgtttgaactataagaacatatacagatatatctccccaacctcttaaaaaaaaaaatcaaagaaagaacacgtctaagattatctgcttcacgatgcccattgttaactagagaagcatcaagttgcacatgatgtgttgctttactttggacaggtactgttatggataccaaggtcgatgaattaacaactgagatcaaagaactgaaagaaactcttgaagaaaaaaccaaggaggcagatgaatacttggataagtactgttccttgcttataagccatgaaaagttagagaaagctaaagagatgttagagacacaagtggcccatctgtgttcacagcaatctaaacaagattcccgagggtctcctttgctaggtccagttgttccaggaccatctccaatcccttctgttactgaaaagaggttatcatctggccaaaataaagcttcaggcaagaggcaaagatccagtggaatatgggagaatggtagaggaccaacacctgctaccccagagagcttttctaaaaaaagcaagaaagcagtcatgagtggtattcaccctgcagaagacacggaaggtactgagtttgagccagagggacttccagaagttgtaaagaaaggtatgcctaatttaaagacaaaattatttgtgttcttttgaaattccatataatggttcacatataaaaagacaaaagtatttgcttttttac

SEQ ID NO: 2386 - DNA, 1044 bp, Homo sapiens
ctggaatagcttcaaagagtttgaacagtctgtgattttaccttgattgctcacttgtcagagtttgatcaagtatgcgagctgataaccttgaaccagaaaacaaagctttgaaagtgtaataacccctatttgtgtaatgtgataattcataagtgagcaagcacgttcttaggatttgggataccaaatatgaacacattggtggttacacgtgggcgatctaaagagtacaatatatttagatttcttgatctaaacatcacaacaacagatttgcaaatttctttttgttgatgtataagagctataagcattaaggaattatacttagtaataaatttgttcatcatatacattatattaaaatttttcttcaagtatgaagaagaatgctctgagattttctttcactaaagtggacccatttgttactcttattagaaatagtctaccattttgtgcaaatttttctcccctcccctaccaaattctctctgttactcacattcggatttaactttggcatgctgccaacaacaaaatactgaagtatatactggagaatatatatttaatatactgaatatactgactttccaatgaacatgagaacagcttctcttttaagcaactagtgcccctaaaccgtggagctaccaagcttgtccaaagctgtcaactacaagatatccactggatactgaatacaggagaagtcaggtttagggtcccgatatgggccataccattttctcagaagggtgactgggagccaccctttcccaaacctcagtaaaaagtaacatccattcctgtttgtctcacacttctggagatcaaacgaagtatttgactctcttagaaaaccatgacatatagctggtactctatgcctccactgtctttaggcagctcactttattgtaatctcttgtttaaatatctgtcttctgatttgcaatctgagttctgtgaggttactgattacatctatagtttatgtctatgcagtgtctgacattcaacaaatattcactgaat

SEQ ID NO: 2387 - DNA, 1029 bp, Homo sapiens
agcgaggccgacttgtccccagccccaaagctggactggagtccaacggcagtgagaactgtaaggtccagtgaaggcactttgtgtgtcagtacccctgggaggtgccagtcattgaatagataaggctgtgcctacaggacttctctttagtcagggcatgctttattagtgaggagaaaacaattccttagaagtcttaaatatattgtactctttagatctcccatgtgtaggtattgaaaaagtttggaagcactgatcacctgttagcattgccattcctctactgcaatgtaaatagtataaagctatgtatataaagctttttggtaatatgttacaattaaaatgacaagcactatatcacaatctctgtttgtatgtgggttttacactaaaaaaatgcaaaacacattttattcttctaattaacagctcctaggaaaatgtagacttttgctttatgatattctatctgtagtatgaggcatggaatagttttgtatcgggaatttctcagagctgagtaaaatgaaggaaaagcatgttatgtgtttttaaggaaaatgtgcacacatatacatgtaggagtgtttatctttctcttacaatctgttttagacatctttgcttatgaaacctgtacatatgtgtgtgtgggtatgtgtttatttccagtgagggctgcaggcttcctagaggtgtgctataccatgcgtctgtcgttgtgcttttttctgtttttagaccaattttttacagttctttggtaagcattgtcgtatctggtgatggattaacatatagcctttgttttctaataaaatagtcgccttcgttttctgtaagaatgattcctaagtgtaaaggcattcgaatattggtactatttcttgctaattacaacagcctcttatacacgtgaaaatgtttgaacaaatgatacagatctttaaacaaatgatcttagcatctttagttgtattaaaagacacaatttggaatacgggtcataaggagtatatg

SEQ ID NO: 2388 - DNA, 1050 bp, Homo sapiens
tttccctgcttggtttaaaagttttctgcatgtttcaccaacataaacatattcttggattgtgggagttaggagacagatgaagtggagagaagacccaccagcctcatgcttattatgagaattctgaagcatcttccctttcatagggtgctgtgctctgaagcattgttgagattagtatcttagttgtgaatgaagacaaacaatacagtataagtgagtgactaatgtagaaaacatgaggaaaggtgccaagttcattttcagcgctgatggttgtggtgtgacactctcatgccagccaaagaggtgcctgagggaaaggtttaattgcacttttgtgtaataactactggacaggtgtcaaagggtagctccattattccagttggctcaaaaaagggcaagaaattctatcaggttcttgtttctcaaacaaaatagagttcaaccaattcagtatttgctataactggtgagtgtatgggtgtgtaattgagaaaggcgggggaaacttggaaaaagctaagaagctaagacagaatcagtatgaatcactatgttttgggaagttatatattatttttgctgtcttgattttgtgacattgagccaagaaatataaacatattaaacagttttgcaagacttccttttctctgcataatgttagcaagtcattaataaacttcccatgcagtatattaagaagttttacctggagcctaaaagcacagaaatttcttgtaggttattaatggcaatgagtcaactcactcaaagtgagaaatacacattttatggggcctgaaacaggatctgtctatcaggatattattggaatgtcttagtatagtgcctttactcatgactaatttgggttgtaggaagtttgatttattcaaatataaattgtgttaactggttactttgtcaggtgtgtgtgtgtgtgtgtgtgtgtgtgtgtgtgtacaaagcttgagattttcaatcatcactatgatattttagttactatgattttttaatttcagttctcactatgat

SEQ ID NO: 2389 - DNA, 1060 bp, Homo sapiens
ggtgttcttttccgcgcctaattaggggatttgtaatttgaaagatttctgtgatgggagtgcagtaggtttgcagtacctagttatttattttcagaatttcttggtgcatgggcttgaaggatctgttcaacttctaggacagtgtgtccagaaactgcagtttgaacatttgcttttaggaagctctggatattggcacggtgtgacgcccttggagtaaacagactgaatgctcttctctgtctgttctctttctggccttccgcccccccccccccccgccccttctgtgcctgttattaagtttgttgggggaaaaaatcgtagtttttgtggatttcctataacttatgagtcactcctctcagaaaagggagtttgccagctgtttgaaagaaggattagttgagttttaggcttggtaaggagataaacaaggaaatgctctggaatacagttaatttttctgtgcttgagaatatgattttcaaccagcattttaaaagtattttaatgtcttagaaccatagtgataaaaaatgtctactgtagtgctttaatcctaaacatttgatagctttctagaatttaacacagaaaaccatggtacttcgttcttagggtttttcctcttcccccaaatcaaaacttagataatttacaacgttattgcagttgtatagaaaccagtcttatggagatttatgtctcctaatgtaagaaatggagtttttcctaaaatcacgttaaaatattggaagtttggtaacttgtggaatacccctaaagaggaggcctgcaatgtgtgttgattatactgaagagtagcagtataatcatttacaatccctacactggtttctacttgctattgatagttaatgtatttcttttctttaattttctttttttttttttttgagacggagtcttgctctgtcgcctggctggagtgcagtggcgcgatctcggctcactgcagcctctgcctcccagtttcaagcgattctcctgcctcagcatcccgagtagctgggtcacaggcgcgcgccaccac

SEQ ID NO: 2390 - DNA, 2103 bp, Homo sapiens
gagataaacttttaattgtgattggaaagcatgttttgataatgatagaaaatttattttggagactaaggcactttttatggaacagtgcatacacggcttctgctgttactgacactgagactgatactgctaaatgatttaagtgggcagtttagtgacatctgtgtgtcaacaccagtgtattctgaaagtgctctgttgtaaccataaaatgcctgcagatcgtacagaagaatcaagtctccgttttgtacagaacatttaactgagttttagagtgtgattctgtttatcacacataagtttcaataaacatttactgggtgtgtgctaggtgctaagaacaatgcttttaggtggtcctctctggctttaagaaaaaacaacatctacttttttaatacaaaatccatttctgaaactgagtttgaaaagtgaatttacagataatccatttatcaagatatgtaaaatattatgagccattgttgcctcaggtgcctggatggacttgcaaagttgagagatctgtgagacttctgacactactctgtataagccttggtagtcacagtcaccctggcctgcaatccagtgctatttaatagcccacttagaagatgggaatgggaagtaggatgtattttgaggtttgttatgctgcagtgagcataataaaaaaaagtaagcaacttccacgtttttgataattccaggctgctaatttaggtaatggcagacaatagatggatgatacagtgtatacatgcacagcctgggaaacatcccttagccattttggctggggtttggcctgtgtttcctggtgatagtgcatggtaactagtgccactattcagtcaccttgtttagtttaagtatgaaaggtaaaaataaatttagggatttcatataatgccagaaaataaatgtggagtgaaagtagaggtttgctaggctgggtgagataacattgtagttcaaggtgatatcttaaaatgaaaatactcagagaagggctggactgaacaagtactatattgctttgtttgccatatcagtttacataaattattggtttgttgtcccagtctattatactgtactttggtaaagatcctcccttggtaatatacaagcttgatcaaatgacaacctcagaacagtgatgtatttggctgaatgatttttgaatgaatgaagtcagcagttgcagatagcccaagactgcctataaagaaggtgttaaatgagtaatttacagtgaaattactatgagcttaaaaagagataatacaggattggatatttagaaaaactattacagggaaggtaaaacctgagtggtatcaagaaagatggacggatcttgaattattggacatgaagagagtgatctagctgaataaagataccaaaatggtagtaagcatgaattttttggggatatgaagaagttttgtcctattagaggggaaaaccagcatttgtactggagagatgagatggaacctgaaggtaattttgaatgttatactgagaagttgagacttggtgtgatgggctaattgttgattcttcagcagagattagcttattggaaagtagtgttttaagatgcattatatggcggataacaagttgtttattgttattgagagctgcttgtataatcttaactctgaattgaaagtagcaacgtttaaaaatattaactgtaataaatatattggtacagctataactataaaacatcttgtaaatcattagccagtgtattaaaacaagttaactaatactgaaatttcaaatcatgttctcacttataataccagatgatttttaattgcagatttagtacctcaagacaaactcttatgtggattccagattcttttttttccaggtatgtcttataattctttagtgtatattttaatacatttatttaccaaaatataataatgtttgtcagttaaattttttttaataaaaaaggttaactcttaaaattatatatttttgaacttggaagatagataacttacttttagtggtctttaacatttggtaaagaattagcacatttgtttatactca

SEQ ID NO: 2391 - DNA, 1048 bp, Homo sapiens
ctgtgttataatggacttctgagcaagatttcattttaaaaaatgttcccctgtcaaataaaaaatgtttgaaagtatggggaatttcagttctaaagcagttaaattattacatagtacctaacacataatacctgtaccataattgtaaagagtggctggcagactgaattaattacccattaattcagtaacctaaagcttatttattgtaaacagtatgacaataccagaaatctgttgacagaattttgtctttgtctttgtttttttcattttcattttattttttaattgtaattaaattatttgtaataatttgctatattggaagatgtatttcggctttaatgaaattcacatttttgtttctttgtcacaatgtgatatttttaatttttgaaaggtgaacttaggaatgtatttgttttcttcttctctttataggtattcctagtcgtaaaataaacaacacagtcagatctgctgattctaggaatggtctaaattctacagaaggtgaagcccggggaaatggtacacagcctgttctctctggaacgggagaagaaactgttaggctaggtaagcaaagattacagaaatagaaaaagaaaaatacgtatgtttttagtgctgggtgatattgagtaattacttttaaagatttttgcctcatctccttttttatccagatttatcatttatatcttggaaaggtctcatttaacacttaatttttatttaaaatgttgtgtaatcttctatcttctctgaatctttagaacagggttgccaaaatttatctggtaagagccagagattaaatattttaggctttgtgggccacgtgttctctgtcagacctactcaactttgccattgtagcatgaacacataatggacaatatgtaacaagtaagcatggctgggttctaacaaaactatttttttttttttttttgagacggagtctcgctctgtcgctcaggctggagtgcagtggtgccatcttggctcactgcaagctctgcctcctgggtttacg

SEQ ID NO: 2392 - DNA, 1008 bp, Homo sapiens
ttgtatcagtaagttacaaaacctttaaaaaaagagtagtacagtgaagacctgtatgatgttctcctagcttcactaattttctacatggttaggttttatgtttatgtccctttttcttgctgagtttatgacagtgttacttctattaacgaagagtagttgtgtgaattgctgcccccttggggcttatattccactttagatctttaatccttgtggagtttacttttttgtatgtggtatgagatttaaggatttattttcttctcagtgggtaggtaattatgttctgacaatttattacgtaaatcattctttgtcagtgaatctgatagcccattttatcttgctttatgtgtgtgtatatacttggatctgtttttcagttctctcatttccttaagacatatgtctattctcatacaacttgaggtgaagtatgttcataataagtttcaaaatctcacagggcatgtcctctctactgtattttattgaggtcttcatgtaggaaataactagacgtaactctattcttcgcatagctgtcttaaccagagggttggttcactaggcagcagtaagatgatggagaggtgaaataacagagcatattcttgttttatattttgttttatttattattatatattttttgttttgttttgtttttgagattttgagacagagtcttgcactgtcacccaggctagagtgcagtggcgtgatctcgggtcactgcaacacctgcctcctgggttcaagcaattctcccacctcagcctcctgagtagctgggactacaggtgtgcaccaccacacctggccaatttttgtatttttagtagagacggggtttcaccatgttggccagactgttttcaaactcctgatctcaagtgattcacccgcctcagccttccaaagtgctgggattccaggcgtgagccactgtgcctggccttgttctacatattttaaatgtattacttgtatggaaagtta

SEQ ID NO: 2393 - DNA, 1035 bp, Homo sapiens
gtttatcttaacaaatgaatcccatctggtggctgaagagggtggttacaaattacacaatgcttaggaaaaattgatacatttttctctattgctttgaagtttagggaaatcattagttcttcaaattaatatgctcaattgtatattcttatgaattacagttgtattacttggcatacatatttaagggaaaatgaagttgatgtatttttatttaggcccttaggtgaccatcatttatgaatacctaagtttgctttttgcagcgaatgtcaggtagtgtgcaaaagaacgcttcttttccttcatcttctatattctctttaggtaagccaaaagagaaattttatagttatgtttgcattatttgttgagtttaaaaatagatacttcatagttcaactcattcattattatgattacgtaactgctaaagctctaaatgtatgaaggctgctatacatataatcgcatagaaaacatttctttaaaacctaaattcagatagggcagaaagaattattaaaaactgacaggatatttattagagaaattaggtattaaagaatacattagcttttacatatgggtagtcatatggaactgtagttccatagagttttgcatttagacctttaaaaactagtcttcagaggatatcctgcaccctatccttttttatataatagtgctaatgtattggaatgcatgtgatacactcagtgtttctggatagactgtccatctgaagtacaaaaagcaagagattcagtatgtgtcatttcagttaataaaccctgaaaagctgattaataactgaaaggaataataattctgaaattcagatttttgctgattgttcatactcacagaagatgacagtatcatttgtgtgtgtgtgcgtgtgtgtagagaaacatgaaagataaaactatctttttttaaagtttctgaaattttttaaaatttggaggactttactaaattattctttggggaaatatagaactgtagtctctttcaagtcgttat

SEQ ID NO: 2394 - DNA, 1558 bp, Homo sapiens
ataaaacattactcccctgccccactgaggagtttctaactcttgctggttcctcatcttttgcccagttgctgagtgttggattgcccttgagctctttcctggactctgtattctttatctgcactttcctagttatttgaatagtaattatatgtcagtggttcccaaactttcctccacctgtgaccatccaaagagttccaaaccctgtatatccagtgtctggatctctggttgtatgtttaataggcatctcaaatttaagttggacaaaataaaacttaatgatttctccctcaaaagccatcttagtatacagtatcaccatctacttatctactcaagctgaaaatctaggaatcacccttgatttctccctttctttcacctcccacatagtacaattcatcagtaagtcctgttggttttgctgccacattatgtcacaaatccagtcacttttcattgctgtcagtctagtgtctcacgtcatcatcctttctcccctagatgactgtagtaacttctcaacttttccctctctatggtacatgttccacacagcagccagaagcatcttttagaaacacaaacgaagtttgattcctgatggcttctaattgtatttagaataaatttaaatttctaccatagcctgtatggcttttcttgttctagattctacctacctttaaaatttcttcccaatcccatgtcacttttctcattgctgataacactctaacctgttggcttttctatttcttaaaaatgccttcgaacttttgtgtttgttctttttatttgaaatggtttgcccataggtatttgtttgactgcattcttgtcattctggtgccgtttcaaagcccttctcaatgagtgccccttggccacctgctttaaattaaattagccaaacctctgtccaacaataactttctctaacggtaccttgctttgtgttcttcatagctttatcacttattcatttatttgcttgtttattatctctatctcttctagaaaattctccaatagcagaaactttgttgtgttctcagcacttagcataattctgacacgtaaaagatgctgaataaatgttatgaaataaggcaattcagttctctgagaaaatgggccgttttgaagggttattgtgatgtttagatgataatgtatagagatactctgtaataattgctattattttggtggttataatgttattgtgggatgtgataccaaggaactactttgtaaaacttgcattttaacatcagatatttcatgtaggtttgaaacttttgtaagtttgtcaagagaaatatcctttttaacaaaaaatctggagtattttgtgtatactcagttatgttattctgccacctggtggatattaacacatatgtaatgacattgttttccctatagtgcattttaatcccttaaagaaaaactttggataatgactaatattagcaaaattgacgtaattgtccaattgaatcaactaaaaatatttaaattatttttctgaatcctagtaagc

SEQ ID NO: 2395 - DNA, 1723 bp, Homo sapiens
tgagtttttaaaagtaattttgtattcttttgtgttctctttctctgctagtctgtgcagataataatcatgtccggacgtggacagtaacacgattcagaggaatgatctctactcagccaggttctactcctttagcgtcattcaagatactatccctggaggagacagaaagtcatggtagctattcctctggaaatgacataggtgggttaggttattttagggcatttttaggtactatattaactgttcagaagaagcatatcaactaataaaaccacaaaaatgagttttaaatacaaattttccattttaattttgaaattctaaacagaattttagtgtgtttttctgattaaattctataaattcacaaaattattttattgcagcgtttttccttaaaatgttagagcaaatttttcctcttattaatgtttcatcatttaaagaatgtcatcttcacatgttaactacttttatttattattaaaactatgataactgtgtacatttgacatttgaaattttttttgttaatctactgaaaataaaatttgaagctagaaaaacgttggtccctataaatgagagtcattttgatgacatcgtaatattcattaggaaacaatgtagtatgtctcctttgatattctctgatttcagcaaaaggtgtataagtttagtttaggttttctctctatacaccatacatacgtgtgcacatgggcactcacacatccacacatgtgtgcatacacatatacagtcttcatagagatagatcattccacccccggccccatttgaaagaatctcactgtccttataagctacttaagagaattctactaccacagccttactatttttagaaagagaaatatgcagtgttaccagttttaacagttgttatataatcccagttctctgcatgattctaggcactggaagtttatattgttatttattcaacaaatatttatcgagtacttgtgttctagatattagaaattttaaaaagtgcggtgaacatcaacttacaatgtagtgagcagtgggaattaaaataaaacagttgcattttgcaactttgcttaaaggcataggtcaaaaagaacccggaggagatagtgccaggatctatgttagaggttgtaatatatgctctcgtttaatcttgacaatttaggaggtagataccccacttaatgttgacagaagctgacattcagacagagaacacacagaggttttaatgtttgaactgatacatgaaggatagacatttgttgggtgtggaaggttctaaggttggaacattcctggcagagaaaacagcaagttaaaagggtagaggccaagggaacttgacaagtttagaaaatgtcaagaaggtcattaattgttggattataggatatgtgggtaagaatagtaagacatactgagtgaataggccagtgccggatcgtggaaggcatctatacatcaaactaagaaatttagattttatcttgtaagtaatggagaccttttgaagaattttgagaatgatactagatttgtgatatatataattcatctttcaagagcatgcaagaagacttgacagtgaagacatgagagagtgaagcaaggaaaccagaaaggaggaatttattaaccaaagtgcatggtggtcattgactagatgtggcaggcatgagagaggaaggag

SEQ ID NO: 2396 - DNA, 1051 bp, Homo sapiens
caaagatagtaaatatcttaacaggtctcctgctagtactgttaatgtggcaccttaggaaattttttcttttagcttttacagccttagttatatataaaatataatttagaaataattgtgtatttctttaaaaatgttctaatgcaaattgaagtacttgtatacatttattgcatgtctgatgttgagctgaaatgtgataccatattggtacgtataagaaattcttttcttatattaatattaatgttccttttgtaaaatgagaaaaaataaaattttaattaattttttgacatttttgttttctgatcaaggaccttttggagagcgagacgatcaacaggtgtttatccagaaagttgttcccatcaccaacaaactatttgtaagactctcatcgactggaaaaaggtaacactttattgtaaaaatatttgtattcagaagccaccttttgtcttacaaaacatatggcataatttgacatattgaccaaagagtgctactagaaacaaattgttgggacagaagtctgttatctcataatcataactcaaaattaagacagtagactttatgcttactttctgggatttaagagtttcactgatgctgtggacagttaggagggactagtgatagaataagaacacagtgaactttttttcatggccaaacataaatacttattaattttgttattataaacagtttctatctttaaaaaacctggaacttaaatattttccatcccatataaatctgtatacattattgatgtttctcaaataaaacattacagatttcctgattcagtatccccttttaaaataaaaatgatattaataacactaatttgcataatcttggcacagcttacaacatagcacacattttttttttctattttagacctatttccatctactttaacatggagagaaattgtctgtctccgtgagagtaggattcctgtctttatgcagtctcctcagtatttgtttgtgaatgctgcacttatgcttccattatatggcactggcag

SEQ ID NO: 2397 - DNA, 1030 bp, Homo sapiens
agagaaaacattacaaattgattttattatacttttatatgacacgagagccttcagaatgaagacccaaagacacaaggaaaagtgtccatttttatgcttaggttagaagaagcagggacagccatgtagaactgtgactggacaaaaagttgtaagttaacagaaatagactgagtagggaactccagtggagactgtctctgtgtggcattcctttctcccagggatggggcagaacccctctgtagtgagggccttaatttctttatggctagctgttcacagaaagatagggacatgttagggtaatatttttatgcttcatggctagctttggggaaagagcgttctggtttctgtgagccaccttggggaaaaagaagattgtctctatggcttgccttgcaggtcagagagaaactttgcttctgagggtattttctgagacccaagttttcatatgcatacaaatgttgatttgttttatttgaaacataaacaggactctgaggagggagttgttgaacattttaaatcaatttacagatattatttaaaaataaatgtaattcactaaattatgatcatcttgataaatacaggaataaaatctgataatttgtcacctatttatgatttaaaaaaaccctagcaactaaaaaaagggaaattttaaaatctgataatgcccatgaaaataattctttcaaactttatattggcgaaatattaaaaacttccaggccgggtgcggtggctcacacctgtaatcccagcactttgggaggctgaggtgggcggatcacctgaggtcgggagttcaagatcagcctgaccaacatggagaaaccccatctctactaaaaatacaaaattagccaggcctggtggcacacgcctgtaatcccagctactcaggaggctgaggcaggagaatcgcttgaacccaggaggcagaggttgcagtgagccgagatcacgccattgcactccagcctgggcaacaagagcaaaactccgtctaatg

SEQ ID NO: 2398 - DNA, 1059 bp, Homo sapiens
aaccagcagactgcattcctaatcttcattatgcctgagacttgtcttacaatgttacctttaagtgaatcacataattgtctttggaacttggtctcccaacacttattgtgattgcaaagtgtttaccagatatttgatgaggtgctatgtttgtgaaaaacatatcatgtaattcaaaaacactattgatattgaataccagataccactatgtagtaagtcttttaggatgattttaatttagtcgtgcgtcattttctgattctcatcattgggagatcttaaatcttagcaagcattagcaatattaaatgccaaaattccattgaaactttcaagttggagcaattgtctgtgtttgaaaagatgaaataaaaataataatcaagggcaaagctttgagtgcccagaagggaaagctgtaccagttgctaacctgtcttgtttcaggagccaccatgtttttttttcagtgttaacaacaatcatgataattaaattaaaacactagtttgttcacttgtaggactgcagttctgaattttgggttaaaggttttggctgctgtaagaatgtgaatttgaatgtattttgaattgtaagagcaaaagaacgtttttgtacaattttttttcatttaattggaatgatcttcaggtttctacaaatagggtaattgtaaatttaaagcattagcatttattggtgaataatgtatatatccccattccaagaaatataagtgagtgaagttgaaataaaatctttaaaatttactatattgccagtggtttcacaacagttctcttgtatttatttatcaattaaatcaaataaaaatgattatgtcaatgcgttttcagttatttaagtaacagttctgtttaaagtgtgctatatatgtttgttcatttctttgcttcttcccataatttaaaaaaaatggggggagggagaacttaatatatgtggaaaataagttattatcaatgaaagaaaatattaggcaaagcataatttcaaaattactaagattgtaattatcttacacccttc

SEQ ID NO: 2399 - DNA, 1055 bp, Homo sapiens
aataatggctagttctccaaaaagaagggatatagtgcagagtaatatatacatgatatacatatatatacacataggtatagtcttgtctctacatgtatatatgttaatgctagaaggaacagatacatttttccttttaaaatttcacgcagcctaatattgcaaatagaacagtagtttccatttgaaatgtgctaggttgaagatgtcagtattctctgatattcagtgaattgacagaattttatgagaaactagtttcaaaactataaaatatatgaaataaaaacattggttcaagtagaggtgttcctagtgaaacactttgttttctcctcaaaatgtataaataagctgtttactccttagatttttggaaaattcataaatgcaagaacagagacatttatgtgtaagttatgtgttgccttgtcaaaaagtttggtgagtaaccctatgtattgtaaataaatagaaccttcagccttgtcaaaaagtttggtaagtaaccctatgtatggtaaataaatagaaccttcagaaaagtttgtcgacctggtgcaaagtttgggattcatttagcagctgtgatcattagaataactattcttgcaggattgtgtcaaccctgacagaaatggcagatagaaatgaacagcagtgacatcctttcaacagaatcatttttgagccagtaactaacttactacttctaacaactgtgagccatcttgaaattgccactgattattcagttaaccaggagcatcactgccaaacagaaccaagtgacaattacatacttctttgtcttctacaaaataagagcaaatcaagtattttcatatgaatattctctctcatttaagatgagaaaaatatcatttcttagacctctattaggaaggaacactttcaaaaacagtcatcatttctttaaagaattataggataataaacaatggcttttcagcatttatgatgtgtgagtgataacccaggaggaaatgggtgcagaccttgcattccagggttacgtcttctgggtttcc

SEQ ID NO: 2400 - DNA, 1024 bp, Homo sapiens
agccagattagagatgatccaataggctattgatcatactttcttctaaaggtcatactgggggggagcataaatgctcaagaaaccacacacttctccaagtaagaggcacattttatttgccttcctatttaacctcatatgggcttttattaataccaaaactcagaaacgtcttggaaatgtccacgtgaggtttggtatagggatcattttctgagattttctcaatttgagggtcgactcaaaagaaaggacaaaatatgtgtgacaatcttcctagatgttagtctaagcaaagactacttaacagcatatttcagtatcttctaatggaagaaaaacagtctcccttcgaggaggttgcaacaccagttcctgggactagatcttgccacaactgtgtctatttaggttgtaatgacctgaaaaaacctaaatgtatggctactgtggttattatacaggtgcctggcaataaaatactacgccttagcaaatgaagagacataggaggtgaagaaaggtcaaaaaaaaaacacagatgagaaatcaatgtcaaaagaggtcactttatgagcttcaaaggaagctacggtcattgattataatatcactgaaacaacacaggccctgtgagatctgaaattacatttccagtctgaatttatagaactcactgcagactctggttgtgattgtagcacattaatgggggcctaccaagtaagcatgatttagatgggcacaggcagaggtgaattcagtttttcctgggtttagatgactaggtgtgcgatcaagaaaagttcagaataggtttcttctgcaatttaagggacattgctggtaacagttaggggctagaacaaactttcaaaaacacaaatctaattatgtcagtgtcttgcttacaaaccaccaatagccctttttttcatgcatgatgaggtttagaatccttagacaataggcaaggcctttctggtgaggtgttgtgctgaacccctattaacctcaaagg

SEQ ID NO: 2401 - DNA, 1036 bp, Homo sapiens
agccccatagatttagcaaaatgaaggtcactggttacttagcaggagttgattcaatgacaatatgggagactagagttggttcgattaggtaaattttaaaggagataccaagtgtagataaaaattcgaataagtttggctgtgagtgggagaagagagaggaatagctgtagggagatatggggtaatgtatcttttattttttaagatagaagatgtttagcattaattatgctgttatgtggatatcactatttaactggtatcctccgattttatattaatttgtcttttaaattaatttcccaaaatttcagattcagaagtaatgctaaggggagcactcatgcaaggggcgcaaactctgccacaaaatgtatgtccttagaaatgagttcctagaaatgggaataacaggttaaatgagtggctctctacaaggggtgattttgtgattttggcaatgtatttttgattgtcacaacttaatgaaggaggctacagcaatctaaaggatagagagagactagggattgctaaactttctacaatgcatagggtagccccctgcagtgaagaattatctacctaaaatgtcaattatgccacctgtgagaaaccctgggttaatgagtatgcacgtttttaagacttttgatccatcttcccaaatgtcttgcagaaagattaaactaatttgcattttcaaccatttgtgtgaatttttatttctctacattctcatcaacactgaatattttttattatcattaattttataataggtaaaattcttttaaaaacttacattgttttgataacaatttattctaaaaatctttttagacatttattgaccacttgctcttttctaaaagacatgtttttttatatcttttgctcatatttctgttcacgagtttgtctttttcttactatttttctaattactatatgaactcttcctttaggtatagattttgtttttatttatcctgcctaggattccttgggttgcttaatctgtggtgtc

SEQ ID NO: 2402 - DNA, 1043 bp, Homo sapiens
attgagaacttttaagcaagatggtgacagttgtttataaatattactgccagatgtacggtgactgccaaagagtgccaggacagtttgtaggcaattgcaaaattctatgttaggatctgcactaggacacagcagtgaagacagagaagggccccacttgaaatatttttcaaaaagaaagtattcaattttgcaaacaggcaactttcatgtgagcttatagcaccataggttttgggcatactacactgttagaggaattggataataacaatagttatacttttggaactttcctatgtgcctggttctgttctgagttccttctatatatcagctcagagaattctgacaactctatgagatagatgctgctattatcctcctgttacatttaaaaaactgaggcacagaggcttataacttgcccacttctgtacataagcagataagcaagttgataaatgatacaacaattattgaagtttgattgtagagcttatgctcttgaccactaccttaatatgtttgaggaatcaggaggacatagataattttaaaaagtatctggaaagtgaaagcgttgggcctttgaatctaaggaaagaaaggattggggacaaggagactttggtatggagacaaacttttctccctcccactcaagaagatttcatcaccaagggacatttttgtgttcagatttctatagcacttccaatgtttataaccagagtattctttccttccttcctttctcctaaaatccatatgttatttctggaagcaaattcccctgttcactcaattgtataagaggcacctgtgatggtactacctttcagagtgactttgtgctagttattattatctaccccaatttcctcatctacaaaatgaggataataataatgtctactttaggattgttgtaacaattaaatgagtttatatatggtaagcatttaatatttggcacatggtacccactcataaatattagtgatgacgatgatgtctcttctgacctaaaaaaactg

SEQ ID NO: 2403 - DNA, 1019 bp, Homo sapiens
gacatttagaattgtgattaatgttttaataaaatgctaagttagaatgaataatcataattatatagatggaagatatattctaacagttcttaaataattttagattctctaaatttagagtgttttctagcttagagagcaatattaatattttttacctagtctactgaacataatttcagggagttagtatttaggactttttacctagagatgcggtaaaccttttaaatttaaatttgctttcttaaaatacctgttccaacattgctcacctttcttctccctcctttttgccctctccttcagtgggaggagcacatattcagctttctgttaaacactctttggttttcaactgagtaaggcaagcaaggatatatgttagaagagtgggcataatactttatattaaaattatagggactaaaagtctaaatcattgctgtcaataggactttttttgatgatggaaataatttatgtctgtgctgttcaatatggtagccactcgcagaggtgactactgagcatttcacgtgtggcttgtgatacagaggaactaaatttttaattttacttaattactttaaattttaaaagttacacgtggctagtgggtctatcccaactatgaagagaataaagctacagagcatctatctagtctaatgaaacaacagtgaatttgggaattgtaaatctgtcttaagctttttccataaacttttattgatataatttaggcatatacaaatactggtgaaattttattgattgaattattgttgacttttttttcagtatttatatttttaaaaagatatgtttctttataattaacttgtattgtagggtaaccattgtccttaaatgttaagccacttagttaataacaaatagcatttggttttttagcattatttatcatctgaggctttcagaattaatgcaccaaaccttaaatatttttgttgttctctaaaagaatgggtttatgatgcaccaaaaggaca

SEQ ID NO: 2404 - DNA, 1033 bp, Homo sapiens
gctgatagccctttgtgggacattttataaagttcagactacatatttttagcaatgtggagatttaaaagtaaaaatataagagatattgtatatgccctgaggcatattttgtcttaaatattatccttggccaagtatactatataaatacagtaaatatgaatagaactggccaggtgccaatctcctaggatgaattttagtcaagaatgtatttatgggatataaataatactgtgtcaacatttaaagaaggggtctgattagttttgaatttattcatattgatcttttcacgtgctgttagtttaagactcgaagtggagttatgctaaggtttaccgatagtttgcccactgggaattagtggacctctagtagtttaacaatccatttgaagttcgaggcacatctattcgaaagatgctgcacaaggttttagaaacttagaaagggtgattcagttatacacaggaagaattcaaataattgacatgtaagaatctgtagagagtccgacaatcaaaaagaggaagagacacaacgtttcattttctttcttttctctccctttttcattgtaaccaatcagcacatgttgtggttctaaccctggtgattttgtactccccccaacacccgcacccctactcccactggaacgtttggcaatgtccagagacactttgggttgtcatgactggaggtggaggggtgctaccggtatttagtgggtcagccagggatgtttctaaccatcctataatgcatagggcaaccccccattcccaacatcaaagaattatcctgaccacaatgtcagtaatgcctctgttgaggagccctggtatttgttgggggttactgaattctgttaacagtaccatttagaaaataataacaaaaataaaatatctttatgatcaaagcatattcaaatgagaatactgaataggaggatagtcagacagttatcttaattaaatggagtgtggattagaccattgtatacagtatgtactttattttt

SEQ ID NO: 2405 - DNA, 1069 bp, Homo sapiens
tgaaaactgattttttttcctttttctgagacagagtctcactgtgtcacccaggctggagtgcagtggtgtgatctcagtttactgcaacctccgcctcctgggttcaagcgattcttctaccttagtctcctgagtaactgggactacaggcacgtggcaccacacccagttcatttttgtatttttagtagagacggagtttcaccatattggccaggctggtctcaaactcctgacctcgtggtctgcctgcctcggcctcccaaagtgttgggattataggcgtgagccaccgcgcccggcctgaaaactgattattttaaaactaaggtttgctttctgtagactgaacaatcattagcatccttacatctctatctcattcatggtcttaacttctaaggcattggatcagcaccagagctccctgtcctcctgccttacttaaaaacaaaaaagaaagaaaggaaagaaaagaagggattttaatgctgttttatagcagagtgaaagtaaaccaaaggtgcatacttgagaactgcaggctggaaattgcaagtgacaataattacctcatcttattcccacacagacttcctatgacctgggtgaccttgggatctgaattctgtttaatagaattgtccctcttctgcaccacggcgtacactggcctgaagaaggtgctgtttcccaggaaaagcacttaaatccccccaagaaatgcatagggccatagtttgaagaaaaagtattgctaaccaagtgacttactctgcatattctacctttctctggttgtattctttgagatttttatttaagataactttcagcatctctttttaaaggtcagatacgaatgagaaaactttgtctgacttgttaatcttgtgacaaaccgtttatatccagtgtagcttcctgtctttgctgactggttatttgagggaattttcttcctgtaagactgtggagaagcctctaaaaataaacagcatggtttcttattggtgggaacatatgtgagcagatgtcagctggaagcagcatatggtggcaacat

SEQ ID NO: 2406 - DNA, 1033 bp, Homo sapiens
ttagtagagacggggtttcaccatgtggccaggatggtcttgatctcttgacctcgcgatctgcctgcctcagcctcccacagtggtgggattacaggcgtgagccactgtgcctggattattttaattttttttagagacaggtctcactctgttgcccaggcttcagtgcagtgactcagtcatggctcactgtagtctcaccctctcaggctcaagtgatcctcccacctcagcctcccaagtaggtgggagttacaggcacatgccacatcacccagctaattttttattttttaatagaaatggggtcttgtcttgctttgttgcccaggctggtctcaaactcctagccttaaccaatcctcccactttggcctcccagagtgctgggattttaggcatgagccactgtgccaggcctgaaacaattttagactcacaagaaattgcaaaaatagtacagagagttcctatatacccttcaacagcttctcctaatgatgatcacaactgtagtacgttttcaaaggggatggataacccatttaccatgatgtgattattaggcattgcatgcctgtatcgaagtatttcatgtatcacatgaatatatacacccttactaggtagccacaaaaattaaaaattaaaaaaaattagtacatataaaaaccgaagaaatccaagcctagttaatagtattgtaccaatgtcaattaaactttttaataaaaatagtcctaatatgaacattgtagtgaaaggtgaaattgcttgatgcagagctgtttagtggaaagttaggatttctcttgtcaccttttctgatggtcaggtttatagtaaaacaggtgaaatgttaaaggatagtggtggggagtctgtgagaactttggggactggaattgctccctactcagtggaaaggaattagagtatatagcgtcatgtataaactgccccaggacacttagctcctcctgttctttctctcctcttctaatttggtctgtcaggctatcagagcact

SEQ ID NO: 2407 - DNA, 1034 bp, Homo sapiens
ccggccaaaagcctgttagtcatccatgagaccttttactgttgaccctttataacaaatccgttgccaatctctattaattttaccacctaaatttctctagtatctgtttctatctacatcatcgctgtagtctaagcatgaacagtagtttcctaactgatctctgtacatctacttttgctctctttcaattctgtcttgacacagcttccagattgatcctttagaatcatgccaacctttctgtcagaaatattcatgacttcttcatgaacagatttgtcacgttcctacagtttctctggtctcattttatagacactgctcttttcattctctgcttttcagttcttacatgtcatactgctccctcttatccagaatcctggcacctgccctttcctcgccctgggatacttttttcttctgccctgcacttctcaccatcctgtagactttagttcaaaccattcagcaactatatttggatacccagtttttgtcagtcctgttctaggcactatgtgaacaaataactcagataaaatacatcataaacttcctcttgcagagtttataggctagtgcatttattgttgaactccataaacccagtcagttgtgaataaaataaatatttgcaacaccaagtgtctcatttttgaagcaggtacatttgcctttcacatttatttgtgtgattttttgactaatttctgtttttcacaatatgctacacactccatgagaatagggactctattcctccctcaccccaccatcattgcctctctagcagtgaacacagtgcttgacacattaacagggattcaataggcagtttttgaactgataccttaatgagttaattgattaaaaaattaaagttgtgaccttaatttcctcctcaggactccataagatggacttatatttccttccatttttttctgtaaatacatatacattaatatttatatggctttttattacttaccagctttggagtagataattcttcttttaggtca

SEQ ID NO: 2408 - DNA, 1026 bp, Homo sapiens
taaaacttaagcttaaacaagatcttcagagtaatcaatggtgaagccaggagtaaaataatcaaaattattgctagttattgagacctagttagttaattcatattagtaagtcagtttctatatggttattatgatgtatggagcttttttaaatcctttattccatcctctgtgtgacataaaagttttagactgctttgaaatgcattgtattactaaaatatttattttaatctagattttttgattcatcaggtgattctggacaaggattaagaatgtggatcaagcaggttttaaatcaagatttaacattccaacacataaaaattatttatccaacagctcctcccaggtatgcagtaatttatctcacttgtcaatataactctgtggcataaaatatatatagagagatgtgccagctaggtgttctttaagcttaattttgtatttaacatactttaaattagagtactttgtccccagaatgtattctttattgcagttacactgttggaccaagttttgccaggtgagtaatttattccctttctgtaaagcattccctaaagctctgaatttaaactgtgtcccaagcatggcttatgtaactctgcttcctcttgccctgcagattgctcaactttcatacttcttccctacattcaccccaaaaggaaacttaataactccaacaagtataatctttctaataatttagttaagccagaattcataatctctgggaaagggttttatggcattctttccacatttaaaaggattatcaagaaacaatgttatgcttttttaatcagtaaaccagaataggaagatagaattgactacttaataaatatttaggttatataacctgtaggtgtgtgcaaaaaattcacagtaataaaactgctatagttttgaggtcaaactactctttgtaaatattaaattaacatctgcatagtcttttattcggaacacatgccgtaaatcagggattgggatttttttttggtt

SEQ ID NO: 2409 - DNA, 1434 bp, Homo sapiens
ttggagaatattctcatcaccccagaaagtttccttgtgcttctttcaagtcaactcccatctcatgtattattgtttgcatatctattactgtagcatagtttggcttgttcttgaatttcagttaaattgagtcacttaatgagtgacttaatggaatcttgtgtctggcttcttttattcaaattggtatttttgggattcatctatatgtgtgtatcaatagttcaatttttaaaattctaagtaggtattatataaatataacacagtttgtttatttatctactgttgttgcacgtttggatcatttccagttttgagatctaatgaataatgctaccataaatattcttgttacacgtctttttgtgagcataatttgaattcttatctagactctattccattggtctaatcttatagtagtacaaaattgttgtaattatcacagctgtatagaaaattttgaaaccaagtggtgtaagttttgctcattctatgttacttgcatttacgtgtaaattttagaacctgctcttcaattttacaaaacacctgtttggattttgattgaaattgcatggaatctagtttgatttagagaaaatagatgccttctaatacatacacatggtatgtctcaccatttacttaggtctttattaatttctctcagaagtgattcggagtttttagtgtagaagtcttttgctaaatttatctacaagtattctgtttcttcatgttattgtaaatggaatgttaaaaaacttaattttcaaattgttgctagtacagagaaataaattttagttttttattatgtccttgtatccttctatctttctaaattcacttatttctagtacttacttagtatattccttatgaatttcgtgtgtgcattttatttcattgtcttgcttttttggacttgtttgaacttccagtacaatgttaaatagaagtgagtacttccttcctgtgtaatcttagaggggaagtgttcagtatttcactgttaagtgtgatgttagttctagggttttttgtatatatgccttttttttatattgaggacatttctttgcctaattagctgagaggtttctttgtgaatttatcaaatgcttttctgtgtcctttgaaatagtcatggtttttatctttcattttgttaacacagtgaattacattaatggatttccaagtcttaaaccaaccttacattcctgggataaacccttttgtaatgtattatcctttttatatgtatctaaatttgttttgctaatactttggtaaagaattttatgtctgtgttcatgaggaatattgttctgtgattttctttaatgcctttgaaaaacgttatcatcggggttatgctagtcacttaaaagcattgggaaggattcccttctctgtgtc

SEQ ID NO: 2410 - DNA, 1377 bp, Homo sapiens
tataaccccatgggacctaaataacccataagttctgggtcctaaataacccatgagttatttagaaacatgttgtttccagatatttggagctattctagatattcttattactgttgatatctagtttcatttcattattattagagaaaatatcctgtatgattttcttcttttgatattcattgggacctttttatggctttgcatatggtctatcttggtgactgttactgtgcatttctgcgtgtcacgttctataaatgttaatggttcaaggtatttgaaagcattacacaaattctgtatatgcttagtgattatttttctaagttgttctattagttgccaagggatgggtattaaaatctctagctatgattgtagattggtctgtttctccctttagttctgtcagttttctctttatgtatttttaggctatattattaggtgcatattcatgtagtaatattgtcttttttatggctacttttatctataaaatgttcctttttaatttgtggtaatactctgaagtgtactgtgtttaataaaaatatagtatatctcagcttccctatgcttattgtttacatggcacttcatttttcatccttttactttcttttgattagagctgtatggtatgtctttttccattcttttgcttttaacctacctatatcattgtatttaaagtggatttcttatagacaacacgtagttgggctttgttttcatctttaaccaaactgataatttgtcttctaagtgatttgtttaagcaatttacatttaatgtaacaattaatatgcttgaatttaggtctactgcttttcattcctctgtttccctttcacactttctattgaattattcgttttttaatacaccattttactttattttttttctgattgccatagggattatgatatacatagcaaagcttttttacctacttagagttctttgttgttttttttttccttgtaactatataggtccctttatccccatcttgtgtatgttatagttttcatatgtattttgtctgcatacattgaaaactgtatcaaacaaggttataatttttgttttcaacagtcaaccatattttaaacagcttaagaggagaacaatagtttattgtatatactcagttgtggtctattacagcatataagtgtgttttgattaaattgtgaattaccattttgattataaggtatcccttttcctcaactgtatttaatagatgttttaaatcagctaaggtaggggcatagtcagtaaaagtcagcaattagtttgctgtgttgatttagatggaaaatactgcttttttttttcactgtggtaatttggactct

SEQ ID NO: 2411 - DNA, 1046 bp, Homo sapiens
taaaataaactaggcactttttatttaggcatagtaaaccatgaattcctctttactccatcacttagaattcctatctgaagcatgatagtaggagagccctctcctgataacagtatatctgtactacaagtatgctagtaaggaaccctactaaaaacagctattttgaagaaataatgtacttctttggtaagtattaggtatgtttaaataggtactagtatggaaaagttttcttagatatgattttttaaaaaagaaacaaaaatggactgttttctacaaatcacagtgtagattttataagagttaaagtcaaaatatatttggagcaaaaataaaataattttagacattgttatttctggctggcacaaattattcccaagtggcacaaatgattactgaaatttattcagcaaatatttagcatctattctatgtcaggctttgttcttagcactgggtatgtatctgtggaaagaatgaagtccctgctctcaatgagctcatgtagagacagaaaataaaagggaaattaaatgtaataatttcaaatagtgataaatggtattaagactggggatagagagtatatgtgtgtgttgcagggtaaaagggaggtatactttcagttggagagtcaaagaagctcccctgagaaggtgacacttgagctgagacctaaatgaacagtcggagcccaccatgcagaaatgttgcaaagagccctctaagtagtggggatatcagatgcaaagccactcaactaataataagctcgtactatttgaagaaaaggaagtgacaaatgtgactggaacctagtgaagggtgggagagagaagtggtatgaaatgaggataaagaggaagactggtgccaatttgttaacttaaaggttatgaatgaactttcgattttatgactttaaggcaacacagatcaaaaacaacttggtatcaagctgaatgtcaacttttttttttttttaaccttggacattttattctagcttaatattttaccaatgtgtaatgggt

SEQ ID NO: 2412 - DNA, 1034 bp, Homo sapiens
ttttttttgttcccctttcatttacatctaccaacataatacttgaatacaggaccccctttactccattacagtttggaatatcttgatggtgtgtgtgcctgtgcacgtatgtgtgtgtattttttttaaccaacatagtatcccagagcatgaatatacaatgaatggattaagattcactggtactgtaactgttctccctcttaaaagatggagggagtaggtaaagaggatatgaactggcattagtagattttaatggattagatacaagtatgggatagttaatacaatatacatgagagtagttttaatatgcatttaacttataaaacttagaagaaattgaaatcatttattcaaaacactattattttggtaattaaagcatccattttcatattcccttttcctttctttttttttgggggggggcggttgttaaacagatcatatactcctatgaaaggaggaatctccaatgtatggtttgacagatttaaaataaccaatgactgcccagaacaccttgaatcaattgatgtcatgtgtcaagtgcttactgatttgattgatgaagaagtaaaaagtggcatcaagaagaacaggatattaataggtaagacctttaaatgttggtaatttatcactgttcacttttgtctaattctatacatcaaatcttacttggaacattatttagaagcacttgtatatcattcgatgcattcatagtttcagataaactttacatattgaggatttcaaagatattagaattataaacagcagcgcatgaaactttaattgattttctttttgaataataacggattttgagactcttgtggcagttaaaatttttcttctagtttaattttcagttaagaaattattcatttcaatttttaaaacattttacttcagttaccttaactcttatgaatataagtttaaacatctattgccattaagatatacagtcaaaatataccactacatttatgaaaattataatcttcagagttaat

SEQ ID NO: 2413 - DNA, 1034 bp, Homo sapiens
aaactttctttgtgtttattgaagtgctgaactgtctgttgagtcatgagagacaacatgatataatggataaaatccattctattctgtcttggcgttagtttccactttgttgaaagcagcgtggcctctagcataacaacatcacctttctggtccttagtttcctcattatgtttaactctatatttctgtgtttccatgtttaacgttgatgtttaactctaatagagataaacatggagcattatgggaggactaggaagagtgtagggaagggattcccaacttagtctaggggattatgaagtagttagaagatagaattccaaacatgtgaatcatgtatcattcagtcatcattcaatctttagcaagtattttttaagtccccactatgtgctacgcattattatagatgttcacggggatgtgcagataagtaaagcaagatctatctgccttacatatttcttacaacctgaaagggccaatgagattcttaaagtggtaactataatgccagccaggctgtgatgagtgctctaatgtggtataactaatagcttttcaaagccaatgatagtatatatttctttttatttcccagaacctatcacaatgcctggcacagagcaaatactcaggaaatctataacaaataacattacccaatcaataaattgtcagtactgtaggaattgagaggaagaagtagtcacatgcatttggggctgtaagagaaagatttaatagaaagatggcagtggcatttaagatgcacaaattattaaaattttaactattacagtgtagaagtctaggtagagggaatgatttgtacagtaaagtagaagtggacagagtaatgctttttgtttttgtctgtctggacagtagttggctgtaacaaagtttgtgtctaactaaaaagtacctgttgactcagatagccacagtaagagactagaacgtgatggcataatggtgacaaaaatgagttcaaatctacagtccaccacttcctagttggc

SEQ ID NO: 2414 - DNA, 1129 bp, Homo sapiens
ctgggtcagatggtatttccggttctaggtctttgaggaattgccacactgtcttccacaatccttgaactaattaacattttcatcaacagtgtaaaagtgttcctgtttctccacagccttgccagcatattaaaaattcaaaattcaaaaattcttgaatttttaataattgccactcagactggtatgaaatggcatctcattgtgattttgatttgcagctctctaatgataagtgatgttgagctttttttcatgttttttggctgcataagtgtattcttttgagaaatgtctgaagagtcatttatgacaaacccacagccagtatcatactgaatggacaaaagctgtaaccattccccttgaaatccagctcaagacaaagatgctctctctcaccacttctattcaacatagtattgggagttctggctggggcaatcaggcaagaaaaagaaataaaaagtgtgttcaaataggaagagaagaagtcaaactgtgtctatttgcaaatgacatgatccaatatctagaaaactctatcgtttcagccccaaagcttcttaagtggataagcaacttaaggaaagtctcaggatacaaaatcaatatgtagaaatcacaagcattcctatacaccaacagtaggcaagcagagagctaaatcatgaatgaactcccatgcacaattgctacaaagagaataaaatacttaggaatacaaaggacttcctcaaggagaactacaaaccactgctcaaggaaataagagaggacataaacaaatggagaaacattctatgctcatggataggaagaatcaatatcatgaaaatggccatactacccgaagtaatttatagattcaatgctatgcccattaaactaccattgacattcttcacagaattagaaaaaactactttaaaattggaaccaaaaaagagcccatatagccaagatagtcctaagcaaaaaggacaaaggtggaggcatcatgctacccaacttcaaactatactacaaggctacagtaaccaaacagcatggcactggtacaaaaacagacacatagaccaatggaacagaatagagatctcagaaataagacctcacatctaca

SEQ ID NO: 2415 - DNA, 1036 bp, Homo sapiens
acacgttttctctatagcccagctgggagctaaaacttcagaatgatagcattcttctactttctttgaacatatatgtattttaattaaacattttatgtttcttcaacaactagtaggactttaaaggctctggactgttgttctaacagttttccatagaggaaaataaatattttgtttatcccacaagttttgtatgagaggagatatccaaataaatgtaatagtcataatttctgtattcccaaatctgaagaataattataatagtataccagttaaatggaagaggtgttgaaatttagaatggtaatggactttattgcatgtttaaagttcttttcagttgatagcacactttaagtggatttttttaaggattttactttcagattgattatcttaatgttcctaatatagtctttttatagattgtttctgttttattttatataaagagttcataaagccaggtttattattttttaacatgttttattcagcttgttaatcttaagtgtatgttgaaatgttaactcttgacattttaaatactttgccagcaaccgtaaatacccgttataaccattacctacaatggatttactattttcgtatttacttattgaacagtagattttatatcattttttagactcttaggtggaaaattgaattcaaataactagttctttgtgttaaattttcttctgttaggaaaaaatacacaaagtcccttttcacagtagtgtcctatgctaaaggtcattgtattgtcaaagacggctagtgaggagttgcagattacctcacaaaatcataaatgggaaagggacttagattaaatcttaaaataataatatttcaatgagtatatttttcttcattgtaacttaagagaattaaacatgaagttaaatgtctgcaggatgcatttatgtgtattcataatgacattttatgtgcgggtaaatgttttctttctctctttttttttttttaagttgttaccatcaaaagtctctgaaactac

SEQ ID NO: 2416 - DNA, 1033 bp, Homo sapiens
ttatggattcttacaaagctgccaggagaaatggaaaaacaaaaatgaatgaatcaagagtgatttgttaatgtaagtgtaatgtctttgtgaaaagtgatttttactgccaaattataatgataattaaaatattaagaaataacactttcctgacttttttattattaaaatgcttatcactgtagacagtagctaatcttattaatgaaaaacaatagacaaacatctgtgcataatttttcagacacaattctgtaaatatttggaaaccttttaagtatttaaacttttaaatttttgaaataaagtattctaaactaatataaataaggacaatgaaaaaacatgaaaggacttagcataatgttattttatcttttctacaactttgtttaaattacctttccaaagatatttgtgtttatgtaattttccacggaataacattaatactctaggtttataaaccggtttcacattatttcatttgatcatcacaagagctttgtgaagtaagccgagaagttgttactggtatttaataatagcaatagaggagttaaagactttcccacagcttgcaggtcaagacaagaaattcaggtctcctaattctcagtggagctctatttctgttaacccaaattgctgctctgttttaggtctcaatttcatctgtaaaatgatactaatagtacttatcccattggatttttgttgagatttaaataaatagccaaaagccaatacataataaacactcaataaagattaaccataaggagagtcatgatctggttccaggaatacattgttagatgactgaaaaattgtattacttcaatgaaaatactataaataataacattttcatatattagttggttctcatgcatacataatctaattttatttgatcctcacaactgtttaagttttattaaatatacattatccctatttgtataaatagaatcatacaatacctgcctgctttcattcaacaaaattatcatgagatttttccatg

SEQ ID NO: 2417 - DNA, 1051 bp, Homo sapiens
gaaccctggagtttaaggttttactctcctaagaaaccactcaaccattctcttcatgccccctaccccaaaactttctgttgctttgcacatataaacatttcctaaggccaggaagttgaagtagccatgatactttcttacatgagtgaggagaaattgcagcaagaagaaagcataaatcagtatcacaataaattacatttatgtgttgggggaactggaattttgcaaaggaggagagagacacattaggatgtgagtaaagggggactttcattttttattatatagttcttctgcttgaagttttataacaggctttattactttataatccttaaagagaagtaaaatgtttattgataggatttttttctcagctgaaaactgaataggcagtgaccatcagtagtaaggaaattaaatatattgtttataggaaattggatagttcaattgaagtataacaaaatgaactgagaacaaaataggaggcagactggttataattgagcatgtgtagtactttgatatgtaaaataaaatgtccagattattattaccaagaacatatttaaacaatgtcttcattagatgaaaaaaatttcttgacatatgacaagagcacagaattagcaaagccatgtaattacaagttaccaactatttcaggaaaatgccaaaagcatgtaaaccaagattgtccaccctgcagcccacaggccacatgtgggccatgacagctttgaataaacacagattcataaactttcttaaaacatcgagactttttttgcctttttttttttaggtcattagctattgttagtgttagtgtattttttgtgtggcccaagacaatcttcttccagtgtggcccagggaagccaaaaaattggacacacttgatgtaaacatttcaagaaaattcagactatatgatcactcaagacagccgattcaccagccttctgaagggaagactaagcatattcctatattgaaggtaagatacagacccatgcatgtgttatctttttcatatttg

SEQ ID NO: 2418 - DNA, 1102 bp, Homo sapiens
gctacttccactcaataaaaccttgcactaattctccaagcccatgtatcatccgattcttccggtaaaccagggcaaaatcccgggatacagaaatctctctgtcctagcgacaaggtacagggtccaattgagctggttaacacaggccgcctatagatggcaaaactaaaagagcacactgtaatacacgcccactagggcttcagctgtaagtattcaccgctagacactgctgtggggtcggagccccatagcctgcccgtctgaatgctctcctagaggtttgagcagtgggacactaaagaaacgagccacaccctcatcgcatgccctgcgagggggacaagggaacttttcccctttcacttggatcctttcccctaaactaatattatcaaggtcctctaatcatacaaactgaaatgatttgaagagggcaaaataccctttcaaaagttggaaatattttctgtcatttaaatgggtgagacttacatttatctgtagggcaatgtattattaaggttaccacacaaatggccttttagtcacgtaaataaaaataagagatttttctctgaaatagaaacttttgaaataagaagtaacctgagttactttcactattcaacaacttaaaaactgtatggtaggcttatcttttttttgaaacagagtctcactctgtcacccaggctggagtgcagtggcacaatctcagctcactgcaacctccgcctcccgggttcaagcaattttcctgcctcagcctcccgagcagctgggactacaggcgcctgctaccacgcccggctaatttgtgtatttttagtagagacggggtttcaccatattggccaggctgatctcgaactcctgaccttgtgatccgcctacctcggtctcccaaagttctgggattacaggcgtgagccaccgcacccggccgtaggtttatcttgcaatttgattgacttagcaaagtcaattcattggtcaagacaaaattagtttctgtatcaagagaaaattagtttctgtggtattgtattttcctgattcataatgttttcaatcttgtctaaaagaaagatacaag

SEQ ID NO: 2419 - DNA, 1043 bp, Homo sapiens
ttggaaagggtattttttactacctgtgttcacctgaagtctgtgagtttttaagggagatatttatcacatagatttgagacccccaaacaacttagctcttctataactcaacagtaatgcccgagctcagatagactcagtgcagttcatttaaaaatataaatacatacatacacacaaacatatatgcatactttttaaaaaaaatagtgtaatatgaagttgggcccttaccctatactgtatacaaaaattagctcggaatggatcaatgagggctaaactataaaattcttagaaaaaaacataagaagaaagtttcatgataatggatttggcaatgatttcttgggtatgacagcaaaagcataagcagcaaaagtaaaaatagatggattagactacatcaaaattacaaacttctgtatgtcaaaggatactatcaacaagtgaaatgcacctatgaaatgggagaaaatatttgccaatcatttatctgataagagattacaatctggaatacataaagatctcctacaactcaactgcaagaaaacaaataacccagttaaacaattggcaaaggatttgaatagacatttatccaaagaagatatataaatgaccagcaagcatatgaaaagatattcaacatgcctactcattagggaaatgtaaatcaaaacctcaatatatcactgcccgtctgataggatggctactatttaaaaaaaaaaaaaaggaaaataacaagtgtttgtgatgatgtggagaaattgaaacccttgtgaactgttgtgatgatgtaaaataatgctgccaccatggaaaacaatattccagttcctcaaacaattaaaaatagaattaccttatgatccagtgattcttcttcttggtattcaaaaacgttaaaagcagggtacacctatattcacagcagcattattcacaatagccagaaggtgaagcaacccaaatgtccatcaatagatgaatggataaacacaatgtggcacatatacagtgtaatattattc

SEQ ID NO: 2420 - DNA, 1067 bp, Homo sapiens
ttttaataacattagcattttgttctctagtttaataatcatacatttctattgtagtatagtcaagcatcacttaatgacagagataccttctgagaaatgcatccttaagatattgtaattgtgcaaacatcatagagtgtactttcacaaacctaggtggtacagcctgctacacacctaggctataaggtatagcctattgctcctaggctacaaacctgtacaacatggtatcgtactgaatactgtaggcacttttagtaaaatggtaaatatttgtatatctaaacatagctaaacacagaaaaagtacagtaaaagtacagtataataacataaaaaatgtaagccagtataggtcacttaacaggaataaagtttgtgggatgggaagttgctctggggtggcaggtgagtgaatggtaagtgaacataaaagcctagaacattactgtacactactgtagacttcatcaacactctacatttaggctatattaagttaatttaaattttttctttcttcaataataaattaaactttgctaactgtagcttttttattttataaactttaacatttttttaaatttttgactcttttgtaatgacatttagttaaaaacaaacacattttagagctgtacaaaactattttctttctttatatccttgttctataagcttttttctatttttaaaatgtatttttcttgtacttttcaaactcttttgttaaaaacaaagacacaaacacacacattggcctaggcctacagaggatcagggtcatcaatatcactgtcttctgctactacgtcttgtcccactagaagttcttcagaggtaatagcaagcatggagctgtcctttcctatgataacaatgccttcttctgtaatacatcctaaaggatatacctgaggtttttttcacagttaactttttttttaataagtaggagtatactctaaaataatgataaaaagtatagtgatagtaaatacaaaaatcagtaacagtcatgtattatcatcaaatattacacactatatataattgta

SEQ ID NO: 2421 - DNA, 1038 bp, Homo sapiens
tggacttgtgaaattaccccaatgacttccatatttttccctatctagttcacaaggaaaaatgaacaatgataaccaaagaggcaaactgcagaattttagcagtagatatcagaggtctggcaaaaacaaatctaatatctagaagggcgctggtccttagagatgagggctctttttatcctggcagtacagtgaccaccacaatcacagcgtagaatttacttccacctaatcttctgtaatccccaattggagcaattaattttacaaggggtcatgctccctttctgtggtatttctattgagagcttaatgatgtgtcctttatgatgcattttggcagcacctttcacccagacctgaaaatattcattgattatgatcagcaattttggtgttgtaaatggggtgtagctgaagtgtttccttgatgacagagcatagaacagcctgtgcctagaaagggagagagaaagggagagagacactgtgggtttagaactcatttcacttatctaaacatgggccttgttccatacagatgacacaaagaggaactgaagtggaaagtagagtgtatactaggatcagcagttccaagcagaactaggagataagggaaagcaccacattttaggatcagaagctggaaaacaacaagaatctgatggcctcacacactatcttctttgtcttattcactttagccctcaaccactaaatgacccatgttcagatatctgctcatctgaaggcattttaacaaattggcttaaataattgacatatttttcctaagctcctctcatctcctaaaaccaggaaattgtcattgtgattttttttttaaatatcagagcaaagctttgaaaattaattcaattcactggcttttgtccaaaaacaaatctggggacttcaaataagttaagcttttccagatccactgtttccaaggagaagaagttttattgttgttgttgtttaagtattggaggagatgtgagggaatacagaaagatggcaaacgtacaa

SEQ ID NO: 2422 - DNA, 1071 bp, Homo sapiens
agaaaatgaaggggggatattattgaataagtaatttaagacattttcagactgaaagacatgtgtcttcccattgaaaggacaatggagcacctagcacaatgaatgacaaaaaaaaaaaaaaattccaggtaggttatggtaaaatatagaatacttgaaatcaagaaaagatcctagaagcttccaaaggggagggggataacacagtcaaatacaaaacaatggtcttgaatttcttaacagcaactgaatcttagaagacagtggaacaaagcgtgaaaaattctgagtgacagtgattttcaactgagaattctattttttttccaaaaaaaatcaaatataagggtaatgcattttttatttaaaataattttgtcatgtcagaaatataagtgctttagaaaacaacatagtaaaccaacaaagaaaatgcaaaaattgttgtctatcttatgagagatgaagggaaggttcatgattacagcagagtgtgtagtaggtctagagaattatccaccataaaggaatgaaagttatcattctaggatgaaattatccatccttttcttggtggggctctaagaaagagagaagtgggggctgaagagatgaaatgaatgtgtttgagtgaatggattattgatagacctatggcagacatgatgaaatgtttggaaaataattactacaaggcagcacagagtgttggagtgatttctccagggccacacatctagtaaacaatggatctgggcttataatctagctccatatttggtgctcttatccggcacccagtaggacttttcaagcacgtgacaacagggcatgttctttgccatgtcatttatgatgtaactttgattataatatagtaaaaagaaaatccgggtgtaactttattgagaggtactgtttgggatgggggcaaagaaacaaatcttcatcatccatgcctagaattatcgatgaagaaatagcagtgcatgcatatgattcacaaacgtggagctaagtacaaaggagaagcagagcagtttagcgtatttgcctctggggagcagg

SEQ ID NO: 2423 - DNA, 1043 bp, Homo sapiens
ctagctctacttactaagctatgtctcactgtccagctgaatcagcctttctcatatgtcaccagctagcaccttgtccaggagacagctgccaacttgccctctttctgtttatggtaatattattaattcttttgcaatctaattttgaaaccatgagattgacttgagaaagattgacatagggcaatgtctctcaactttatgatggaaaacatttttcaaacatttctaatgtaaaatgtctattatttaaagacttcaaatgaagccttccttgtttattcagtttccccttcaccttcccttgtagctcctgaaactctatcatagaatcccaaggcttctttgatcatggttttgaaaacattactataatagaaagaaccttgaaaaaggagagagaatacatttcttaattatatcaaccttgtgactttgagcaaccctcttaactctgagtttcttttctgatataactgagaataatatctgatcaatttgttggactgctttgatcatcagtctcatctcccactgcaattctgctccccatttatactttaatcttctaatgttgtaggattatttgccctcccctaatactctgccaatttttatgaccctgggccattgaccactttttcttctatatctagaatacattttccttttttctttcagtgaaatccctacttttccagcataaatgacagctttctgacccaatcataatgaagaggggtgtgtgtgtgtgtgtgtgtgtgtgtgtgtgtgtttaatctgcatttgcatggcattttgtataacaactttttacaccatggctgagttttgataaagaaataattgtaaaatttgtatctattttatccggcatctaatataatccttagtatgaaatagattcccagtaattgtttttagaatgaataaatcaaaaacttaaagttttgtattgtgtacttattattattatgctagccatttctgtgtgaagactattttttattcctctgcataccttaccttagacttttaaa

SEQ ID NO: 2424 - DNA, 1025 bp, Homo sapiens
tgttgcagctgaaagaatattttcaatactattctaaatagggatctgggatagacctccatggctcaaaattctggtatcagaatgaaataaactacgaacatttctcactataggatgcaaatttaggtggcttatttcattgtgctttacttcactctgtggcactcatgtcatcattctgcaccttcttttgctattctcatctagtgatctcaccttctctttatagagctccttcatcttccttctctctggactttgccttcgcatatctacccactatccaaccattcctttttttttcttccacttatggtagagaaaagtaagtcactcttctttcctaaaggtggtatctccacagctaattgtatttccattcacacttgtctttctctgatttttctttaaaggcaattccctttaaattctgtagcaacttgaattctcatttcttaaggaaagattcccctccacctagggcttgtggatcctgagaaaatcttttctgagatctgctgccccctcaaaatgaacactcagtccttctttgagttatggaacttccaacagaacatgctgctacacttctgtattcattggtaaactcactgtagtttgtcttcccctacaccatttgcctgcagttgttcactcaaagaaaccagtgaacccccattgttttctcagaccatatccagtttttattctttatagcatttgacactgcaaactatctacctttctgaaagtggctcctcctttgacttctgggcattgcacgattctcgtctcccttctctttccaaactcttttgtctctcctgtacttactgtttgtcctcctcccattctctaactgggagtcttcccccaggatttatccttttatactttgcaactattttacgtgtattttatcagaattcttcatcttatggttttaaataagtccacagcataagtgacttcctgttttatatcaacagccttaacattttcttgacatctctcccaaatta

SEQ ID NO: 2425 - DNA, 1058 bp, Homo sapiens
acggaggagactccgtctcaaataaataaataaataaataaataaaatatccacaggattatattgaggaataaataaaatgaaatatgaaaacattaagaatatagtaggcgttcagtaaaggttaccatttattagtacttttcctttcttcaagtgtccttccaggaacgatttaataggcataccttccccaacccaatttctgctgaacaataagcctagagacaaagtttcccctcaaggtagctgcatgttcattgcatcaccactagcccagcttaggctctgttcatccagtgtttggcttactactccctggatggtttttctggtcctagttagtctaccatataatctgtctttctcagtactgattcttctcaaataaaatatttaccatgctatccttttgctcaaaaacattcaattatttcttattttctatagtgtcaaaactaaacgttgacttctgattccaactgtcatgcgtaactggtacctactagccctcctgctgcaagcagctacaaaaccggactaaattatgagacaattttaagacattgaaaagctgtcagcacaagaatgtaatgtttaggagaagtgaaaccgaggatgtaagcctttctatcacctcagatttttgcctggaggcatttactagatcctggcacaggaaggagcaatcaaagcagatcatgttggtctcattgagctaagaaggcagattggtgctcagagaggctgaaaccatgggaatttgtgaagcacaataccagataggaggtaactatgcaaagacagagcactagattctacataatggttccttcagtgtttacttgaatgccaggtttacatgccatagacacagtgagaaaccatgagtcctggggaaggacaactattggagacagataaactgttggggagctcagccatttctaaaagtggcacagtgctggaaaaggtttgtgctttcaccaactggaatgtagacactttctagaacatcaaaggcatttgataggaggacaggacctcaggagtaaact

SEQ ID NO: 2426 - DNA, 1061 bp, Homo sapiens
cagtccagcctgggtggcagagtgagaccctgtctcaaaaaaataaaaaaataaataaataagaaagaaattcccaggcctattttcccattgccctggggagccattttgtatcccaagctgaagccaatttaatctgaattcattagaccattcaataaatatgtattgtgtgatattatgagttaaaactgtaacaaatttaatgggaaattcagttgtacatgaagtatgatccctgccctcaagaagcttacagttatcttgcacttggaagcacagatccttagaaatagaaagaaccccaaaagtccaggtgtctcattatttaaatgagataactgagatctagagagtaaatgtgattatctttagtcagtgctcttgtctaggtcagacacagtggctcacacctgtaatcagagcacttcgggaggcccaggcaggcagatcgcttgaacacaggagtatgagactagcctgggcaacatggtaaaacctcatctttaccaaaactagaaaaattagctggatgtgatggtgtgtgcctgtagtcttagctactccagaggctgaggtgggaggattgccttaagcccaggatgtcaaggctacagagagttgtgatcttgcactccaacctgggtgatagacaagatcctagctcaaaaaaaaaaaaaaaaaaaaaagctcttttctataacccaggttccagattcaattctgtgttttttccattatgtgatgctttgagaggttacttcgttttgtagttatttttctttttccctccctagctaaattataggtctctttaaaggcaggaagtaatgtctgatatttctttcccattcaggccacccaagtatgttatgcataattagacagacttaagtattcagtaaatgtttgtgggatgagcaagtaagtaaagtaatgaatgaataggtagtgcgaacacaaatcactaaatgggagagaaagcctggaaaacactcattctttcttattccatgtctctgtagtgattgcccttggtttgtggcttagcagctgtcagt

SEQ ID NO: 2427 - DNA, 1029 bp, Homo sapiens
aatccaggtaattgtggaaatggataggggtgcagatgaagcaagattgtccatgtgttgataattgtttaagaaggaaattggtatatggaggcttattatgctattctctatatttttgaatgtgctaaataatctacaatgaagtgtttttgaaaaagatattgaatagctaatagagtattagaagggccagaaaacaaaagcataagacccagcttctagcaataatgcaaaattaagtctcagaaacactttcgtaaggaaaacgctgtagccaccactaaccatcattggagtcatctgctcttatagcagagcgagagacagagaaagagccactgccagagagcacaagcatactctccactcattccctctcaggaacttttgaggaaaaatctgcggcagatgcctgtggttatcagagcctttgccatagcttcaagggagtctgggaaagaggggaaagtaatcatctagtattatctgttccaattacaaggtttcctgtcccatccccactgcaaagaatcaaaatgagagcaattccaaaaatacagaaaataattcagaaatcaaaaagcaaaattgaatgaacaatatttacctccctgggcaagtaggaacctccctgagtttcagtttcctcatctggcaaatgattaaacaataccattctcccaagattgctttgaggactgaaagcaataatgtgtctattaaacagcacaatacaaaaggtccctcagcaatctttccttcctccctgtttttctcccctcttcccttcctttccatttaatttcctatctcacttcagtttctatgttctttgtgttttcaggataatattctatttacttaagggacacaaagtaaataaatgtttttgaaactgaattggattgaagtggatccagattttcacaggaaaaaaaagtttccttttcccttagttctccttacacacctggctttgcaggaaaagaaattatcatttggaaacacacatctgcctcagccaca

SEQ ID NO: 2428 - DNA, 1053 bp, Homo sapiens
aaactttcaaataaataaattttatcaaaaacaaaaatatattttttcaaaactcaacacttcctaattattatcattttactatcatctatgctcttgaagttatatttttatctattctatgggcataatggaaacaatatgtccagctcactttccaacttttcccttagttgcatcacactggtagcttgagatcagctaaggtagaggtattcatatcacaaaaattggcaaacactacaaatcaggatttcatttgtcttgttgactgtctacaccactagttctcaaccaaggtgacgtttgcccctccaatgcctaacatttggcaatgtctcgataaatttttggttcttccaacgggggattactactagtatctagtgggtagagaccatggatgctgctaaataccctataattcacaggacaactgtattaatctgtcctcacattgctaataaagacataccagagactgggttacttacaaaggaaagaggcttaattgattcaccgtttcacatggctgggagaactcacaatcatggaagaaggtgagtgaggagcaaagtcacaccttacatggctgcaggcaaggcagcgtgtgcaggggaactcccatttataaaaccatcagatctcaagagacttattccctaccatgagcacagtatgggggaaactgcccttatgattcaattatctccatctggccctgcccttgacacatgggaattattacaattcaagttgtgatttgggtgggaacacagacaaaccatatcaacaacctcccataacaaagaattattcagccccaaatggcagtagtgctaaggttgagaaaccctggtctagacctaataaagtgatatggaaaatattaatagtgcagattaaagtatcatatctgtactggttacattggcctatgtctgccctcctttcctatcatcacagacaactttagctagccttctgtcttcagaattttccaggcaaaggcaggtataacttcctcaattctcaaatatccccaagcctaac

SEQ ID NO: 2429 - DNA, 1051 bp, Homo sapiens
tgctgccctctggtatctaaaatgaatttaaaaaggtaaattggttctagaactatacctaatgaagaggtctactgttttagtaagggtttgtcaatgacagagttaaccacaatattccattctctgagtacactgtaagttctgcaatggtttgatgatatttcttagctcaatataaataatattagactatttgtgtcaatagtttttttatgagttaatttatacgtttcctttcaaattgcagttttaaaaatggtattaagtttaaaaaaaagaacataaattgtaggccaaatattttatgtatgaatgctaattatcattttatctttgcagattttgaaatacatggccaaatattttatgtatgaatgataattatcattttatctttgcagattttgaaagacatagccaatcgattccatatgatgaatggctccaaaatacattttgtgcccggctgggattgtcatgggttgcccattgaaataaaagtattatcagaacttggtagagaagctcagaatctttcagctatggaaattagaaagaaaggtaaataatctgtatttctgttttaaaatgatatttgtaaacactcaggtccttgaaatagtcagaactttaccaaaggaaccttttgtttgggtttcgtttgcttataataagatctattggaaacgcctttctgtcacagaaaattcagattttatttcattgatttttgtaagaacttatgtttggatattgaaggaaagactttgtgagcatttctgattgcattctcagtttcttaatgttcatattttaaaaaactattttttggtaaattcttttttctgctttcctcaagggggcttgttgactgattttaggtgttaagccaaaattcaattctaaaatacatatattttacattaatcttttatttgatcctttttcttcagtcgactgggccaagggaggattctctttttcttatatgttatactattgtacatttggatgtaactgtgaagatttttttacttccttgtgaaac

SEQ ID NO: 2430 - DNA, 2128 bp, Homo sapiens
tcaggaggctgaggcaggagaatggcgtgaacccgggaggcagaggcttgcagtgagccgagatcatgccactcgcgccactgcactctagcctgggtgacagcgagactgtgtctcaaaaaaaatttgcattctaaactgtctgtagcatttgcatttagagagatacatgctaaaccatgtttaagaattcgaattcattggttttttaaaatctttttttcgtcttttttttagctagatcatttgctaaagcagccattgagaaacagaaatcagcatttattcgttggggaataatggcagattggaataattgctactatacatttgatgggaagtatgaagccaaacagttgagaactttttaccaaatgtatgataaggtaaagaagtattttttctctttgagtaggttttagtatgcgttacaagattctacttttaacatcatatttttgtcttttatagggcttggtttatcgatcttacaaacctgtgttttggtctccgtcatctaggtatatatgcatttttcggtaattaaaagggagaaatttgtgaggcttccaagtatttatgtttaatatttttaacccttaggactgcattggctgaagcagaacttgaatataatcctgagcatgtcagtcgttcaatatatgtaaaatttcctctcttaaagccttctccaaaattggcatctcttataggtaagatttattcatagcttgagtgtaccaaagttatagaattatcccatttgctaacatatttacaattgtattttcacagatggttcatctcctgttagtattttggtctggaccacacaaccttggacgattccagccaatgaagctgtttgctatatgcctgaatcaaagtgggtatattattgcattttttgttttatacacaaatagaatgtattccattattaacattattttgaatttattttatcctgtttattattgtaaaatttaatgaattataacttagttattatgttcatatagattttattaacctttaggtgatcctttttatgaccttatccagcttttcgggaaaatgaaatagaagtataagttacaaagtgttttgaaaatagtacagtttgatcttgaagtcagttttttcttttttctttttttttttggagaccgagttttgccttttgttgcccaggctggagtacagtggcatgatcttggctcaccacaacctccacctcccgggttcaagcaattttcctgcctcagcctcccgagtagctgggattatgggattacaggcatgcgccaccacgccaggctaattttgtatttttagtagagatggggtttctctatgttggtgaggctggttgcaaactcccaacctcaggtgatccacctgccttggcctcccaaagtgctgggattatagacatgagccaccgcgctggcctgaagtcagttttttctaaaatgattatttaaaaattaaaatgatatctgtggcttttcttgtttcattattagtaatttctcctaaaattttatgttaggtatgctgttgtgaaatgttctaagtctggagacctctacgtactggcggcagataaagtagcatctgttgcttctactttggaaacaacatttgagactatttcaacactttcaggtgaagatttttagatatctgacaacatagtcatcaaagtattgggctgacttgaatttactactttgctgaactgcatattttgaattgaaacagatatggcctctacctttctagaatacattttacattgattacactaaaggagaatatacattaagcatgataggagtatagaaaaatatgaatattgataaatgtacaacaggtaaaactaatttctggcaatatccagtagttacttggtaaaattttatgcaaaattaatttttaaaattgtttttatctgttttaataaaagtagcaagaaaggaaatgcatatacttatttttcgatacataattttaataaaggattgaataagttctgaaaattattcagaaagcagttcttctatcaaaggaattttattttattttattttttaaagagacagggtctcatgctgttgcccac

SEQ ID NO: 2431 - DNA, 1651 bp, Homo sapiens
gttcactacagcctccgctttagcttaggttcaaatgattctcccacctcagcctcccaagtagctgggattacaggctcacaccactgtgccctgctaatttttttgtatttttaatagagatggggtttcaccatgcaggccaggctggtcttgaattcctgacctcaagtgatcctctcgtctctgcctcccaaactgttgggattacaggcgtgagcaaccacgcccagccaagttgactactcttttattttttgagacggagtctcgctctgtcacccaggctggagtgcagtggcacgatctcggctcactgcaacctctgcctcccaggttcaagcgattctcctgcctcagcctcctgagtagctgggattatgggcacacaccaccatgcccggctgatttttgcatttttagtagagacgaggtttcaccatgttggtcaggctggtctcgaactcctgacctcgtgatttgcctgcctcagcctcgcaaagtgctgggattacaggtgtgagccactgtggctggcaaggtgactactcttattgccacctgttgctgcagatttagtattttctggaagtttagagcatttttaggattttcacagtactttttaattatgtctaatttggtgtttttttttttaaagttataaagatgcttcagactgcaaagaatttgttgaaagaggagaaattggtgcatagctatccgtatgactggaggaccaagaaacctgtggttattcgtgccagcaagcagtggtttataaacatcacggatattaagactgcagccaaggtataaaaagcatcctgttttaacaggtcgggcatatcattccctcagtataaaggggctgcatgtgaggttgaggtggggtttcaggagtaatagggattgctgctattatgatttagtttcataacattgtagaattttagatctggaaggaccttggacttccattttttcattatacatgtgtgagaaatgaggcataaagaggttgagtgatttgtccacatcacactgttagtagatagactttcttgcccagtgtagtcaaagttgcatagaatttggacagaactgtgttacctagtttaacctcccactgcctctgtttcctcatctatataaagtggtaataatgcgtatctcatggagtaaggaaattcgagtttccagaatatggtctgatacataataagcagtcagtaaaacttttttaaaccctttgcttccttaagattgaaattacaatcaattaaaaaagttactgttctgcttacaaaggaagcatattaaaaagaaaaactaacaatatgaaaaatatacaaagttgttgctttggagctaacaaatacttataattggtatttaaatacttaatatatatttgagccctttcatttaatatgtatctttctatatgggtatatatatatatatatatatatgtgtgtgtgtgtgtgtgtgtgtgtgtaaacatctctcacaacttgattctatttaatgaaagagcttaaatatatatgtgttaaccaggttgaatatatagatattttgctttacagtttgaaagatactactgtatttagctggttcatttattggcctggcaatttggggtcct

SEQ ID NO: 2432 - DNA, 1002 bp, Homo sapiens
gcatctatttcaaggtctgttttgtaaagtaaagggatgagggtaggaggaagtactctcagaccattgattgcatcagtttagttttgagggaatgaggttggactgatacagtgtcagtgggaaccactgtaatctttcaaaggtagaactgagagaatgtgttggtttaatttaggcagaaatcagaagagggaagataattagaaggctttgagtataagtacctggatagaaaatagatgagtaagaaataggtaaatcagtaacggaaacagatgttttttctttttaaggatatgtataatcaattttttatttatattgaatttaaaatgatagcagctttttcttcaaactaaggtttgaggaaaaaggaaaataaatcactatttcttaattttaaaatgtttgttattcatcacaatagttaattgaataattctgccatgtcccccctgaaatagccaaaccactgagcatattgttaaactagtggaacaacacggcagtgatatctggtggactcttccccctgaacaacttcttccaaaagaagtcttatctgaggtaaatttctgtttgtatttaacagcctttgtatgtattacaggacttaatgacaacatgagaaattcttgagagttaaaaaattatcttatgtaaagttaacaaatttatttactgtaaattagaagctaatgcagtgtgaaagtagacattttgtttaactatagaagtgtagtatttaaggctgggcgtgatggctcacacctgtaatcctagcactttgaaaggctgaggcagacagatagcttgagtccatgagtttgagaccagcctgggcaatatggcaaaaccctgtctctacaaaaaaatataaaaattagctgagcattgtggcatgcgcctgtagtcccagctacttgggaggttgaggggggaggatggcttgagcctggaagacaggttgcagcgagccaagattgcaccactacactg

SEQ ID NO: 2433 - DNA, 1031 bp, Homo sapiens
gaccctgtcttaaaaaaaaaaaattgtgttttctcataattggaaatgtgtttgcattagtgtacccttaagtcagaggtgtacataccaattttgcccaaatcaaaaataaatgaggcataaatgaaggaacactaatgaattgttggtgacgtccactgtttgctgttgttaaaatggtgtgattttgttatttacaatctcattctttccttaattaatgtcctttcgtagttctcagagtaaaatagtattttctgagtgtagtcaaatgtgttatccagaaatgacatttggaagattcccaggagttcttgcatattgcctgttttgtatttgtctcattgaaacatatttttgaaaggagcatattttgcttgtgatgacttacattttcatttgcctgtctcagcttccaaatttattttggctttgttccctagattaccgaattatacaaacaatatgattttggaaaagttgttcggctgttacggacgttttataccagagagctctctaacttttatttcagtataatcaaagataggtatgtatgactaaatattaaaatgcttaacaatggccaggtgtggtgactcacgcctgtaatcccagcactttgggaggccgaggcgggtggatgacatgaggccaggagttcgagaccagtatggcaaaatacaaaaattagccgggcatggtggcacatgcctgtaatccgagtcactcaggagactgaggcacgagaatcgcttgaacttgggaggcggaggttgcaatgagcagagattgtgctgctgcactccagcctgggtgacagagcaagatctcgtctcaaaaaataacaacaacaaaacctcaacaagtattttttgagtgtctacttgtgtttggcaaccgtcagggatacagtgatgagcaagatgggcagtgttgtgcagttattaagattgggttccgggccaggcgtggtgcctcacgcctgtaatcccagcactttgggaggccgaggcgggcggatcacgagg

SEQ ID NO: 2434 - DNA, 1048 bp, Homo sapiens
tgcctgagtagatgtagaactcggtgacttgggagatgtcagttaatctcagagtcacggggtctctaattcctcagctcccttcaggtgttgagttgtatgatcccattatcttggctatatatgtaatgggacaaatggggaagtgtctgacaagctttaccaaggcaggacaaaagactgaaaaagaagcctctgctaaaccaattaagaaacagtgttacaagttgaatgcctatcagaaatactcttcatgtatttttttataggtggtgatattcgtgaagagtcttcctataaagtaattgtcatgccgactacgaaagaaaaatgcccccgttgttggaagtatacagcggagtcttcagatacactgtgtcctcgatgtgcagaagttgtcagtggaaaatagtattaacagctcactcgagcaagaaccctcctgacagtactggctagaagtttggatggattatttacaatataggaaagaaagccaagatttaggtaatgagtggatgagtaaatggtggaggatgggagtcaaaatcagaattatagaagaagtatttcctgtaactatagaaagaattatgtatatatacatgcagaaatatatatgtgtgtgtgtatctgtggatggatatatgtatatctcttcctatatatatccatagtggacttattcagaacatagatatgtattcagcttgtcttcaaatacggccaagcagaaaatgttttatattttataaatcatcttttgactctgtatttaaattctatgatactgaaaataaaggcattctggaaaaatactgactgattttggtgcagaagttttgagtatcaagtaaaagaagtatagttttgaaagggaatggcggaggcctgtttcccttaagaggtgaagggtcatttcattcttcccattagtgaacatcagccttttcagaatagctagtttttggggttggatcagaaagaatataatcaccaaatttgttactcaagaaaggaagaaatctcttaatagttagttatactt

SEQ ID NO: 2435 - DNA, 1834 bp, Homo sapiens
gctttttgtaacattgtgtccacattttgggtcatgggcaccaaagcgagaaggatgggaatggaagtggagatgtgtgcgtgtttgtgtatgagtttatactgctgtgacactcttagtagggatgagtagaagaatttcacgaacagcatctatggccctggggttacagcaaaatgttgaaaagccacatgaagccaagggctttttaatctcttccttaagtcagtgataatgatgcagggcaggttttactttaaatatctctcctccttggagtgtcacaaggtgcacatctttaaaggagggattttctgtgtctttgatcagattgccctctggagctgttatcaagatgcagatgtgccgggcttttaaactcttgaaaaacgaaaagaacaagatcccttgtatttccaccttctgaaaagtacagttgtgtgtgtgtgtgcaagttcctttgtgggaaggttttcttgtttttgtttttgtttaaaacactcaagacctgtaaatagggcttggctgattttccgactgattttaaggacctagaggggtactaagttttggtcagctgtccagagctctctgtctagttatctcatcagccgtccagcttttgatataccactgacttcatggggttggtaaaataaaataacgaagcgctttggtgttcttagacaaaaggcatgagagaaaggatacaagctcacttctgagttgttggaggggtataaacagatgatttcatcttaggagggaagcacagaaatttaatataactatacaaagagagaagaaattctactaagagaccattgttagaggacctgtgaagatgtttcagagtatgcttttgtcttccctagcgccgtgcatttaaatgggaaagatagtgtaaggctgctgctatcataaattagaacttcatttgcatcataactattttagaaaatataattgatacataattttgattgagagattgaacaagttcagagaaaaagatggatattttggtttgagttggttttaaagccgagttggcacagaatttttctaacaggaacattaaaaaaatgcctgtcattcaagagtgtgaatgaaaagtatgacagatgataacctttgtttttattagcaaattactgtatgtgttaacccaggaggagtggaaaaatacattgtttttattttcttttagattttgaatagtatagcttttctcatacttgtatgaataaggtacttcataaagacatgagatataattatagaaatatgcattaaggaatagcacaaaatgcagcttctcatgtaagaacacacaaaaaaggattttaaagctaagcaataatagtatgataaattttgttgtgagtaccttctgaaaatgattatgctgtataaactgatttgctgtttctgaacatgttatttcaaagtcacttttatggtcttgtgccttattgtgttgtacataatgatatctccatttagcttactttacccacaccttattttctcctaattgctgtggaaaatatctattatatgacacctgtcaattaataagtatgcactcagcatgttcattttttaggtaaagggttgggaaggggatatagaagtagtgtttaagataaagtctctccctgcaaggagcttacagaagagataataatcccaaacaagtaatgtatggtagaagacattgtgtaaatagggctaaattggtttataggtgttataggtgtttatcaaagaggccaccactgatggctacgaaatcaccattggtgactctctttattctctagttggtagt

SEQ ID NO: 2436 - DNA, 1051 bp, Homo sapiens
tttcatttgaaaatttactagatttttgaaatcatttgttacaattgttagaatgattaattttcaagaatggctcaggcaaagtggaaatctaacagaacttttgcataattgatgaatagatcgaactatgagcatcataattaaataaatgcaagcagttgtccactgcttccatttatgtgagatgctctcattagccatgacagtcattgaaattaagtagcaacataaactggacttataatcagtctttcagttctttatcacaaattgttaagccaacatttacaaaactcaagaaacattcatttgtattgtataacattaataatattttgctaatcactgaaaagtttgtaccattagaattcaatatatttccaaaaatttttatactatactttttaatatgcataatctatttataaagtaattcatatgtaatttattagcatttctatgggaatgcatacttacacattttgaagctaaaaataccttggactgtagtttagaggccattctatgccacagagtttagcgttgttctctaattcttctgcgtataaacttctgctttctagctaaattgaaaatattttgaggccatggaccactttcaacattatttctgtatatcctttattacctagcatagtgtttggcatattttttggtactcaacaatttaataaaccaaggtctattttatttatttattctcaaatacagtgagtttatgaactacctgaggagattgtttcaaatttgcatttcttaactcctgctccctcccaatctttgttcttgctcagtttttctagggtggggtctaggaatttctccaaacccttagggaattcttacacagataggttttggaaaacactgatttatgtgatgatgatgattacattgtaattaacctcatattatgatgaaaatgaaaagacaattatagttgatggctatattttagaaagtaggatggaaaaaatgataagtcaatccttttgtaggtgatgacaacagtagaaaatatcaggga

SEQ ID NO: 2437 - DNA, 1065 bp, Homo sapiens
cctggaaatagtggagtactttaagaatatgaggtgatgctatgtagatacagtatttgctggttaaattctggtcattttttggtgaacatctgaagtatatcggagagaggttcctctatgttcatgatcaaaagttaaagttatcataaaatttcaatgtacttcaaaaaattaatttaagttgatatgattattagcttatattaggaaataattactggattttgttagatttactaaatataactgaaatgaaggttgtagaataagctctgactactatagtattaaattaaatcaaatgtaatgatttagagaacaaacatcgggttgggcacggtggctcacacctgtaatcccagcacttcgggaggctgagactggcggatcacatgaggtcaggggtttgagaccaatccggccaacatggcgaaactccatctctactgaaaatacaaaaattagcaggcgtggtggtgggcacctgtagtcccagctacttgggaggctgaggcaggagaattgcttgaacctgggaggcagagactgtggtgagccggaggctgcggtgagccgagattgtgccactgcactccagcctgggtggacagtaagactcccatctcagaaaaaaaatataataataataattaataaataaagaacaaacacctattgtaatttctggcatgagtttgctgtaacgtttttgttcttgtgagagtgaaagaactaggaagtttggaaaagaatttaacacggtatttttagataatttaggtaagtgttttcttttattaccagcttgtaataaatcctggcaagtggtagtgaaagccctcccaaagtagcttcttggggtgtaggggagtatcttagggagaagtgcctctaaaaatacaggctcagccactccctgttcgcctcctctgtctcagccctcaggctgtgcttgtgtggggaataggggtaattgccctttgtataccacaattcagatgtagaggcagtgtaatttcttggttaagagcacaagctttgaagctcaagtccttgggttca

SEQ ID NO: 2438 - DNA, 1063 bp, Homo sapiens
cagtgtgatttcctatagaaggaaaggtgattaaggtccctgtgcactagatcagcgcttctagctgggggcagttttacctcccagggcacatgtgccaatgtttggagacatttttggttatcacaagtagaggttggagtactactggcatctgctgagtagaggctagggatgctgttacacttcttataatgtgtaggatagtcttctataacaaagaattatgtggccccaaatgtctgtagtactgagtttgagagaccctgaactaaattatgacataagggtagaggtttgaaatagcccccaggtaggatagtaaatgaagcagcaagctggttcagatgtttctttactaacagttataaataaaaaagcatttgcagttcatcagtcacacaccaggtactggagtgtgttgatttgattcagcaaggaaaccacatctagaatagtgctgtaattggcataaccaacttataaaactttgataacttaactgtcattttacaagattcatctgtcttctgcataggccaaataggtgagctgagtggagatgtagtgggaattgccatccctgaaaattttaaactttttatggtggcactaaacctacagttcccccaggaagcaatattgcttttggtttactattttggtaagcccaagcagttctaatggcttccacttgtcctttcccagtgtaatagtccttaattcgcaggccaagggatgaatgtgtaggctgtagcagatgctgagtacatgtcttccaactgtattccagaactggggaagtaaccacagaatgggtttggggacccactgattccattgtgaactggacccagtccaaaacgtcattgatcatctgatttccataaactcctgctttgattggtggatcacagtggaatttggggtctctaggaattactactttggagatagtttggagatgtggcagggggttgagggcatggaaatctattacataatcatcctatctgtattagatatatttaattgtaatgaaaataatcacatatgacttaat

SEQ ID NO: 2439 - DNA, 1004 bp, Homo sapiens
aggtgagtgagaaggggcatagtagtaaatgagggcagaaaggtaatagggggtccgactttgttagtcttaccttattggtcatataagggctttgattttactgtgaataaaatggggatctgttgcaggatatttaacaaagagtgtgatgatatgatatgaaaaagaaaatgttccctatactcccgtttcccagtcccctagctcccttttctagaggtaactactttctcttctgtgtcttgtgtaaccttctggagatagtctgtgcttattgaagcatgtgcatggaggcacatgtacacatatacacatttacaaagaacataccatacatacataaccagctctgcctattgatggactttgtgcttgcttctgttttttgctgttacaaacagtgctacaataaatattgtatgtgttcatctttacactcatttgtgactatgtctgtaaaactaattactagaagtaaaatttctagcccaaggattgtgggaatttacttgatagttgtctcccaactcctcctatacatagaatttgtgtcaattttcactgtgaccaatgatatataagtatgcctagttctataccatcaccatcaaatgctatcaaactctaatcgttgtaatctgatagatgaaaaatagattttattgtagctttaatttatatttcacttatgatttacttcatatgtttaaaagtcacatatatgtccttttctgtgaaatatctgtatacatcctgtgcacattcatatttgcccattttaaaaattgacttgtggaagtttagtattttaaaattaaccattttcctgccatatgttacaaatattttttctcaatttattttctgcctctttactttgatataaggagagttttttaaaaaatcaactactgtcttttaaatttgcgatgtcacatttattaaacttttttttagtgacttctattttatgttatacctagagagccatttcccatgct

SEQ ID NO: 2440 - DNA, 1064 bp, Homo sapiens
gacaaccagtataacttttcataacactgatatttctgcccagtaagaacatgaaaactttgctgggttcttctttttctgtgaatgtgagataatgtattatgggtctcttcttggagaaagtctcttcttttagcaccagtctttttgctaaccatgatgcctttgtgtaagtgagaaaaagacatcctacctggaccaattaactatgcaaagatgctgttttttactgggctggaaccacagtaggacatatctttgcctacccctgtgctgggaacccacttaaaatgcacaaactgggtaattgtacacagtgtccctgtccatggcccacatagcttttctacttttcctggatttagttgtgggttactctggcaaattgagtgatttttaagtggcatctagaactactcaggcctgttgtgctagctggaatacacagcaatgcgactcctactctgtctttcccaaggttgtataaacaaagttgtacttattgaaacatgtgaacatgaaactgaatgttgctttctttatctgaataactaaaacgtgtacttgatgatgataagtaatttctgtcataaaatctactaatcttgttgataaagtattgcttttccaaataggcatataaaaatgatacaattttgttttctttaacccgtgaaaataaagatgaagactcactaaatgtagccagtacactgtgtgtgtgattgttttttgagtgatttacatgtatgttgatagatttgctttcttttagaagttctgaaggaaaagcagatcaagtcttcattaattctcatgtgtttagaacattcagcatttgacctttcccatttaggcagtagcatctcccagtcagtcatacttaaaaagtaatggaatgtgaaacaatccatttttccctagcattgaaaaagacagtaaaatttgcttccatgtcttaggtatactcataaaaggcaggtaattatcgcacatttatatgaaataaggattcattgtaatctcacttctagaagtgtttgggtaaatttgttctggtttga

SEQ ID NO: 2441 - DNA, 1885 bp, Homo sapiens
tggttttggacaaagtactgaaaacagagtataacataaaatcataggaagaattggtgggaagtatacttttcacactgaaatatgaggattttgagggaaaggtgtttaaacaagtgttttaaaggtgataccaataatattaatatctggctaaaatatcaacagtttaaatgttgaggatgtgatcatcagatttgctgagaaaaacaaactgtgcagtttagtgaccaaaaatctgacttttctaaaccttgttagccctctttaattactggggaaagggctcaatgacatataattgggcatttttaacatacagatgtgcatccaaatatgaaaaatatcttccagagcaagcatatccaaagagtatgtcaaaaatctatttgctaatatccctcaaattaaaacttccagtctttcacgttttgagtttagtaagctcaacaacctagaatttcacagccatacataatcttcggggagaaatatctctttaaggttagattcagtaatcactctgaatgtcttgagaattacctgaaacattacctaatgcttattcattttcccagtcaatctatgattgtgacttgggaattttcttgctgattttatttcttgtatctcttttgaaaatgtctgcttttatctttctctatcatgaccagtttagacaaagtcactgttatcttcttgtagccttccaactgcatccactttacatacgtatacacacacacacacacacacacacacacgcgcgcgtgcgcagagagagagagtttaaaatgtaatacatagagtttaaaagttgtcaaggatgcaaaatacgtctgtgaatatgctatccctttgtttaagctttcagatggcgttttattgtttgtagtccaaaaatcaaattcattaacatggtataaaggtcctcacttccttttccacctcatggaccatgaactcgccgtagcttctcttcactctcctcttccccgactcctacagctttagtgattttcatctgctcctattcatactctattccagttaccaggcctttgcaactttctcccaccttctgggtaaggcttatctcccctcttcccttaattagtccttactcattcctcccatttcagcctagagtcacttcttcagggaaacctttcctattcccctaacagtgttaaatccacttaccctccataaaatcaagcactcataaccaaggattatttataaataaccactttatttttatttgttttggttttggtagtcgtttgttgatttgtttgttgacactttttgtttctgatgtttttgttttaatgcctgtattctacctctaactccaaaaacctctgtcctaattgcttggtttttaatagctgcaaagcatccatttctatgttctcaagaagctacttaagatatactgaaatcaatgtggaagaattttctcttgagggaaatgaaggaggcttagagtctttaagtcacctatgaagtttagactaactatctggctgttttaaaagtcacagtcttattttcttatttagttattttaagcatcgtattttcatgtttttctaagcttggcagtttgttgatataataaactagtctatttttaatttttggatggggacttcaaaatgtctttcccattttaaaaaagttgctttctcatgatatttatttattgcactaaaatgttttgttctaatcttgtttttaaagaaataaaacatcacagctataattgaagacccatgtgtcatttcttggttccagtcttgtctttcctacctagaaataaccactattctgaatttgatctttcttattcccacttaaatttttaaaaacttttttt

SEQ ID NO: 2442 - DNA, 1073 bp, Homo sapiens
cacttcatattaataggccagtaaactgtcaaatatacagacagaagttttataaagattgcagtgaagacaaagaagggttcctatccctcctgaaacccaaatcagagcaaaatccttgaaaggtgaagaaggctatgttgtaaggcacaagaactgtatgccagccttctactagcccagtttactgtgactctgaagacagcctgaaagaactctctcaggaggaacaagctgaaccactgcctttgtcaagctcccaatgaccacaatgtgctccttctgcctcaagatcaagcaagcgatggcgaagtcctgtgacattgatgagaccaagggcaacttcgtcagactggtgagcaggtctgatggagagaaaaccatgtgcatttggcccctgactatgacactttgggtgtaactagaatgacgattgtctaagccatgtccagttggctagttctaaaaatgacagactttttcatcatcacaaaaagagtgctagcagaggaatggaagagataggaaggaacaaagagcagttgagaagagaaaaggaaaatgcacataattgagggaaatattgattgacactaatggagtttggctaaccctgacctaagctctagccaggaaagacccaattgaaaagtaaatatctccaaagaattgaagattgtttactactttagttatctggaacaaagccaagaaccaagaaggaaacaaagacctctgaacaactagaatagctgtgatatagaagacatatctcaggccttcactcctggcttattttcctaatttaacacacaagtctagcaaactctggccttaatttccagcctacagcaaacctgaaacagtaaatttgaaggggaatagtaaattcagagctcttttactaaatttacatttgctagcaacattgtgtgacatcacagtttgaaaatgagaaagaaaaagaactgaaaattaacatcagaaactcaaatagtagcatggcactgctgttcttaaaattacctctattttttatacttgtacctggagtgtatgacacatgcaataat

SEQ ID NO: 2443 - DNA, 1025 bp, Homo sapiens
gaataggaatctggtattccattatccttactcaatataccatgtaaaacatcctaatgttccttcttacagcaaccattcttcgacaactgcctatcatttttagtcaacacacacccaaacccacgcacatcttcttgttatcgcttatgtttttttctctctccttgtccaaagctgctgaaggagaggaaactaaggattaaacaatatactcaagacatctttgagatataggaacccaatggctgtgtattgttgttttattggaattaaaaattccagttaaagttctgattagaactttggccctgcctacacgtctttttcttgcttcttcagatggaagtggagtgaccttctgtttaggtgttgtttttgttatggatgccccagttttcacaaaatgattttaatcctgtccctcagctcatgtctgttctttgtagaacggaataactgcattccaggtaccagtcagggattgaatttatgaactaattgcagtcaaaaacccaacttaagaaataattaaataaaaaaacaccccaatacttttggaggaattcctgaagaatttgctgccagtctatttctttagattagttgttctgaaacatggagctgccaggaaacatcagtatgtttctgttagttttgagatatgtcccagccgattctaagagaaaactaccaaatttgccagtaatttcataaaaagtaactggagtaaattcaagattattcatatgacagtgttgtcttcagtatactgtaatttgatgtactttgtcaagacaagagaaagaagaggagttagaacccagaaaccagcatggcttattcatgttgtagcttaatgggccacacttcctagtacacaggaaatgcctgtgccaattagagagtacaagtaaaagccctctttcatagtgcagtaaggagctgttaattgaaaaaagcaggttaaagtgaggaattattaaaagttatataaacatttaacacttctattgtacacacaa

SEQ ID NO: 2444 - DNA, 1028 bp, Homo sapiens
tcagtagcacgctaatagctaatagctttttaaaacctgttagccctgtttgggaggtgaagagttcaaaactctgaggaacgcttctgagtgaaggctgactcccattgtccaaggctgcaatagcaaaatcatcagttacagtgacttggagctcaaaggggccattaggactgtggagcacaaaggtagagcagacgaggctcagagtaggcacttgagagtcatgagataaggctagagaggtaaataggatcttgatttttttctagagtctggtagccagtgttcaagattaggggtttagttctaatagcattgagaaaccaccagtggatgttaagtagtagataacggattggaggatgggaggatagaaaagatgtgtggataacaggttggaggatgggaaggtagaaaagagagtcagaatggttgtaccaagaccagtgagattcagtgtgacagtagtgtcaatatggatgggtagacgttgatggatttgagataaactgtggaggtgagtaaaaatgtcttaatgatgcatcgatgtagaaatttcaagagatggtgttgttaaggatgatcctaaagtttcagttattagggtgcttgacagacatatggagctggggaaaaccagtatcaaatttgatgtgagaaatcaagtattgggtttgaatttctgtgagacagccaagtgaaaatattgagtaggtatatatggattggatataaatgttgggatgataaagttaaatttagtagtcagcaacaaatcgatgatatttgaagccatgataaatcattaggagaaacatgtagagtgagaagataaagggggctaagggctgaaccctgaggacctccatgtttaaaggttgagtagaaggggagaggtttagtggaagactgagaggggtcatttaggcaggaggatggtcaggaagatgtactgtcagagccagagcaagagatgatctcaagtgtactgaagaccctgtgtactgagaggttaacccgtatgc

SEQ ID NO: 2445 - DNA, 1118 bp, Homo sapiens
ttttggttctcctattttcttgaacaaattgctttatttggaagctaacatatactcaaagacatagagaaaataataccaaattatgcttttgaaaaatgtgccctgtattgtttaaaaagtaaaatgaaaaggaggaaaattttaacatttgtgtttcaagtcgcttcttgtcattttgtttttatataaattagtaaatgtgtttttattgttctttaatgttattctacaaatctacctaaaaaccttactgaatctttcattaaaatgtctgatcagtcagaagagatgactttaaagagtcaaacccctaaggaaggtggtttctgggtaaaaatcatatgaaggagcatttagtttcattttcagtgtttttcttctgtagcttttcataaggaatggttaaataattgtaagttttactgtgtatagtgtattcacaccacagacacacacagatcatttgagttcatctacttaaaattcttttagaaaccaagtcacagcgaagttaatgtcacagtctaagttaacatagcttgtttgtacagagttgggactgagaaaatatcttgtttcaatgcattgccagaatcctgtagcattttgtaagcagattaatttcttcaaataaatattttaattggctctctgcttgcttgtttttttttaacagaaatatatctacctgttttctttaacagttatttcgagaagtacgaataatgaagatactgaatcatcctaatataggtatgaaatatatatatattatatatatatatatatataattagcgatgaagtgttttccttaatttgagggtatttgaaaagacacaatgtttaaggatagtttatttaagcagaagaaaagtgataacctgagtgataaccccaggaagtgatactttgggtaaaaatagattacaaagaagctaactggaggctacagattgctgttttctgctaccttgctatcttctgctctccactaaaataattgatatcattcagaattaatgcatacaattttttttaatttcctaattaaatgtttctaaatttaaaaaaaaatgtctttctggccgggcgtggtggcttatgcctgtaatc

SEQ ID NO: 2446 - DNA, 1026 bp, Homo sapiens
atttttcagtaagttctgatttctccccctttgcaaataaacgtattgattagatatattattatatgaaatcatttgattgtgacaagtaaaattctttttaaaatctgttttttaaaacacttttttttgcacatttaaaaatcttatctgtatatagttgttaaagtatttatttgtggtgaatatttgaactacataaatttgataatttggtaatttttctaaccagaaactttcataatatcacagaaatacagaaattcttttgtttctgtaccaaagattatttagcattttttgatgtctcactgtaatgtaacatagtctctttttaaacttcagtttaaattctgtttttctgattttaagagttccttttattaccttattctaatttgaaaaagtaatgaccttttaatcctagaaacttaactttttcaactcaagaagttggttctaaatcactttgtggtaagtagttttctgtcataggagtaataatctttgagagactttttgaacttaaaattgtgattaataatgtttagcaagtagtcaaattttctactagtttagtgttaccttagattttcttaaagcatattcaatctgtgctaacagttatagagttatatctctaattttttttcagtaaaattgtttgaagttattgaaacagagaagactctctatttagtcatggaatacgcgagtgggggtaagaatgagggtgattgaaaagttctctttgctgagacatacagaaatgttaacacctaagagttcattatgacatttatgtcttcagtgttaatgaatctattgttttatctaaatgcctttaaattacatcttaaggaaaattcagtgtttacttttaagacctttcgatcttacattataaatggaatttttggcttatttacattttacttagggacattttttgaaacgttaaatttgtattttcatcttataaatgtattgattctcttatctaaattttactatatcatatcatga

SEQ ID NO: 2447 - DNA, 1035 bp, Homo sapiens
tgatttttaatattttatttatatcctaggattgatattgcatatatatgtaatatatctgtatacctaggtacaaaaatgcaatttattgagtgcttactatatgccagtcgctgtgctaagcacatgcattatttcatttaatccttacaacaaccatgtgagtagacagtaggtagaaactgagtcttaatgaagttaagaaatcttcctaataatgtctttcagtagtacttagggctaaaacaaaattcataccaaaattggtctgattctaaagtctgagtttttttgtttttaccactttgctatactttacaagaacactttaagccattttgtgagtttttaatatacatgtatatctatctggtacaaattataaggacacaaaaataaatttaatccttatactaagataatattttatttttaaaattgtaactcaagtttaatttagttttaagctattactaactagagaaaaaggagaaaaacttacagacatgtaaagtaatggatccagtagaaaatttatacagcttctagttctttttaaattatttcaccaaacatttatctatccacttcgtgttctgccatgaagatgaagatgcaaattaagtacagatattatgatgattttcaagtaatttacagttcagctggggtattagagatacacacacaaatgatttaattctgtataatttgtggctgactactagaatgtatgaaatgagtagagtgagaataaacacagagtataggaaaggaaagaaataaatcaatgtggatggaagtagtgagatggaattttatccagactacatgacagggagaatttaaaagagcaatccaacaaaacacacttcatcattttgtttgaaacgtaggccccaaatacaaagccaaatgtaatttttgattgaccaggctgtggcttccctttactagaatgtataataaagagttgactgtatttttacataatacttgaaagcagaaagcaagttttcttggttgtgtttttat

SEQ ID NO: 2448 - DNA, 1031 bp, Homo sapiens
tatcaattttgttgatcttttcaaaaaaccagctcctggattcattgatttttttgaagggtttttttatgtctcaatctccttcaatcctgctctgatcttagttatttcttgccttctgctagcttttgaaagtgtttcctcttgcttctctagttcttttaattgtgaggttagggtgtcgattttagatctttcatgctttctcttgtgggcatttagtgctacacattccctctacacactgctttaaatgtgtcccagagattctggtatgttgtgtctttgttctcattggtttcaaagaacatctttatttctgccttcattttgttattcacccaatagtcattcaggagcaggttgttcagttcccatgtagttgtgcggttttgagtgagtttcttaatcctgagttctaatttgattgcactgtggtctgagagacagtttgttgtgatttctgttcttttacatttgctgaggagtgctttacttccaagtatgtggacggttttggaataagtgcaaagtgatgctgagaagaatgtatattctgttgatttggggtggagagttctgtagatgtctgttaggtctgcttgatgcagagctgagttcaagtcctggatatccttgttaacctgtctcattgatctgtctaatattgacagtggggtgttaaagtctcccattattattgtgtgggagtcttaagtctctttgtaggtctgtaaggacttgctttatgaatctgggtgctcctgtattggatgaatatatatttaggatagttagctcttcttgttgaattgatccctttaccattatgtaatggccttctttgtctcttttgatctttgtcagtttaaagtttgttttatcagagactaggattgcaacccctgcttttttttgttttccatttgcttggtagatcttcctccatccctttattttgagcctatgtgtgtctctgcacatgagatgggtctcctgaatacagcacactgatgggtcttgactcttta

SEQ ID NO: 2449 - DNA, 1099 bp, Homo sapiens
aaatgaatgagtacttataaactcggaacagcttctagtgaattattatgtgcttaaaaacttgaaacagtttctagtggattattatgtgctctgcattagctgtttattatcatcggtattgctctgtgatttatcattagtattatctatatatgaatttagatttcctattgggatgccagtgattccaacaaaagtttgctggcagcaaacaacttgtatgttacagagagagggatagtgtgtcaacctgcagtttaccatgctgagttctaaataaatataatttcctgatcagaaacagtaaaccagattttttttttgcaaatgtggagaaaaccaaacaaatctatatgtatgtttatatgcatacatatgtgtatatacatgtgtgtatatttaaaattttagattttattgtaagtttgaatctcagtgatgccccttaacttttttaacctcagtttttccatctataaagtgtaggttaatacatcataggtttgttgtgatgattaaataaagtgacatatagaaagagcttatttagcacagtgcctagtctataataacccattcagtaattggtagctgttatttcgtattttgactaaactaaggatttgtacaagataatacaagattatgagtagtcactaaagcgtattctatccagttcaccccttttcctgcttgccaacttaaagttctaggcccaatactacactgttttttcagtttggattacttcttgtatagctttaagtcatttagaaaatcaagagtgcagtgtttgtgcaaacttttttttttttttttttgctttaaaatccctgtggtttttcttcttatagtttgaaggtggtgaatcgttatccagtggaaacttgtgtcagaggtcccggcccagtagtgacttaaacaacagcactcttcagtcccctgctcacctgaaggtccagagaagtatctcagcaaatcagaagcagcggcgtttcagtgatcatggtaggggaaaaagtcacataagtgaagcaacacacgggttcttcccaaatttgtgtttttaaagcattgtacattcacgtctctatgt

SEQ ID NO: 2450 - DNA, 1035 bp, Homo sapiens
tttccaatgttattagtgtttctaggatttcaaagagtggatgtggaaaagagaagaagcagcttcagtcttacttgccttgtcatggagctatttataggcttggttcatacatcagtttgcccagtatcacatagctgaattaaaaactttaaagcctcaaatgtaacataaatttctaaccatatcagtcagtgactttgtaccattggggcaattactatgcagcatgaaacttgctagagaaagaactaaaagttcaccaacagagtcagcatggaagttagatcatagtgttagccggccatctgcagggtactagtcagattatcagtagtttctgcttttggaatttgtctatttaaggccatttcaaaaagccagtactttctcatggttaagccagaattaattttaaagtgaagaaaaataggtttatagtttagtgcttgattactaattgtgcattaagcattgtgcaaaatatttctcttaactgcaacaaaaatttagactctaggggaaacagagtactttggaaaggaagtcgtgagatagaatgccaaagcaagaaagtgccttagagctggtctgttgggaggttctgataaagattgccatatagtctttgaacacatatgtggagacctactacacgcaaggcccttttgtaggagctattgctacggcagtgagtgagactgatgggtctcctgccttcctgtgagcaacttactatcttgaaacattccacacatttaaagcgtttcccttgcttggctctggttttctcctacctcacagactagctatcacttctcaggctcctttgctggcttttttcagattcccttgcctttcccccaacctctaaatattagaatgccccagagctcagtctttggacacatttttttctctggttttccttacactcttggtgatctcagtcaggctcatgacattagattccgtcctgtatgaacaactcctaactgtatctctagcgcacatctttctgctgaactgcagact

SEQ ID NO: 2451 - DNA, 1057 bp, Homo sapiens
ggggatgcctgcaataagtaaaattcagtgagatttagtcatttaacaaatatgttaattattactatgtacccagcacagttctagatgcccgagatatatcagtgaatgaaatagacaaaattccttgccctcctggagtttacagtctaatggtagattcagacaacaccctaacaaatgggttaaataatatgttagaatgtgtaagtgctatcaagaaaaataaagcaggctaagggggcttggccatgctaggataggagttagggtacaatatgagcaaagatttgaaaaaagcaaaggagttagcgtcgcagccatctggggagaagcattcatgacagagggaacagtctgtgcaacagccttgtggcaagaacataacccgtgtgttcaaggagcagcatggaggccattgtgttctgataggagtgaggaaggagaaaaattctaggaaatgggattgggggtagtaggagttggaatggaagtcatggggaacgttgtagactgttttaaggatgtctttagtgaaatgagaagtcactggaggacattgagatgtgtggtataatctaacatctttacctaattgcagtacaacattctttctcaaccttaccaggtaaacgaattatctttccctctgaagttacgacattcctcctatccaaaaaggcagaaaaaagaaattttttatatttcaaaaatgtatatttacaaatagaatattagtggttcctattttgtgtgtgtgcttgaacagagaaatatggaactgaagaaggtattaagttcttcactttcagttgcagacttgtttccctcaaaccacttatatttaagaaaaatgctattttagattgacaatattaaaagtcaaaacagatggcatcttggggtgtgtttctgtaacagcaagataacataaatctttgcgtccatctgagggtggtctgcaaattaggtagtgttattaggcactgaactatgaccacttagattttatgtgtgttttgatctctttgctgagtgaaatatttgctttcattct

SEQ ID NO: 2452 - DNA, 1050 bp, Homo sapiens
ccctgtgctgggatattggatgtcctcctgaggtctcctcagcctttccctgatggctctggtcatattttggaatgtctccctgggaggagccgcccctgcttctggaaggggctgtgctttttatcctcctcacatttggaaagcctctggctttcagacaatttttacttatcagtgcctgcattttcctcacccgctagtctgcagattctatcttctttctaaaatagtgatattgggctaggcacagtggctcatgcctataatcccagtactttgggaggctgaggcggcaggtcacttgaggccatgagttcaagaccagcccagccaacatagcgaaaccccatctctactaaaagtacaaaaattagctgggcgtggtggtacacacctgtaatcccagctacccgggaggctaaggcaagagaatcacttgaaccaaggaggtggaggttgcagtgagctagactgtaccactgcactccagcctggctgacagagtgagactctgtctcaaacgaaatgaaacaaaacaactaaacgaaacaaaacaaaatgaaactaaactgtgatattgaaatttattttccctaggagtggaagatttttttctttttggcaacacagtcttttgtgtggtacagccccaacctatatgctaggctgtaggtaaaagcctaaccaactgggcctggccagcttcccctcactcttcagctcatcccatagaaatacaaagtaagaaaaccaagtccagtacagtgggctctctaggaaataagtgggattcttatctaacatgtgacttctgtgtgtctttgttctctatgtcagaatgtgtgcatgaagaggaaaggctgtttgggaggtttcctgatgtaggacccccgcatgccgcggcaagttaaacagagcagaggctggcctggttccgcttggaggcagcaacattgcaagacctttgtctcagactcaaactcacttggccaacctcatcttgttctacaacaaaaggacctgaaagctattttacttctcccaggg

SEQ ID NO: 2453 - DNA, 1030 bp, Homo sapiens
ttgctgatgagacattttgtgtcaaaatgtagaagagagtggactttgcagaaaattctgcaagaattggagaagatggcatggcagagggagcgataccatccagtgcagggatgggagacagggctggtggagggatgccttccatcggggggaaggggctccggttaatcagtattccattgccctgttgggggcttttctgcttttcaaagtgccacccataagctttcccgggtgggtggagactgtgagtaatatgtgtgcacttatgtacaagtgctgttctgaggggatgagggaagagctccatccaggagcatgtacttagggaactgctgaacagtgggatggaatcagttttaggggaaaggcagaaggccaggagaggatcatgagatgtctgtagagccaagaattaatcagaggtgaaacagtggcttcgagaagggggtttagagggaaggaaaaggcccaagaaatgtgaaaggaacagcactgagatttgacagtagataggagaggaggtgagaggttgggagtctctaccctcagaccaggattgtgagttgcagggtacacaggggttcatctaactgggagcacctcaggtgtccacattgaaatccttcacatgcatcgcctcaggagtcctcacactggtatgagccttcccacggggaggggcaagcccttcccatggtagatgagggtaggggaatcaatttccagatcctgtgaattatatctacaatcagcaagttctccggtctcaccataaacatttcttctttgtacagaggaaaggcttttgtctgtccaccccacatcttactaggggcattgcccttggagggaaaaacatacagggacccaaacaatgaaaaatgctggtgttgataaagagggtgatgttaatgacagggtaaaatggttgtacaagtcagtggttccaactctttgtcttacattaaaatgaaggggcctccagtgaaattgttgctgataaatcattaaaaatactttttga

SEQ ID NO: 2454 - DNA, 1044 bp, Homo sapiens
acaaatgcctaatattggtctttatgtggccattgagtcctgttgactttccactcatgtgctttttactctagcattatggaatctgggctgtacttgagtatggaaattctcttatagacttagttttagtactctattacacctttactaagccacataaaagtaatctgtttgtgtgtaactgccagatataccacctggaattccaagtaagataaggaagaggatgacatttaaaagagaatggaattttgagagtaggaatgcaaggaagacagcatgaacatatttttttcagtgcaaataattttttcgtaacaaagaaacgaacaactttggtatgatcttaagcaaaaatactcactgaaatagtatgtggatgaattcacctacttacaattttatggtttctttgtaaataataaatgtgaatctcaatcctgctttatctttggtatttatgagtcttcttcctgggtttttctctttatattagaatttgagtcactgcaatttatttttccttaccctttctgattgcctccagagatacaatctgactccacaaacactggcttctgtcattggcagggggcgagggcgttgtgagctgcaggcacacaggtggcctgtctgtggcaggatggccagtgtccgcaaggggccttcctagtggtcagtgaggagtggctgttccctcctcctccattttcctttgctgggttctgggactgaaattcaccaccattccccgcaccctgtgaggtaaaagtggtaagtgagctgtaggcctgggtaaattctggaagtgatgaaattgaaaaatcagaacttcaaagtcagccattaaaatagggaagccattttttcctcttaaattttcaaagaggaattcaggagggagataaacagaaacgcacatttggtgccccggaactgcctttccgaggaggatcaagtcgtgcctcctgctgagctgtgtcctttacagacaaggtgtgacctggggttggaagagaagagaatagagcagaaaaacag

SEQ ID NO: 2455 - DNA, 1056 bp, Homo sapiens
tattgtccaggagaaaggggggcactgagggaggggtacatacacagggctatgaaggtatgagagaatggccatcttgcagtgctggggctcaggagaggaggggagctgagagcacaggtacttggtgtcaggttttggggagtctgggaagaatttttggccagggagtgactgaatccgatttgcatgatacacatttgcctctgccaggagcctggagaaggattagcgcaggcggggccagggtgcagctgggagagcaggctagcatggaggaaggccgaggacctgcatggaagtttctggaaagcagacccactcctcatctcggaagctaccttctcagcaactgtggcttttcgctgcctcccttcatcatcggcactccccacacacatttcttacacctcacttctccctgaagccacagtagagacaaccaccctacctgccacagtcagtgaccgtttctcagtcaccaccaccccgctctgaggacacatggacactacttactgaaacgtttctcctttagctgtactgcccttgcttctctgctgtttgtcctcatcccttacttccaaaagttctggccttgacccttttctctcccctccttggtgatcacactgtctcctgcagcatcgccctctgtcacctgacataggtccctcaaatgtccacccaggactccctctggagtgctgcaccacagttccaactctttgttggttgacagagaaactcagacttatgtgctcccaccccagcccctacaccctcaccccacctccctaaactcattctttctttcttttttgaaacagagtcttgctctgtcacctaggccagagtgcgctggcatgatctcagctcactgcaacctccgcctcccggattcaagcgattctcctgcctcagcctcttgagtagctgggattacaggcagacgccaccatgcctggctagtttttgtatttttagtatagacagggttttgccatgttggccaggctggtctcgaactcctaacctcaggtgatccacccgcct

SEQ ID NO: 2456 - DNA, 1032 bp, Homo sapiens
tttgtgacaggaaaatcacagaagaagttcattttagtgttaaaaaatttttttttaaatttactggactaaaacctgctttcatattgtctttctctcattcgctccgttaatggttaccttactccttgtctctactcccccaatcttaaaacctgaatcacggtactctttttcatacaggacacattttcaaatatacggtgaagaaggatgggccattacacatgtgcatagttttcacttctcttatcaggtgaaacattcccaactgtttatttttccttacttaaatgaaaaggaatctaggtcttccaccttcttttaaaaaatattttattttttatggatacataatggatatacatatggatgtacatgtggtaatgtaataccttaatataatttgtaaagaccaaatcattgtaattagggtatccatcacctcaaatatttgtcttttctttatgctaataacattcagattattctcttctagctatttgaaatatataatggggtactgtaaactgtagtcgtactactcacctatcaaacactaggtcttatttcctatgtcaaactgcatatttatactcattaatcaacctctcttcatctgctcctactcactacctttcccagcatctgctaatcaccaatttactctctatcttcatgaaattcactgtttttgctcccacatatgaatgagaacatgtgatatttgtctttctgtgcttgacttacttcacttcacttcacataatgaccttccatccatgttgctgcaaatgacagaatttcatctttttatggctgaatagcattccactgtttatatataccacatttttttatccattcattcactgatgggcacttatgttgattccatattttggttattgtgaataatgctgcaatagacataagagtgcaaacatctcttcaatatactgatttcatttcttttagatatatacccagtagtggaattgctgtatcatatggtagttctatttttagttt

SEQ ID NO: 2457 - DNA, 1263 bp, Homo sapiens
ctgggaatcagggcaggcagtttgatgttaatctgcaagtccctgacagagcagttttagggaccattcatccagatccagaaattgaagaaagcaagcaagaaactagtatgattttggatagcgaaaaaacaagtgagactgctgccaaaggggtcaacacaggaggcagggaaccaaatacaatggtggaaaaagaacgccctctggcagataagaaagcacagagaccatttgaacgaagtgacttttctgacagcataaaaattcagactccagaattaggtgaagtgtttcagaataaagattctgattatctgaagaacgacaaccctgaggaacatctgaagacctcagggcttgcaggggagcctgagggagaactctcaaaagaggaccatgagaacacagagaagtacatgggcacagaaagccaggggtctgctgctgcagaacctgaagatgactcgttccactggactccacatacaagtgtagagccagggcatagtgacaagagggaggacttacttatcataagcagcttctttaaagaacaacagtctttgcagcggttccagaagtactttaatgtccatgagctggaagccttgctacaagaaatgtcatcaaaactgaagtcagcgcagcaggagagcctgccctataatatggaaaaagtcctagataaggtcttccgtgcttctgagtcacaaattctgagcatagcagaaaaaatgcttgatactcgtgtggctgaaaatagagatctgggaatgaacgaaaataacatatttgaagaggctgcagtgcttgatgacattcaagacctcatctattttgtcaggtacaagcactccacagcagaggagacagccacactggtgatggcaccacctctagaggaaggcttgggtggagcaatggaaggtgagatgcctatggccttgtagaacagggctggagaagcaggtgggtgggtcgctgaggtgcctcctatcttgtgaagctctgttcagtttccaatgtgcctaaaggagagggacaacacagggaggtccacatgttccttcctgccatctttcttttaggctggagcatggagaagaatttcttgccgtttcccttagaatagttgagactggttagcattttcaaaaggaaactttgtaaaaagctaaagagaaagatataaaccagaaagtaatatacaaaatacaaatgtcatgtaaaattatgaaagggttttattgaacacaattt

SEQ ID NO: 2458 - DNA, 1050 bp, Homo sapiens
taagaaatgggggaggagaacttttttgcatttaattaaaacatatattttggataagaaggcaatattcagatgaattttcagggtaaaatatgaggctacaaggaaattcacctttgctgtggatcacattggactgtcccctaagcctcttaggagaggagatggcttcactttgtttgactcttagaggtactttgaaagtattcgaaagacatctcagcaagctgccttggcgtggaatgtccctgtctgtactagttctgtgagaaaggcatgctagggtatgcaagagttcatgttacttctctgcagaatagatgtttcacatttctgctcttgagtggaattctcatttgcacatttatttgtgtgggtgtaggctgatttgccaaggaaagatgttactgaagtccctaccataaatgtatttatttatgaaatactcctctgtagattttattatgtagattagtcatcctttaaatggaataaaagaaactgaaactcttatttccctgcccagttgtgctccatgggatgcccatgcatggaggtcaatgttgaggtgccctggtgtggtcagtgggattagcctaacaggtagtgtcatcaagctgtgctagcccagtgtattcttctcaccctagagatgcaaccactgcatgaagataatttctcacgagagaagacagcagaacttaatgtgcaggttcctgaagaacccacccacttggaccaacgtgtgattggggacactcatgcctcagaagtgtcacagaagccaaatactgagaaagacctggacccaggtaaagcctgctaatttttttctacaaagtggagaaatcataaagaaggccttctaggagattcattgtcaaaggcaggagctagagacttgttaaattcaaaggaaaaaaggatcccagagctaattgagagaaaagcaggcgtcaagacagatggagatcaaaaataggaaagacaccagagactataactaacctacaaaccaatgtttggctgtcactatcttgtgtaaattat

SEQ ID NO: 2459 - DNA, 1060 bp, Homo sapiens
gtggagaatataggaaatagtttatgcaaagtatcaagtagttcatatagataattgtttcatagggttttggagtaatggggtgctgactttattgggaaaactataccagaggtcagactcgtagatcaataattgatgaatagttagtggaatcttagggttggaagagaccttagaagctactagtccaacttctcagtagtcacagcaattccctgtactctaaccctgccattttgggacctgtgcgtcaccggttcctagtgtaagccgcctaccttgcaaggctatacattcctttgttgcctatttcattcttatactgactccaaattttcctccagatgatttcctctatagaatctagttttctttttacatagtaatcctttaaatatttgaagttatactttaatttattttagcattttatcctggaaaatttcaaatatacaaaagcagagaatccgtgggaccatcacccaataattcccaaaagtgactgtaccattttatacttccatcagcagttaatgaaacttccatttgaccacaccttccctaacacttggtattatcagtcttaaattttagccattgtagtgggtatgcctttctggttttaattgtaattcctgatgattaatgatattgagcactttttcactgcttattggccatagttttttgtgtgtcagttcactctgactagctggaatttaaatgtcttgcagccctgtgacaactctgggaattgtttagcttacagttgttcttttttcctttagttattctttgcccatcctcaaggaatcttaccctacacaggagctgtttagaattcaggctgaggctgaaggagagacctccttgcatatttctggaactctacttgttcctagtgtccatcttttttttttttttttttttttttgagatagagtcttgctctgttgcccaggctagagtgctgcggtgccatcttggctcattgcaacctccacctcccgggttcaagcgattctcctgccttagcctcccaagtagctgggattac

SEQ ID NO: 2460 - DNA, 1042 bp, Homo sapiens
gcattatcaaatgatgcccaaagggttttgtttttttctgactctttctaataatcattatgctgtcatggatttaaaaatatttggtgtgtttctatccaatcaagaataattttttttttttttttttttggttaagatagggtctcaccctgtttcccaggctggagtgcagtggtgtgatcatggctcactgcagcctcgacctctctgggctcaggtgatcctcctacctcagcctcctgagtagctgggactacaggtgtgtgctaccattttttatattttttgtagagacggggttttgccatgtttcccagtctggtctcaaaatcctgggctcaagtaatttgcctgcctcagcctccctaagtgttgggattacagacatgagccaccatgcctggccagttattcttattgatgatcaatttacaattataattggagatttcagtatcccttctcaataactgatagaataggaagtcaataaggatctagaagttatgaacatcatcattaaccaacttgacattattgatgtttatggaacattccacccaagaagagcagaatacatattatatactttttagtgcacatgaagcgtttaccaaaataaactatattatcagccataaaacaagtctaatgaatataaaatgattcaagtagtacaaagtctgttctcttcacaatataattaagttagaaatgaataatggaaatatctggaaaatccccaaatatttggaaactaggtgacacacttctttctgaacatcttatgagtttaaaaggaaaaggagaaattagtattttgagatgaatgaaaatgaaaacaggccaggcgcagtggcatcccagcactttggaaggctgaggcaggaggatcacttgagcccagaacttcaagaccagcctaaacatggtgaaatcctgtttctacaaaacacacacacacacacacacacagctgggcatggtggcacgtgtctgtagtcccagctactcaggaggctgaagtgggaaggttgct

SEQ ID NO: 2461 - DNA, 1075 bp, Homo sapiens
ccattttcttatggagaactgtccttgttgtgagtaaattaatgcatactttaactcataaattcaagtatggttttataatcacagtccttttgtttctttttcagtttctaatatgaacagaaattaatgcttttaattcaagctaaccttgtaaaataatttagtataatttttgtgttggtaaattcttaagtgaataagacaacatgtataatctcagtgggaaaacttcagtttatatgtctcatatcaaagtctaaattttaagaattaggtgggtctgtatttcaactcacaaaggatgaaaagaaagaattagataggtcatatgtacactgttagtagaactaggaattcttagagccatcctgaaaaatagtttcatgatgtgtatgataagccttaaaaatggttatatccttttatattgtattaatgtcatgtctagtaatcgatcctaaagaaataaccagtcagccggcacagtggctcacacctgtaatcccagcactttgagagtccgaggcaggcggatcacttgaggccaggagttcgagaccagcttagccaacatgatgaaaccccatctcttctaaaaatacgaaaattagccaggtgttgtggcacatgcctgtaatcccagctactcgggatgctgaggcagagaatcgcttgaacctgggaggcggaggctgcagtgagctgagatgtgccactgcactccagcctgggtgacagagtgagactccatctcaaaaaaaaaaaaaaagaaagaaagaaataaccaatcatgcattaaatatcttacatggccgggcgtggtggctcacacctgtaataccagcactttgggaggcggaggcgggtggatcacataaggccaggagtttgagaccagcctgaccaacaagacaaaaccccatctctactaaaaatacaaaacttagccgggggtggtggcaggagcctgtaatcccagctacttgggaggctgaggcaggagaatcgcttgaactggggaagcagatcatgccactgcactccagcctaggcgacaaagtgagactctgtc

SEQ ID NO: 2462 - DNA, 1023 bp, Homo sapiens
attaacttgagtagcctcgagtgggtagtagattggctttttagacccaagagttagatattttataaccctcctttgagtagttactgcttcactagccaagggaaggttacatgatcaggagtgtggacttgggagatagtaggatgagcccttctgttccttctggaagtgaattatttgaattggctacaattttctgaaggatgcaataaacaagatcaatttccttgatagctctgatgttctcactacagctctgagggttggggccactgtctcctcccacttaaccaaggtcttagcccatagtgataggccaaggagaggcatggttccttatttacctgtctcattcatgtggtcctaatgtctccagtgcaaaagccctaacctgtgggaatcatgtgttttaactttgcagttgcagcaggaaatcgaagactggagtaaattacatgctgagctcagtgagcaaatcaaatcatttgagaagtctcagaaagatttggaagtagctcttactcacaaggatgataatattaatgtaagtgcgttcatgaatacaagcttaattcttgtgaattatcaaatctgttgaattaaatggaaagactcttaatgcccttttacttcttttctaggctttgactaactgcattacacagttgaatctgttagagtgtgaatctgaatctgagggtcaaaataaaggtggaaatgattcagatgaattagcaaatggagaagtgggaggtaagatcagcctcaaggaggatggaccccttttgccttcctgtctttaagtgcaccagtgctacttttcagctggctgcatttcctcttaagctttcgaggtgtaaatacattggatttgaatgtgtgtctgtttgcattgggcagaggtggattgctagggtgaggtgtagcagtaagcatgcagtgaacactgactttgttttcacattgagactagaagggtgcacgggagctgcactggtcatgtcttacacctctaagtat

SEQ ID NO: 2463 - DNA, 1035 bp, Homo sapiens
cttaaggtccagctgctgcactgcctctgatgaaaagcatggcccttaatgaggttgactcacacagggttgactgcttttagtaatactttctgtccttttcctctggtgagttagaccttttctccaatagtgaccaagatgacttgggcctcagagtgactcaaaaggggatgaatcactgcagtcctgttagtagggccctgtccattctgctgaatctgatcccataaatcttggcacattttccagcctataggcatgtagttatgactgtgaacctcttgtttaggttattgttttaaaaatacttttaatactaaatcataatttgttggattatataaatagactcagttttgctttgagtgaggcatcacattacactgtagatgaacttttctgttaaagtgataggctataactcacaatggcaaatattgtagaaaacacactgattgcccttaacctttgttgttattattagttttgtttttaattttgagagcctaaggaatagaagaactattggataaatgatttgcatgggggggtgggggaagttgaccactaccagtgacatactaggggtcttgatggtgggagctgtctgctatagttggaaagagtattttagcactgaggtttagaattgccagctcctggtgataatacagcagaaagacttttagttgttattatagtttttgaataccacacagatgatgcactcctttgttacctggagagggctgggaggggaatccctcccacctcttgtgtgaatgacctggtggagcctcccacctcttgtgtgaatgacctggtggagcctcttgaagcaaaatagtaccagtttgattttcactgtgttagtgtataattatggttctccggagaaacagaccaatatcacatatatatgtgtatttttaaaagagatttattttaagaaattggctcatgcagttgtgggagttggcaagtacaaaatttgtaggtcagaccagcaggctggaaatttaggcaggagtt

SEQ ID NO: 2464 - DNA, 1031 bp, Homo sapiens
atttacaagaggaaactgaggcacagagaagttaggtactcactcaaggttatcctgctagtaagtgtcagagctggacttcttgaactcatgtctgggttccaaagtttatgtgtttaaccactacgctagacagactcctatttttaaaaagtaccagctctaaaaattatttccatctccagaagactgcccttactagtggggcttttgttatttatagtaaattttattaaaatagaaattttcaaatggtaatattcactgtacttgtcttttatcatcaagctatttaatgagtatactgttttatttttaaaagtgatatttattataagcatatttgatgtctgtgtgctaataattatatggataaaatattgatattggtaaaatttggcattatttcaaaatgtgatggaatatgtatgtgtgactgttggagtgctttactttctgttggtattggtaaagtattctttctggctgaagcatctctgaaatatcagaggaaaaatgggaggtgggatccagagggattggaattttagacatctttcaattatttttgtcatttgtgataagtacctaatgaattttgaacctagtaatgcccttatgtgctaactattttggtacctgaggaactggagtgtttctgttccttaccttgtttagtggtctaggaaagaggtctgaagattcaaactctagtctagtttaagtttgtgtttgatagtttacaaatcaaggtgcttaaattcacactttatttactgctatatgcagctcttttttaaagccttttgtgatattttttggtattttgattgtttaaagccctcaggtagcctaattaaaaatgggatgtccaaattcacggaggcatctgttaaataaaacctgtcattttaaaaaaaaaaaaaaggaattgtctgttttattctatagccacagcagaagggttaaatatggacagaacactatttgtccttttaggtattactgttttagaaggagattatagctat

SEQ ID NO: 2465 - DNA, 1081 bp, Homo sapiens
ccccccagcaacttcaacaattgcttacatttagttgtagaccacgaaagaggtatttttaatataaaaggatgggtattgctgggcaacaattaaaacttcaaactcaacatttagggtttagccaactgactttactaaaatggaatgctttaactttttgactctatatttcaggaaaattgctcattgtagtttattaaggtaaaatgactttttgtgatgtagtgctaaaaaggtcaaatctccacttaaaatattaggttggtgcaaacgcagttgcagtttttgccattgctagcttttggtagtgctaaagagttttgcaaaaatgatttttcttttaaagaatatttaaattaatttactttgcttttggtaaatgccaaagaaaggcacagtgaagtattgtaagtgcattcaaaatcgattcttcatccgttcatttgtcatcctaaagtgaaaaaaagaagtggaagacaattattagatggatagtaaatataatctaatgatttatatgttgttctgacatttaaccatagatactgttgcttaaaaggactcttgaaagaaaatctcagcatattttttattcaaagttgttttgacttaggtactttttccatgtaagagacaaaaatcccacaaatattaaatctatttcaacaagtgtttttgaaacattatgtagatttgcaatgcagtttcattagcacaataaatatttcttaatgctgtgctttttgagtttctggatttttgaacaatatgtttaggtcattttgaattattatttacttaatattatttattatgactgtgaactgatttgtttatgtgtatgtatttgtgtgttttggctctatctgtatctcaacaagaccatttaatgtcagctctatcacaagataatttacttttttcccctctatgatatataacttttgggatagaaatttgttttggggtgtaatttttggaaatgtactagccacttgacatgctttaatattcaaaataattcacagtgaatctggatttttagtgactagtcaatgtccttggtagacatttttgt

SEQ ID NO: 2466 - DNA, 1022 bp, Homo sapiens
acaagattttggggaataggaggatggcttctttagagacctaacagttatttgtgtggcctggaaaagtgggatagctcattctgaatcattttcaaacttgtccagagagctctggggctcctcagaggaacctcagtactactagtgggaatagggttgccaagaagggcaggggtcttatccccacatcctttaactaaggaacttctactagacacaaaggaaaacaaagaactttgaatataataaattagcttttgcttctttgtcatagaatcttcctgagttactgtttgtgtaccaactcttgagggttccatcatgtatgatgaggagccacatcaagacctttcacctgtgctctcttattcttttcttctgccattccctctgcccctctcacacaaacctttttgtagaaaggaaagcagggacaaataacacttgagttccaggcgttgggaactagttaagatctgttagaaaagaaagatttaaacaatttttgaaagccctgaaaattatcttcctaaatcttttacctaaatggaaatttgtattatcttcattaggaagaatatatatggaagtaatcaacaaactgaactagttagaaagcagtgtattttagccaataatgagccttaacctttgcagggttagcacatggaaatcgttattatatactagcagatacagctatgccaccatacttcttaagtcaaggaccaattcttcattataccagcgtgttctgattttcacagttaatcttatttggttgctaaatgccttacgtacctaatgaaatgaaatttgggaattgactagcttaattttgcagtgtgaagtggttcccttctctttattttaaaacattttttctcccaaaattttgaagatattttgactaattcaaatttcatataattttaagagtactataatttataagctatagaggtgtgtgatttgaatgcttcctatctaatgcgactggaatttttctccaattataa

SEQ ID NO: 2467 - DNA, 1047 bp, Homo sapiens
tctcccttgaaattcttatcccttcacctggcccagggatttttttttttaactttttattttgaaataattttaaactttcagaaaactttcatagagttcctgggttcccagcttttcttcatgttaatatcttatataaccatagcacaattattgaaacaaggaaactaatattattataatacttctattaatttcaattttgccagttttttcacttatatcctttctctggcccagatccaatcctggatcccacactgtactaaattgttgtgtctccgtagtctcttccaatctgttaatgtgtgatagttctccagtctgtctttatctttcatgaccctggcaattttaaagagcatttttaaggtttctttttaaaaatgttcctcaatttgggtatagcttatgttttctcatatttagatggaggctatgcatttttggctatgcatcctacagaagggatgctgtataagtcttaatgcatcatatcaggggtatatggtgtccgtatgccttattggtgatgttaactttgatcacttggttaaggtgtctgcccagtttttactctgtaaagttactatttttcccttcatgattaatgagtatcttttgctcactgattttagcatccactgatggttcttgcctacaattattactatggtatgtgtctaatgatgactttttattatttatttatttggtgagacggagtctcgctgtgtgcccacgctggagtgcagtggcgcgatcttggctcactgcaacctccgcctcctgggttcacgccattctcctgcctcagccccccgagtagctaggactacaggcgcccgccactacgcccggctaattttgtttttgtgtgtttagtagagacggggtttcaccatgttagccatctcctgacctcgtgatccgcccgcctcggcctcccaaagtgctgggattacaggggtgagccaccgcacctggcctgtctaatgatggcttttaaatttctacatttcttctacattcagtaattggaaa

SEQ ID NO: 2468 - DNA, 1034 bp, Homo sapiens
tgatgtcagaactgttttgagagaccatttatgttgtgtttcctttgaagaagagtgattcaaggcaatctttacttacatagggccaatgagttgacctaggaagcctagaaacaaaaatcctttgccaaaaaagagttgaaagtagctgtaagtgatttgaaacatcatatttacataagagttttgagagagatcatttggaattaatctagtttacctagaggcagaggattagttgctcaaaatgattccttatgggaattcctagtttgatgtcatgcatctctcagaattttttgggcactggcatgtttaactgcagtcatttctggggagggtttgtttatagataaatgcacaactttacataaacacaaagtttgtgattgagacattttttaaaaccagctaaaaaggatttcgaatgggggaaaaataatcacagaagctgaaggttcagtttcagagataccaagttatcaggtttctttcttgatgtcagattaatgggaaattggaaactgaaagctggtgtgtattaccctcttacactttaaaatgttgcttgttaaggcaggcacatttttaaaatacttgtttgaatacctgaagtacaagcccttattttcctgcctgtatgtcatccttctgattggctgttctgattgtagccagaatatctgggcatttttcaggcagttgagataaagaaactcgtattttcttcttcattactcttaaattcatagttcaaaatatttatgttagttttaaacataatagtttcctgaattaggtaatttataaatgtcacattgtttttgtttttttttttttttttttttttgagacggagtctcgctctgttgcccaggccggactgcggactgcagtggcgcaatctcggctcactgcaagctccgcttcctgggttcacgccattctcctgcctcagcctcccgagtagctgggactacaggcgcccgccaccgcgcccggctaattttttgtatttttagtagagacggggt

SEQ ID NO: 2469 - DNA, 1019 bp, Homo sapiens
gtgtatgtcatacatttatcaccttgttactgcttatggctgttttccttttcccacatttcctttacagtctgttacttcctttctttttacttctttttacttctgttacttcctttcctcattctctcctcctctatttctgtttgccttggtttcctcatttgttgaaatcgttttcttaaaggggtttcttaaaggttatagtgagttgactcatggattaatcaaagtgtttctttttaactttattttattgtcaggccttattagccagcagaataataaagccaatcatagtatattcttaagtttgagtaaacttttgttgaacttatttggttatttgaggtttcactaaagaatgtgagttagaaaaatggcagagtgatagggatgtgctttcatgtctgagtattgacctgtgatgtaatgggtgcaagaatgaaacatagttgccatatgcagtgatgtgatcttgggatatgagacaatttgtactctcaacctgcatgactagatatttatagcagaaatgctaaaatgaaaacaaaaacaagaactttgttcttgaaaaaacttctaattagactttaaagttttggaatatagtaaaaaaaatagtgactggaacttagtaaattagaaaggtttgttttgatgtgagaagtatggcctgtaccccaccttcttggtacttggtagttgcttgtattctctttaaagatttacctatacaatagttagaagtgaaatataatattaagaccaaattattttataggatattaacaaattaagcaaataaattaagttttatttttatagatgagaccattcacttttatatatcaaaatgctagcttgcatgtatcaatatagagacattactcttagactcaaatgatctagaatatgaacttccaagttagagtttatttgcaaaagaagttgaatcataaaatatctaaattacttgaattatatttctcttataatcattcttctatttgcttagc

SEQ ID NO: 2470 - DNA, 1023 bp, Homo sapiens
gtccccccttcattcagtcctgtggtaaccgtagtaactgtggcaaactgcggcaagtggcacccaaacaggggcgaacagggacagatagagactagcagagacttgcagggacagggagggacagacagggacagatagggtcctatagggacttgaatgaggaaggtatgctggaacagagaaagtgagactgaccagacgaacaagaaacccctttacaagtctgccagcagcaatataaggtcagtgccctaaagaggtaaagagaatgggaagtttttgaatcagggtaacatggggaagaatttggctatttcttttctcttttctgtttggaatttggttcatattgtccttttgtcattatttcaaaattcgagagaattttttgcaccacccacagcacctatcaagggtggtgaacagaagagggaggatgaaaattgccttgtacggtcttcttttatggctacaggaaggctaactttaactttggcttttgagattgcaaacgtggactgtaaatgtgcactggcacctgtgagatgtacaaaaaacttgggaggttttctcagagcttgtcaagatatgggaactgagcttcattgctctacaatgttggttcaagcaatggcctatttggtagttgatccaaggggactaaagtgggaaaatgtcataagtgtagaaaaattggacatttcaaaaaagaatgctgtcagacctctgggcagaagggatcttataacacggttcccctctcaacagaaaaaatgccaggactttgccctcattgcaataagtgaaataaatcattgtgctaatcaatgccattcaaaatgtcatcaaaacggcacctccctgttgggaaatgagaagggggcctggacccgggcacctcaaacattgaggacattccccatccaggccacaattctgtttcaggggtgggtctccagaggcatattgattccctctccccaggaacacctggaagcgcagtattggatttcccagtca

SEQ ID NO: 2471 - DNA, 1066 bp, Homo sapiens
ggatttatcttatctatttgcagtgatatccaaattcataaaaactgaattcagagccagcagggacctatgagatcatctcatctagtgtttggattttgtagataaggagactgtaacctcttgattcagtgatgagttcaaggttacatagccagtgagtggtagagctgagactaacttcaagtcttcagtgattccctgcactgggctatgacttgggcagcataatgctctggtctgaagttttcagtgggtatggaactatttgtactctggaaacatcaaaatccaatatagaatattatcttcagaactttggtatgattagtttttctgaacttgtacttccaaattactaaactattaatttgaccatactgaaagaaaaatcttgctgaagcagtatctacaatgtaccacagtttacttgttcataactgtttgacacttaatgctaagaaaaaagataaatagacaagacttttaaatgttaataaatgtaacagaatccggaattgcatttttgactaggtgcagctgggaaagagtttatcagcagctgttttatcacttttctaaaagtaccaagtgttgtgcctctcctgcaggctctagtctctttttccctcccccatgcccttgtcttcctaataatgaagaaagatacctaaatagtatgatctacaacaaaaaggatactgttttcagaaaatattagaacatcgtaaggtcactagtacttttcttttcactctgaataatatattgagaaacatattgaagtaattggggataatatttatttataaaataattatgtgtcccatgtgacaataccaaaaatgtactttaacttgtctatttttacatggaccccaaatgtttaaatgaagtgattagacatacaaatctgtaattttgataaaaatataaataagaatttataagtttctgagttagagaatacaggtctttggtttttgtgacactatatttaatttaagggatttctttataggatcaacaactctagaacctttgtttgcatttcttgaaaggaaaa

SEQ ID NO: 2472 - DNA, 1053 bp, Homo sapiens
tctcttttcattgtaacaagagcaataaaaaaaagtaaagatagtttaaacttagagtaccaggtccaactgttttctaatatgcagcaatattctgcatttcaagcaatattttcagactgttgaatattttgagtggcagttgcttgctcttatagattgatcagcattaattatataaagtataaatcagtggctctcagctctgactgcatgttaaaatcacccaggatgctttaaaaaatgctaatgtccacacttcactacaatatgaattaaatcagaacctcaacctctggggccaggacccttttatcataatttttttagtattaccaaagtgattctaatgtgcagccagagatgagactgctgtgatagacttgtaattttattaatattcatatttaatgcataccttaagacttgtagcagagtctaattaaatgttttggctagttttggggttagataactacttatataggagaactttgtagaatttttttaaagtgaccattgtttgacatccctgattatagaaagtttctctagttttattttgtatatttttggttatacaatttcacataattctccaaacttagggttcaaaagaaattagtgcagcttaatggaatttaaactcatctgaaagaggagcgcaaagctatgagaagccttccctacctctttctttccagcattgatgcttatgggcacagtacttataacacgagtgtggagagaagtggtaaatattacatggaaagataatttttgtggatgaacctggaaaagagatctctgaaaagtgctttgataattgcaatattgtgagagtgctcttgaaatatgtatttaggaagataagtgtttatgctaaatgaaggatatcactgatatcatttacctgagattgaaagagataaacttcattttatacccacatttctgttcccacatagaccaaaggtacattggatgtaaaacaaaatgagaaaaatgaaattgatgtttctacaaccctgaaatttctatcactcacctcta

SEQ ID NO: 2473 - DNA, 1054 bp, Homo sapiens
agaaaagcaattcttcgtcattgtgaattaagtctttaaaatttagattatattatagaatatgcttaaccagaacatcagtatcccataaaggtttcaaaatgggaaaagatgaacattttgaagtcatatatttccttttctctcacctgcaaatatataggctttgcatgaacatgtaaccagctatatatggcttctacattaatgatgtccttgactatatcaggtcatataagcaattaagaatgtttagttttttttttatcaacattgcaatttagattgcataatatttaaattctttctaattctcatcacattattatctccttttagtaatttgtgatttttataacaaagttacctttctaagaattttaataaattttatcgtgactataaattttccaaaatattttgtaattatgaacactcttccctgagtataaagaattttttaaaattatgacatggaacttgatttgtgaactgaacttgtgtgactagtgaagtaagtggactttaatggcataaaattgcaattaaaatctataacaatagtattaatgattttattgaacccttactatatgccaggcattgtgctatattttacatgcattctctgatttaatcctgaaaacaacccaaggaattcagtgctattactgtcattttcattttatagatgaagaaactaagctttgcaaaattactgttggctgggcacggtggctcacacctgtaatcccagcactttgggaggccaaggcaggtggatcacctgaggtcaggagtttgagaccagcctgaccaacatggagaaaccccgtctctactgaaaatacaaaatgagccaggcatggtgatacatgactgtaatcccagctactcaggaggctgaggcaggagaattacttgaacctgggagaggtaggttgcagtgaaccgagactgtgccattgcactccagcctgggcaacaagagcaaaactctgtctcaaaaaaaaaaaaaaaagaaagaaaagaaaagaaaaaagaaaaattattg

SEQ ID NO: 2474 - DNA, 1020 bp, Homo sapiens
aaaaacattccatgctcatggataggaagaatcaatattgtgaaaatggccatactacccaaagtgatttatagattcagtgctattcccatcaaactaccagtgacattcttcacagaattagaaaagactactttaaatttcatatggaatgaaagaacaccctgtatagccaagacagtcctaagcaaaaagaacaaagctggaggcatcacactacctgacttcaaactttaccacaaggctacagtaaccaaaacagcatggtactggtaccaaaacagacatatagaccactgtaacagaacagagaccccagatataacaccacacatgtacaaccatctgatcttcaactaatctgacaaaaacaagcaatgggaaaaggatctcctattcaataaatggtgctgagaaaactggctggccatatgcagaaaactgaaagtagaccccttccttactccttatacaaaaattaactcaaggtagattaagacttaaatgtaaaacccaaaaccataaaaaccctagaaggaaacctaggcagtaccattcaggacataggcatggacaaagacttcatgatgaaaatgtcaaaagcaattgcaacaaaagccaaaattgacaaatgggatctaattaaactaaagagcatctgcacagcaaaagaaactatcaccagagtgaacaggcaacctacagaatgggagaaaatttttgcaatctactcatctgacaaaggactaatatccagaatctacaaggaacttaaacaaatttataaggaaaaaacaaccccatcaaaattgggcaaaggatataaacagacacttctcaaaagaagacatttatgcggccaagaaacatgagaaaagactcaacatcactgattattagagaaatgcaaatcaaaaccaaaatgagatactgtctcacgccagtcaaaatggagattattaaaaagtcatgaaacaatagatgctggcgaggctgtggagaagtaggaacactttacac

SEQ ID NO: 2475 - DNA, 1050 bp, Homo sapiens
ggactgtcgttagtaaggaggaagtcaagaggctgagagggaaggggagggccatgggtcattccaaggacaggtgactcaaggcatgacatgacataaccaggagacctagaatttttttaaaaacgagatttttgaatgaaggtaaaggtaatgttctggaaaaggaagtaaagcagtaaaggactaaccctgcttgagcactgtggcttggtgggctttgggggtgagagtggctttgtgctgtcagagaagcagggcgcccagggaaaaacatgagtcagaagcagcagaagtgaaggcagaggtgcactttagccccatgccatgcttgccaccctaacagcctttcaggcaagtcagcgtgcccttggtttcctagcaggcgcgccctcccaggtggagtcctggggctgaacacatcccctggacccacatggagtttccaggatctgagttcatgacactaattgctggtttatccttttctcctccggggaaattcttacggctgggaagattccctctgatattttagaagaacataataattaagcattttaaggggaggaggcttgtagaagttcaaattagatgctatatggggaaattatagctgctgccgccaagaagcagcagcaagaaaggctgtcagcaagaagttgcgtgcaacggcgacaggaatgggcccactttggaccagcagggctaggcgtgcttccccttcctgcacctctgcccattccacctcaggtccaggcgctgcccagggcccaacagaccagggagcagctggattctcatctcccaaaaccacacaagaagtcctggccttctcagatggtgggcatgaaggggtgggaccccccactccatggaccaccttcctcctgtgtctaccccaccagcaaatcatgggcaaggagggccatggggctgctggtgaaatggcacagttccctgattcccctcgcaggacatggggctgctggtgaaatgggacagttccctgattcccctcgcaggacatgcgacaggggtgttgcctgc

SEQ ID NO: 2476 - DNA, 1078 bp, Homo sapiens
aatttggtgggtagggggctagtgaattgggagtattgattggttggctccgcaatgaaatgacagagcgtcaaagctgttctcttctgctgagtcagttcctgggtgggggccacagaactggttagcaggtccaggtggggccatccagttgttagaaatgcacctgaaaactcatctcaaaaggccaatcttagattcacaatagtgatgttacctccaaaagtaactggggaagttgcaaatcttatcacctctggaataatggctggtaatatttagaattccagcccttctcttcctgacttggtggctggtggcctgtcatttgttttataagaatagtttagccttttaggaagggctattatttaaactataaactaaattccttcccaaagctggttctgactatgtccaggaatgaacaaggaccgtttagaggttggaagcaagatggtgtcagttaggtctggtatctttcactgtcataattttctcagttgtgatttttgcaaaggcagtttcagccaaggcagccctgcagaatgaatggacaggagacattcgcctgaattacccgggcattgacaagttctctaggttcactcttggatttgcaaatcacttgctgtgtgaatttggggcagtctcttcctcccagtgtgcctcagtttccttctttattggttcattctataaacatgatttcagttgaaacatgctaaaagaattgaaaaaaaaaaatcaaacagactgtatgtgcacaaccctaacacccaggggctgccttcttgtacttaactagcagtccctcgggggtactgttagctgaaatgctagtgaaatgaccgctctccacagataaggaatagctgattgttcctcccagccagcgctggattccctggaaccattcacattctcttttcctccttcctttggaatatacagacatatgcctagcatgctgcctggtatggagccagctctcagccaacacgtctgagtgaagctgcattgggcacacacccgcgtggggcagtgtgaggctggcactgcaggccaccccaggcag

SEQ ID NO: 2477 - DNA, 1028 bp, Homo sapiens
cttggacattagctcttcatggtttgcggggtggggaggatgtgttttctgggacttcccaaggtacacagtagtgaaggacttcacaagctgggctgatgtgccagcttcaggactccactcacccccaagcgttctgagatgcccatggggctcaggagccctgacttgcacaagccagcaactgcctttctgcttccattcagccagctttactgggcatctgttataggaagagcagtgggctgagacttcagcaaaaaagacaaaagcaaaacacaatcccttctctatacaaggttcttccctttctgtgtccaaccagtccctccattctcggtccttaactcatcaccaagccgccattttcttctattcccccattactccaaggcgggcctcagttctcacctggagtctggctcaggatgcctacaggtggccccagaattgtaatggcttgacatgcaatttttcagctttacaatggcatgaaagcaatacacatttagtagaaactgtacttgaagtacccatacaaccattctgtttttcactttcagtacagtattcaataaattacattgagttgttcagcattttattttaaaacaggctttgcctccttagataattttgcccaactgtaggctactgtaagtgttctgagcacaattaaggtaggctaggctaagctatggtgttaggcagtgtcaacaaaatagtcaaattctgtgaaatatttaaagagtttattctgagccaaatatgagtgaccaaagcctgtgacaaagcccaaggaggtcctgagaacctgtgcccaaggtggttggtttacagcttggttttatacattttaggaggacataagttacaggcagacatcaatccagaaaggcgggacaacttgaagtggatggggaaggcacaggggctggagggggctccgagtcacaggtggattcagagatttttctgattggcagttaattgaaagcattaagttactatctaaagacctggaatca

SEQ ID NO: 2478 - DNA, 1039 bp, Homo sapiens
ttgttttccagctgcccaagctggaacactatagacccagaggagagggaaaggctgaccagacggcatgaagatggagaattctggtaagattagtggaggcttcagggaaagctctgtctgccccaatgttctttactagaaaactgctaattagaaagagtgtcggccaaagtgagtttaccatgtcgaggacacaagcgtgtgggatcctggttttgttattttaagttcactataagagcctgaataaagaaattcttaagccccttcaacggtccatcttgacaatggggtttataagctgagcagcttcagaaaaaggctaagaggaattcctttggtaatgttcagatcccaggaaacaagggaaagatggggcctttctcccccaggttccggagactcatcccagccccttaagaaactggtcccttagtgagcagcaatggacccacatgtctgtgtgtctgcgccactctataaccacctgcacctggacacaacatgctctttatcaaatggggcccatatattgtcacatttgatgggcacggctcccatttttgcaggtgagagttctgagcttcagagaagtttaagtaacctgctcaaagtcacccagctagaaagttgcagcgccaggactggaatctgggccttctgattctgaacctggtgcccatccactcagttctaatgagctgctctgcctggctttgggtggctcctggtctggtgttggtggaaagtcaaggcttaccagtgtgtcttcttatcacctgtgatgattgtctctgcttttgccaggatgtctttcagtgacttcctgaggcactattcccgcctggagatctgtaacctgaccccagacactctcaccagcgatacctacaagaagtggaaactcaccaaaatggatgggaactggaggcggggctccaccgcgggaggttgcaggaactacccgagtaagggctgttgcatataagggctgttgcaatgcggggccaccaaaggccaaagctccccttacccc

SEQ ID NO: 2479 - DNA, 1032 bp, Homo sapiens
gtgcaggtcatcctctctccacagctaccgtcacccgtctccagcctaacaaagcctgcagtccacactccaaccctggtgtctcccacctcctagcctctcccaacatcgcctgccgtctctgaccatcttctgccatcctctgccatctcccaccatctcccactgtctcccacagcctcccaccgcctcttgccaactcccaccatctcccgccattttctgacatctcccgctgtctcccaccatcttctgccatactctgccatctcccaccatcccccaccacctcttaccatctcccaccacctcccaccatctccctttatctccatccctctcagaagcctccaagcctgagaccagggccaccccccacccccatgcattcctgctcagggctgggctcctctgcccctttctggctgcagacacattctggatgaaccctcagtacctgatcaagctggaggaggaggatgaggacgaggaggatggggagagcggctgcaccttcctggtggggctcattcagaagcaccgacggcggcagaggaagatgggcgaggacatgcacaccatcggctttggcatctatgaggtgcagagcgcaggggctcctgccctcccttccccatgtgttcatctcagcccctgcatggaaagctgaccccagaggcagaactggggatgggatcccagaccgggagcttggccaaggaaaaacaaaactaccagcctggccaggctcaggagtagcccccgtagggaggcccctgcagtggctctgggttgtggggccttctaagcccttcacgggccccccacagccagcctgcagggagttccactctcaaatggcctccacatcccttctcacatcctccaggcctggcattctggtcagcctacccatcttcaaagaacagaatatactgggccacatcaggcaatactgtgagggcaggactgagtccatgggtgcagctgctcagagctcggcaaagtcattggcctggatggtggagagct

SEQ ID NO: 2480 - DNA, 1134 bp, Homo sapiens
gatttgcatatcattatactaaatgcaaatgagtcgcttaacccttgacaaggtcaaagaaagctttaaatctgtaaatagtatacactttttacttttacacactttcctgttcatagcaatattaaatcaggaaaaaaaaatgcagggaggtatttaacagctgagcaaaaacattgagtcgctctcaaaggacacgaggcccttggcagggaatatttaaagcaacttcaagtttaaaatgcagctgttgattctaccaaacaacagtccaagattaccatttcccatgagccaactgggaaacatggtatatcatgaagtaatcttgtcaaggcatctggagagtccaggagagaagactcacctctgtcgcttgggttaaacaagagacaggttttgtagaatattgattggtaatagtaaatcgttctccttacaatcaagttcttgaccctattcggccttatacatctggtcttacaaagaccaaagggatcctgcgcttgatcaactgaaccagtatgccaaaaccaggcatccaatttgtaaaccaattatgataaaggacaaaataagctgtttgccacctcaaaactttatgaacttcaccaccactagtgtctgtccatggagttagaggggacatcacttagaagttcttatagaaaggacacaagtttgtttcctggctttaccttgggaaaatgctagcaacattatagaaattttgccttgttgccttatcttcttccaaatgtactgttaaataaaaataaagggttaccccatgcaatcacaccatgccatgttttccttcctggagggcagccccacaggacggtttatgagcacacaattatagcttgtttctactttaacaaggtatgctgcctctgtaaattcatgtattcaaaggaaaagacaccttgcctataattaaaatgtggaactataaaattttttaaaatccaattcagaaactttgataatctgaccataacataagggaagctctaatttctactgcttgctgatctgctgttaggcagcacagagacgtatgtgcctctcaggaagttccctgctcgaccttggccagctcctcctggggtaggtacaagcaagggagct

SEQ ID NO: 2481 - DNA, 1029 bp, Homo sapiens
taatttgttttccatggatcccatgaggatacttgtaaaagcagatgatagggtccagttggatcctgtgaatggcactagtttgcagttatgttttctggatctcttccatatgtcgctgacttctttgtatttgaccatgtatggacatacagaatttcataggccagagaagaaaagaagctttataaacattccttatgtgtgtaaaatacaaatcttcatttgtcttagcaagtcaataagtaattaagttgttgaactgattttttttttaaacagggaaatatcttaaaatttaagctgttaggttaaaatgtgtgtttggtatacagcatattactgaaggtagaatgggcttcatttggtaataaaggaaccagaaatatttttaagtaaaattgggagatgattcatgtagattaactatatttttgtatcactttctagaatacagtactatgttgtttaaaagagtaagtaggtaaaggagtggtataattactttggatatttctgcgtcagccacagttaccatgaataaatgatctgtctttataaaggagatggaagtgaattcaagatattgagatgttagatttgactgggttgtcctttgactagaagatcaccagataaagaaaatgtaaacttcctaaaccagataagatgatattgttaaaaaatttttttggcccagcactttgggaggctgaaatgggaagattgcttgaacccaggagtttgaagctgcagtaagctatgatctaccatgcactccagcctgggcaacagagtgagaccctgactaaaaaaaaaaattttttttcctttggttctcatgatttcacactgatgaatctgattgttttctctgagtcattttgcctctctcatgttattagggtaacctgataatagacatgttatctgagttatgtggtatgtaacagtgatcttctaaatgatgtgcatccatcactgatactgaggatgatcagaaactattacaactcttatttattgatc

SEQ ID NO: 2482 - DNA, 1031 bp, Homo sapiens
ataagttttattcttgataataaaattcttttaacagaaaactcttgattgctatagacctctgctgtgtattcagtagtcactagccacatgtggctatttaagttaattcaaattaaataaaattaaatatcagttccttatttgcactagtcagattttaaggagtaagtagccacatgggcaagtggctaccatattggacagtgtggatacacaacaattccatcatctcagaaagtgttattggatagtgtggctacagacttttcttgctcagcaatcttagtctccgcatgttagtctcttcatgcattaggtagcatctataaaacatgccaaaaggaaataggctatctctaaaagtgtcccaaactttttgtcttgtaaattagcttatcagcatacttggagcctcttgccttaaaaaggacttgatataaatgtgtatcaggagaaagcctatcttatgaaggaattattccctttttatttgaatccatgtttgctttatcttcggctcctgaaaactgatactttgcatttaacagcagcatatgcccaggatgaatgataatacatctcctgatacagagcttgaggttacagaatatcttaaattgttccaggaactgttgttatcatttaagtccaataatcagtaagatttcaccctaccagaatacacttttttttattaactgtctggacctttgctgattacattgtccggaatgtggagtatcgcatttgagaagaggattggatcctagccataacataaatataagggtaattacatccatgctgagaaagatttaggaatgatagtaagttcatttgagtgagtggtttgggccaaacttgatagagaatagtccaggaagacatttactataaacagtagattaaatgttcttgcctggttaattacatttgaactctgttaatgactgaatcactcaaactgcttaattgtattattagatgcacatttaagttatgtattacatgtctttagtggtgatcag

SEQ ID NO: 2483 - DNA, 1044 bp, Homo sapiens
gactctctccaactacagtaattctcatgaaatcacattcctgccatccccttggggaaaattttatttcttaaaattgcatgggaaatgagagcttttttaaaagaaaaaaagttttatattcaaatgatatgtagtggctttgtgccatttcttattcatcacaaggggtaagatgtttaaaattgctatatcttatatataaaaatgtacctttgaataatttctcagtttaactatttttagaaatggagcaaagttttgcccattggtacatgatattgtggattaagtgaaagaatatgaggctgggtgcggtggctcacgcctgtaatcccagcactttgagaggctgaggcaggtggatcacctgaggtcgagagttcgagaccagcctgaccaacatggagcaaccccgtgtctactaaaaatacaaaattagctggccgtggtggcgcatgcctgtaatcccagcgactagggaggctgagtcaggacagttgcttgaacctgggagatggagtttgcggtgaaccgagatcacaccattgcactccagcctgggcaatgagagtgaaactccatctcaaaaaaaaaaaaaaagaatatgacacagaattttatgtatagagttccaggtaccctgctcactacagactgaaattctgtgcagtctaataaatgaatcagagcctttccatcttgtctgggtagtccctaggttccctttttagagggttttgtttttagagtgattataaattcatccaacagtgcactttcagtgcctcctacctccctctaccaagtatgaactgcatgcatggctgatatatgattttggctattatcgcttcatgtgcattgttcactattttgtaactgttattaaagtaaaatactgacttggaacatgaattttaaaatggtgttttatccttctagtattgattcccacttttagaaaaattggtgtcattcagtgagttttatatagaaggattttttcccttagaaatacatacatacatacatacaaaaaaa

SEQ ID NO: 2484 - DNA, 1112 bp, Homo sapiens
atctggactgaagattttttttaaaattagccctcatcacatgtagtcagctgtagaaatccttagcatggctgaaatttttcatattaagaaaagactagaacttggccaggtgtggtggctcacacctgtaatcccagcactttgggaggctgaggtgggtgaatcacctgaggtctggagtttgagaccagctgaccaacatggtgaaacaccatctctactaaaaatacaaaaaattagccaggcgtggttgcacatgcctgtaatcctagctacttgggaagctgaggtaggagaattgcttgaacccaggaggtggaggttgcagcgagctgagatcgtgccattgcactgcagtctgggcaaaaaaagcaaaactccgaagaaagagagaaagagagagggagagagaaaggaggagacaatgagagacagagagagagaaggagagagaaagaacaaaagaatgaatgaacgaacaaactagaaatcgagcaggaaccttggaggacctattgcttaaggtgtgggcgaaagaaagtaagttagggcaagagactaaggtatgccagagacccaggacaaaacacagtgcagagtgatgtcacagagccaaatgggagtgcaagctatggcaagccctcccaagtatgtgtgggttaaatgtgattaaattcaaaatctctcaacccaaaaattttctccacaaaggaagtagagaaacaaaacagttcattattgaataagcattaaaccagaatgtgatgtgtgaatataatggaatggaatggattcgaaagaaatggaatggaatggaatggagtggaatggaatggacccgaatggaatggaacagaatggaatggaatggaacgcactcgaatggaatgaaatggaatggaatggaatggaatggaacggacatgaatggaatggaatggaatggaatggaatggaatggaatggaatggaatggacacgaatggaacagaatggaacggaatagactcgaatgggatggaatggaattgaatggactctaatggaatggacatgaatggaatggaatggactcaattagaatgcagttgaattgaaaggatccaaaa

SEQ ID NO: 2485 - DNA, 1049 bp, Homo sapiens
gatggactctaatggaatggaatggaatggaactgaatggaatggaatggacttgaatggaatagaatggaatggaatggaatggactcgaaagaaatggaatggaatggattcaaatggaatggaatggacacaaatggaaccaaatggaatggaatggactcgaatggaatacaatggaatttaatggaatggactctaatggaatggaatggactagaatggaatagaacggaatagactcgaaaggtatggaatgcaatggaatggactcgaatggaatagaacagaatagactagaatggtatggaatgcaatggaatggacaagaattgaattgaatggactggaatggaatggaatggaatgcaatggaatgcacttgaacggattggaatggaatggaatggaacggaacggaacggaacggaacggacccggaatggaacggaacggacccggaatggaacggaacggaatggaatggaatggaatggaatgaagtggactctaatggaatggaatggaatggaatagactcgaatgaaatgggatggactcgaatggaatggaacggaatggaatcgactcgagtggaatggaatggaatggaatggaatagaatggaattgactcaatttaaatggaatgaagtggaatgaactcgaatggcatgcaatggaatggaatagaatcgaatggaatggaatggacccaaatggaatggaacggaatggaatggaatggaacggaatggcatggaacggaatggaatggattggaatgaactccaacggaatggaatggactcgaatgcaatggaacggaatggaatggaatggaatggagtggactggaatggaatagaatggaatggataggactggaatgaaatggaatggaatggactcaaatggaatggaatggaatggaatggactcaaatggaatggactcaagtggaatggaatggaatggacacgaattgaatggaatggaatggactgtaatggaaaggaatggaatggaacggaatggactcgaatggaa

SEQ ID NO: 2486 - DNA, 2074 bp, Homo sapiens
ggaatggacacctatggaatgcagttgaattgaatggacccgaaagcaatggaatggaatggaatggaatggaatgtactcgaatggaatggaatggaatggactcgaatggaatggaatgaactcgaatggaatggaatggaatggactcgaatggaatggaatggaatgcacccaaatggaattaaatgtaatggaatggactcgaatgaaatggaaagaatggactcgaatggaatggaatcgaatggaatgacatggaatggattcgaatgaaatgacatggaatggattcgaatggaatgacatggaatggactcgattggaatgggttgggatggaatgatctagaatggaatggaatggactcaaatggaatagaatggaatagaatggactcgaatataatggaatgaaattggctcgaatggaatggaatggacttgaatggaatggaatggaatggaatggaatggaatagaatggaatggactcgaatggaatggaatggaatggaatggactcgaatggaatggaaaggaaaggaatggactcaaatggaatagaagttaatatggaattacaaaccacagtgatataacacacatgcatgaagatttctaacatgccatcctaaattaagtcactgtatcagtcagagtccaagtataggaaacagtcactacccatgcaaacctgaacagaccttcatacaagggagctgaggcatccacagcctgcagctctgtcttctagtcttgcaggcattcatttagttagtggaagcatatctcctcccagagcccaggctgcaagagtctgaaatggagcttttagctttccagcctctgtatcaaaagggcacaccagaaagaggctagaatgaatggttgggcactaacaaatattttcacaacctaagcccatactcgcagttgtttgctgaacagacaatcaataaatcaaacagcccttccatgtagaaattaagaaggaaacacaacaccaaaactcattattaaatagcattttgtatttgaaaactcattattaaatagcaaataaattgcactaaaatacaaaattgtagaatttgtattctgggaagccacagtaacaaatccctgtgacagaacccacgaagtagaggtctcctgtgggaatgatgaccgaggccctcgctgctgctccacctgcccctacagggatgccctgcttttccagttgcccttactctgatgtgcatcatggcaggaaaaagtgggctgctgctttcctttaatgctttttgtcccactttattttttacttttgcctagtatatcttttcattcttttatttccaacttttgtaaatctctgttttaggtgggcttcttatgtacaacttggagttgggtttcactttttgattcaatctgaaatcttttaccagccttcaggttatgtgtataaagttatgtgtttacatgtatagatacaacgtttggtcttacttttatgacatgtttttgtagctttttgaaaaagtttgcgttctctctgtagttcttctgaaatttagaaatgtttgcactattttgtactaggggttacttttggaattttaactctatgtaattccctctccttcggaatcctcatacaacacatcttagcctgttagtttcctgttccacattgtgataaaactgtcattcatcttgctccttcttccttccatccctctcctctacaacttgattttagtgaataacatcttagtgcctccctgtgattataggtgagacagtcaacaaacctctaaccaccgaccttttttttctcctctgccctccactcacactctgctccatcaccctcagccacacagctgacgctgtagagattcactgacatccagtctgatggacactgtttctccagccgaaactgctcatgagaacagtgagtattccctgagttctcacatgatcaatagtgtttgtttgcagactggatacaaaagatgttttgactggacataaaattcatgggccattctttcttcctggaggatcccataagtaaggat

SEQ ID NO: 2487 - DNA, 1042 bp, Homo sapiens
gagttttctctgggcactctgacttcctccgacatctcagagctgtgcctgttaggttcattgacatgtcttagtggtcccagtctgagtgagtgtgggtgtgagggtgccctgcagtgagatggcatcctggccagggtggataacgacctggtgccctgagctgctaggatgggctccagccacctgcaaccctgaactagaataagcagattgaaaaatgaatgaataggacgggtgtggtggctcacgcctgtaatcccaacactttgggaggccgaggcgggcagatcacgaggtcaggtgatcgagaccatcctagctaacacggtaaaaccccatttctactaaaaatacaaaaaataaataaataaattagccaggcgtgatggcgggcacctgtagtcccagctacttgggaggctgaggcaggagaatagcatgaacccgggaggcggagcttgcagtgggctgagatcacgccactgcactccagcctggacgacagagcaagactccatctcaaaaaaaaaaaaaagaaaaatgaatgaatagccaggcatggtggctcacaccgtaatcccagcactttgggaggctgaggcgggtggatcacttgaggtaaggagtttgagaccagcctggccagtagagatagtgaaaccccatcctctactaaaaatacaaaatttagccaggcatggtggcatgcacctgtaatcccagctactcgggaggttgaagcacaagaaccacttggacccagagagagatggaggttgcagtgagctgaggttgcgccactgtactccagcctgggaaacagaatgaaactatgtctcaaaaaaaaaaaaaaggaatgaatgaatgggccaggtgtggtggttcatgcttgtaatcccagcactttgggaggccaagataggaggatcacttgagaccaggaattcaagaccagcctgagcaacatagggagacctcgtctctacagaaaaaaaaaattgccaggcatggtggcacacacctatggtcacagctacac

SEQ ID NO: 2488 - DNA, 1026 bp, Homo sapiens
tcttaaatgtgtgtatagttcacatttatttcagtgtttgatattagaagtgttttaggggccgggcgcggtggctcacacctataatcctagcactttgggaggctgagtcgagtggatcgcttgaggtcaggcgttcaagaccagcctggccaacatggtgaaaccccatctctactaaaaaatagataaataaatactaaaattagccgggcgtgatggcgggcatctgtagttccagctactcggaggctgaggcaggagaatcgcttgaaccagggaggcagaggtttcagtgagctgagatcgcgccactgcactccagcctgggcaacagagcaagactacatctcaaaaaaaaaaaaaaaaaaaaaggaagtgttttaggtctttatttagaggtttggtggttttcatgaccagaactatgccttaggaacttaacacttgtttatattaattagcctatgataaaattggtttcattacatgtcatttcacttaaagtcgggattttcaagaacctatcaacattaaaatgaggacttctgtataatatagtaaatactaggcgatgggaattttccaactccattataatcttacaggatgaccctcatatatggtttgtcattgaccataacatcatgatgcagcacataaccgtattcaaacaaacatgccatataaagaatattgaggccaggcctggtagctcatgcctgtaatcccagcactttggaaggctgatgcgggcagatcacctgaggtcatgagttcgagaccagcctggccaacatggtgaaactccacctctactaaaagtacaaaaattatccgggcatgggccaggcgcagtgactcacacctgtaatcccagcacttggaaggccaaggcaggtggatcaccagaggtcgggagtttgagaccagcctgaccaacatggagaaacccatcgctactaaaaatacaaaattgtccaggtgtggtggtgcaagcgtgtaatcccagctactcaggaggct

SEQ ID NO: 2489 - DNA, 1068 bp, Homo sapiens
actgtaccattttagacataagcgtggtacttctactgtgtgttagaaatgtgatggtgtactttttaatttttgtagagactgtttctagctatgttgctcttgaactcctgcctcccttggcctctcaaagtgctgagattacaggcataagccaccagccacagcctgtactgtacttttataaaactaaaatttttttttttttttttttttgggagactgagtcttgctgtgtcgcccaggctggagtgcagtggcacgatctgggtttgctgcaacctctgcctcccaggttcaagcgattcttctgcctcagcctcccgagtagctgggactataggcacgtgccaccatgcatggctaatttttgtatttttagtagagacagggtttcaccatattggccaggctggtctcgaactcctgacctcgtaatccgccctccttggcctcccaaagtgctgggattacaggcgtgagccaccgtgcctggccaaaaatattttttataacctgtagtcagctctgtattcgtgggttccacattcatggattcaaccaaccgtggatagaaaatatttagtgagactctgtcaaaaaatatatatgtatatttagagaagaaaaacaattgccggatgcggtggctcacgcctataatcccagcactttggcaggccgaggcaggcggatcacaaggtcaagagttcaagaccagcctgaccaatatggtgaacccgcatctctactaaaaatacaaaaattagctgggcgtggtggcaagcgcctgtagtcccagctactcgggaggctgaggcaggagaatcacttgaaccccggaggcagaggttgcagtgagccgagatcatgccactgcactccagcctgggcaacagagcgagactgtgtcaaaaaaaaaaaaaagagaagaaaaacaatttttaaaaccacagctgtttttaaaatatgaattttaaaatagtacaatgtaactactatttacaaagctttgacatggtattaggtagtgtaggtaatctagaggtgatctaggttatatgcaaa

SEQ ID NO: 2490 - DNA, 1040 bp, Homo sapiens
ctaaggcctgtggtctttccactagacctcaaaactcataccattacattctcgttaatgtaatttgcaaaaaaaaaaaaaaaaaaagattaaatctactcagaaaatgaactgttttgaaaatttgttaaataccttgctttcttaatatatacctctaaagccatggcagccacttaaaactctgaatggtagaagcagtatggttctcacacacatactttccttcaccttatcctctgcttaaagcttttggacaaagaaaagaaactattttgaattttattgaaaacatagattatcccatttgactaaaataatctctatacagtaagatttttaaatgttcttttttaatggaagactggggcaaatggaaagagtgaacttgcttttacactacatttagaagactacagtaaagataatatttcacaaattgtagatgtattttcacattacttttaatggcaaaaccacagttactttggaaccgatctaataatttactgtcagttagcaatccctgtaggatattttgataatgaaagttattctgaagaataagtatcatggaaaaagactaattgtataatatatgttaagaaacggccaggcacggtggctcacgcctgcaatcccagctctttgggaggccgaggcaggcggatcatgaggtcaggagatcaagaccatcctgcctaacacggtgaaaccctgtctctactaaaaatacaaaaaaaagagaaaaaaattcgccaggtgtggtggcgggtgcctgtagtcccagctactcgggaggctgaggcaggagaatgtcgtgaacctgggaggcagagcttgcagtgagccaagatcgcaccaccgcactccagcctgggcgacagagcaagactccgtctcaaaaaaagaaaaaaaaaaagaaaagaaacaccctagaataaatgcttggtacatgatagtactgcataactactgtataaatgttgaattgctatcctatcacctatccatccacatcatccctgtgctcaactcca

SEQ ID NO: 2491 - DNA, 1039 bp, Homo sapiens
gttcacgccgcttgtcccattgatcctcacgacaagcctgggacgtaagaacggcggattcgtaggcatttttcatccatctcggttttgtggatgaaaagactgaaaatggaagacttgccaaataaggaaaatatgtggcgtggcctgctggtcccctgacagctaattgagaggccttaactctccagaggattcgggccttctgtgttacatagagaatgctcatctctcccaggctactcctaatatgctagggattgtgtggaatgctttacaaacattacccaatttcatcctcttggtaattctacttggttggtattatcgctgttttaaaaaatgaaataagaacgcgtgactaaatgctagggggattctaatgcgcattcggttgcctcttccagagcacgtgtttgttttttgtttgtttgttttttgagactgcacgtgtttgttttttgtttgtttgtttgtttgttttttgagactgagtctcactctgttgctcatgctggagtgcagtggcgcgatctccactcgctgcaacctctgcctcctgggttcaagcgattcttctgtctcagcctcccgagtagctgggattacaggttcccaccactacgcctggctaatgtttgtatcttttttagttagagacggggtttcaccatgttggccaggcttatctcgaactcctgacctcaggtgatccgcccgccttggcctcccgaagttttgggattacaggcgtgaaccaccgtgcccggccagagcacgagctttttaacctctgttgaggaaacggggaccggtcacggtagctcaggcctgtaatcctagcacttcgggaggctgaggcgggaggatcgcttcagcccagaagtttgagaccatcctgagtaacatagtgagagccccccgtttacacacacacacacacacacacacacacacacacactttttttaaattgaggaaacggtgagttgaacatgagcaattattccttatatatagtatttccttagtttttctt

SEQ ID NO: 2492 - DNA, 1033 bp, Homo sapiens
gtgctgattgatacttacctcacactgagccttttttccccccacagacttatcactgaaccatttcactgggaaagtaaaaggaccacatatttcttggccgggcatggtggctcacgcctgtaatcccagcactttaggaggctaaggtgggcggatcatgaggtcaggagatcgagaccatcctggctaacacggtgaaaccccatctctactaaaaatacaaaaaattagccgggcgtggcggcagccacctgtagtcccaactactcaggaggccgaggcaggagaatggcgtgaacccgggaggcagagcttgcagtgagctgagatggtgccactgcactccagcctgggcgacagagtgagcctccgtctcaaaaaaaaaaaaaaaaaaaaaagaaggactacatatttctcaatgaaaatacagtgtacaatgttttccatgcaggtgtaaatactaactcatgttctgtttcagggtgggagatggaataacctgtagaaagaatctttagatttgtttaaattatacacaaatgataagagatctttctgaaagtattgactttttggcgggggagggaaggggcctgatagaacaaccaacaattgtacactttaagtttacatttagagttcacattaaaagttcatttacaaggcatctgtttgaaattcgtgaggatgagctgggctgggtggctcatggctgtaatcccagcccttgggtggctgaggtggacaggtcacctgaggtcaggagttcaagaccagtctggccaacatggtgaaaccccgtctctactaaaaatacaaaaattagctgggtgtggtggtgggcgcctgtaatcccagctactgggaaggctgaggcaggagaattgcttgaacccaggaggcagagggtgcagtgagctgagatctcaccattgcactccagcctgggcaacagagcgagactccgtctcaaaaaaaaaaaagaataaatcacaagaaatggttccttcactgttatactttaacatga

SEQ ID NO: 2493 - DNA, 2278 bp, Homo sapiens
ttttcttagttcctgtttttttgttttttctttacagcaaagtatccagagataaagtccttgatgaaacctgatcccaatttgatatggattataattatgatggttctcacccagttgggtgcattttacatagtaaaagacttggactggaaatgggtcatatttggggcctatgcgtttggcagttgcattaaccactcaatgactctggctattcatgagattgcccacaatgctgcctttggcaactgcaaagcaatgtggaatcgctggtttggaatgtttgctaatcttcctattgggattccatattcaatttcctttaagaggtatcacatggatcatcatcggtaccttggagctgatggcgtcgatgtagatattcctaccgattttgagggctggttcttctgtaccgctttcagaaagtttatatgggttattcttcagcctctcttttatgcctttcgacctctgttcatcaaccccaaaccaattacgtatctggaagttatcaataccgtggcacaggtcacttttgacattttaatttattactttttgggaattaaatccttagtctacatgttggcagcatctttacttggcctgggtttgcacccaatttctggacattttatagctgagcattacatgttcttaaagggtcatgaaacttactcatattatgggcctctgaatttacttaccttcaatgtgggttatcataatgaacatcatgatttccccaacattcctggaaaaagtcttccactggtaagtaaaggatttgatacatattctaattttgttttttcatttgtttgttttttgagacggtgtctcactcagtcgcccaggctggcgggcagtggcacgatctcggctcactgtaacctccacctcccgggttcaaacgattctcatgcctcagtctcccaagtagttgggattacaggcgcatgctaccacgcccagctaatttttgtatttttagtagagatggggttttgccatgttggccaggctagtattttgtcagtccaagcagttcattaaaaaaaaaaaaaacaaaaagagcaagaatataaatactgcatcttccagcctacttttacaaagggttcactcttgggtccttaagcttagtggttacacttaggatttatttttaattttattttttaactttatgtttttttagagacagggtcttgccctgtcacctagtctagagtgcagtggtacgatagctcactgcagcctcaactcctgggtcaagcgatcctcccacctcagcctcctgagtaggcaggattataggcacgtgccaccatgcctggctaattttttattttttgtagaggcagggtcttgctgtgttgctcaggctggtctcaaactcctggattcaagtgatcctcctgcctcagcctcccaagtagctaggactacagccacatgctatgacaggctgattttttaaataatttcttttaatcctccaaatggtttgttaaaatttttaacatttttaacatttttatagagctggagtttcctggatgggtgcagtggctcacacctgtaatcccagcactttgggaggcctaggtgagtggatcatctgaggtcaggagttcgagaccagcctggccaacatagtgaaagcctgtctctactaaaaatacaaaaaacttagctgggcatggtggcgggtacctatagtcccagctactcgggaggctgaggcgggagaatcgtttgaactcgggcagtggaggttgcagtgagccgagattgtgccactgcactccagcctgggtgacagagcgaaactccgtctcaaaaaaaaaaaaagagagagatgggtttccctgtgttgcccaggctggtctcaaattcctgggctcaagtgattctcttgccttccagaatgatgctgggattatacatacgaaccactgtgcccatccagatagttttttaacttgagatgaaaagacatttttaacttgagatggcagaattgcacatttgataagtgcttttttttttttttttttttttttgagatggagtctctctctcacccaggctggagtgcagtggcacaatctcggctcactgcaacctccgcctcccgagttcaagcaattctcctatctcagcctcctgagttgctgggactacaggcgcacgccaccatgtctggctaatttttttgtatttttagtagagatggggtttcaccatattggttaggctggtctcg

SEQ ID NO: 2494 - DNA, 1050 bp, Homo sapiens
gcacccagccaagtgcttaatttctatctaattagcatgccacaatttattagtatttgtaagttcctggatggcagggatcagatgttgcctttatattctatggcgtcatccatgcagtacattctttaataatatcaagttaatctaattgtatgtatttgttgttaattttacaaataagccagatatttagtcccttggaatgtgatgggagagagacctagagggtcgagtgtattcaactgctgctgaaatgtagactgctttttgtttagaattcccacagctgctgctgctgctgcttttttttttttttaagagagaggagggaggcaggtctcatggtttcccttctcagtgtttgtgtcaaccattcatcagtcatctttgaaagaacctagtaacactcatttttcatcttgctgtattttttcccttctaggtgaggaaaatagcagctgaatactatgacaacctccctcactacaattcctggataaaagtactgtatgattttgtgatggatgatacaataagtccctactcaagaatgaagaggcaccaaaaaggagagatggtgctggagtaaatatcattagtgccaaagggattcttctccaaaactttagatgataaaatggaatttttgcattattaaacttgagaccagtgatgctcagaagctcccctggcacaatttcagagtaagagctcggtgataccaagaagtgaatctggcttttaaacagtcagcctgactctgtactgctcagtttcactcacaggaaacttgtgacttgtgtattatcgtcattgaggatgtttcactcatgtctgtcattttataagcatatcatttaaaaagcttctaaaaagctatttcgccaggcacggtggctcatgcctataatcccagcactttgggaggccaaggtgggtggatcacctgaggtcaggagttcgagaccagcctggccaacacggtgaaaccccatctctactaaaaatgcaaaaattagccgggcgtggcggcacatgcctgtaatc

SEQ ID NO: 2495 - DNA, 1054 bp, Homo sapiens
ttgcgacagtcgggtgccgggataagtgcgggccatttgcctcctcctgttccccacgcaacacccccggcacccgcccctttgttctggcgggtgttagtacttgcagggacctttcacatccaggagttgactcattcgccaaaggagcgaagttgcttccttcactgtgccgttttgtagtgagtgttggaaaggagttgttttaacaactgtctacaaagtgattattttggttgtccccggtggttgcagatctgtaaattcaataactacatctgctgtagttcccaatcgtttctcagcttttaaatttttctatcgatccatgttaaaacttaagttgcagtattcaaactgttttccagagcaataaatggtggttgaatttagcactgcagtagccatgtcggctacaactcttcccatctcttgacaaagcatctaggcttagttgttgcccaatgttgtattgcaccatccaggtttaagtaattaaatataagaaaaaacgtatgaggaactccgcatttcagcttcctttcttggaaatcacatgtacctgtttctgatcggattaaaccatttgtttgctagagcatgcgggctttaggatagtcgtacagagtatatgttcagtgcagcttcatttttcattgtggactggcatcctgttgtagtggaaagggacaaaatttggaatcagatttcctggtcagctagctctttgcttgcacattatttccctaagcctcagttttctgatctttaaaataggaaatgtttatttcctagatatgcacaatgagaatggtgctgagcaccctagcacagtgcctgccccatagctaatgttcagtaaatattgctctgccttcgtgtccccaccctccccaattgagcagcagtttttactttgatgatatctaacgacaagatttctgagttttagtaggtttggggagctgattgaaagggcagcatcacttgcctaagttttgatgacctctatgcccctcttgtgatataaggaactagagcaagcttgtccaac

SEQ ID NO: 2496 - DNA, 1029 bp, Homo sapiens
tatgggaaagttttagaatctttatccttggtgttttgaaattttacagtgctgtatcgctgtgtacttttttttttttttttttttgagacggagtcttgctctgtggcccagactagattgcagtggcgtgatctcagctcactgcaagctctacctccccggttcacgccattctcccgcttcagcctcccgagtagctgggactacaggcgcctgccaccatgcctggctaattttgtttttgtatttttaatagagacagggtttcaccatgttagccaggatggtcttgatctcctgacctcgtaatctgcccaaagtgctgggattacaggcatgagccactgtgcctggccctctgtgtactttttaaaaggcctttcttgtttgttttggacatctgataggctctttcaatatgggaaattttcttgtattctttctttgatgtttcttccccatcttttttccctccttctcttcctacaacatccactaactagacaattgatctgctggattgatctgccaatttttcctttttcttagttttatctctttgattttttttctgctgtttttattatttcccttgctttttcttctgaattttctttttttcttttttctttctttttgagatggagttttgcacttgttgtctaggctggagtgcagtggtgctatcttggctcactgacacctccaactcctgggtttaaacaattcttgtgcctcagcctcctgagtagctgggattacaggggtgtgccaccatgctggctaatttttgtatttttaatagagatgaagtctcgccacgttggccaggctggtctccgactcctgacatcaggtgatctgctctcctcggcctcccaaagtgctgggattacaggcatgagccactgcacccagccttcttttgaattttctaacaaatgtagcatttatgctaaaatgatgatttttaagaggtttttattctcttggttcatgtttgactcctagttctctgcgaatact

SEQ ID NO: 2497 - DNA, 1254 bp, Homo sapiens
ggcccggttgctagtagaacatgaaagtggtaatgcttgggccctgctttcatctcaagagttgctcatagtccagtggtagagacaacatgtaagccacagcagcaggaagaagagctgtggaaggaggctgtgcaactgccctgggctgagaggccagcttccccaacgaggtgccctagagccaatcacaaaacctgagtaagaagttactgctttgatggagtggtgggatggggagaagaggttccaggcatagaacagtatgtatctggctagagaatttaaaggtttttttttctggacataggtgttttttgttttgttttgtttttttttaactgagctaggttgtttttgttttgttttgtttttatttttttaactatagcctaacataggttttaagttgtacttcccccaactccccacccccagtcactcttttttagtgaaaaagtttggacatgaaagatcctaatatattctttcctttgggtatgaatgattgtcttttactcaaatgattgttcctttgtgaaccttagggacgcaagtctggacaaaccaggctctgtaggaacattcctgagaaaacattagtgacattcatttcttctttccacagtatgatcttagctttgataaatgactgaagctggagaagccgtggttgaagtcagcctacactacagtgcacagttgaggagccagagacttcttaaatcatccttagaaccgtgaccatagcagtatatattttcctcttggaacaaaaaactatttttgctgtatttttaccatataaagtatttaaaaaacatgaattgagtttctgtagatttctagttctcaactttagcctgaacgccaacacttgaaggtgtttttcatcctctgtatgttgaaggtggttatttgtatgtaggaacaggactgccatcccagctttgcatgccaaagaaataaagaacacactttaaagggcaaactgaagagatgagcgagcaaaggtgcccttcaggtctactgaaaagttagagtacaaaacaacactgttgatctggacaaaagaagaaaaattaccctttttgcttgtgttgtgacaacttcatttaatatggtttaaagatttatgagactgtcagctaaaagtcttttcacaagaatgtcaacagagaatggcatctcaaaatatatatatttctttgcacaatttgtgaaaccttataagccattttccccaggtacaat

SEQ ID NO: 2498 - DNA, 1073 bp, Homo sapiens
aagcgattctcctgcctcagcctcccaagtagctgggattacggctagctactcctggctaatttttgtatttttagtagagatggggtttcaccatgttggccaggctggtctcaaactcctgacctcaaacgatctgcctgccttggtctcccaaagtgctgggattataggtgtgagccactgcgcctggccatgtagatgacttttgaccaaaatgtttcaccttctcattcagatattcttagtaaccaaaacagtgactcatgcagttgagagagcctttgggctgtcagtttacagtacatcaggcttgctgaggctaagcaaatcagaaaggtgccatgtttataacagaggtcaaagctccttacttctgaaacattagctgtggttaaaaacaaaaactcttccttcttgtattgcttgtctatcaaagccaggaaagtgggggatcactgtagttaaattttttttttttttaattagagacagagtcttgccctgtcgcccaagctggagtgcactggcgcaatcgtggtacactgcagccttgaactcctggactcaagcagtcctcctgcctcagcttcccaagtagttgggagtaggtgcacaccaccatgcccagcgaattttttgtagagacagaggtcttgctatgttgcctaggctggtatcaaaattactggcctcaagcgattctcctgcctcggcctcccagatgttgggattactggtgtgagccaccacgcccagctcaaaaacaatttttttaggggcacttctacaaatcatgaaagggggataaaagcactgactttaaaaagccatgtttaagatgctataaatgttctccccttttcattgattggagagttgtagaggaccttagagatcattttgtctaactccctcatcccaaagataaactgaggcctagagatcgttcagggtgttgtaactgggaacatctgaatgctgaggcctagagatcgttcagggtgttgtaactgggaacatctgaatgctgaggcctagagatcgttcagggtgttgtaactgggaacatc

SEQ ID NO: 2499 - DNA, 1076 bp, Homo sapiens
aatcctctggggtagctttatataaatttgccaactttctgggacagagtaataggatttacccgtgttagttggtaattttctattttaccaggtacaataatcaacttacggtcatacttgctgattcaaacagcagagaaaaaaaataaacttacagtcattcttcttttatccattacctaccaccttctttgccctccactgccctccattttgaagcaaatcccagaccttgttacatctgtcatattttagtatgtttctctgtaagataagggttcttaaaacacatgcgactagaggagcagtgtcacacaaactggcaattccttagaattaagtatctaggccaggcacagtggctcatgcctgtaatcccagcactttggaaagacaaggtgggaggatcacttgaggccaggaggtcgagacacccctaggcaaaatagtgagaccccatctcttaaaaaaaaattagccgatataggcacctatatagtcctagctacttgggaggctgacgtggagggatggcttgagcccaggagttcaaggttacagagagctatgatcacatctctgtactctagcctgggtaacagagcaagaccctgtctcttgaaaaaagattaaaatttgttgtggaggtttccctctacaaaacttgagtctgttttacaattagagcaatcaggccgggtgcggtggctcatgcctgtaatcccagcactttaggaggccaaggcaggcagatcacttgagggcaggggttcaagaccaccctggccaacatggtgaaacttcatctctactaaaaatacaaaaatggggcacggtggctcacgcctgtaatcccagcactttgggaggccgaggcgggtggatcacagggttaggaattccagaccagcctgaccaacatggtgaaaccccgtctctactaaaaatacaaaaattagccaggcgttatggcgggtgcctgtaatcccagctacttgggaggctgaggcaggagaattgtttgaacctgggaggcagaggttgcagtgagccgagatcgcaccactgcactc

SEQ ID NO: 2500 - DNA, 1045 bp, Homo sapiens
ttaagttttagatttttttggaaaagagaagtcattaaatgatgtaataaaataccagtttttcttttgcttaagtggaagagaattagattgtattttatttattattatttttgagatggagtcttgcactgtcgctcaggctggagtgcaatggcgcgagcttggctcactgcaacctccgccttccaggtccaagcgattctcttgcctcagcctcttgagtagctgagactacaggcgccggccaccacgcccagctcatttttgtatttttaatggagacggggttttgccatgttggtcaggctggtcttgaactcctgacctcaggtgatctgtctgcctcagcctcccaaagtgttgggattacaggcgtgagccactgtgcccggccagattgtattttaaaaaaaaatctgtactcttagatttgttaagactgagaaaatttctatacctggtcctgggaattggcatggaactctaaatgtagatgaataaactgactaaattagctaaatctgctgttaaggtatagctgtatttaaagaaaacaagtagaaaaacttcttccttctctttcctgttaatcagaggaagctgcaaaccatgattttctaagccgtgagctatggaagcaatacctctcacagctacactcaccattagtcggctgccaaatacttatttttcacatttgaactttatttttgaacaaaatagggcatgcaattcctttgaaatgcaaatactcctaaaatttttctaagtttatccatgaatgcacagtggcccttaaaaagacgatcccaggccaggcgcggtggctcacgtctgtaatcccagcactttgggaggccgaggcaggtggatcacgaggtcaggaattcgagactagcctggccaatatggtgaaaccccatctctactaaaaatacaacaattagctgggcgtggtggcgggcgcctgtagtcccagctacttgggaagctgaggcagaagaatcacttgaacccgggaggcagaggttgcactgagccg

SEQ ID NO: 2501 - DNA, 1057 bp, Homo sapiens
gagtgcagtggcgcgatcttggctcactgcaagctccgcctcctgggttcacgccattctcctgcttcagcctcccgagtagctgggactacaggcaaccaccaccacacccggctaattttttgtattattattattatttttagtagagacggggtttcaccgtgttagccaagatggtctcgatctcctgacctcgtgatctgcccacctcagcctcccaaaatgctgggattacaggtgtgagccaccatgctggccttttttttttttttaaatacagacacagtctcattatgttgcccaggctggtctcaaactcttgagctcgagcaatcctcccgtcttggcctcccaaagtgttaggattacaggtgtgagctaccactcctgaccccaagacaatatcttaactgtaaaaattaaactctaccatattttaaaaagctgagatagtataaatgtttataataaaacataaaaccaacatttctcacaagtctttgtaactagtagagactgtagttgttctgtccagatataagtgtggtatatcaacttggcacttagcaacattgatatttaatttgttaaatttttgttaggaagaggtgttttcagatctcaggtgtctttgggaaggaatatttttatatttatatctccagcttcattcctagcttttctttggaacactaaaattgtccagctggacttgttgggcctgggtgggattgggagaattcaggagagcacagttcttgggccagaacagttggtcagctgattgactctaggcaagtcatttaactttcgcagcccctcaggcatgtcatgtttaagtggggataatgacattggcatacctgcttgctagagttaatgtgtgggtcatgagataacgaatataacaaatatttggaaaagtactatgttgaaatattttaaaataaaatttaaatccctcttcatttagaaaggatttgaggcagctaaatgcagaggtgtaagatggttttttggttaggattgtttctgagctgtgactctgtagtca

SEQ ID NO: 2502 - DNA, 1033 bp, Homo sapiens
gactaatggtgtgtgtatataaatacataagtaagtgtatgtatagtcctacatatatgtatgtctatatacattttttgctatttggatgttttcttttgtgaagtgccttttcaaatcttttgcttgttcctcctcttttaagattgtgttgccttttggccgggtgtggtggctcacacctataatctcagcactttgggaggccaaggtgggtgggtcacctgaggtcaggagttcgaaatcagcctggccaacatggtgaaaccctgtctctactaaaaatacgaaaattagccgggcgtggtggcgcatgcctgtaatcccagctacttgggagtctgaggcaggagagttgcttgaacctgggaggtggaggttgcaatgagctgagatcatgccactgcattccagcttgggtgacagagtgggactctgcttaaaaaaaaaaaaaaaaaaaaaagaaagattgtgttgcctttctattattgatgtgtggaattctgtgtatattctggatgtgagtcctttgttggatgtatgtactgcaaatttattttccctctgtgtggtttgcttttgctctcttaatgttgtcttgatgaacagaagttcttaatgaaatccagttcatcagttctctttatggtttgtgctttttgtgttttactttagaagtcatttctcgtcctcaagggcataaatatattcttctgtgttatatcctctggaagtttcaacgttttgcctttcatgtttatgtctacaaccattctgtagtttagttttctgactggtgtgaggtaggggccacagttcattgtttttccatgtgaatgtccagttgacccacaccacagggtaaagaaaatcctttcccccctatcttgcagtggtgttgttataaattagagcactgtatatgtgtgggtatgtttctaaactctctgctcaattgctgtattcacatatctttatgtcttaactggcaaaagtttgtgctgataccatactgacttacttgctgctgtaa

SEQ ID NO: 2503 - DNA, 1027 bp, Homo sapiens
atctttacttccatggagcttatattcttataagcttacacaaacttatattctagtcttgtattgtgtctcctagggaagaccagcaaaaagaaataaataaacaggaaatgcatcaaaaagaaagaaacaggaaatgtatcaggtggtgtgacggtatgatggtatgacgtgctaggcagagaattaaagaaggaccacatgacatagtgcgtgggaagaccctgtctactgaatggccagggagggcctctctcaggggtacccttgaggctgagatctgaatgaactactctcgtgaagatcagggtaaagagcattccaggcagagggaacagataatacaaaggacttagggtaagaacgaactgacttttagaataaacaccctggttagctaaagccaaggcattaaaaggacacaatgaagaaaatgcctctaagggagatagaaccgaagggagatcatagctggttgtggagccaaaggtaaattattctttaagatgtactagatacttattggcagctgctaatagcaaaataaaaaaggtcctgttgttcacaactgaggcacaaaagtacttaggaatgtagggagcagacaccccctccacatttcacttggagccatgcggtctgtgtcaagatggcctgtgtgaagagccaccagttatagttcatgtgggtttccattattctttgggccttcactttgcccaaggcacacagttaatataaccacaagaatgtgaacacttttatttgttctgaaatatgcttttaacctttacagtgggaaaggcccttaatttatctattccttattattttccagcctcatattttctatttcctttctgtgctccctgaaaaacaagatgccatgtctaaaatcctgtgtgcctttgtgcagggcaaagccatgtcctcgtgcacagtcatggggtatggccgagggttatgtaacaagagctgttcctagtgcagttggctcctgcaggagaccatgatgtggcaactacaa

SEQ ID NO: 2504 - DNA, 1059 bp, Homo sapiens
ttccttgacctttgggagtttgattattaaatgccttgatgtagtcttctttgggttaaatatgcttggttttctacaacctttttgtacttgaatattgttatctttctctaggttttggaagttctctgttattatcatcttgaataaactttctacccccatctctttttctaccttctctttaaggccaataactcttagatttgcccttttgaggttattttctagatcttgtaggcatgcttcattcttttttattttgtctcctccgtgtattttcaaatagcttcttctcaagcttacggattcttttttctgcttgatcagttctgctattaagagattctgatgcattcttcagtagatcattgcattttttaactccataatttctgcttatttttaattatttcaatttttgttaaatttatgggataggattctgaatacattttctgtattatcttgaatttctttgagttttctctaaacagatattttgaattccgtctgaaaggtcacatatctctgtctctctgggattggttcctggtaccttatttagttcgtttgctgaggtcctggatagtcttgatgtttgtggatgttcatcagtgtattactctgttttcatgctgctgataaagacatacctaagactgggcaatttacaaaagaaagagttttattggacttaaagttccacatggctggggagggttcacaatcatggcagaaggcaaggagcagcagcaagtcacatcttatgtggatggtggcaggcaaaaaagagcttgtgcagaaaaactcccccttataataaccatcagatctggtgagacttactgtcacaagaacggcatgggaaagacctgcccgcatgattcaattacctcccactggatccctcctacaacatgtgggaattcaagctgagattttggtggggacacagccaaactgttatcattccctccctggcccctcccaaatctgatgttttcacattcccaaaccaatcatgccttcccagcagtcccccaaagtctttttttt

SEQ ID NO: 2505 - DNA, 1077 bp, Homo sapiens
acataactattttaatattattaagttgcttaaagagtcactgaggtacatggttctgggtgggggtctggagagtgcagcagccatggccagccacattgtgctcaacaatggcaccaagatgcccatcctggggctaggcacctggaattcccctccaggccaggtaactgaggctgtgaaggtggccattaatgttgggtactgccacatcgactgtgcccacgtgtaccagaatgagaatgacgtgggggtggccattcgggagaagctcagggagcaggtggtgaagtgtgaggagctcttcatcaccagcaagctgtggtgagcgtaccatgagaagggcctggtgaaaggagcctgccagaagatgctcattgacctgaagctggactacctggacctctaccttattcgctggccaaccagcttcaagcctgggaaggaatttttcccattggatgagccaggtaatggtaatgtggttcccagtaacagtaacattctggacacatgggcgggcatggaagagctggtggatgaagggctggtgaaagctattggcatctccaacttcaaccatctccaggttgagaggatcttaaacaaacctgacttaaagtataagtaggtggttaatcagattgagtgccacccgtacctcactcaggagaagttaatccagtactgccagtccaaaggcatcatggtgactgcctacagctccttcagctcccccgacaggccctgggccaagcctgaggacccttccctcctggaagatcccaggatcaaggcgatcacagccaaacacaataaaactacagcccaggttctgatctggttccccatgcagaggaacttggtggtgatccccaagtctgtgacaccagaatgcattgctgagaactttaaggtcttcaactttgaactgaacagccaggatatgaccaccttattcagttacaacagaactggagggtctgtgccttggtgagctgtgcctcccacaaggattaccccttccatgaagagttttgaagctgtggatgcctgcttgtccccaagtgacctata

SEQ ID NO: 2506 - DNA, 1071 bp, Homo sapiens
gcaaaggaaatggataagaagggttgaatttgaaacactttgtaatacaagaataagcaagacatgaattgatattagaccagtcgctgctccaatgtatgtgatgttctggaccataccccacttcctgtcgtattttccacattagcatagctaagttctgcaactcactcaccactgcattagcctcacttatagccctttctttggaaataatttcactgacagcatagttctttgagaacttagcggacaacttttaaaaaggatatttttgcacatcattattgctgacactattattattcatgttttaaaagctattttattataaatctcagcttgagttttgttcaattctgctctttaaaagaaagttacaatacacagaacaaaggcattagaaaaaagaaattttcaagtttctattgcatagagaagtatacagtccccataaacattccaggtctaatttgtccttgaacatccttagaataacggtagacttaaagacaatattatgcctggcagtatttaggacagcaaggcacttcttgattttggacaaacaggatttaagttttgtttgggggctagaaaaataaataaccagttctatcacaaaccctttatgccggagtagacaatatttcactaaaagacagagaaaaagtgctgatgtaaatccttcctttttgggaagctgattctttttgtcatggaagaaagactggtaaaaatattcacatttgcagtcatcaggatggcaaaacttgaatttgatgcagaaatgcatttatcatttgatatattttttctggctgcatgattcagcattttgatttgcattgaccattttggaaaaatgaagcatttcttggttgtgaaataatttgtaatttgtttctttggaatattccagtttgtggcctagttgactatgtagtgttttccccagacttagtgtaagataagaaaatgagaatctcagcaatgcctaatgggttggcccagcattaagtctatgaggataggaccaagggacatctttaggaatgggaacgacacagc

SEQ ID NO: 2507 - DNA, 1030 bp, Homo sapiens
ctctgctacaaatagtgaggtcatttgcatgagtaaccaactcagatctgcagggttggaagtggttgctgtttgggatcattcatagccagagtgtctgcatcttaacagggttagctgagggttgcctgcatttcttaatgacacttggaatctgcttaactcccacaaactggtcactgaaaactctaaatgcacagctagatcctgaactggtttctgaatacaaatccagggcataatgatcagactcgcaaatatttttaatttggcatagaaagagaagcaaacagggacattcttgcatatgctaaaataaagcccaaacaaaaaactaaaaaatatatctaaagattaggctgatagactgtaatggggccaccaccatttctgtgtgcacagtgtcctgggcattaaaagacttgagaatcttggttaagatgatccctgctctagggcatggggattgaagactaatcttgaggtctcatgggatcgacataaactgcctgtaggataacgtccaaaccgctcaatttggggttggaagcctattacaacatagcattgacctacctctccagccggtctcccacaactccccatctcacagccccaaccccacaggtagactttattgcaccgtagatatgtctatttattctttctacaagcagagccttcttgcctcttggatctaagttttccatgtgctgtcactgacgagcctgggtctcatcatcagcaactctgctcactccaacctaccacaggctcctacaacctggcaaacttgtgtgggttgtttgttcttctccaggtacaaacctgtgttcttacacacttctgtgtgcctgtgcctggactttctaagtgaagcaggggtggatggagaacagggctcttggtgtccaatatatgtgttcacgggacttaggaggacatggtggacacgtgttgagcgcatgactgatggtggctctcagactgaccatgaaagcagaaaaaagtcacctctttggtagcctca

SEQ ID NO: 2508 - DNA, 1032 bp, Homo sapiens
attcaaattttaaacttaaattttattcaaattttgtagctcccacatataagtgagaacatgatatttatctttttgtgcctggcttatttcacttaagataataacttccagttccatctatgttactgcaaatgatgtgatttcattcttttttatggctgaataatatttcattttgtatatatgtaccacattttttatccattcatccatcgatgggcacttaggttaattctgtatctttgcttttgtgaatactgctgcaataaatgtgtgagtgcaggtattccttttatatattgatttcttttactttggttagatactcagtagtgaattgctgaattgaatggtaattgtatttttagttttttgagaaatctccctactgctttccatagtggctgtgctagtttacatacccactaacagtgtataagagttcccttttctccacatccttaccaacatctgttattttttgactttgactttttattaatagccattctgactggggtaggatggtatctcattctggtttttgatttgcatttttctggtggtggtgagcatttttttcaaatacctattggctggttacatgtcttcttttaagaaatgtctatgcttgtcctttgcatactttttaatgggattgtttgtgcttttcctgttgagttgtttcagttccttgtatattatggatcttggttccctgtcaaatgaatagtttgcaatttttttctcctattgaacaggctgttttttcactctgttgattatttgttttgctgtgcagaaactttctagtttaagtccgatttgtctatttttatttttattgcctgtgcttttgaggtcttagtcacaaattatttgcctagcctaatgtccaggagagttttccctagttttggatcttatgtttaagtctttaatccattttgagatgatttttgtatatggtgagagatagtggtccagtttcattcttctgcatgtggctgtccagttttccaggcatca

SEQ ID NO: 2509 - DNA, 1040 bp, Homo sapiens
gatagatgcagaaattctcaacaaaattctagcaaaatgaattcaacaacacattaaaaaaattattctccatgatcaattgagattcttcccagggatgtaaagatggttcaacatacacaaatcagtgaatgtgatacatcacattaactgaaccaggaacaaaaatcatatgattatttgattagttatcaaaaagcattttataaaattaaacatccttttatgataaacatcctcatcaaaatgagtatagaaggaacataccacaaaataataaaggccatatatgacagacctacagccgacatcagggaaaaattgaaggcttttccactaagaagtagaacaagacaaatatacccactttgccacttttatttgacatacttctggaagtcttggccagagcaactaagcaagagaaagaaaggtcatcccaattggaaaggaagaaatcagattaaccttgtttgcaaatgtcatgatcttatatctagaaaaatataagggcgctaccaaaaaaactgatagaactgataaatgaattcagtaaagttgcaagttacaaaatcaacatacgaaaatcagtagcatttatatacaccaaaagcaaacaatctgaaaaagaaatcaagaaaggaatctcatttacagtagctacataaatataaaatacctagaaatcaatctaatcaaagaaatgaaagttctatacaagaaaactatgaaaatttgatgaaagtaattgaagaggacacaatgaaatatatattccatgctcatggatcagaagaattaatattattaaaatgacaatactacccaaagcaatttacatattcagtgcagtccctagctaaataccaatgacatcctgcacagaaatagaaaaaacacttctaaaatttgtatggaaccacaaaagattctgaatagccaaagccctcctgagcaaaaagaacaaagctagagacatcacactaccagactttaaaatgtactcccaaactatagtaaccaaaacagtatgatactgg

SEQ ID NO: 2510 - DNA, 1045 bp, Homo sapiens
aacaactgagaaatcctaggaaagcaaaaggtatcatttgtaacagtatcaaaaaataggtacattagatacatagaaatactttttttttttgaaacagagtctcactctgtcgcccagactggaatgcagtggcacgatcttggctcactgcaacctccgcctcccaggttcaagcgattctccaacctcagccccccgagtagctggggttacaggtgcccactaccacacctggctaattttttttgtatttttagtagagatggggtttcaccattttggccaggctggtcttgaacacctgacctcgtgatccacccgcctcggcctcccaaataaatacgattttttaaaatgatgtaattatgacctttatgagaaaattataaagtttaattgagaattcaacaaaatttatatagaagagcaaagggccaagaatatgtaaaacactccttaaaaagaaaatctgataatcttgacctacaactataaaaaacttattataaagctatcataactaagaagtgtgctgtagaaacaaggatacacaaataaagaataaagaacccaagaacagacaattatattcattttaagtgaacatagacttggcgttataggttagtgaggattgagtgggcatgttcaataatggtgctgtgacaattgtatatccttattgggtgggggcaggggaagaaatggagtctgtctcttacactataccaaaaagtcaaggatttaaagacttatgtattaattaaaagacttgtaaaaggtaaaactttatgttaggaaaacatataagctcattttgttattaccttggactaaggaaagatttcttaagaagccataaacaatacaaaccataaaggaaaaggtagataaattatattaaaattagtaacttctgtttataaagacatcaagaaagtgaaaagataattccaaatcagagatacaaagtgacattttgattgctgctcaaaatgtgtaaataactactacacattgttaagaaaatggcaaaaaattc

SEQ ID NO: 2511 - DNA, 1140 bp, Homo sapiens
aggtttgtgtaagtgcactcttagatgtttgtgtgacagaattgcctaatgatgcatttttcagaatgtatccctgtcattaagcaatacatgactgtatttcttcctattttacctattaaatccataccacaaacaatatttaggtacacctttagttgtcttcatcctctgcctgaagatgggtatatttgatttctggaaggggcctgagcttccagaattctggccttcattgggccagaatgttttaatctgtggagtgcctagaccttacagatagctgtgtttgcaggctggacaaagcttcccctccaacagagtgaaaagtagaagtactctgagccttttgctatttttcttaggaaagaggaaagaaatataaggctagatagggatacaagtgttgggtaaagcaaggatttggccacgttaaggaattttgtcattatactttgaagataagagccgtggaaaggttctaagcaaggagttaatatgaggatttctgttttgtaaagatcactctggctgtatattgaagaacagattggaagagaacaagaatcgatatagggggaccatttatgaggctgtagatattctgaaggtagaattatcagttacggtgatgggttggtgagagagaaggaggtgtcaaagatgatacctacactttgggcttgcttaaaataatgaatagtggtcccattcactaagacaagaagtcctaaaaaaaggtcaggagtttagaggaaggatcatgagttcaattttggacatgttgaatttggggtacctttgacacatgccagtgatgtctaggaggcagttgaatatatgtgtcaggagctcagagaagttagggctgaggtgttgtatttgggaataatcatgtgtgtggatgtttaagccatagtcatggatgagattgaccagtgagaatgtataaagtgagactaaaacagggccaaggaacagtagcaattacgagccaggaaaaggacagctgcaaaggacatgggattggtcagagttaagctgaataggatgacaagaaagacagagtgtgaggtgtcacaggactcacccaaaggaaacaactgtatccaaaaggaggagtggtctaaagtatcaaat

SEQ ID NO: 2512 - DNA, 1273 bp, Homo sapiens
caagttaactggacagacaataggatttttggtttgtgttcaggatccatttgtggttaattaaaatgaattttgggggttaccaatccacgtagggcctctttcaaatagcactaggatgtgcagatgtaggcacaaagaacacatagagttggttttatccaggggcagcgttttgccatacaggtgaggccaacagaaagtgggagtttcggatattggcaagagtgctgtggaaagacataatctaagctggataaagagaaaggtgaaataaaatagagggatgatggattgtaagaaaggaatggggcaatggactggagttcctgatgagcttaaaaaatggtcatgttgggagaattaaacaagctgagaggatggagggcaagtgatgacaagcactattatgtaattgtgaatgtggttgattgatgtagacttagtgatgggaggacatctagaaaatgggggaggagagcacagctttagacagggtcttaattcatgaacactgaagtcatccatgtgatggcagatttagtatggagaaagttggctctcccgtgagccagagttccagattgagtgaccaggcaattggtacttatcaatgaagagtggaagaatatagtggaatcaaaaagcatgagcttctaaggaataggattttttttatttattaaagaaagagggcaagttgttatgatttggaagtggtgaatggagagtaaggagtgttaaaacaagctcactttccaatcttgaggtaaatggagtgtgggaatataaacagcctctaaccagagggttgcatgtcagtagtgccatagggaataactaggtttcaactaaggtagagaggtcagagaaattcttggaatagagcttaaagatagaagaaagttttcacaactacctcaccaatctttccactaatgcccacatttttttcattgtgatctcctgaacagtcctcttgttttcttatctttctctcatccccagccaccctcctcctcattaccccacaattgaaagccttaccatcattcaacatttgatctttggaacaggagaggtctgtggtctcctgattatacaagtgggaaattatctctcttctgaattaggactattggttgaaataaaacttactgtttatttcatttgtatccctttgttttgtttgtaattatcgtgtcttttgccttactaaattgtagcacaatgccttgcactacagaaatatttgttcaatgaatgagaacaa

SEQ ID NO: 2513 - DNA, 1280 bp, Homo sapiens
aaatagaccttttgttacttttctgtatttatctctaaatattttctctgctcagttatcaaattacagttaataaacagggtcctcttctgtatttatttcatgtgaggattcacactttaaagatttagtataatattcaaaaaccacagttacttttgtatcaacctaataataaagttacctaacatttaccttagtaagcacttactgtgtgctttaaatgtattaactaatttaattcttgtaacaacctatgaggttcttactgtgacaattctcatttcaaaggtgaggaaagcaaggcagataggtaacttacaaagtaaatcatgtgactatgagtgttaaagcttgtatatgagcttggaacccaggcagtgggattcagcctgtgctcttaactaccatgctatactgccttatataatcattaactgtattgctgggtatgtggaattactatggtattatttacagctcacactagttattcagttaataatggttttattttcagattaccttagagaaagtataattcaacaacatatggtttctccagagccagcttcccttaaggagaaagggaagtcaaggagaaaaaaggatcaaactcatgcttgtccaaatgttaggaaagccaggcctgtgtcctatgatagaacaggtatgtggtatcactgaaccaattgcttagaaatcactatactttttcagattattctgtggtttgtgtgcttatattggacactgactttagaaaaaacagtcttactgaattttatgtgtttggttgcttaaggattattacaatgcttttaaaattctttttgaaaatctaaaatattatgttgaaaaattgacagagactgtttaatgactgttcttaactaagaacaatatctgaaggctatgattttagaactataatataaactgtatggttttttacatacaactgtagtaaaacttgatgatttcattttatttaacaattttatgcctttgcctgatagagtttaaatccccaaataaatagtttatttaaatagattttcttccactaacatcttctagtttgtgttttctctataactgaaattcttcttagtattaatattttaattttataaaagaaaggaaacttttctattttcactgaaacaccatggtacagaggtggatttatcataaagctattgaagcctaagcttcagggcctctcactcacacaggcttcatcccttcatcctttctttaaataaatatcctcaaaa

SEQ ID NO: 2514 - DNA, 1320 bp, Homo sapiens
taaatacaccctacagttgactctggaacaacgcaagggttaggggctctgaccccctacacagttgaaaatttgagtataacttttgactctacccaaactttgctattaatactaatagtctattgttgacaagaagctttatcagtaacataaacaatcaattaacatgttttgtctggtagatatatactgtattcttacaataaagtaagttagaggaaagaaaaaggaaaatcataagggagagaaaataaatttactactcattaaatggaagtagatcataataaaattccttcatcctcatcattttcacattgagtaggctgaggaggtggaggaaaagtagaggttggtttttgttgcaggaagtcagggaccccgaacggagggaccggccgaagccatggcagaagaacgtggattgtgaagatttcatgaacatttattagttccccaaattaatacttttataatttcttacacctgtctttactgcagtctccgaacataaattgtgaagatttcatggatacttatcacaataaatacccttgtgatttcctatgcctgtctttactttaatctcttaatcccgtcatcttcgtaagctgaggaggatgtatgtcacctcaggaccctgtgttgattgcgttaactgcacagattgtgtgtagagcatgtgtgtttgaacaatatgaaatctgggcaccttgaaagaagaacaggataacagcaatgttcagggaacaagagagataaccttaaattctgaccactgatgagctggaacagagccatatttctctttcaaaagcaaatgggagaaatatctctgaattctttttctcagcaaggaacatccctgagaaagagaatgcgtccctgagggtaggcctctgaaatggccgcttcggggggcggctgtattttatggtcaaagctgtagggatgaaataagccccagtcccgtaacgctcccaggcttattaggacgaggaaattcccgcctaataaattttggtgagaccggttgtctgctctcaaaccctgtcttctgataagatgttatcagtgacaatgcgtgcccgaaacttcattggcaattttaatttcgccccggtcctgtggtcctgtgatgttgccctgcctccatttgccttgtgatatcttattaccttgtgaagcatgtgatctctgtgacccacaccctattcgtacactccctccccttttgaaaatcactaataaaaacttgctggttttaccgctcgggggcatgatggaacctgccgacatgtgatgtctgccccggac

SEQ ID NO: 2515 - DNA, 1541 bp, Homo sapiens
gagataatagaaaacatgcaaataggtaaaatattgagtggagactaaatgtagttgaaggaaaataaaacagagtaagggagctggggcagcttgttgattcaagttcatgattaaaaatttatctagttttaaggtacattatgttacattacattatatcacatcacattaggattctcaagactctgattcttcacaaagtagttccagattgttgttcttttagtgtgtatctagttctataattttcttgtttcttctctaatgtctgcattttcttgtgatatgtttttgtccattggggactaggaaaacagaaaaataatattttaaattgtttatttaatatgtaaatagcttaaataactaaggacctgagaaactttttttttgtaagagaagaaggattttgtgacagagaaattaattattgaataaatgttatcatgtccctattttgtttcactggtgtaagaactggagatagaactgtgaaaaaatatacaggtttctgttcctatagaacttagattctaatggagggagatagataataataggtaaataaataatttcagatagtgatgaggcctagaaatataataaaacagagaactagagacgtctgtgtgcattgcttctttagataggttggtcagagatgtggcagtgaagcagagacctaaatgatgaaaaagagacagccatgtggggcttccagaaggagaatatagcaagtttcaaagttgtgaagcaggaacaagtttagtatggatttgatggtagaagtggtgttcctggaatgaagttggtaggaaatgaagctggttctgttattttctgggacctgtcacatgtagtgtagatgactgagtaacagttctgagaagtttctcgtcaaagataggtgatagttgcatccctgtaatttaggaactagaattggggctagataggtttttgattctggattatcaatttaagatattatccaaagtactattttctgtatctttttatttgaaactctgtcagtgtcagactttccactgttgtccttgccttctgataaatcctcagggtctgctctgctgtaaataattatcatttattaaactttttaagttcaactgcagatgggacaagaatcatctttttacatgacatttggcatcaatgtctatagtcaaaatgattcattttctttattcaagttaaaaatacaaattaaattttatatttacttaatttgtacttaattttatatttactgaagttgtacaattaatatagacttacttaatttttaaattttatgatttatttatttattattttttttgagacagagtcctgctctgtcacccaggctggggtgcagtggtgcgatctcggctcactgcaagctctgcctcctgggttcaggccattctcctgcctcagcctcccaagtagctgggactacagatgcctaccaccgcacctggctaatttttttttttttgagatggagtcttgctctgtcacccaggccggag

SEQ ID NO: 2516 - DNA, 1853 bp, Homo sapiens
tgcataagtaatctcacattggcaaacaagtatcacatctcagtgtttatttaaaggtggttgttttcctctagatgcaaaggctaccaagggagtgattgtgatattgcattagactagtcccacacgtgcataatataggtggccatattcatttagagttgagagagctttgcagaaacagttggcctgtctttttcaaaatgcatgacaattattgatgatgagtaataaccagggaaactttccaattctttctcatgtaggttctttgagttttaaaaattacaagtgcattttttacataagtattatataatatcaaaatgacatacattgccttaattttttacttaccactatacagactttttatcaatgtaccttttcattatcactgaaaattgaatcttgattttattgaaatatgaagtctcttttcgaagtaagccaataaacatataaaggaaaacggtattttaaaaataatttttaatatttattggaatgttgcagctaagtgaatcctgtatctatgagaattataaggactttcatttacatttaccttttgctctatattctgttgatagtttgggagaaaatttatatggcttagcatttcctttaggtaactcaggatgaatgaaatatgttctagagaatattctggtattactaagcttttactaaatttattccatataaatacgtggtttatggatatggaatataagaagcatttttcctttcagaatgaataaagcatttgttacctggaaattgaatgttaaaagaattaagacagagaagagcaggtaagttttgatacgcaatatataaaaatttcaaaaggaagctgtatgttttacatgtactatggaagcagatataatttcattttcattcagtgattagaaagtcacattccattgctttacgattaaacttaacccatttttatttttaaaagactattaaacactgtgttttgcagtgtaccattctatggtcatagaactatggaaaaccttgatgagttcccttggtcactttatctaacttcttgcttccaggaagaagaataattaagtcatttaaagtagacaacagtaatcttattttgttaggatctccatcagccaaatgttttttaaaattgtttttattaaactttttattttgagataatcgtggattgagatgcagttataagaaataatagagatatcccatgtaccttttacccagtttccctcccaaatgttgcaaaactacagtctatgatgacagccagggcattgacaatgatatataatcaagatatagaacactgctatcaccacagtttcccttgtgttggccttttatagctatatccaccttcctcttattcctactctctccttgacctttggcaaccactaatctgtttgccatttctgtaattttatcttttcaagaatgttcttttcaaagggaatgcttccagtttttgcccattcagtatgatattggctgtgggtttgtcatagatagctcttattattttgagatacgtcctatcaatacctaatttattgagagtttttagcatgaagcgttgttgaattttgtcaaaggccttttctgcatctattgagataatcatgtggtttttgtctttggttctgtttatatgctggattacatttattgatttgtgtatattgaaccagccttgcatcccagggatgaagcccgcttgatcatggtggataagctttttgatgtgctgctggattcggtttgccagtattttattgaggatttttgcatcaatgttcatcaaggatattggtctgaaattctct

SEQ ID NO: 2517 - DNA, 1160 bp, Homo sapiens
cagccaaaaaacacatgaaaaaatgctcaccatcactggccatcagagaaatgcaaatcaaaaccacaatgagataccatctcataccagttagaatggcaatcattaaaaagtcaggaaacaacaggtgctagagaggatgtggagaaataggaacacttttacactgttggtgggactgtaaactagttcaaccattgtggaagtcagtgtggcgattcctcagggatctggaactagaaataccatttgacccagccatcccattactgggtatatacccaaaggactataaatcatgctgctataaagacacatgcacacgtatgtttattgcagcactattcacaatagcaaagacttggaaccaacccaaatgtccaacaatgatagactggattaagaaaatgtggcacatatacaccatggaatactatgcagccataaaaaaggatgagttcatgtcctttgtaaggacatggatgaagctggaaatcatcattctcagtagactatcgcaagaacagaaaccaaacaccgcatgttctcactcataggtgggaattgaacaatgagaacacatggacacaggaaggggaacatcacactctggggactgttgtggggtggggggagggtgaagggatagctttaggagatatacctaatgctaaatgacaagttaatgggtgcagcacaccggcatggcacacgtatacatatgtaactaacgtgcacattgtgcacatgtaccctaaaacttaaagtataataataataataaaaaagaatgttcttatgataaataacaataaatcaagaggagggaaggaaacttttggaggtgacagtttatggcatagattgttcacagatgtatacttatctccacatgcaccaagttgtatacattaaataggtacagctttttgcgtgtcaatcatacttcaattaaatggttttcaaaaaaagaatgctgtatctgcgcagcaaaggaaataatccacagggtgaagagacagcctgcagaatgggagaaaatatttgccaactgttcattctataagggattaatatgcagaatataaaggggactcaaacaacagtaaaaaataaataatctgatttaaaaatgggcaaaggattggaatagacatttc

SEQ ID NO: 2518 - DNA, 1032 bp, Homo sapiens
gtgttaaccaggtagtacactatggccttgggtgagactcaaacatgctggcttcaggtgagacccagcacattcacagctgtggtggctatagtgagactccttctgcttaagaaaagcagagggaaaagtaaaggggattttgtcttgcaccttaggtactatcttggccacagtgggatggaataccaagtagactcttggtgtccccgattccaagccttggttcttggatggcatttctggacctgcactgggacagaggagagcacactgccctgaagggtgagtcccaaacctggcaacgttcaccacaagctgactgaaaagcccttggtgaacatcagtggtagcctggaaggtactccctatgggcctgtggtggtggtggccacggggatttcctctgcctgtggagagaggaaggaagaatgggaaggactttgtcttgtggtttgagagccagctcagttgcggtagtatagagtgtcacatcaatttctaaggttttggactccaatccgtggctcccagacagcatctctggacctatccagggcctgggggatctcactgccattaagggaaggatgcaagcctggcaggctttgccacctgctgattgtggagccctaggttcttgagtgaacataggcagtagccaggtagtggttacaaggctttggtgagactcaggcctgttggcttcaggtttaaccagaaggacacaagcctggctggctttgccaactactgattgaagagtcttaggtccttgagtgaacatacatccgacccagtgcaatcacagtggtggtggccacagtggggcttgtgtcaccccacccccagctccatgtggggggctatgggagggatagcattaggagaaatacctcatgtagatgacaggttgatgggtgcagcaaaccaccatggcacgtgtatacctatgtaacaaacctgcacgttctgcacatgtatcccagaacttaaagtataattaaaaaataaaataaatagctgtattgg

SEQ ID NO: 2519 - DNA, 2448 bp, Homo sapiens
acatcccatgctcatggatgagtagaatcaatattgtgaaaatgaccatactgccaaaagcaatctacaaattcaacccaatccccaccaaaataccatcataattcttcacagagttaggaaaaacaattctaaaattcatatggaaccaaaaaagagtctgcatagccaaagcaagactaagcaaaaagaacaaatctggaggcatcacactgcctgatttcaaactatatcacaaggccatagtctccaaaacagcatggtactggtataaaaataggcacatagaccaatgaaacagaagagagaacccagaaataaacctgaatacttacagtcaactgatctttgacaaagcaaacaaaaacataaagtgggaaaggactccctttttaacaaatggtgctgggataattggctagccacatgtaggagaatgaaactggatcctcatctctcaccttatacaaaaatcaactgaagatggattaaggacttaaacctaatacctgaaactataaaaattccagaagataacattggaaaaacctttctagacactggcttaggcaaggatttcatgaccaaaaacgcaaaaacaattgcaataaaaacaaagataaataggggggacttaattaaactaaagagctcttgcactgcaaaaggaatagtcagcagagtaaacagacaatccacagagtgggagaaaatctttacaatctatacatctgagaaaggactaatatccagaatctacaatgaactcaaacaaatcagtaagaaaaaacaatcccatcaaaagtgggctgacaaaggactaatatccagaatctacaatgaattccaacaaatcagtaagagaaaaaacaatcccataaaaaagtgggctaaggacataaatagaaaattctcaaaataagatatacaaatggctaacaaacacatgaaaaaatgctcaacatcactaatgatcagggaaatgcaaatcaaaaccacaatgcgataccttactcctgtaagaatgcccacaatcaaaaaatcaaaaaataatagatgttggcatggatgcagcaatcagggaacacttcgacactgctggtgggaatgtaaactagtacggctgctatggaaaacagcgtggagattccttaaagaactaaaagtagaactaccaatttgatccagcaatcccactactgggtatctacctagaggaaaagaagttattattcgaaaaagatacttgcacatgcatgtttatagcagcacaattcacaatagcaaaatcgtggaaccaacccaaatgcccatcaaacaataggcatgtaaagaaaccctggtatatatatgatggaatactactcagccataaaaaggaatgaattaacagcatttgcaatgacctggatgagattagagactattattctaagtgaagtaactcaggaatggaaaactaaacatggtatgttctcactgatatatgggagctaagctatgaggacacaaaagcataagaatgatacaatggactttggggacttgtgggggaagagctgggtgggggtgaggggtaaaagacaacaaatatggtgcagtgtatactgctcaggcaatgggtgcaccaggttctcacagatctccactaaagaatttactcgtaaccagataccacctgtaccccaataacttatcaaaacatagaattaagaaaaatagctgtattgaggaagctcaaagaaattcaagataacacagagaaggaattaagcaaccagataaatttaacaacaaattgaaataatcaaaaagaagcagaaattctggagatgaaaaatgcagttgatctactgaagaatgcatgagtctcttaatagcagaattaatcaagcagaagaaagaattggtgagcttgaagacaggctatttgaaaatacacagagaagattaaaaaagaataaaaaaaaatgaagcatgcctacaagatctagaaaatagcctcaaaagggtgaatctaagagttattggccttaaaaaagaagttaaaaaagagctggggtagaaagtttattcaaaggaataataacagagaacttcccaaacctagggaaagatatcaatattcaagtacaagaaggttatagaacaccaaggagatataacccaaagcacacctgaaaataccagtaacaagtaagaagatcaaagctgtaataaaaaaaagtctctcagcaaagaaaaccttaggacctgatggcttcttctgaattttgcaaacatttaaggaagaactatagcaatcctactcaaactattctgacaaatagagtatttgggaatatttccagactcattgtatgaggacagtattaccctgataccaaaaccagacaaaggcttattaaaaaaaaaaaaaaaaaaaagaaaactacaggccaatatccc

SEQ ID NO: 2520 - DNA, 1049 bp, Homo sapiens
attaaaaagtttattcatcatgaccaaatggaatctatcccggggatgcaaggatagttcaacatatcaacatttgtatttgcaacatttgcatattgattgatatgcaaagcaatcaatgtgaaacattatatcaacagaatgaaggacaaaaaccatatgatcatttcaatggatgctgaaaaaggatttgataaaatccaacatcctttcatgacaaaaattcctaaaaactggctataaaatggaacatacctcaacataataaaagccatgtatgacagattcacagctagcattgttgtactgaatgtggaaaagttggaagtctttcctctaagatatggaatacaacaaagatgcccattttcaccactgctattcaaactagtactggaagtcctagctggagtactcagacaagagaaagaaataaaggccatccaaattggaaagtaaaatatcaaatgatccttgtttgcagatgatatgatcttgtatttggaaaaacctaaggactccactaaaaatctatttgaattaataaacaaattcagtaatgttacaggatacaaaatgaacatacaaaaatcagtagtatttctatatgccaacagcaaataatctgaaaaagaaatccagaaagtagtcccatttacaatagctacaagtatatgtggagagagaggagagagagaaagagacagagacagagacagagacagagacagagacagacctgagacctgtagttggtaaactagagtcccaggagatgtgatggtatagtatagttccccttctagtctgagtccaaaggcctaaaaaccaagagagagagtgatttaagttccagtccaagttcaaatccaacaacaggagaaagccagtgtctcagcttgaggatgggaagagagagacagaattatctcttactctgcatttttgttttattcaggccacaatggattggatgaggcctgtctcagttcattttgtattgctatagcaaatactacggactggatcatttatggagaaaaagaagc

(The sequence listing continues in the following parts.)
